United States Patent Application Publication US 2025/0018062 A1 - sequence listing, part 3

SEQ ID NO: 3531 - DNA, 8442 bp, synthetic construct
  misc_feature 1..8442: note = source = /note="Description of Artificial Sequence: Synthetic coding sequence"
  source 1..8442: mol_type = other DNA
atgatcccagccaggtttgctggggtgctgctggccctggccctgatcctgcccggcaccctgtgtgccgagggcacccggggccgcagcagcacagcccgctgcagcctgtttggaagtgactttgtgaacacctttgatggctccatgtacagctttgctggctactgcagctacctgctggccggcggctgccagaagaggagcttcagcatcattggagacttccagaatggcaagagggtgtccctgtctgtgtacctgggggagttctttgacatccacctgtttgtgaatggaacagtgacccagggcgaccagagggtgtccatgccctatgccagcaagggcctgtacctggagacagaggccggctactacaagctgagcggggaggcctacggctttgtggccagaattgatggcagcggcaacttccaggtgctgctgagtgaccgctacttcaacaagacctgtggcctgtgtggcaacttcaacatctttgctgaagatgacttcatgacccaggagggcaccctgaccagtgacccctatgactttgccaacagctgggccctgagcagtggagagcagtggtgtgagcgggccagcccccccagcagcagctgcaacatcagcagcggggagatgcagaagggcctgtgggagcagtgccagctgctgaagagcacctctgtgtttgcccgctgccaccccctggtggaccctgagccctttgtggccctgtgtgagaagaccctgtgtgaatgtgccggcggcctggagtgtgcctgcccagccctgctggagtatgcccggacctgtgcccaggagggcatggtgctgtatggctggacagaccacagcgcctgcagccctgtgtgcccagctggcatggagtaccggcagtgtgtgagcccctgtgcccggacctgccagagcctgcacatcaatgagatgtgccaggagcgctgtgtggatggctgcagctgcccagagggccagctgctggatgagggcctgtgtgtggagagcacagaatgtccctgtgtgcacagcggcaagcgctacccacctggcaccagcctgagccgggactgcaacacctgcatctgcaggaacagccagtggatctgcagcaatgaagaatgtcctggagaatgtctggtgacaggccagagccacttcaagagctttgacaaccgctacttcaccttcagcggcatctgccagtacctgctggcccgggactgccaggaccacagcttcagcatcgtgattgaaacagtgcagtgtgctgatgacagagatgctgtgtgcaccaggtctgtgacagtgcggctgcccggcctgcacaacagcctggtgaagctgaagcacggggccggcgtggccatggatggccaggatgtgcagctgcccctgctgaagggggacctgcgcatccagcacacagtgacagcctctgtgcggctgtcctatggagaggacctgcagatggactgggatggccggggccgcctgctggtgaagctgagccctgtgtatgccggcaagacctgtggcctgtgtggcaactacaacggcaaccagggagatgacttcctgaccccatctggcctggccgagccccgggtggaggactttggaaatgcctggaagctgcacggggactgccaggacctgcagaagcagcacagcgacccctgtgccctgaaccccaggatgacccgcttcagcgaggaggcctgtgctgtgctgaccagccccacctttgaggcctgccacagagctgtgagccccctgccctacctgaggaactgccgctatgatgtgtgcagctgcagtgatggccgggagtgcctgtgtggggccctggccagctatgctgctgcctgtgccggccggggcgtgcgggtggcctggagggagcccggccgctgtgagctgaactgccccaagggccaggtgtacctgcagtgtggcaccccctgcaacctgacctgccgcagcctgagctacccagatgaggagtgcaatgaggcctgcctggagggctgcttctgccccccaggcctgtacatggatgagcggggggactgtgtgcccaaggcccagtgcccctgctactatgatggagagatcttccagcctgaggacatcttcagtgaccaccacaccatgtgctactgtgaagatggcttcatgcactgcaccatgtctggagtgcccggcagcctgctgcctgatgctgtgctgagcagccccctgagccacaggagcaagaggagcctgagctgcaggcctcccatggtgaagctggtgtgcccagctgacaacctgcgggcagagggcctggagtgcaccaagacctgccagaactatgacctggagtgcatgtccatgggctgtgtgtctggctgcctgtgccccccaggcatggtgagacatgagaacagatgtgtggccctggagcgctgcccctgcttccaccagggcaaggagtatgcccctggagaaacagtgaagattggctgcaacacctgtgtgtgccaggacaggaagtggaactgcacagaccacgtgtgtgatgccacctgcagcaccatcggcatggcccactacctgacctttgatggcctgaagtacctgtttcctggagagtgccagtatgtgctggtgcaggactactgcggcagcaaccctggcaccttccgcatcctggtgggcaacaagggctgcagccaccccagcgtgaagtgcaagaagagggtgaccatcctggtggagggcggggagattgagctgtttgatggagaggtgaatgtgaagaggcccatgaaggatgagacccactttgaggtggtggagagcggccgctacatcatcctgctgctgggcaaggccctgtctgtggtgtgggacagacacctgagcatctctgtggtgctgaagcagacctaccaggagaaggtgtgtggcctgtgtggcaactttgatggcatccagaacaatgacctgaccagcagcaacctgcaggtggaggaggaccctgtggactttggaaacagctggaaggtgagcagccagtgtgccgacaccaggaaggtgcccctggacagcagccctgccacctgccacaacaacatcatgaagcagaccatggtggacagcagctgccgcatcctgaccagtgatgtgttccaggactgcaacaagctggtggaccctgagccctacctggatgtgtgcatctatgacacctgcagctgtgagagcatcggggactgtgcctgcttctgtgacaccatcgccgcctatgcccacgtgtgtgcccagcacggcaaggtggtgacctggaggacagccaccctgtgcccccagagctgtgaggagaggaacctgagagaaaatggctatgaatgtgagtggagatacaacagctgtgccccagcctgccaggtgacctgccagcaccctgagcccctggcctgccctgtgcagtgtgtggagggctgccacgcccactgccccccaggcaagatcctggatgagctgctgcagacctgtgtggaccctgaggactgccctgtgtgtgaggtggccggccgccgctttgccagcggcaagaaggtgaccctgaaccccagcgaccctgagcactgccagatctgccactgtgatgtggtgaacctgacctgtgaggcctgccaggagcccggcggcctggtggtgcccccaacagatgcccctgtgagccccaccaccctgtatgtggaggacatcagcgagccccccctgcatgacttctactgcagccggctgctggacctggtgttcctgctggatggcagcagccggctgtctgaggccgagtttgaggtgctgaaggcctttgtggtggacatgatggagcggctgcgcatcagccagaagtgggtgcgggtggccgtggtggagtaccatgatggcagccacgcctacatcggcctgaaggacaggaagaggcccagcgagctgcggagaattgccagccaggtgaagtatgccggcagccaggtggccagcaccagcgaggtgctgaagtacaccctcttccagatcttcagcaagattgacaggcctgaggccagccgcatcaccctgctgctgatggccagccaggagccccagaggatgagcaggaactttgtgcgctacgtgcagggcctgaagaagaagaaggtgattgtcatccctgtgggcatcggcccccacgccaacctgaagcagatccgcctcatcgagaagcaggcccctgagaacaaggcctttgtgctgagctctgtggatgagctggagcagcagagagatgaaattgtgtcctacctgtgtgacctggcccctgaggcccccccacccaccctgcccccagacatggcccaggtgacagtgggccctggcctgctgggcgtgtccaccctgggccccaagaggaacagcatggtgctggatgtggcctttgtgctggagggcagtgacaagattggagaggccgacttcaacagaagcaaggagttcatggaggaggtgatccagaggatggatgtgggccaggacagcatccacgtgacagtgctgcagtacagctacatggtgacagtggagtaccccttcagcgaggcccagagcaagggggacatcctgcagagggtgcgggagatccgctaccagggcggcaacagaaccaacacaggcctggccctgcgctacctgagtgaccacagcttcctggtgtcccagggcgaccgggagcaggcccccaacctggtgtacatggtgacaggcaacccagccagtgatgagatcaagaggctgcccggggacatccaggtggtgcccatcggcgtgggccccaatgccaacgtgcaggagctggagcgcatcggctggcccaatgcccccatcctgatccaggactttgagaccctgccccgggaggccccagacctggtgctgcagcgctgctgcagcggggagggcctgcagatccccaccctgagccctgccccagactgcagccagcccctggatgtgatcctgctgctggatggcagcagcagcttccctgccagctactttgatgagatgaagagctttgccaaggccttcatcagcaaggccaacatcggcccccggctgacccaggtgtctgtgctgcagtatggcagcatcaccaccattgatgtgccctggaatgtggtgcctgagaaggcccacctgctgagcctggtggatgtgatgcagcgggagggcggccccagccagattggagatgccctgggctttgctgtgcgctacctgaccagcgagatgcacggggcccggcctggggccagcaaggctgtggtgatcctggtgacagatgtgtctgtggacagcgtggatgctgctgctgatgctgcccggagcaacagagtgacagtgttccccatcggcattggagacagatatgatgctgcccagctgcgcatcctggccggccctgctggggacagcaatgtggtgaagctgcagagaattgaggacctgcccaccatggtgaccctgggcaacagcttcctgcacaagctgtgcagcggctttgtgcgcatctgcatggatgaagatggaaatgagaagaggcctggagatgtgtggaccctgcctgaccagtgccacacagtgacctgccagccagatggccagaccctgctgaagagccaccgggtgaactgtgaccggggcctgcggcccagctgccccaacagccagagccctgtgaaggtggaggagacctgtggctgccgctggacctgcccctgtgtgtgcaccggcagcagcaccaggcacatcgtgacctttgatggccagaacttcaagctgaccggcagctgcagctatgtgctcttccagaacaaggagcaggacctggaggtgatcctgcacaacggggcctgcagccctggggcccggcagggctgcatgaagagcattgaggtgaagcacagcgccctgtctgtggagctgcacagcgacatggaggtgacagtgaatggccgcctggtgtctgtgccctacgtgggcggcaacatggaggtgaatgtgtatggagccatcatgcatgaggtgcgcttcaaccacctgggccacatcttcaccttcaccccccagaacaatgagttccagctgcagctgagccccaagacctttgccagcaagacctacggcctgtgtggcatctgtgatgaaaatggagccaatgacttcatgctgagagatggcaccgtgaccacagactggaagaccctggtgcaggagtggacagtgcagaggcctggccagacctgccagcccatcctggaggagcagtgcctggtgcctgacagcagccactgccaggtgctgctgctgcccctgtttgctgagtgccacaaggtgctggccccagccaccttctacgccatctgccagcaggacagctgccaccaggagcaggtgtgtgaggtgattgccagctatgcccacctgtgcaggaccaatggagtgtgtgtggactggaggaccccagacttctgtgccatgagctgcccccccagcctggtgtacaaccactgtgagcacggctgccccaggcactgtgatggaaatgtgagcagctgtggggaccaccccagcgagggctgcttctgccccccagacaaggtgatgctggagggcagctgtgtgcctgaggaggcctgcacccagtgcatcggggaggatggagtgcagcaccagttcctggaggcctgggtgcctgaccaccagccctgccagatctgcacctgcctgagcggcaggaaggtgaactgcaccacccagccctgccccacagccaaggcccccacctgtggcctgtgtgaggtggcccggctgcggcagaatgctgaccagtgctgcccagaatatgaatgtgtgtgtgaccctgtgtcctgtgacctgccccctgtgccccactgtgagcggggcctgcagcccaccctgaccaaccctggagaatgtcggcccaacttcacctgtgcctgcaggaaggaggagtgcaagagggtgagcccccccagctgccccccccaccggctgcccaccctgaggaagacccagtgctgtgatgaatatgaatgtgcctgcaactgtgtgaacagcacagtgtcctgccccctgggctacctggccagcacagccaccaatgactgtggctgcaccaccaccacctgcctgcctgacaaggtgtgtgtgcacaggagcaccatctaccctgtgggccagttctgggaggagggctgtgatgtgtgcacctgcacagacatggaggatgctgtgatgggcctgcgggtggcccagtgcagccagaagccctgtgaggacagctgccgcagcggcttcacctacgtgctgcacgagggggagtgctgcggccgctgcctgcccagcgcctgtgaggtggtgacaggcagccccaggggggacagccagagctcctggaagtctgtgggcagccagtgggccagccctgagaacccctgcctgatcaatgaatgtgtgcgggtgaaggaggaggtgttcatccagcagagaaatgtgtcctgcccccagctggaggtgcctgtgtgccccagcggcttccagctgagctgcaagaccagcgcctgctgccccagctgccgctgtgagaggatggaggcctgcatgctgaatggaacagtgattggccctgggaagacagtgatgattgatgtgtgcaccacctgccgctgcatggtgcaggtgggcgtcatcagcggcttcaagctggagtgcaggaagaccacctgcaacccctgccccctgggctacaaggaggagaacaacacaggagagtgctgcggccgctgcctgcccacagcctgcaccatccagctgcggggcggccagatcatgaccctgaagagagatgagaccctgcaggacggctgtgacacccacttctgcaaggtgaatgaaagaggagagtacttctgggagaagagggtgacaggctgccccccatttgatgagcacaagtgcctggccgagggcggcaagatcatgaagatccctggcacctgctgtgacacctgtgaggagccagaatgtaatgacatcacagcccggctgcagtatgtgaaggtgggcagctgcaagtctgaggtggaggtggacatccactactgccagggcaaatgtgccagcaaggccatgtacagcattgacatcaatgatgtgcaggaccagtgcagctgctgcagccccaccaggacagagcccatgcaggtggccctgcactgcaccaacggctctgtggtgtaccacgaggtgctgaatgccatggagtgcaagtgcagccccaggaagtgcagcaagtag

SEQ ID NO: 3532 - DNA, 816 bp, synthetic construct
  misc_feature 1..816: note = source = /note="Description of Artificial Sequence: Synthetic coding sequence"
  source 1..816: mol_type = other DNA
atgacagagccccaggtgggctgtgtggcctgcccccgggtgcacaaggagcccgcccaggtgggcaccccctggccagccaagcccaggagccaccccaggaagagggaccccacagccctgctgcccaggagcctgtggccagcctgccaggagagcgtgacagccctgtgcttcctgcaggagaccgtggagcggctgggccagagccctgcccaggacacccctgtgctgggcccctgctgggaccccatggccctgggcacccagggccgcctgctgctggaccgggacagcaaggacacccagacccgcatcagccagaagggccgccgcctgcagcccccaggcacccccagcgccccaccccagaggcggcccaggaagcagctgaacccctgccggggcacagagcgggtggaccccggctttgagggcgtgaccctgaagttccagatcaagccagacagcagcctgcagatcatccccacctacagcctgccctgcagcagccgcagccaggagagccctgcagatgctgtgggcggccctgctgcccaccctgggggcacagaggcccacagcgctggcagcgaggccctggagccccggcgctgtgccagctgcaggacccagaggacccccctgtggagagatgctgaagatggcacccccctgtgcaatgcctgtggcatccgctacaagaagtatggcacccgctgcagcagctgctggctggtgcccaggaagaatgtgcagcccaagaggctgtgtggccgctgtggggtgtccctggaccccatccaggagggctag

SEQ ID NO: 3533 - DNA, 1182 bp, synthetic construct
  misc_feature 1..1182: note = source = /note="Description of Artificial Sequence: Synthetic coding sequence"
  source 1..1182: mol_type = other DNA
atgaccacctacagcgacaagggcgccaagcccgagcggggccggttcctacactttcatagtgtgacattctgggtgggaaacgcaaagcaagcaacctctttttattgtagtaagatgggcttcgagcctttggcttaccggggcttggaaaccgggagccgcgaagtggtgtctcatgtgatcaagcaggggaaaattgtgttcgtgctttcttccgcattaaacccttggaataaggagatgggcgaccatctcgtcaagcacggagatggtgtgaaggacatcgcatttgaggtggaggactgtgactacattgttcaaaaagccagggaacgaggtgcgaagatcatgagagagccatgggtagagcaggataaattcggcaaggtgaagtttgctgtgctgcaaacatacggggacacaacgcataccctggtggagaaaatgaattacattggacagtttcttcctggttacgaggcacccgcatttatggaccccctccttcctaaactgcctaaatgctctctcgagatgattgaccacatcgtgggcaaccagcctgatcaggagatggtctcagcatccgagtggtatctaaaaaatctacagtttcatcgcttctggtctgtggacgatactcaggtgcacaccgaatacagttccctccggtctatcgtggtggccaactatgaagagagtatcaaaatgcctataaatgagcccgccccaggcaagaaaaaaagccagatacaagagtatgttgactataacggtggagccggcgttcaacatattgccctgaagactgaggacattattacagccatccggcatctgagggagcggggcctggaatttctgtcagtgcctagcacatactacaaacagcttagagagaaactgaagaccgcaaagattaaagtcaaagagaatattgacgcactggaggagctgaagatcctggtggactacgacgaaaaaggatacctcctgcagatctttacaaaaccagtacaggataggccaactctgtttttggaggtgatccagcggcacaaccaccagggatttggagccggtaactttaattcgctctttaaggccttcgaagaagagcaaaatctcaggggcaacttgacaaacatggagacaaacggcgtggttccaggcatgtag

SEQ ID NO: 3534 - DNA, 1065 bp, synthetic construct
  misc_feature 1..1065: note = source = /note="Description of Artificial Sequence: Synthetic coding sequence"
  source 1..1065: mol_type = other DNA
atgggcttcgagcccctggcctaccggggcctggagaccggcagcagggaagtggtgtcccatgtgattaaacagggaaagatcgtttttgtgctgtcctcagctctgaatccgtggaataaggagatgggagatcacttggtcaagcacggcgacggcgttaaagatatagcttttgaggtcgaggactgtgattacatagtacagaaagcccgagaaaggggggcaaagattatgcgggagccttgggtggaacaggataaattcggcaaagtaaaatttgccgtgttacagacatacggagacacaactcacacattggtcgagaaaatgaactacatcggtcaatttctgcctggctacgaggcccctgcgttcatggacccgctactgcctaagctgccaaaatgttctttggagatgatcgaccatatcgtcggtaaccagcccgaccaagagatggtatccgcaagcgaatggtatctcaaaaacctacaattccaccgcttttggtctgtggatgacacccaggtacataccgagtattcgtcactccggagcatcgtggtggccaactatgaggaaagcataaagatgccaatcaacgaacccgcccccggcaagaagaagtctcaaatccaagaatatgtcgactacaacgggggagccggcgtccagcatatcgcgcttaagactgaggatatcatcaccgccattcgccacctgagagaacgtgggttggagttcctttctgtgcctagtacatactacaaacaactgcgcgaaaagctgaaaacggccaaaattaaagttaaggagaatatcgatgcactggaggaactgaaaattctggtggactacgacgagaaggggtaccttctccagatctttactaaaccagttcaagaccgcccaaccctgttcctggaggttatccagagacataaccaccagggatttggtgccggcaactttaattctctgtttaaggctttcgaagaagaacagaatctccgaggtaaccttaccaatatggaaaccaatggagtggtgcccggcatgtag

SEQ ID NO: 3535 - DNA, 1173 bp, synthetic construct
  misc_feature 1..1173: note = source = /note="Description of Artificial Sequence: Synthetic coding sequence"
  source 1..1173: mol_type = other DNA
tacagcgacaagggcgccaagcccgagcggggccggttcctgcacttccacagtgtgacattctgggtcggtaatgccaagcaggctactagcttctactgctctaaaatgggtttcgagccactggcctataggggcctggagactgggtctagagaagttgtgtctcacgtgattaaacagggcaagatcgtcttcgtcctctcctcggccttgaacccatggaataaggagatgggcgaccaccttgtaaaacacggtgacggagttaaagacatcgcgttcgaggtggaagactgcgactacattgtgcagaaggcccgcgagcgcggtgcgaaaattatgcgcgagccctgggtggagcaggacaagttcggtaaggtgaaatttgccgtgctgcaaacctatggtgacacaacccatacacttgtggaaaagatgaattatatcggccagtttctccccgggtacgaggctcctgctttcatggacccactgctccctaaactgcctaaatgctctctagaaatgatcgaccatatagttggcaaccagcctgaccaagagatggtgtctgcaagcgaatggtacttaaagaaccttcaattccacaggttttggtctgtggatgacactcaagttcacactgagtactcttccctccgttcaatcgtcgtggctaactatgaggagtctatcaagatgcccatcaatgagcccgcccctggaaaaaagaagtcccagattcaggagtatgtcgattacaatggcggggccggggtccagcatattgctttgaagaccgaagatataattacagcaatacgccacctaagagaacgtgggctcgaattcctttcagtgccctccacatattacaagcaattgagagaaaagctgaaaacagccaagataaaggtcaaggagaacattgatgctctcgaagaactcaaaattctcgtggattacgatgagaaaggctatctgctccagatttttaccaaacccgtgcaggatagaccaactctgtttttagaggtgatacagcgccacaaccatcaggggttcggcgccgggaactttaacagcctgtttaaagcttttgaggaagaacaaaatcttcgaggcaacctcaccaatatggagaccaatggcgttgttccaggaatgtag

SEQ ID NO: 3536 - DNA, 438 bp, synthetic construct
  misc_feature 1..438: note = source = /note="Description of Artificial Sequence: Synthetic coding sequence"
  source 1..438: mol_type = other DNA
atgagcaccgagggcggcggccggcggtgccaggcccaggtgagccgacgcattagcttttctgcatctcaccgcctctattctaaattcttatctgacgaggagaatctgaagctgttcggaaagtgtaacaatcctaacggccacgggcataactataaggtagttgtgactgtgcacggcgaaattgatccagccaccggaatggtgatgaatctagcagacctgaagaaatatatggaggaggctataatgcagcccctggatcataaaaacctggatatggatgtgccctacttcgctgacgtggtgtctaccaccgaaaatgttgcggtatacatttgggataacctgcagaaagtgttgccagtcggggtgctgtataaggtaaaagtgtacgagactgataacaacatcgtggtctataaaggggaatag

SEQ ID NO: 3537 - DNA, 4284 bp, synthetic construct
  misc_feature 1..4284: note = source = /note="Description of Artificial Sequence: Synthetic coding sequence"
  source 1..4284: mol_type = other DNA
atgcaccagcggcacccccgggcccggtgcccccccctgtgcgtggcagggattctcgcatgcggcttcctgttgggctgttggggcccctctcacttccagcagtcatgccttcaggcactggaaccacaggctgttagttcatatctgagccccggagcccccctcaagggccgtcccccatctcccggatttcaacggcagcggcagaggcagcggagagccgcaggaggcatcctgcatctggagcttctggtagctgtaggccctgacgtctttcaggcacaccaggaagacacggagagatacgtgttaaccaacctgaatattggagccgaactgctgcgagatccctctttgggggcgcagtttcgcgtgcatctcgtgaagatggtaatcctgaccgagcccgagggcgcaccaaatataaccgcaaatctgacctcaagtctgctctctgtgtgcggctggtcccaaacgataaatcctgaagacgatacagatccaggccacgctgaccttgttctgtatattacccgtttcgacttggaattgccggatggcaatagacaagtaagaggtgtgacccaactgggaggagcatgtagccctacttggagttgcttgatcacagaggatactggcttcgacttaggggtgaccatcgcccacgagatcgggcatagctttgggctggaacacgatggggctcctgggtccggatgcggtcctagtggccacgtgatggccagtgatggagccgctcctagagccggactcgcctggtctccctgttcccggaggcagttactgagtctcctgagcgccggcagagctcggtgcgtatgggatcctccccggccacagcccggatcagccggacatccccccgatgctcagccaggtctgtactactccgctaatgaacagtgtcgcgtggcctttggaccaaaggccgtagcatgcacttttgccagagaacacctggatatgtgtcaggctctctcatgccacactgaccctcttgaccagagttcttgttcacggctactggtcccactgcttgatggcacggaatgcggagtggaaaagtggtgcagtaagggccggtgcaggtccctcgtcgagctgacacctatcgccgctgtccacggacggtggagcagctgggggcctcggagcccctgttctaggtcttgcggcggcggggtcgtcactcggaggcggcagtgcaataatcctcgacctgcattcggtggacgagcttgcgtcggcgccgatctgcaagccgagatgtgcaacacccaggcctgcgaaaaaacccaactggaatttatgagtcagcagtgcgcgcgcacagacgggcagcccctaagatccagccctgggggggcttcgttttaccattggggagctgcagtgcctcactcacagggggatgccctctgtagacatatgtgcagagccattggcgagtcattcatcatgaaacgcggggatagcttcctggatgggacgcgatgtatgcccagtggccccagggaggacggaacactaagtctatgtgtgagcgggagctgccgcacctttgggtgcgacggaaggatggattcacagcaggtctgggaccgctgccaggtgtgtggtggtgataattcaacttgtagtccaagaaaaggctcattcacagcaggccgggcaagagaatacgtaaccttccttacagtgaccccgaaccttactagcgtttacattgcaaatcatagaccactctttacacatctcgcggtgaggatcggaggcaggtatgtcgtggcaggaaagatgagcatctccccaaacacgacttacccaagcctgctggaggatggccgggttgagtatagggtagctctgactgaagataggttacccagactggaagaaattagaatttgggggccccttcaggaggatgctgacatccaagtatatagacggtatggggaagagtacggtaacctgacccgccccgacataactttcacctatttccagccaaagccgcggcaggcttgggtttgggcagcagtcagggggccatgttctgtttcttgtggcgcaggcctgcgctgggtgaattactcatgcctggaccaagcaagaaaagaactcgttgagaccgtacagtgccaaggctcacagcagccccctgcctggccagaagcctgcgttctggagccttgcccaccttactgggcggtgggcgatttcggtccatgctcagccagttgtgggggaggcctccgggagcggcccgtacgctgcgtggaagctcagggctcactgctgaaaacactccccccagccaggtgcagagccggcgcgcagcagcccgctgtggccctggaaacttgcaacccacagccttgtcctgcgaggtgggaggtctctgaacctagctcttgtacctccgccggcggagctggacttgcgttagagaatgaaacctgcgtgcctggcgctgatggcctggaggcaccagtcactgaagggcctggcagcgtggatgagaagctgccagccccagagccctgcgttggcatgtcctgccctccaggatgggggcatctagacgctaccagtgctggcgaaaaggccccatcaccctgggggtcaatcagaacgggggcccaggccgcccacgtgtggacaccagctgctggaagctgttccgtttcatgcgggaggggcctgatggagctgagatttctgtgtatggacagtgccctgagggttcctgtgcaggaggaactctgcgggctcgcctctaaacctggatcaagacgcgaggtatgccaggcggttccgtgtcccgctcggtggcagtacaagctagccgcatgcagtgtcagctgcggccgtggagtcgtcagacggattctctattgcgcacgagcacatggggaggatgacggagaggaaattctgttagacactcaatgccaggggcttcctcggcccgagccccaggaagcctgctccctggagccttgcccccctcgatggaaggtgatgagtctgggtccatgtagtgcctcttgcggactaggcacggccagacggtctgttgcctgtgtgcagctggatcagggccaagatgtggaagtcgatgaagctgcgtgtgcagccctggtacgacccgaggcttcagtgccgtgtctgatcgccgattgcacttaccgatggcacgtgggcacatggatggaatgcagcgtgagctgcggcgatggcattcaacgccgcagggatacatgcttgggcccgcaggctcaagctcccgttccggcagacttctgtcagcacctacccaagccagtgactgtgagggggtgttgggccgggccttgcgtcggtcagggtactccttccctggtgccacacgaggaagcggccgctcccggcagaactacggccactccagcaggagctagtcttgaatggagccaggcccggggcttactgttttctccagcgccacagcctagacgattgttacctgggccacaagagaactccgttcaaagttcagcatgtggtaggcagcacttggaacctactggaaccatagacatgagaggacctggacaggcggattgcgcagttgcaatcggccgccccctgggcgaggtggtgacactcagggtactggagtctagcttgaactgctctgctggagacatgctgctcctgtggggcaggctcacctggcgcaaaatgtgtagaaaactccttgacatgacattttcctccaagaccaacacactggtggtcagacagcgctgtgggagaccagggggaggagttcttttgagatatggatcgcagctggcccctgagaccttctatagggaatgtgatatgcaattatttggaccctggggcgagatagtgagtccctccttatcccccgctacaagcaacgcgggagggtgccggttgtttattaatgtggcccctcacgcgagaatcgccattcacgccctggccactaacatgggcgctgggacagaaggtgcaaatgcaagttatattctcattagagatacgcactctctccgtacgaccgccttccacgggcagcaggtgctttattgggaaagtgaaagctcccaagctgagatggaattctcggaggggttccttaaagcccaggcctctctgaggggtcagtactggactctccagtcctgggtgccagaaatgcaggatcctcagagttggaaaggtaaggagggtacctag

SEQ ID NO: 3538 - DNA, 3309 bp, synthetic construct
  misc_feature 1..3309: note = source = /note="Description of Artificial Sequence: Synthetic coding sequence"
  source 1..3309: mol_type = other DNA
atgttccagctgcccgtgaacaacctgggcagcctgcggaaggcccgaaagacggtcaaaaagatattgtctgacatcggcttagagtattgcaaggagcacattgaggattttaaacagtttgaacccaacgatttctatctcaagaataccacgtgggaggatgtcggcctgtgggaccctagcctaaccaagaaccaagattatcgcacgaagcctttttgctgctctgcatgcccgttctcgagcaaattcttcagcgcctacaaatctcacttccgtaacgtgcacagcgaagatttcgaaaatcggattcttctcaattgcccatactgtaccttcaatgcggataagaaaacactggaaactcatatcaagatcttccatgcgcccaatgcaagcgctcctagcagcagtctgagcacctttaaggataagaacaaaaacgacggcctcaagcccaagcaggctgattccgtcgagcaggcagtctattactgcaaaaaatgtacctatagagatcccctttatgaaattgtgaggaaacacatctaccgtgaacatttccagcatgtggcagccccttacatagcaaaggccggcgaaaaaagcctgaatggagctgtcccgttgggatccaatgcccgggaggagtcctctattcattgtaaacgatgcttatttatgcccaaaagttatgaagcgctggtgcagcacgtgatcgaggatcacgagcgaattggctatcaggtgacagccatgattggccataccaacgtggtggtgccaagatccaaacctctcatgttgatcgcaccgaagccgcaagacaagaagagcatggggcttccgcctagaatcggttccttggcatccggtaacgtgcgatccctaccgtcacaacagatggtaaataggttaagtatcccgaagcctaacctgaattctacaggcgtcaacatgatgagctctgttcacttacagcaaaacaattacggcgtaaagtccgtgggccagggttatagtgttggccagtctatgcgccttggcttgggagggaacgcccctgtcagtattccccagcagtcacaaagtgtcaaacaactcctgccgtccgggaatggaaggtcctacggtctcggatccgaacagagaagtcaggccccagcaagatacagcctgcaaagcgccaacgcttcatctcttagttctggccagctaaaaagtccctccctgtcacaatctcaggcaagcagagtgctgggacagtcgagcagtaagcccgccgccgctgccaccggacctccacctggcaatacaagttcgacacagaagtggaaaatatgcacaatctgtaatgagctcttccctgaaaacgtttattccgtgcacttcgagaaagaacacaaggccgaaaaagtccccgccgtggctaactacatcatgaagatccataactttacatccaagtgtctgtattgtaaccgctatctgcctactgatactttgcttaaccatatgctgattcacggtctgtcctgcccatactgtcggtctacgtttaatgatgtggagaaaatggctgctcacatgcgtatggtgcacatcgacgaggaaatggggcccaagaccgattcaactctgagctttgaccttacgctgcagcagggttcccataccaacatacatctgctcgtgactacttataacttgcgggacgctccagccgaaagcgtggcgtaccatgcccagaacaatccccccgtgccccccaagccacaaccaaaggtacaggagaaagccgacatccccgtgaaatcctcaccccaagccgctgtgccatataagaaagacgtcggcaaaacactgtgcccactttgctttagtatcttgaaggggccgattagtgacgccctcgcgcatcatctcagggaaaggcaccaggtgatccagacagtgcaccctgttgagaagaagttgacttataagtgtatacattgcctgggagtgtacacaagtaatatgaccgcctccacaatcaccctgcatctagttcactgtagaggggttggcaaaactcagaacggccaggataagacaaatgctccctcaagacttaaccagagtcctagtctggcaccggttaagagaacatacgaacagatggagtttcctctcctcaaaaagaggaaactggacgacgattccgattctccgtcttttttcgaggagaagcccgaggagccagtcgtcctggcccttgatcctaagggacatgaggatgacagctatgaggctcgaaagtcattcctgaccaagtacttcaacaagcagccttatcctactcgaagagaaattgaaaaattagctgcctcactgtggctgtggaaatctgatatcgcctctcacttctctaataagaggaaaaagtgtgtgcgcgattgcgaaaagtataagcccggcgtgctccttgggtttaacatgaaggagctcaataaggtcaagcatgagatggattttgacgctgaatggctcttcgaaaaccacgacgaaaaagatagtagggtgaacgctagtaagaccgcggataaaaagctcaatctaggaaaagaggatgattcatcttccgattcattcgagaacctggaggaagagtccaatgaatccggatctcccttcgatcctgtgttcgaggtggaaccaaaaatctcaaacgataaccctgaagagcacgtattgaaagtaattcctgaagatgcttcggaatcagaggagaagcttgaccagaaggaagacggctctaagtatgagaccatacaccttaccgaggaaccaacaaagctgatgcacaatgcatcagattctgaggtcgaccaggatgacgtggtggaatggaaggacggcgcatcccctagtgaaagtggccccgggtcacagcaagtttcagatttcgaagacaatacatgcgaaatgaaacccggaacttggtcagacgaatcctcacaatcagaggacgcacgaagttctaagccagctgcaaaaaagaaggctaccatgcagggggatcgcgaacagttaaaatggaagaattctagctacggaaaggtggaaggcttctggagcaaggatcagtctcaatggaaaaatgctagcgagaacgacgaaaggctgtctaatccccagatcgaatggcaaaactcaactattgacagtgaagatggcgagcagttcgataatatgactgatggagtcgcagagccaatgcatgggtcattggccggcgttaaacttagcagtcaacaggcttag

SEQ ID NO: 3539 - DNA, 3309 bp, synthetic construct
  misc_feature 1..3309: note = source = /note="Description of Artificial Sequence: Synthetic coding sequence"
  source 1..3309: mol_type = other DNA
atgttccagctgcccgtgaacaacctgggcagcctgcggaaggcccggaaaactgtcaagaagattctcagcgatatcggccttgaatactgtaaggaacatatcgaggatttcaagcagtttgagcccaacgatttctacctgaaaaatacaacttgggaagacgtgggcctgtgggatcctagtctgacaaaaaatcaagattaccgaaccaaacccttctgctgtagcgcttgccccttttcttcaaaattcttctctgcttacaaaagccacttcaggaacgtgcacagtgaggacttcgagaacagaattctactgaattgtccttactgcaccttcaatgctgataaaaagaccttagaaactcatattaagatctttcacgccccaaacgcatccgcaccatccagcagcctcagtactttcaaggacaagaataagaatgacggtctgaaacccaagcaggcagatagtgtcgaacaggcagtatactattgcaaaaaatgtacttaccgcgaccccctgtatgagatcgtgagaaagcacatatacagagaacacttccaacatgtggctgccccttacatcgccaaagccggagagaagagcctcaacggggcagtgcccttgggctctaatgctcgtgaggagagttcaattcattgtaaacgttgcctgttcatgcccaaaagctatgaggcgttagtacagcatgttattgaggaccacgagcgcatcgggtaccaggtgacggcaatgatcgggcatactaacgtagtggtgccccggagcaaaccgctgatgttaatcgctccaaaaccccaggataaaaaatcaatgggactgcctcccagaattggaagtcttgctagtggaaacgttcggagcctcccatctcaacaaatggtcaataggctctcaatccccaaacccaacttaaactcaactggagtcaacatgatgtccagcgtgcacttgcagcagaataactatggagtgaagagtgtgggccagggatactctgtggggcaatccatgcgactaggcctcggagggaatgcccctgtaagcatcccccaacagtctcagtccgttaagcagctgctgccgagcggaaacgggagatcttacgggctcggttccgaacagcggtctcaggcccctgcacgttattcactgcaatcagcgaacgcatcatctctgagtagtggacagctgaagtcccctagtctctcacagtctcaagcctcacgggttctaggccagtcctcttctaagcctgcggccgccgccaccggcccaccccccggtaacacctctagcacccagaaatggaaaatctgtacaatctgtaatgagctgttcccagagaacgtgtactctgtccatttcgagaaagaacataaagccgagaaagtgccagctgtggcaaattacatcatgaagattcataactttactagcaaatgcttatattgtaacaggtatctgccaaccgatactcttctgaatcacatgttgatccacggtttgtcttgcccttactgtcgttccaccttcaacgatgttgaaaaaatggcagcgcacatgagaatggttcacatcgacgaggaaatgggccctaagacagactcaaccctctcattcgatcttacattgcagcagggatcacacaccaatatccacctgctggttactacatacaatctccgagacgcccccgccgaaagtgtggcctatcatgctcaaaacaatcccccagtgcctcctaagccccagcctaaggtccaggaaaaggcggatatccctgtgaaatcttcaccccaggcagcagttccctataaaaaggacgtgggcaagaccctctgcccgctttgctttagcattctcaagggccccatctctgatgccttggcccaccatctgcgggagcggcatcaggtcattcagactgtgcatccagttgaaaagaagctgacttacaaatgtatacactgtctgggagtttacaccagcaacatgacagcttctaccatcacgttgcatttggttcactgtcggggcgtcgggaagactcagaatgggcaagataaaaccaacgctcccagccgattgaatcagtccccttctcttgcgccagtaaaaaggacttacgaacagatggaattcccgctactcaaaaagagaaagttagatgacgacagcgactccccctctttctttgaagaaaaacctgaggaacccgtcgtgctggccctggacccaaaaggtcacgaggatgactcttacgaggccagaaagagtttcctgaccaaatactttaacaagcagccatatcctaccagaagggaaattgagaaactggcagcatcattgtggctatggaaatccgacattgccagtcatttcagtaacaaaagaaagaaatgtgtccgggattgtgagaagtacaaacccggcgtcctgttgggctttaatatgaaggagttaaataaggttaagcacgagatggacttcgatgcagagtggcttttcgagaaccacgatgaaaaagattcacgagtcaacgctagcaagaccgccgacaaaaaactgaacctgggcaaggaggatgattcttcttcagactccttcgaaaacctcgaagaagaatccaacgaatctggatctcctttcgatcctgtcttcgaggttgagccaaagatcagcaacgacaaccccgaggagcatgtgttaaaggtgatccctgaggatgccagtgagtccgaggagaaacttgatcaaaaggaagatggaagtaagtatgaaactatccacctgaccgaggaaccaacaaagctcatgcacaatgcctccgactctgaagtagaccaagatgatgtggtggaatggaaggatggggcttccccgagtgaaagcggcccgggatctcaacaggtgagtgactttgaagataacacctgtgaaatgaaaccaggaacttggtcagacgagtcctcgcagagtgaggacgctcggagctctaagccagcagccaagaagaaggccactatgcagggcgacagagaacagctgaagtggaagaatagtagttatggtaaagtggaaggattttggtcaaaagaccagtcgcagtggaagaatgcatcagaaaatgatgaacgactgtcgaaccctcagatcgaatggcagaacagcacaattgattctgaagacggggagcagttcgataacatgaccgatggagttgctgaaccgatgcacggtagccttgccggggtgaagctgtccagccagcaggcctag

SEQ ID NO: 3540 - DNA, 3309 bp, synthetic construct
  misc_feature 1..3309: note = source = /note="Description of Artificial Sequence: Synthetic coding sequence"
  source 1..3309: mol_type = other DNA
atgttccagctgcccgtgaacaacctgggcagcctgcggaaggccaggaagaccgtgaaaaagatcctgtcagatataggtctcgaatactgcaaagagcacatcgaggacttcaagcagttcgagccaaatgacttctacctgaagaatacaacgtgggaggatgtaggactgtgggacccctcgcttaccaaaaaccaggattatcgcacaaagccattctgttgttctgcatgtccattttcatccaaatttttcagtgcgtacaaatcccactttagaaacgtacacagcgaggatttcgaaaaccggattttgctgaattgcccttactgtaccttcaatgccgataagaaaacactggaaacacacataaagatatttcatgccccaaatgccagtgcacctagctcctctctgagtacctttaaagataagaacaaaaacgacgggctgaaacccaagcaagcggactcggtcgaacaggccgtctactactgtaagaaatgtacttatagggacccactctatgagatcgtgcggaagcacatctaccgtgagcacttccagcacgtggccgccccgtatatagcaaaagcaggtgaaaaatctctgaatggcgctgttccgttaggatctaacgccagggaagagagtagcatccactgtaaacgatgcctgtttatgcctaaatcttacgaagcactggttcagcacgttattgaggatcacgaaaggattggttaccaggtcactgcaatgattgggcacaccaacgtggttgtccccagaagcaaacctcttatgttgattgctccaaagccgcaagataagaagagcatgggactgcccccccggatcggctcgcttgccagcggaaacgtgagatccctgcccagccagcagatggtgaatagactgagcatacctaagcctaaccttaacagcacaggggtcaatatgatgtctagcgtgcacttgcagcagaacaactacggagtcaagtctgtaggccaagggtattcagttggacagtcaatgcgactgggcctaggtggtaatgcccccgtttcaatccctcagcaatctcaaagcgtgaagcagttgttaccgagcgggaacgggcggtcttacggcctgggctcagagcaacgctcccaggcacccgctagatacagccttcagtcagcaaacgcctctagcctgagcagcggccagcttaagagcccaagcctgagccagtcacaagcttcacgggttctcgggcaatcctcttccaaacccgcagccgctgcgacaggcccaccacccggaaacacttcatccacccagaagtggaagatttgtaccatctgcaatgagctgttcccagagaacgtgtactccgtacattttgagaaggagcacaaggccgagaaagtgcccgccgttgccaactatatcatgaagattcacaattttacaagcaagtgcctctattgtaaccggtatcttccaacggacacactgttaaatcacatgctgattcacggcttaagctgtccatactgcaggtctacattcaatgacgtcgagaagatggccgctcacatgcggatggtgcacatcgacgaagaaatggggccgaaaactgactcgaccctgtctttcgatctcacactgcagcagggatcacacaccaatattcacttattggtgacaacctacaatctgagagatgcccctgcagaatccgtggcctatcacgcacagaacaatcctcccgtccctcctaagcctcagcccaaagtgcaagaaaaagccgacataccagtcaagagcagcccacaggcggcagtaccatacaagaaggacgtcggtaagactctttgccctctgtgcttctccattctaaaggggcctatcagcgacgcgctcgcccaccaccttagagagagacaccaggtaatccagacagtccatccagtagagaaaaagctgacctacaagtgtatccattgtctgggtgtatacacatccaacatgactgcctccactattacactccatttagtccactgccggggagtgggcaagacacagaatggtcaggataaaacaaatgcccccagccggctgaaccagtcgccctcactagcccctgtcaagcgaacatatgaacagatggagttccccctgctgaaaaagcgcaagctcgatgacgactccgacagtccctctttcttcgaggaaaagcccgaggaacccgtggttctcgccctcgacccgaagggtcacgaggatgactcctacgaggctcggaaatccttcctgacaaaatacttcaacaaacagccctaccccacaaggagggaaatcgagaaattagctgccagcctgtggctctggaagtctgatattgctagccatttttccaacaagaggaaaaaatgcgttagggactgtgagaagtataaacccggggtgctgctggggttcaacatgaaggaattgaacaaggtaaagcatgagatggactttgacgccgagtggctgttcgagaaccacgacgagaaagacagccgggtgaacgcatccaagaccgccgataaaaagctgaacttgggcaaggaagacgactcttcctctgactcttttgagaatctcgaggaagaaagcaatgagtcaggatctccctttgatcctgtgtttgaagtggaacctaaaatcagcaacgataatcctgaagagcatgtgctgaaggtgattcccgaggacgcctccgagtccgaagagaaacttgatcaaaaagaagacggcagcaagtatgagaccatacatctgactgaagagcctacaaaactgatgcataacgcaagcgacagtgaagttgaccaagacgatgtagttgaatggaaagatggcgcatcgccgagtgagtctggcccagggagtcaacaggtaagcgatttcgaagataacacttgtgagatgaaacctgggacttggagcgatgagtcttcacagagcgaggacgccagatctagcaaacctgctgccaagaagaaagccacaatgcagggagaccgagaacaattgaaatggaaaaatagtagttatggaaaggtggagggattttggtccaaagatcagagccagtggaagaacgcaagcgaaaacgatgagcgcctttcaaatccccagatcgagtggcagaatagtaccattgatagcgaggacggagaacagttcgataacatgactgacggcgtagcagagccaatgcacgggagtctcgctggcgtaaagctcagttcgcagcaggcttag

SEQ ID NO: 3541 - DNA, 3309 bp, synthetic construct
  misc_feature 1..3309: note = source = /note="Description of Artificial Sequence: Synthetic coding sequence"
  source 1..3309: mol_type = other DNA
atgttccagctgcccgtgaacaacctgggcagcctgcggaaggccaggaagacagttaaaaagattctgtccgacatcggccttgagtattgtaaggagcacattgaggatttcaaacagtttgaaccgaatgacttttatctgaagaatacaacttgggaggatgttggtctatgggacccaagcctgactaaaaaccaggactaccgcacgaaacccttctgttgctcggcttgtcccttctcttcaaagtttttttcagcttacaagtcccactttcgcaacgtgcacagcgaagacttcgagaatcgaatactgctgaattgcccctactgcacctttaacgctgacaagaaaactctcgagacacacatcaagatcttccacgccccgaacgcttcggccccttcttcttccctttcgaccttcaaggataagaacaagaatgatggacttaagccaaaacaagctgacagcgtggaacaagcagtttactactgtaagaagtgtacatatcgtgaccctctctacgaaattgtacgtaagcacatctaccgcgagcactttcagcatgtcgcagccccctacatcgccaaggctggcgaaaagtcattgaacggggcagtgcccttgggcagtaacgccagagaagagagtagcatccactgtaagaggtgcctgtttatgcccaagtcttacgaagctctagtgcaacacgtcattgaagatcacgagcgaattggttaccaggtgacggcaatgattggtcacaccaatgtagtggtcccacgctcaaaaccactcatgctcatcgcccctaaaccacaagacaagaaatccatggggttgccgccaaggataggctcactagcctctggcaatgtgagaagccttcccagtcagcagatggttaatcggttatcaataccaaagccgaatttaaattctaccggtgtgaacatgatgtcatccgtgcacttgcagcaaaacaattatggagtaaaatctgtgggacagggttattctgtcggtcagagtatgcggctggggctaggcggcaatgctccagtgtcaatcccccagcagtctcagagcgtgaagcagctgctcccaagcgggaatggccggagctacggcttggggagcgaacaacggagtcaggcgccagctcgctactctctgcaatccgcaaacgcttctagcctgtcaagtggtcaactcaaaagtccatcactgagtcagtcacaggcatcgagagtcctcggccagagcagtagcaagccagctgcagctgccactgggcctcctcccgggaatacaagctccacccagaaatggaaaatatgcaccatttgcaacgagttattccctgaaaacgtctacagcgtccacttcgaaaaggagcacaaagctgaaaaagtgccagccgtcgccaattacatcatgaagatccacaacttcaccagcaaatgcttgtattgtaaccggtaccttcccactgatacgttattaaatcacatgctgatccatggcttgtcttgcccctactgcagatctacatttaatgacgtcgaaaaaatggccgctcatatgaggatggtgcatattgatgaagaaatgggcccaaagacagatagcacacttagtttcgatctgaccttacagcaggggtcccacacgaatatccatttattagtcactacctacaatctaagggacgctcccgcagaaagcgtggcttatcacgcccagaacaaccccccagtacctcctaagccgcaacccaaagtacaggaaaaggctgatattccagtgaagtcctcgccccaggcagccgtgccttacaagaaggatgtgggaaagactttatgccccctgtgcttctccatccttaaaggtcctattagtgacgcattagctcaccatctgagggaaagacaccaggtgatccaaaccgtgcacccagtggagaaaaaactcacctacaagtgtattcattgtctcggagtctatacttccaatatgacagcctccaccatcaccctccacctggtacactgcaggggagtgggcaaaactcaaaatggtcaggacaagacgaatgccccgtctcggctcaatcagtctccctctttggcgcccgtgaaacgcacgtatgaacaaatggagttccccttgcttaaaaaacggaagttggatgatgatagcgacagcccctcttttttcgaagaaaagccagaggagcccgtagtgctagctctcgatcccaaagggcacgaagatgacagttacgaagcccggaaatcctttctcacgaaatatttcaacaagcagccatatccaactaggcgggagatcgagaagttggcggctagcctttggctctggaagtccgacattgcctctcacttctcaaacaagagaaagaaatgcgttcgcgactgcgaaaagtacaaaccaggcgtccttctaggatttaatatgaaggagctcaacaaagtaaaacacgagatggactttgatgcagaatggctttttgaaaatcatgatgagaaagattccagggtgaacgcatcaaagacagctgataagaaacttaatctcggaaaggaggacgacagtagctctgactcctttgagaatttagaggaggagagcaacgagtctggcagccctttcgaccctgtgtttgaggtcgaacctaaaatcagcaatgacaaccccgaagaacatgtactgaaggtaattccagaggacgcatccgagagcgaagaaaaactagaccagaaagaggacggctccaaatatgagaccatccatctcacagaggaaccaacaaaactcatgcacaacgcctcagacagtgaggtcgatcaagatgacgtggtggagtggaaggatggagctagccctagcgagtcagggccaggcagccagcaggtttccgatttcgaagataacacgtgcgaaatgaaacctgggacctggtccgacgagtcctcacagtcagaggatgcccggagctcaaagccggctgccaaaaagaaagccactatgcaaggggacagggagcagctgaaatggaaaaactcaagctatggtaaggtggaaggcttttggtccaaggatcagtcccagtggaagaatgcgagcgagaatgacgagaggttatcaaatccacagattgagtggcagaacagcacgatcgactccgaggatggagagcaattcgacaacatgaccgatggcgtggcagagccgatgcatgggtcccttgccggcgtgaagctctcaagtcaacaggcatag

SEQ ID NO: 3542 - DNA, 522 bp, synthetic construct
  misc_feature 1..522: note = source = /note="Description of Artificial Sequence: Synthetic coding sequence"
  source 1..522: mol_type = other DNA
atgttccagctgcccgtgaacaacctgggcagcctgcggaaggcccgcaaaactgtgaagaaaatcctgtctgatataggactcgagtattgcaaagagcacatcgaagactttaaacagttcgaaccaaacgacttctacctgaaaaatacaacttgggaggatgtgggtttgtgggaccctagtctcaccaagaaccaggactacaggactaaacccttttgctgcagcgcctgcccgttttcttcaaaattttttagcgcttataagtcacattttaggaacgtgcattccgaggattttgagaaccgtattctgctgaactgcccgtactgcacctttaatgctgataagaagacccttgagactcacatcaagatcttccacgcccccaacgcctcagcaccctcctcttcgctatctacattcaaggacaagaacaagaacgatgggcttaaacccaaacaggccgactcagtggaacaagccgtgtactactgtaagaagtgtacgtacagatag

SEQ ID NO: 3543 - DNA, 441 bp, synthetic construct
  misc_feature 1..441: note = source = /note="Description of Artificial Sequence: Synthetic coding sequence"
  source 1..441: mol_type = other DNA
atggtgatcctgaccgagcccgagggcgcccccaacatcaccgccaatttgacctcaagtctcctgagcgtgtgtggatggtcacagacaatcaatcctgaagatgatacggaccccggccacgccgacctggtattgtacatcacgcggttcgacctcgaactccctgacggaaaccgtcaagtgcggggcgtaactcaactgggtggagcttgctcccccacgtggtcttgtctgatcaccgaagacaccggctttgacctcggtgtcacaatagctcatgagattgggcataggatttgtgcacggccatctcccgcaactcagacaagatggaccaaggcagctgccgcagcaagcagcttccttagctggatggggcagaacgtcgcctggcgatccggggcgccccgagtggccgctgccccctggtggtcatag

SEQ ID NO: 3544 - DNA, 4116 bp, synthetic construct
  misc_feature 1..4116: note = source = /note="Description of Artificial Sequence: Synthetic coding sequence"
  source 1..4116: mol_type = other DNA
atgcaccagcggcacccccgggcccggtgcccccccctgtgcgtggctgggattctggcctgcgggttcctgttgggctgctggggtccgtcacatttccagcaaagctgcctccaggcactggagccacaggctgtctccagctatctgtcacctggagccccactaaaggggcggccccctagtcctggctttcaacgccagagacagcgtcaacgccgggccgctgggggcattctccacctggagctcctcgtcgccgtcggtcctgatgtatttcaagcacaccaggaagatacagagagatatgtgctgacgaacctgaatatcggagcggagctcctgcgagaccctagcctcggcgctcagttccgcgtccaccttgtaaagatggttatcctgacggaacctgaaggtgctccaaatattaccgccaatctgacctcctcactcctcagtgtatgcggttggagccagaccatcaaccccgaggatgatacagatccaggccatgctgacctggttttgtatattaccagatttgatttggaattgccagacggaaaccgccaggtacggggtgtgacccaactgggcggcgcatgttccccaacttggagctgcctgattactgaagacactgggttcgacctgggcgttacaatcgcccacgagataggtcatagctttggtctggaacacgatggagccccaggatctggctgtggaccttctggacacgtgatggcctccgatggggcagcccctagagcaggcctcgcctggtcaccatgttcccgccgtcaactactctctctgctttccgctggtcgggcacggtgcgtctgggatcctccgagaccacaacccgggagcgccgggcaccctcctgatgcccagcccggcctatattacagcgccaatgaacaatgccgggtggccttcggcccaaaggcagtggcctgcacattcgccagagaacacttggacatgtgccaagcccttagctgccacactgacccactggatcaatcatcatgttcccgcctcctagtgcctctgctcgacggcacagaatgcggggttgagaagtggtgcagtaaagggcgttgcaggagcttggttgaactgactcctatcgcggccgtgcacggccggtggagctcctggggcccacgcagcccttgttcccgtagttgtggcgggggcgtagtaacacgtcgccggcagtgcaacaatcctagacccgccttcggcggtcgtgcatgcgtgggggccgacctgcaggcagaaatgtgtaacacacaggcatgcgaaaagacacagctggagtttatgtctcagcagtgcgctcgaaccgatggacaaccattaagatcctcgcccgggggcgctagcttttatcattggggagctgcagtacctcactcccagggagacgccctgtgccgccatatgtgtagagcaatcggagagtctttcatcatgaagcgaggcgacagctttctcgatggaacaaggtgcatgccttccggccctcgagaggacggaactctttctctttgcgtgtcaggctcatgccgtaccttcgggtgcgacggccggatggattcacaacaggtctgggacagatgccaggtatgtggcggcgataatagcacttgcagcccacgcaagggatccttcacggctggtagagcacgcgaatatgtgacctttctgaccgtaacgccgaacctgactagcgtctacatcgctaaccaccggcccctgttcactcacttggcagttcggattggcgggcgctacgttgttgccgggaaaatgagtatttccccaaatacaacgtacccctctctgttagaggacgggagggtcgagtaccgcgtggccttaacagaggatcggctgccccgactggaagagattcggatttggggaccgctccaggaggatgccgatatccaggtctaccgcaggtatggcgaggagtacggcaatctgacaaggcccgacattactttcacttacttccaacctaaaccgcgacaggcctgggtgtgggctgcggtgaggggaccctgctccgtgagctgcggggccggcctcagatgggttaattatagctgccttgatcaagctcggaaggagctggtagagacagtacagtgccagggcagccagcagcctcccgcatggcccgaggcttgtgtcctggaaccttgtcccccatactgggcagtaggtgatttcggtccatgttctgcttcctgcgggggaggactgcgagagcgcccagtcagatgcgtcgaagctcaggggtccctgttaaaaacattgccccctgcccgttgtcgcgcaggcgcccagcaacccgctgttgccttagaaacctgtaatcctcaaccgtgtcccgcgcgctgggaagtctccgagccctctagctgcacaagtgcagggggggccggcctcgcccttgaaaatgaaacctgcgttccaggggcagacgggctcgaagccccagtgacagagggtcccgggtccgtggacgagaagttgcccgcccccgagccctgcgtgggcatgagttgcccaccgggatggggacatcttgacgccacctcagcgggcgagaaagcaccgtccccgtggggtagcattaggactggtgctcaggccgcacacgtttggacacccgccgccggctcttgttcagtctcctgcggcagaggtttgatggagctgagattcctttgtatggattcagctctgcgagttccggtgcaagaagaattatgtggcttagctagcaaaccgggtagccgacgagaggtttgccaggcggtcccgtgccctgcacgttggcagtacaagctcgccgcatgttccgtgtcctgtgggcgtggcgtcgttcggaggatcttgtactgcgctcgggcccacggagaggacgacggagaggaaatacttctggacacccagtgtcagggcctgcctaggcccgagccccaggaagcatgcagcctggagccttgtccacctcgctggaaggtgatgtctctgggtccctgcagcgcctcatgtgggctgggaactgcacggcggtctgtcgcctgtgttcaattagaccagggccaggatgtcgaagtagatgaagcggcctgcgccgcactagtgagacccgaggcctctgtcccctgcttgatcgccgattgtacgtatcggtggcacgtggggacatggatggaatgttccgtgtcatgcggagacggcatccagaggcgaagagacacctgtctcggccctcaggctcaggctcctgtgccagctgacttctgccagcacctcccgaagccagtgacagtgcggggatgctgggcgggtccatgtgtggggcagggagcctgcggtcggcagcatttggaaccaacaggtacgattgacatgaggggtccagggcaagccgattgcgcagtcgccattggacgacctctgggcgaagtggtgacccttagagttcttgaaagcagtctgaactgttcagctggtgacatgcttttattatggggccggctcacatggaggaagatgtgtagaaaactcctggatatgacattctcaagcaaaacgaatactctcgtcgtgagacagcgctgcgggagaccggggggaggggtactgttacgttatgggtcccaattggcccctgagacattttaccgcgaatgcgacatgcagttgttcggaccctggggggagatagtaagccctagtctgagccctgcgaccagtaatgcaggaggctgtcgactcttcattaacgttgctcctcatgctcggatagcaatacacgccctcgcaaccaatatgggggcaggcacagagggcgccaacgcgagctatatccttatcagggacactcactctttgcgaacaaccgctttccacggccagcaggtgctatattgggagagcgagtcttcccaagcagagatggaattttcggaagggtttctcaaagcgcaggcaagcctcagaggccagtactggactttacagtcttgggtcccagagatgcaggacccccagagctggaaaggaaaggagggaacatag

SEQ ID NO: 3545 - DNA, 4023 bp, synthetic construct
  misc_feature 1..4023: note = source = /note="Description of Artificial Sequence: Synthetic coding sequence"
  source 1..4023: mol_type = other DNA
atgcaccagcggcacccccgggcccggtgcccccccctgtgcgtggcaggtatccttgcatgcgggtttctgctcgggtgctgggggcctagccactttcagcaaagctgccttcaagccctagagccccaggctgtttctagctacttgagcccaggcgctcctcttaaggggcgtccaccttctcctggctttcagcggcagagacaacgccagcgaagagctgctggcgggatcttgcacctggaattgctagtcgctgttggccccgacgtctttcaggcacatcaggaggataccgagcgatacgtgctcaccaatcttaacattggtgcagagcttttaagagaccccagcttgggcgctcagttccgcgtccatctagtgaagatggtcattctgaccgagcccgagggggcgcctaatattaccgccaacttgactagcagcctgctctccgtctgcggatggagccagaccatcaatccggaggatgacacggaccccggccacgcagacttggttctttacatcacacgcttcgacctggaactccctgatgggaaccgacaggttcggggcgtgacgcaactcggtggcgcatgttccccaacgtggtcttgtctcattacagaggacaccggcttcgacctaggagtaaccattgctcacgagatagggcactcgttcgggcttgaacacgatggcgcacctggctccggatgtgggcccagtggccatgtcatggcatccgatggggccgccccacgagcaggtcttgcctggagtccctgctcgcgccgccagcttctatccctgctctctgcgaatgaacagtgtagggtggccttcggtcctaaagccgtcgcttgcaccttcgccagggaacacttagacatgtgccaggctttgagttgccatacggatccactcgatcagagtagctgctcaaggctgctggtgcccctcctcgatggaaccgaatgcggggttgagaagtggtgttccaagggacgatgcagatcactggtggagttaacccccatagccgccgtgcacggacgatggtccagctggggcccccgcagtccatgtagtagatcgtgcggaggcggcgtggtcacacgcagacgtcagtgtaataaccccagaccagccttcgggggtagggcgtgtgtgggcgccgatttgcaggctgagatgtgcaacacccaggcctgcgagaagacccagctggagtttatgtcacaacagtgtgctcgcactgacgggcagccacttcggagttccccaggcggagcttccttctatcattggggagccgctgtgccccactctcaaggtgatgcactgtgccgacacatgtgcagggctatcggcgagtccttcatcatgaagcgtggcgattcgtttctggatggcacacggtgtatgccttcaggcccacgcgaggacggcactctatctctgtgcgtgagtggctcctgtcgtactttcgggtgcgatggtaggatggattcacagcaggtatgggatcggtgtcaggtgtgtggcggggacaatagcacatgtagcccacggaaaggctccttcacagccgggcgcgcccgcgaatatgtgaccttcttgaccgtcacccccaacctcacctcagtatacatcgcaaaccataggccattgttcacacacctggctgtcagaattggaggtcgatacgtagtggctggaaagatgagcatttcccctaacactacttaccccagtctgctggaggacggccgggtcgagtatcgtgtggcactgaccgaggacagactgcctagactggaggaaattcggatctggggccccctgcaagaggacgctgacatccaggtttatcggaggtatggagaagaatatggtaacctgactaggcccgacataacgtttacatacttccagccaaagccccgtcaggcctgggtgtgggcagcagtccggggcccttgctcagtgtcctgtggcgctgggttgaggtgggttaattactcctgtcttgaccaggccaggaaagagctggtcgaaaccgtccaatgccagggttcgcagcagccacctgcatggcccgaggcttgcgtcttggaaccatgtcccccatattgggcagttggggactttggtccttgtagtgccagttgtggcggggggctccgtgagaggcctgtgcggtgcgtggaagctcaaggttccctgctcaaaacactgccccccgcaaggtgtcgcgcgggcgcccagcagccggccgtggccctcgaaacatgtaatcctcagccttgcccggcgcggtgggaagtctcggagccctcctcatgtacctccgcgggaggcgccggtctggcgttggagaatgagacgtgtgtcccaggtgcggatggtctggaagcaccggtcactgagggtcccgggagcgtcgatgagaaactgccagcccccgaaccgtgcgtgggaatgagttgtccgcctgggtggggtcacctagacgcgaccagcgccggcgagaaggcaccctcaccatggggaagcatccgcacaggagcccaggccgcacatgtgtggaccccggcagctggatcttgcagtgtgtcctgcggacggggattaatggagctgagatttctttgcatggatagcgccctccgggtgccagtgcaggaagaattgtgtggattagccagcaagcccggctccagacgggaggtgtgtcaggctgtgccttgtcccgcccgctggcaatacaagctggccgcatgcagtgtctcttgtggacgtggagtggttcgccgtattctgtattgcgcacgtgcacacggtgaagacgacggcgaagaaattctcctggatacacagtgccaggggctgcctagaccagagcctcaggaggcctgttctttagaaccttgtcccccaagatggaaggtgatgtcattgggcccatgctctgcctcctgcgggctgggcaccgctcgcaggagtgtagcttgtgtccagctggaccagggacaagacgtcgaggtggacgaagccgcctgcgccgcacttgtgagaccagaggcctctgtgccctgccttatagcggattgcacatacaggtggcacgtgggaacttggatggagtgtagtgtgtcctgcggtgacgggatccagaggagacgcgatacctgcctaggtccccaggcccaggcccctgtgcctgccgatttttgccaacaccttccaaaacccgtgacagtgcgaggctgttgggccgggccatgtgtgggtcaaggcgcgtgtggcagacaacacctcgagcctaccggcactattgatatgcgggggcctggccaggccgattgcgcagttgcaattggaagacctcttggagaagtggttacgctgagagtactcgagtcctccctgaactgttccgctggtgacatgttattactctggggacgtctgacctggaggaaaatgtgcagaaaactgttggacatgacattctcgagtaaaacaaataccctggtcgtgaggcaacgctgcggtagaccaggaggaggcgtgctgctcaggtatggaagtcagctcgcgccagaaacattttaccgggagtgcgatatgcagctgttcggcccctggggagaaatcgtgagtccaagcctctctcccgctacaagtaatgctggggggtgtagactttttatcaacgtggctcctcatgccaggattgcaatccacgcactggcaacgaacatgggtgccggtactgaaggggctaatgcatcctacatcctcattcgcgacacccactcacttagaacaacggcctttcacgggcaacaagtcctgtattgggagtcagagtcttcacaagccgaaatggagttcagtgaaggatttttgaaggcgcaggcaagcctaagaggccagtactggactttacaaagttgggtgcccgaaatgcaagacccacaatcttggaagggaaaagaagggacctag

SEQ ID NO: 3546 - DNA, 672 bp, synthetic construct
  misc_feature 1..672: note = source = /note="Description of Artificial Sequence: Synthetic coding sequence"
  source 1..672: mol_type = other DNA
atgcggggccccggccaggccgactgcgccgtggccatcggccggccactaggggaagttgtaactctccgcgtcctagagagctctcttaactgcagcgccggagacatgttactgctgtgggggcgcctcacctggagaaagatgtgtaggaaattgctcgatatgacctttagtagtaagaccaataccctggtggtgcggcagcggtgcggaaggcctggagggggagtcctgctcagatatggtagccaacttgcccctgaaaccttctacagggagtgtgatatgcaattatttggtccatggggtgaaatcgtatccccatccctctccccggccacatcaaatgccggcggctgccgactgttcatcaatgtcgcaccccacgctcgcatcgcgatccacgccctggccaccaacatgggggccggtactgagggagccaatgcttcttacatcctgattagggatacacactcactcagaactactgcttttcatggccagcaggtgttgtactgggaaagtgaatccagccaggctgaaatggaattctccgaggggttcctgaaggctcaggctagtctcagaggccagtactggactctgcaaagctgggtgcctgagatgcaggacccacagagttggaagggaaaggaggggacatag

SEQ ID NO: 3547 - DNA, 1035 bp, synthetic construct
  misc_feature 1..1035: note = source = /note="Description of Artificial Sequence: Synthetic coding sequence"
  source 1..1035: mol_type = other DNA
atgcaccagcggcacccccgggcccggtgcccccccctgtgcgtggccggtattttagcctgcggctttctcttaggatgttggggacctagccactttcaacagtcatgcctgcaagccctggaaccacaagctgtttcttcttatctgtctcccggagcaccactgaaagggaggccaccctccccaggattccaacgccagaggcagaggcaacgccgcgctgccggtggcatcctccaccttgagctgctcgttgctgtggggccagatgtattccaagcgcaccaggaagatacagaacgttatgtactgacaaacctgaatataggagccgagctgttaagggatccttcgctgggcgcgcagtttcgagtccacctggtgaagatggtcattctgaccgagcccgagggggcccctaacatcactgcaaatcttacttcaagtctcctgtcagtgtgcgggtggtcccagaccattaatccagaagacgacaccgatccagggcacgccgacttggttctatacataacaaggttcgatctggagctcccggatggcaaccgccaggttcgcggagtgacacagctcgggggtgcctgctcaccaacctggtcctgtctcattactgaggacacaggcttcgacctcggcgttacgattgcgcatgaaattgggcatagttttgggctggagcacgacggtgcccccggttcagggtgcggaccttccggccacgtcatggctagcgatggcgccgcaccccgtgcagggttggcatggtcaccttgcagccggcgtcagctactgtcactactccgtcctgtgcccccatccccccttccactcctggccacccatttatgtgccggcagatccctcagcctgggcccctcacaagaacctgcacctggcggggggcgcggacctagaactccagtcccaacccataagcgtcctaggtttcaaaccctgccgtcatcctgcccgctgcttcggcctgcctcttccagatgtacccctcgcgactag

SEQ ID NO: 3548 - DNA, 831 bp, synthetic construct
  misc_feature 1..831: note = source = /note="Description of Artificial Sequence: Synthetic coding sequence"
  source 1..831: mol_type = other DNA
atgcaccagcggcacccccgggcccggtgcccccccctgtgcgtggctggaatcctcgcctgcggcttcttacttggctgctggggaccttctcacttccagcagtcatgtctgcaggcacttgaacctcaggccgtgagttcctacttgagtccaggtgcgcccctgaaaggacgaccaccctctcctgggttccaaagacagcgccagagacagagacgagccgcaggcggtatcctgcatcttgagcttctggtggctgtcggacccgatgtgttccaggcccaccaggaggacacagaacggtacgttctaacgaatctcaacatcggcgccgaattgctacgtgatccctcactcggggcccaatttagggttcatcttgtgaaaatggtaattctaaccgaaccagagggagcccccaatataacagccaatctgacctctagcctgctctccgtgtgtgggtggtctcaaactattaacccagaagacgatacagatcctggccatgccgaccttgtgctgtacataacacgattcgacctggagctccctgatggaaatcgtcaggtcagaggtgttacacaactgggcggggcttgctccccgacatggtcatgtctgatcacagaggataccgggttcgatctgggagtgactatagctcacgagatcggacaccgcatctgtgcgcggccatcacccgctacccagacacgctggaccaaggcagccgctgcggctagctcctttctaagttggatggggcaaaatgtcgcttggcgctccggagctccccgggtggctgcggccccatggtggagttag

SEQ ID NO: 3549 - DNA, 4284 bp, synthetic construct
  misc_feature 1..4284: note = source = /note="Description of Artificial Sequence: Synthetic coding sequence"
  source 1..4284: mol_type = other DNA
atgcaccagcggcacccccgggcccggtgcccccccctgtgcgtggcggggatcctggcatgcggtttcctgctgggctgttggggaccaagccacttccagcagtcttgtttacaggcgttggaaccccaggccgtgagctcatacctcagtccgggggcccctctgaagggtagaccacccagtcctggctttcagagacagagacagcgacaacgccgagccgcaggggggatcctacatctggagcttctggtggccgtgggccccgatgtgttccaagcgcatcaagaggataccgagcgctacgtactgaccaatcttaatataggagcggaactgctccgggacccttcgctaggcgcacaattccgggtgcatctcgttaaaatggttatcctcaccgagcctgagggcgccccaaacatcaccgcaaatcttacaagttccctgctgtccgtatgtggttggagtcaaaccatcaatcccgaggatgacaccgacccagggcacgccgacctggtgctctatattacaaggtttgacttagaactccctgacggtaacaggcaggtgagaggcgtcacacagctcggcggagcttgctcgccgacatggagctgcctcattacagaagatactggcttcgacctgggcgtgacaatcgctcatgagattggccacagtttcggcttggagcacgatggggctccagggtctgggtgcgggcccagtgggcacgtgatggcctctgatggagccgcgccacgggccggtctggcatggtctccatgctcccgcagacagctgttgtccttactcagtgctggtagagcgcgctgtgtgtgggatccaccaagaccacagcccgggagtgctgggcaccccccggacgcacagccaggactgtactattccgctaatgaacagtgcagggtggcattcgggcccaaagcagtggcttgtaccttcgcgcgcgagcacttagacatgtgtcaagccctgtcgtgtcacaccgatccactggatcagagttcttgttcccgcttactcgtgcctttgcttgatgggactgagtgtggtgtggaaaaatggtgcagcaagggccgatgtagatcactcgtggagctgacgcctatcgcggcagtccatggaaggtggtcctcttggggacctcgtagtccttgttcgcgaagctgtggtggcggcgtggttactagaaggagacagtgcaacaatccacggccggcgtttggagggagggcatgtgttggggctgatctgcaagcggaaatgtgtaatacccaagcatgcgaaaagacccaattggagttcatgagccagcagtgtgccagaactgacggccagcctcttcgatcctcaccaggcggcgcttctttttatcattggggggcggccgttccccattctcaaggggatgccctttgcagacatatgtgtcgagctattggcgaatcctttattatgaaacgtggggatagcttcctggacggcacaagatgcatgccttccggtcctagagaggacggaacgctttccctttgcgtatcaggatcatgtagaacctttggatgcgacggaagaatggacagccaacaggtgtgggataggtgtcaggtgtgtggcggagacaattccacctgtagtccccgcaagggatctttcacggcaggccgagcacgagagtacgttacttttctaactgtgaccccaaatcttacttccgtgtacatcgctaatcaccggcctttgttcactcatttggctgttagaatcggaggaaggtacgtggtcgctgggaagatgtccatatcaccgaacaccacttacccgagcctgctggaggacggtagggtcgaatatagagtggcccttacggaggaccgcttaccccggctcgaagagattcggatatggggccccctgcaggaagatgctgatatccaggtctatcgcaggtatggcgaggagtatggtaacctcacaaggcccgatattacatttacatattttcagccaaagccgcgccaagcctgggtgtgggccgctgttagggggccttgctccgtttcatgcggggctggattaaggtgggttaactacagctgccttgaccaggccaggaaggagttggtggaaacggtgcagtgtcaaggatcgcagcagcctccagcttggcccgaggcctgcgtcctggagccctgtcctccatattgggcagttggcgactttggtccctgttccgccagttgcggcggagggttacgcgagcggcccgttagatgtgtggaggctcagggaagcctgcttaagactctgccaccagcacgatgcagagctggtgcacagcagcccgctgtggcgctcgagacatgtaatccccagccatgtccagcacggtgggaggtcagtgagcctagctcctgtacgtccgctggcggagccggcctggccttagaaaacgagacctgcgtgcctggcgccgatggattggaagctccagtaacagaaggaccaggctccgttgacgaaaagctcccggctcctgaaccatgtgtggggatgtcctgcccccccggttggggacatctcgatgctacttccgccggtgagaaagccccctccccctgggggtcaatccgcaccggggcccaagctgcgcacgtgtggacaccagcagccggcagctgctccgtgagctgcggtcgcgggctgatggagctcagatttttatgtatggattctgctctgcgtgtacccgtgcaagaagagctgtgcgggctggctagcaaacctggatcccggcgcgaggtgtgccaagcagtgccctgtcctgcaagatggcagtataaactggccgcctgctctgttagctgcggacgtggcgtggtccggaggattctgtactgtgcgcgcgcgcatggggaagatgacggcgaagaaattctgctcgacactcagtgccagggacttccccgccctgagccccaggaggcctgcagcctcgagccgtgtccacccagatggaaagtgatgtctttaggtccctgcagcgccagctgcggactaggaaccgcccggaggagtgtggcctgcgtccagctggatcaaggccaagacgtcgaggtcgacgaggccgcctgcgcagccctggtgcgaccagaggctagcgtcccttgcctaatcgccgactgtacttatcgttggcacgtcgggacttggatggaatgctcagtatcctgtggggacggcattcagagaagacgcgacacgtgtctgggccctcaggcccaagccccggtccctgcggatttttgccaacacctcccgaagcccgtcactgttcgcggttgttgggctgggccctgtgtaggccaaggtactccatccctggttccacacgaagaggccgcggcccctggtagaacaaccgcaacaccagcaggcgcctcccttgagtggagccaggcccgcggactcctgttctcacctgcccctcaacccaggaggctcctgcccggaccacaggaaaattcagttcaatcttcagcatgtggtcggcagcacctggagcctaccggcaccattgatatgcgcggccctggtcaggcggattgcgcagtcgccatcggtcggccactcggcgaggtggtgactctcagagttctggaaagcagtctcaattgcagcgccggagatatgttgctgctatggggacggctcacctggagaaagatgtgcaggaaactcctggacatgaccttctcatccaagacaaataccctagtcgtcaggcagcggtgtggtcgtcctggaggaggagtcttattacggtatggcagccaactcgccccggagacattttatcgggaatgcgacatgcagctttttgggccttggggggaaatagtgagcccatccctgtccccggcaacatctaacgccgggggatgccgactgtttattaatgtggccccccatgccagaatcgcgatacacgccctggccacgaacatgggcgccggtactgagggtgctaacgcttcatacattctcattcgcgacacccattccctccgtacgactgcctttcatggacagcaggtgctctattgggaaagcgagtcatctcaagcagagatggaatttagtgaagggtttcttaaagcccaggcaagcttaaggggccagtactggacgctgcagtcgtgggtgcccgaaatgcaagatccgcagagctggaagggcaaggaggggacttag

SEQ ID NO: 3550 - DNA, 1095 bp, synthetic construct
  misc_feature 1..1095: note = source = /note="Description of Artificial Sequence: Synthetic coding sequence"
  source 1..1095: mol_type = other DNA
atggacatgtgccaggccctgagctgccacaccgaccccctggaccagtcctcttgtagtcggttgctggtgccattgctggacgggactgaatgcggagtggagaagtggtgtagcaagggacggtgccgaagtttggtggagctgacacccattgccgcagtgcatgggcgatggtcttcctggggccctcggtctccctgctcgagaagctgtggtgggggggtcgtgacccgtagaagacagtgcaataaccccagacccgccttcggcgggagagcatgtgtcggggcggatctgcaggccgaaatgtgtaacacccaggcttgtgagaagacacagctcgagtttatgagccagcagtgcgccaggacggacgggcagcctctgaggagcagccccggcggagcaagcttctaccactggggtgccgccgtgccccacagccaaggcgacgccctctgccggcacatgtgcagagcaattggcgaaagctttattatgaaacgcggggattcttttctggatgggactcggtgcatgccatccggccctcgggaagatggtacattgtccctgtgcgtctctgggtcttgccgtacatttggatgcgatgggagaatggatagtcagcaggtctgggatcgctgccaggtgtgcggtggcgacaattctacgtgtagcccccgcaaggggagttttaccgccgggcgggctcgcgagtatgttaccttcctgacagttacccccaacctgacttctgtgtacatcgcaaaccacagacccctcttcactcatttggctgtcaggatcggcgggcggtacgtggtagcagggaaaatgagcatttcacctaacacaacgtatcccagcttactcgaggatggccgtgtggaatatagggtcgcccttactgaggacaggctgccacggctagaagagatccggatctggggccctctccaggaggatgcagacattcaagtggggggggtcagggctcaacttatgcacatcagttggtggagtcggcccggacttggtgagcgtgacctctgcgcccgcgggcgatggcccggagggtcgagtgactag

SEQ ID NO: 3551 - DNA, 1095 bp, synthetic construct
  misc_feature 1..1095: note = source = /note="Description of Artificial Sequence: Synthetic coding sequence"
  source 1..1095: mol_type = other DNA
atgccctaccagtaccccgccctgacccccgagcagaagaaggagctatccgatatagcacatcgtattgtggcacccggaaaaggcatccttgctgcggacgaatcaacggggtccattgcaaaacgattacagtctattggaaccgagaacactgaagaaaatcgtcggttctaccggcagctgctgctcacagcagacgatcgggttaacccctgtatcggcggagtgattcttttccacgagaccttatatcaaaaagccgatgacgggcgacccttcccccaggtaattaaaagcaagggcggagtggtggggatcaaggtggataaaggagtagttccactggccggaacaaacggcgagacaacaacgcaaggattagacggactgagcgaaaggtgcgctcagtataaaaaagacggcgccgactttgcaaagtggaggtgtgtgcttaaaatcggagaacacaccccttccgcgctggcaatcatggagaacgctaacgttctcgcacgttatgcctcgatctgtcagcagaatggaattgtgccaattgtggagcctgaaatcctccccgacggtgaccacgacctcaaacgatgtcagtatgtcacagagaaagttctggccgccgtgtataaagccctctctgatcaccacatctatctggaaggaacactgttgaaaccgaacatggtgactccaggccatgcctgcacacaaaagttctctcatgaggaaattgcaatggctacagtcactgctctccgccgcactgtaccccccgccgttaccggaattacctttctgtccggcgggcaaagtgaagaagaggccagcatcaatctgaatgccatcaataaatgtccattgctgaagccctgggccttgacctttagctatggcagagccctgcaggcttctgctttgaaggcatgggggggtaagaaagagaatctgaaggccgcgcaggaggagtatgttaagcgcgcactggccaatagtttggcctgccaaggcaagtacacaccctcaggccaggccggcgccgccgcaagcgagtcactcttcgtctctaatcatgcctattag

SEQ ID NO: 3552 - DNA, 1095 bp, synthetic construct
  misc_feature 1..1095: note = source = /note="Description of Artificial Sequence: Synthetic coding sequence"
  source 1..1095: mol_type = other DNA
atgccctaccagtaccccgccctgacccccgagcagaagaaggagctctctgatatcgcacatcgaatcgtcgcacctgggaaggggatcctggctgcagatgagtctaccgggtctatcgctaaaaggctccaaagtatcggaaccgagaatacggaggagaaccgacgcttctatcggcagctcttgcttacagctgatgaccgcgttaatccatgtattggcggtgttattttgttccacgagaccctgtaccaaaaagcggatgatgggaggcccttccctcaggtgattaagagcaagggcggggtggtcgggattaaagtggacaaaggcgttgtccccctggccggcacgaacggagagacaactacacagggtctcgacggtctatctgagcgctgtgctcaatataaaaaggacggagccgactttgccaaatggcggtgtgttttgaagatcggagagcacacaccatcagcactggctattatggaaaatgctaatgtcttggcaaggtacgccagcatttgccagcagaacggcatagttcctatcgtggagcctgagattctgccggacggtgatcatgatctgaaaaggtgtcagtacgtgaccgagaaggtgctggctgctgtgtacaaagcactgtcagatcatcatatctatctggagggtaccctgctcaaaccaaacatggtcaccccagggcacgcctgcacccaaaaattttcacacgaagagatagctatggctaccgtgaccgctttaagacgcactgttcctcccgctgtgactggaatcactttcctgtccggcggacagtctgaagaagaggccagcatcaatctgaatgcaatcaacaagtgccctctactgaaaccatgggctctgactttctcttatggacgagctcttcaagccagcgccctcaaagcctgggggggcaaaaaagaaaacctgaaagctgcccaggaagagtacgtcaaaagggctctggcaaatagcctcgcatgccagggcaaatacacccctagtggacaggccggggcagcggcgagcgagtctttgtttgttagcaatcacgcttattag

SEQ ID NO: 3553 - DNA, 1257 bp, synthetic construct
  misc_feature 1..1257: note = source = /note="Description of Artificial Sequence: Synthetic coding sequence"
  source 1..1257: mol_type = other DNA
atggcccggcggaagcccgagggcagcagcttcaacatgacccacttgagtatggcaatggcctttagctttcctccggtagcaagcgggcagctgcatccacaactggggaatacacagcatcagactgaattgggcaaggagctggcgacaacttccaccatgccataccagtatccagccctcacacccgaacagaagaaagaactttctgatatcgcccatcggatagtggcccctgggaaaggtattctggcggccgatgagtctaccggatccatagccaaacggttgcagtctatcgggaccgaaaacacggaggagaaccgcaggttttatcgacagctgctacttaccgctgatgatagggtgaatccgtgcattggcggagtaatattattccatgaaactctttatcagaaggcagacgatggccggcccttcccccaggtcatcaagtctaagggtggggtggtgggtatcaaggtggataagggagtggtaccactcgcaggcaccaacggcgaaactaccacccaggggctggacggattgtcagaacgctgcgcccaatataaaaaagacggtgcggactttgccaagtggagatgcgtcctaaagatcggcgaacacacaccttccgctctcgcaattatggagaatgccaatgttctcgcgcggtatgcctcgatctgtcaacagaatggcatagtacccattgtagagcctgaaatcctgccagacggagatcatgatctgaagcggtgtcaatacgtaactgagaaggtcctcgccgcggtctacaaagctctgtccgatcaccatatctacctggaaggtacgttgctgaagccaaatatggtgacaccaggccatgcatgcacccagaagttcagccatgaagagatcgccatggcgactgtcacagccttacgcagaactgttccacccgctgtcaccggaatcactttcctgtccggcggccaaagtgaagaggaggcgtccattaacctcaacgccatcaataaatgccctctgcttaagccctgggctttaaccttttcctacgggcgtgcactgcaagctagtgccctcaaggcttgggggggcaagaaggaaaatctcaaagcggcacaagaggagtacgtaaagagggcccttgccaatagcctggcatgccagggtaaatacacaccatctggtcaagccggagcggcagcatcagagagtctgttcgtatctaatcacgcctattag

SEQ ID NO: 3554 - DNA, 1095 bp, synthetic construct
  misc_feature 1..1095: note = source = /note="Description of Artificial Sequence: Synthetic coding sequence"
  source 1..1095: mol_type = other DNA
atgccctaccagtaccccgccctgacccccgagcagaagaaggagcttagtgacattgcccaccgcatcgtcgctcccggcaaaggaattctggctgccgacgagagcacaggaagtatcgccaaacggctccagtctatcggaacggaaaacaccgaggagaaccggcgattctaccgtcagttactccttacagctgacgatcgcgtaaacccctgcattgggggggtcattctttttcatgagactctttaccagaaggcggacgatggaagaccatttccccaggtaatcaaatccaaggggggagtagtgggcattaaagttgataaaggcgtagttcccctggccggcactaacggagagaccaccacccaaggattagacggtctctcagaacgctgcgcgcaatataaaaaggacggggctgattttgctaaatggcgctgtgtgctgaaaattggagagcacaccccctcagcccttgccatcatggagaacgctaacgtactcgcgcgctacgccagcatatgccagcaaaacggcatagtgccaatcgtcgagccagagattctgccagacggggaccatgacctgaaaaggtgtcagtacgtcacagagaaagttctggccgcagtctacaaagccttaagtgatcaccacatttatctagagggcacattgctgaagcccaacatggtgactccgggccacgcctgtactcagaaatttagccacgaggaaatagccatggccacagtgacggcccttcgtcgaacagttccccctgcggtgaccgggatcacattcctgagcggaggtcagtcggaagaggaagcatccatcaacctgaacgccatcaataagtgtcctcttctgaagccttgggctcttaccttctcttatgggagggcattgcaagcaagcgctctcaaagcatggggcggcaagaaggagaatctgaaagccgcccaggaggaatacgtgaagcgcgctctggcaaattctcttgcgtgccaggggaagtatactccctcgggccaagccggtgccgctgcatctgagtctctgttcgtatccaaccatgcgtattag

SEQ ID NO: 3555 - DNA, 1095 bp, synthetic construct
  misc_feature 1..1095: note = source = /note="Description of Artificial Sequence: Synthetic coding sequence"
  source 1..1095: mol_type = other DNA
atgccctaccagtaccccgccctgacccccgagcagaagaaggagcttagcgatattgcccatcgcatcgttgctcccggaaagggaattttagcagccgacgaatcaacaggaagcatcgcaaagagattacagtcgataggtactgaaaacaccgaagagaaccgtcggttttatagacagttgttgcttacggccgacgaccgcgtaaatccctgcatcggaggagtcatcctgttccacgagaccctttatcagaaggccgacgatgggcggcctttcccacaggtcatcaaaagcaaaggcggagttgttggaataaaagtagataagggggttgttccactggctgggacaaatggcgaaacaacaacccagggactagatggcctttctgagcggtgcgcccagtacaagaaagatggtgcagattttgccaaatggcgctgcgtgcttaagattggagaacatactccctctgcccttgctatcatggaaaacgccaacgtgttagctagatacgcctcaatttgccagcagaacgggatagttcccatcgttgagcctgagatactacctgatggggatcacgacctcaagagatgtcagtatgtgaccgagaaggtcctcgccgcagtctataaagccttatctgaccatcacatttaccttgagggcactttgctgaagcctaatatggtcactcccggacacgcctgcacccagaagttcagtcacgaagagattgccatggcaacagttacagctctacgccgcactgtgccacccgccgtgactggaatcacgtttctgagcggtgggcagtcagaggaggaagcctccattaatctcaacgcgattaacaagtgccccctccttaagccttgggcgctgaccttctcttatggcagagctttgcaggcaagcgctttgaaagcatggggaggcaaaaaagagaatctgaaggctgcacaggaggagtacgtgaagcgggctctggcaaactcccttgcttgtcaagggaagtatactccctctggtcaagctggcgctgccgcctcagagtcactgtttgtgagcaaccatgcctattag

SEQ ID NO: 3556 - DNA, 1257 bp, synthetic construct
  misc_feature 1..1257: note = source = /note="Description of Artificial Sequence: Synthetic coding sequence"
  source 1..1257: mol_type = other DNA
atggcccggcggaagcccgagggcagcagcttcaacatgacccacctgagcatggcgatggccttcagtttcccacccgtggcttcgggacaactgcacccccagctggggaacacccaacaccagacagaattaggcaaggaactggccaccacatcaaccatgccttatcagtaccccgcactgaccccagaacagaaaaaggagctgagcgacatagcccatagaatcgtggcccccggaaagggaatcctcgcggctgacgaatccactggatccatcgccaagcgactacaatccattggaacggagaacactgaggaaaatcggcgattttaccgacagctacttcttactgctgacgatcgcgtaaacccttgcattggaggcgttatcctgtttcatgaaacgctttaccagaaggctgacgatggtcgcccatttccgcaggtgatcaaaagtaaggggggagtggtcgggataaaagtagacaaaggcgttgtgccgctggctggcaccaatggcgagaccactacccaaggcttggacgggctcagtgagagatgcgcacagtacaagaaggatggcgccgatttcgcaaaatggcgatgcgtgctaaagatcggagagcatacgccctccgctctggctattatggagaatgctaacgtcctggcgcgctatgcgtccatttgtcagcagaatggtatcgtgcccattgtcgaaccggaaatacttccggacggtgaccacgatctgaaacggtgccagtacgttacggaaaaggtgttagcggcagtgtataaagctctgtccgatcaccacatctacttggaaggtaccctgctgaaacccaacatggtgacacctggacacgcctgtactcaaaagttttctcacgaagagatcgctatggctactgtcacagcccttcgaaggaccgtacccccagctgttaccggaataactttcttatcaggcggtcagtctgaggaagaagcctccatcaatcttaatgctataaacaagtgtcccctgttgaagccttgggcgctcacctttagttatggacgggccctgcaagcctccgcgttgaaagcctggggaggaaaaaaggagaatctgaaggcagcacaagaagagtatgtgaaacgggcactcgccaatagcctggcctgtcaaggaaaatacacgccctcaggccaggctggcgccgctgccagcgagtccctgttcgtgtcgaatcacgcgtactag

SEQ ID NO: 3557 - DNA, 1095 bp, synthetic construct
  misc_feature 1..1095: note = source = /note="Description of Artificial Sequence: Synthetic coding sequence"
  source 1..1095: mol_type = other DNA
atgccctaccagtaccccgccctgacccccgagcagaagaaggagctgagcgacatcgcacatagaattgtggctcctggtaaaggaattcttgccgccgacgagagtaccggatctattgccaagcgtctccaatccatcggaactgaaaacaccgaggagaaccgacgcttctatcggcaactgctcctcactgccgacgaccgggtgaatccctgcatagggggggtcattctttttcatgaaacactgtatcagaaggccgacgatgggcgcccattcccacaagttatcaaaagtaaaggtggtgttgtgggaattaaagttgacaagggagtcgtgccactcgcaggaaccaatggagaaacgactacccaaggccttgacgggctgtcagaaaggtgcgcccagtacaaaaaagatggcgccgatttcgccaagtggaggtgtgtgctgaagatcggggagcacacgccatcagcgctcgccattatggagaatgcgaatgtgctagctcgatacgcttctatctgccagcaaaatggcatcgtgcccatcgtcgaacctgagatcctgcccgacggggaccacgacttaaagaggtgtcagtatgtaacagaaaaagtcctcgccgccgtgtacaaagcactgtctgatcatcatatctatttggagggtacacttctcaagcctaacatggtcacacccggtcacgcttgcacgcagaagttttcccatgaagagattgccatggctaccgtgactgccctgaggagaactgtcccccccgccgtgactgggattactttcttgagcggaggccagtccgaggaagaagcctcaattaatctgaacgctataaacaagtgcccactcctgaagccctgggccctaacctttagctatggccgcgcattgcaggcctccgctctcaaggcctggggcggaaagaaggagaatctgaaagctgcgcaagaggaatatgttaagagggccctagcaaattctctggcatgccaagggaaatacacaccatcggggcaggctggcgcggcagcgtctgagagcctttttgtttcaaatcacgcttattag

SEQ ID NO: 3558 - DNA, 1344 bp, synthetic construct
  misc_feature 1..1344: note = source = /note="Description of Artificial Sequence: Synthetic coding sequence"
  source 1..1344: mol_type = other DNA
atgagcgccagcaagatccccctgttcaagatgaaggacctgatcttgatcttgtgtctgctcgagatgtctttcgccgtacctttcttcccgcagcagtccggcacgcctggcatggcgagcttatctcttgagaccatgcggcagctggggtctctgcaacggctgaataccctttctcaatattcccgctatgggtttggaaagtcttttaactctttatggatgcacggccttctccctcctcacagttctctgccatggatgaggccaagagaacacgaaactcagcagtacgaatattccctccccgtgcatccaccacccctgccaagtcagccaagtctgaaaccgcagcaaccagggcttaagcccttcttacagtcagcagcggccacaaccaaccaggcaactgcgctgaaggaagccctgcagccgcccatacacctcggccatctgccgctgcaggaaggggaacttccacttgtgcagcaacaggtggcgcctagtgataagcctccaaagccggaattacctggggttgattttgccgaccctcaggggccgagtttaccgggaatggattttcctgatccccagggcccctcactacccggcttggatttcgcagaccctcagggatcgaccatcttccaaattgcgagactcattagccacggccccatgccccaaaacaagcagagtccactttatcctggtatgctctacgtgcctttcggggccaaccagttgaacgcccccgctagactcggcataatgagctctgaggaggtggcaggaggcagggaggacccgatggcctacggagccatgttccctggcttcggcgggatgcgcccgggattcgaaggtatgcctcataacccagctatggggggagacttcacgctggaattcgatagtcccgttgctgccactaagggccctgaaaacgaagagggtggcgcccaaggttcccccatgcctgaggcaaatccagacaacctggaaaatccggccttcctcacagagctggaaccggcaccacacgccggcctcctagcacttccaaaagatgatatcccagggctgcctcggtctccctctggcaaaatgaaagggctcccctccgtgactcctgcagccgccgacccgctgatgactcccgagctcgccgacgtgtaccggacatatgacgctgacatgactaccagcgtggattttcaggaagaggcaaccatggacacgaccatggcccctaacagtctgcagacctctatgcccggcaacaaggctcaggaacctgaaatgatgcatgacgcgtggcattttcaggagccctag

SEQ ID NO: 3559 - DNA, 1299 bp, synthetic construct
  misc_feature 1..1299: note = source = /note="Description of Artificial Sequence: Synthetic coding sequence"
  source 1..1299: mol_type = other DNA
atgagcgccagcaagatccccctgttcaagatgaaggacctgatcctcatcctctgccttttagaaatgtccttcgcagtgccgttttttcctcagcagtcgggtacccccggcatggcttcactgtctctggaaacaatgaggcagctgggctccctccagagattgaataccctatcccagtattcgagatacggctttgggaagagctttaacagcctctggatgcatggactcctccccccgcattcatccctgccttggatgcgaccccgcgagcatgagacacagcagccgagcctgaaacctcaacagcccgggcttaaacctttcctccagtccgctgctgcaacgacgaaccaggccaccgccttgaaggaagctctgcagcctcccatccacctgggtcacctgccgctgcaggagggggagcttccattggtccaacagcaggttgcccccagtgacaaacctcctaagcccgaactccctggtgtcgactttgcggatccacaggggccttccctgcccggcatggacttccctgatccgcaaggccccagtctgccaggcctggatttcgcagatccccaaggctctaccatcttccagatcgcccgtctgatcagccacgggccaatgccacaaaacaaacaaagcccactatatcctggtatgttgtacgtcccctttggagctaaccagctgaacgcgcctgcccgactgggaataatgtcctccgaggaggtggccggcggccgcgaggaccccatggcatatggggccatgttcccagggttcgggggaatgcgtcccgggttcgaggggatgccccacaaccctgctatgggaggagatttcaccctcgagttcgactcaccagtggccgccaccaaaggtcctgagaatgaggaggggggtgcccaaggctccccgatgcccgaggcaaaccccgacaacctcgaaaatccagcctttctcacagagctcgaacctgctcctcatgcggggctattagctttacccaaggatgacattcctgggctgccaaggagtccttccggaaagatgaaagggctgccctccgtcaccccagccgctgccgacccactcatgactcccgagctggcagacgtgtacaggacttatgacgctgacatgaccacctccgttgacttccaggaagaggcaaccatggacaccacaatggctcctaattcactacagacctcgatgccaggcaataaggcgcaggagccggagatgatgcatgatgcttggcatttccaggagccttag

SEQ ID NO: 3560 - DNA, 1341 bp, synthetic construct
  misc_feature 1..1341: note = source = /note="Description of Artificial Sequence: Synthetic coding sequence"
  source 1..1341: mol_type = other DNA
atgagcgccagcaagatccccctgttcaagatgaaggacctgatcctgatcctgtgcctactggagatgagtttcgcggtacccttttttccccagcagtcaggcacccctggcatggcctccttatcacttgagactatgcggcagctggggtcattgcaacgcctgaacaccctctctcaatacagccgttatggcttcggcaagtctttcaacagtctgtggatgcatggcttgttacccccacacagttccctgccctggatgagacctcgtgagcacgaaacccaacagtatgagtattctctgcctgtgcacccaccccccttgccgagtcaacctagtctgaagccgcagcagcccgggctcaagccattcctgcagagcgcggcagctactactaatcaagctactgcccttaaggaagccctgcagcctcctatccacctgggtcatctgcctctccaagaaggcgagctgcccctggtgcaacagcaagtggccccttcagacaagccaccaaagcctgaacttagagtagattttgccgatccacagggtcctagtttacctggcatggatttcccagacccacagggcccttctcttcccggtctagacttcgccgacccacagggctcgactatatttcagatcgcaagacttatcagccatggtcctatgccacagaacaagcagtcaccactgtatcccggcatgctctatgtaccgttcggggctaatcagcttaacgcgccagcccgcctcgggatcatgtccagcgaagaggttgccggaggtagagaggaccctatggcatacggagccatgtttcctggctttggtggtatgcgtcccggtttcgaaggcatgccacacaatcctgcaatgggaggcgattttacattggagtttgatagtcccgtcgccgccaccaaaggtcctgagaacgaggagggtggcgcacagggtagccccatgccggaggcaaatccagacaacctggaaaatcccgctttcctcactgaactcgagcctgcaccccatgcaggcctactggcactgcccaaagacgatattccaggactgccccggtccccgtccggcaaaatgaaaggacttccgtcagtgacacctgccgccgcagaccccctcatgaccccggagctagccgacgtgtacagaacttatgacgcggatatgacgacatctgtggatttccaagaggaggcaactatggacaccacaatggctccaaactccctgcagacatccatgccaggtaataaggcacaggagcccgaaatgatgcacgatgcgtggcactttcaagaaccctag

SEQ ID NO: 3561 - DNA, 528 bp, synthetic construct
  misc_feature 1..528: note = source = /note="Description of Artificial Sequence: Synthetic coding sequence"
  source 1..528: mol_type = other DNA
atgggcacctggatcctgttcgcctgcctgctgggcgccgccttcgcgatgcccgtgctcactcccctgaaatggtatcagtccatccgcccaccctacccgagctacggctacgaacccatgggtgggtggctgcaccaccagatcattccagtcttgtctcaacagcatccacccactcatacattgcagcctcaccatcatatcccggtggtccccgctcaacaacctgtaattccccagcagcctatgatgcctgttccgggtcagcattccatgacgccgattcagcaccaccagcctaaccttccgcctcccgcccaacaaccctaccagccgcaacccgtccaaccgcagcctcaccagccaatgcagccgcaacctcctgtgcatccaatgcagcctttacctccccaaccccctctgccccctatgttcccaatgcagccactgccccctatgttgccggatcttacactggaggcctggccctccactgataagaccaaaagggaggaagtcgactag

SEQ ID NO: 3562 - DNA, 618 bp, synthetic construct
  misc_feature 1..618: note = source = /note="Description of Artificial Sequence: Synthetic coding sequence"
  source 1..618: mol_type = other DNA
atgggcacctggatcctgttcgcctgcctgctgggcgccgccttcgcaatgcctctgccgccacacccaggtcatccagggtacatcaattttagctatgagaattcacactcacaggccattaacgtggacaggaccgcactggtactcacccctctgaagtggtatcagagtatccgcccaccttatcctagttatggttatgagccgatgggagggtggctacaccatcagatcatacctgtactgtcccagcagcaccccccaacccacaccctccaaccacaccaccacatccctgttgtgcccgcccagcaacccgtgattccccagcagcctatgatgcctgtgccaggccagcacagcatgaccccgatacagcatcaccagcccaatttacctccacccgcacagcagccctatcagccccagcccgtgcaaccgcagcctcatcagccaatgcagcctcaaccgccagttcaccccatgcaacctctgcctccacagccacctcttccacccatgttccccatgcagcctcttcctcccatgctgccagatctgacacttgaagcatggccttccactgataaaactaagcgggaggaggtggattag

SEQ ID NO: 3563 - DNA, 576 bp, synthetic construct
  misc_feature 1..576: note = source = /note="Description of Artificial Sequence: Synthetic coding sequence"
  source 1..576: mol_type = other DNA
atgggcacctggatcctgttcgcctgcctgctgggcgccgccttcgccatgccactgcctcctcatccgggccatcccggctacattaacttttcttacgaggtgctgaccccattgaaatggtatcagtctatacgccccccgtacccatcatatggctatgaacccatgggcggatggctccatcaccagattattcctgtgctgtcacaacagcatcctcctacgcacacgctccagccacatcatcatatcccggtcgtgcccgcccagcagcctgtgattccccagcagcctatgatgccagtgccgggtcagcatagcatgacgccaatccagcatcatcagcccaatttacctcctcctgcccaacagccttaccaaccgcagcccgtacagccacagccgcaccagcccatgcaaccccagccccccgtccaccctatgcagcctctcccgccacagccaccgctcccacctatgtttcccatgcagccgttacctcccatgctgcccgacctcactctggaggcatggcccagcacagacaagacaaagagagaagaagtcgactag

SEQ ID NO: 3564 - DNA, 4023 bp, synthetic construct
  misc_feature 1..4023: note = source = /note="Description of Artificial Sequence: Synthetic coding sequence"
  source 1..4023: mol_type = other DNA
atgttccgggtgggcttcctgatcatcagcagcagcagcagcctgtcacccctgctgctggtttcagtcgtgagggttaacacaacgaattgtcacaagtgtttgctcagcggtacttacattttcgccgttctgcttgtgtgcgtggtttttcacagcggagcgcaagaaaagaattacacaattagagaggagatacccgaaaacgtgctgataggtaatctcctgaaagacctgaacctatccttgatccctaacaagagcctgaccacaacaatgcagtttaaactggtttataaaaccggggacgtacccttgatcaggatcgaggaagacactggcgagatcttcacgacaggagccagaatcgatcgggaaaaactgtgtgccggtatcccgcgtgacgaacactgtttctacgaagtcgaagtggctatcctaccagacgagatttttagattagtcaaaatccgcttccttatcgaggacattaacgataatgcacccttgttcccagctactgtgataaacattagcatccctgagaattccgccatcaattctaaatacaccctgcccgcagcagtcgaccccgacgttggcattaacggcgtccaaaactacgaactgattaaatcccagaatatctttggtttagatgtcatcgagaccccagaaggggacaagatgccccagctgatcgtgcagaaggaactcgaccgggaagaaaaggacacttacgtaatgaaggtgaaggtggaagacggaggttttccacagcgtagcagcacagccatcttgcaagtctctgtgaccgacaccaacgacaaccatcccgtgttcaaggagaccgaaatcgaagtgagtatcccagaaaacgctccagtcggtactagtgtcactcagcttcatgccaccgatgctgacataggggagaatgccaagatccacttttcatttagtaacctggtttcaaacatcgcaaggaggttatttcacctcaatgcaacaaccggccttattaccataaaggagcctttggaccgggaggaaacaccgaatcataagctcttggtgctcgcctccgacggaggccttatgcctgctcgggcaatggtgttagtgaacgtgactgatgtgaacgacaacgtgccatcaatagatatcaggtacattgtaaaccccgtcaacgatactgtcgtgctatcagaaaatatacctctcaataccaagatcgctctgattaccgtgaccgacaaggatgctgaccataacggacgcgtgacttgctttactgaccacgagataccatttcggctgcgaccagtcttcagcaaccaattcctgctggagaatgctgcgtatcttgactatgagtctaccaaagaatatgctattaaattgttagccgcggacgccggaaagccccccctcaatcagtcagcaatgctgttcattaaggtcaaagacgaaaacgataatgcccctgtgtttactcaatcctttgtaacggtcagtattcctgagaataatagtccaggtatccaactgatgaaggtgtctgcgactgatgcagattcgggccctaacgcagagataaactacctgcttggccctgacgcgccgcccgagttctctctagacaggagaaccgggatgcttactgtcgtgaagaagctggacagagaaaaggaggataaatacctgtttaccattttggctaaagacaacggcgtccctcccctgacctctaacgtcacagtattcgtgagtattatagatcagaatgacaatagtcccgtgttcacccacaacgaatataagttttatgtcccggagaacctgccgcgacatgggacggtgggtctgataaccgttacagatcccgactacggggacaatagcgccgtgactctttctattttagatgaaaacgatgacttcacaatcgacagccagacaggcgttattaggcccaatatcagtttcgaccgggagaaacaggagtcatacaccttctacgttaaggccgaggacggtggtagggtatcacggtcttccagcgccaaagtcaccattaacgtggtggacgtgaatgacaacaaacctgtcttcatcgttccaccatataattacagctacgaactcgtgctaccttccacaaatcctggaaccgtggtgttccaagttattgccgtggataatgacacaggaatgaacgcagaggttcggtactcaattgtgggcggaaatacccgggatctgtttgctatcgaccaggagactgggaacataaccctcatggagaaatgtgatgtgactgacctcgggctgcatagagttctggtcaaagccaacgatttaggacagcctgactcactctttagtgtggtaattgtcaatctcttcgtgaacgagtctgtaacaaacgccacattgattaacgaactggtgaggaagagtattgaagctcccgttacaccaaatacagagattgccgatgtttcatcaccaacatccgattacgtgaagatcctggtcgctgccgttgccgggaccattaccgtcgtcgtggtgatctttattaccgctgtggtgcgttgcaggcaggctcctcaccttaaggccgcccaaaagaacatgcagaactcagaatgggctaccccaaatccagagaacagacaaatgataatgatgaagaaaaaaaagaaaaaaaagaagcattcaccaaagaatctgctgttgaatgtcgtaacaatcgaagagaccaaagctgatgacgtggactcagacggcaatagagtaactctggacctgcctatcgatctcgaagaacagacaatggggaagtacaattgggttaccacccctaccacttttaagcctgactctccagatctggcgcggcactacaaatccgcgtcacctcagccagcgtttcagatccagcctgaaacccccctgaatctgaaacatcacataattcaggagcttcccttggacaatactttcgtggcctgtgatagtatttcaaactgcagttcatcatctagtgacccttactccgtgagcgattgcggctaccctgtgactacgtttgaggtgcctgtctctgttcacacccggcccagtcaaagacgcgtcacgttccaccttccggaaggcagccaagagagtagctccgatgggggcttgggcgatcacgatgccggtagtctgaccagcactagtcatggactgcccctcgggtacccccaggaggagtattttgatagggccacaccaagtaacagaacagagggagacgggaactctgacccagaaagcaactttatttccggcatgagggagaagattactgtccagccaaccgtggaagaggcatcagataactgtactcaggagtgtctaatatatggccacagcgacgcttgttggatgccggccagtctggaccactcgtcttcctcacaggcacaggcatctgccttatgccattctcccccactgtcgcaggctagcacacaacatcacagccctccagtgacacagacgatcgtcctttgccattcccctcctgtcacacagaccatcgccctttgtcactctccgcctccaatccaggtcagcgccctgcatcactcccctccgctggtgcaagggacagccttgcatcattctccaccatcagcccaagctagtgccctgtgttacagtcctccgttggctcaggccgctgcgatttcccacagctcctcattgccacaggtcatcgccctccacagatcgcaagctcagtccagtgtttcactacagcaggggtgggtgcagggcgctaacggactgtgttctgtcgaccaaggagttcaaggtagtgcaacttcacagttttacacaatgagtgagcggctgcaccccagtgacgatagcatcaaggtgatcccccttacaacattcgcacctaggcagcaggcccgaccttcacgcggagacagtccaattatggaaacccatccactctag

SEQ ID NO: 3565 - DNA, 621 bp, synthetic construct
  misc_feature 1..621: note = source = /note="Description of Artificial Sequence: Synthetic coding sequence"
  source 1..621: mol_type = other DNA
atgggcacctggatcctgttcgcctgcctggtgggcgccgccttcgccatgcccctgccaccccaccccggtcaccctggatacatcaacttcagttatgagaattcccattcccaagccattaacgtagatagaatcgctctggtgctaacccctctgaaatggtatcagagcatgattcgccctccctactcttcatatggctatgaacctatgggcggttggctacatcaccagatcatcccagttgtgagtcaacaacaccctttgacgcataccctgcagagccaccatcacattccggtcgtgccagcgcagcagccccgggtgcgtcaacaggccctaatgccggtcccaggtcagcaaagcatgacccccacccaacatcatcagcctaatctaccattgccggcacagcagcctttccagccgcaaccggtccagccccaaccccatcagcctatgcagccacagccaccggttcaacccatgcaaccgcttcttccccagccccctctcccgcccatgttccccctccgtccactgccacctatcctccccgacttgcaccttgaggcctggcctgccacggacaaaacaaaacaggaggaagtggattag

SEQ ID NO: 3566 - DNA, 618 bp, synthetic construct
  misc_feature 1..618: note = source = /note="Description of Artificial Sequence: Synthetic coding sequence"
  source 1..618: mol_type = other DNA
atgggcacctggatcctgttcgcctgcctggtgggcgccgccttcgctatgcccctgccaccacacccgggacacccgggttacatcaatttttcttacgagaattcccacagtcaggccatcaacgtcgatagaatcgccctagttctcactcctctgaagtggtaccagtctatgattaggcctccttactcatcctacgggtatgagcccatgggtggctggctgcaccatcaaattattccagttgtgtcacagcagcaccccttaacccataccctgcaatcccatcaccatatccctgtggtgcccgcacagcagcccagagttaggcagcaggccctgatgcctgtgccaggccagcagtctatgactccgactcaacatcaccagccaaacttaccactgcccgcccagcagccctttcagcctcagcctgtgcagccccagccgcatcagcccatgcaaccccaaccccctgtccagcccatgcagcctctgttaccacagccccctctaccgccaatgttcccgctgaggccgcttcctcctatattgcctgatctccatctggaggcctggccagccaccgataagacaaagcaggaagaggtctag

SEQ ID NO: 3567 - DNA, 4599 bp, synthetic construct
  misc_feature 1..4599: note = source = /note="Description of Artificial Sequence: Synthetic coding sequence"
  source 1..4599: mol_type = other DNA
atgggccacagcaagcagatccggatcctgctgctgaacgagatggaaaagctggaaaagaccctcttcaggctggagcagggctacgaactgcagtttagactcgggccgaccctgcaggggaaagcagtcacagtgtacaccaattatccatttcccggtgaaacttttaaccgtgaaaagttccgttcgctggactgggagaatccgactgaacgggaagatgacagcgacaagtactgcaagctaaacctacaacagtctgggtcctttcagtattactttctccaggggaatgagaaatctggcgggggatatattgtggtggatccaatcttgcgggtgggagccgacaatcacgtgctgccccttgattgtgtgactctccaaactttcttggccaaatgcctggggcctttcgacgagtgggagtccaggctccgagtcgctaaagagagcggctataacatgatccacttcacaccactgcagactctgggtttgagtcgatcatgttacagtctggcgaaccaactggaactaaacccagacttcagtcgccccaatagaaagtatacttggaacgatgtaggccagctggtcgagaaactgaaaaaggagtggaatgtgatttgcataacagacgtcgtgtataaccatacggccgcaaatagtaagtggatccaggagcaccctgagtgtgcatacaaccttgtcaattccccacatctgaagcccgcatgggtgctggatcgtgccctctggagatttagttgtgatgtagcggaaggaaagtacaaagaaaaggggattcccgcactgatcgagaatgatcaccacatgaactcgattagaaaaattatctgggaggatatctttccgaagctgaaactgtgggaatttttccaggtcgacgtgaataaagcggtagagcagtttagaagactgctgacgcaggagaaccggagagtcaccaaatccgatcctaatcaacacctcaccattatccaggatcccgagtatcgccgattcgggtgtacagtggacatgaatatcgccctgaccacctttataccccatgataagggccccgccgccattgaagagtgttgtaactggtttcataaaaggatggaggagctgaatagcgagaagcatcgactaattaattatcaccaagaacaggcagtgaactgcttgctcggtaacgtgttctacgaaagactggccggccacgggcctaagctcggacctgttaccagaaaacatcccctggtcactaggtatttcaccttcccttttgaagagatcgattttagtatggaagagtccatgatccacttgcccaacaaggcatgctttcttatggctcacaatgggtgggtgatgggcgatgacccgctgcggaatttcgccgagccaggcagcgaggtatacctgcggcgggagcttatctgctggggagactcagttaaactgcgctacggcaacaagcccgaggattgtccctatctgtgggctcacatgaagaaatataccgaaataactgccacctatttccagggcgttcgcttggataattgtcactctacccccctgcacgtggccgagtatatgcttgatgcggcccgcaacctgcagccgaatctgtacgtcgtagccgaactttttacaggaagcgaagacttggacaatgttttcgtcactagactgggtatatcaagtctgatccgagaagctatgagcgcctacaacagccatgaggagggtcgactcgtttatcggtacggcggggaacccgtgggatcatttgtccagccatgtcttaggccgctgatgcctgcgatagcccatgccctgttcatggatattacccatgacaatgagtgcccaatcgtacacagaagcgcgtatgatgcgttaccgagcaccaccatcgtgagtatggcctgttgtgcgagcggtagtacccgtgggtacgatgaattagtgccgcatcagatttcggtggtgtcagaagaaaggttctatactaagtggaaccccgaggccctgccctctaacaccggagaggtgaacttccagagtgggataatcgcagccaggtgcgctattagcaaactccaccaggaactgggagccaaaggcttcattcaggtgtatgtggaccaggtggacgaggatatcgtcgctgtcacacgacatagcccctctatccatcagtccgtagtggctgttagccgcacggcctttaggaatcctaagacatcgttctacagcaaagaagtgcctcagatgtgcatcccagggaagatcgaagaggtggtcctggaggcacgtaccatcgagcgtaacactaaaccctacaggaaggatgagaactccatcaacggcacccctgatatcaccgttgaaatccgagaacacatccaactgaatgagagtaaaattgtcaagcaagcgggggtcgcgaccaaggggccaaatgagtatattcaggagattgagttcgaaaatctgagccccggctcagtgatcatcttccgcgtgtctctggatcctcacgcacaagtggccgtcggaatcctaaggaaccacctgactcaattcagtccacattttaaaagcggtagcttggcggtggataacgccgacccaatcctgaagattcctttcgccagtctggctagcagactcaccttggccgagttgaatcagattctttaccgctgtgaatccgaagaaaaggaggacggtggcggctgctacgatatccccaactggagtgcgctcaaatacgcagggctccagggcctcatgtcagtattggccgagatcaggcctaagaatgatctggggcaccccttctgcaataacttgcggtcaggcgactggatgattgactatgtgtctaacagacttatctctagaagcggcacaatagctgaggtggggaaatggctgcaggccatgtttttctatctgaaacaaatcccccgctaccttattccatgctattttgacgctatccttatcggagcgtacaccaccctgctcgacacagcttggaagcagatgagctcgtttgtccagaatggctcaactttcgtaaagcatctcagcctcggatccgtccagttgtgtggtgtggggaaattcccttcgctgccaatcctgagccctgctctgatggatgtaccgtaccgactaaatgaaattactaaggaaaaagaacagtgttgtgtcagccttgccgcaggcctgcctcacttctcatccggtattttcagatgctgggggagggacactttcatcgctctgcgaggcatcctcctgataacaggaaggtacgtggaggctaggaatatcattctggccttcgccgggactctacgtcatggcctgatcccaaatctgttgggggagggcatttatgcaagatacaactgccgagacgcggtgtggtggtggttgcagtgcatacaggattactgtaaaatggtgcccaatggtctcgatatacttaagtgtccggtgagcagaatgtatcccactgacgatagtgcgcctctgcctgccggaactcttgatcagcctcttttcgaggtgatccaggaagcaatgcagaaacacatgcagggcattcaattcagggaacgaaatgccgggccacagatcgatcgtaatatgaaagacgagggctttaacattaccgcaggtgtggacgaggagacaggatttgtttacggaggcaacagatttaactgcgggacgtggatggacaagatgggcgaaagcgatagagcccgcaaccgtgggatccccgcaaccccaagggatggatcggcggtggaaatagtcggccttagtaaatcggccgttcgatggttacttgagttatctaaaaagaacatcttcccatatcatgaagtgaccgtgaaacgacatggaaaagcaatcaaggtttcttacgacgaatggaaccgaaagatccaggataacttcgaaaaactgttccacgtgagcgaggatccctccgatctgaatgaaaagcatcccaatttagtacataaacggggaatctataaagacagttacggtgcctcgtctccttggtgtgattaccagctgcgacccaattttacgattgcgatggtggtggctcctgagttgttcacgacagagaaagcttggaaggctttagagatcgcagagaaaaaactgctggggcccttagggatgaagactctggaccccgatgatatggtgtattgcgggatttatgacaacgcgctcgacaacgacaactataacttggccaagggcttcaactaccaccaagggccagaatggctctggcccataggctactttctgcgcgccaagctgtatttcagccgtctgatgggccccgaaaccacagctaagactatcgttcttgtgaagaacgtgctgtctcggcactatgtccatcttgaacgctcaccatggaagggtttgccggaactgacaaacgagaacgcacagtactgccctttttcttgcgaaactcaggcctggagcattgctactattctagagactctctacgacttgtag

SEQ ID NO: 3568 - DNA, 4551 bp, synthetic construct
  misc_feature 1..4551: note = source = /note="Description of Artificial Sequence: Synthetic coding sequence"
  source 1..4551: mol_type = other DNA
atggcccccatcctgagcatcaacctgttcatcggctacgagctgcagttccgtctcgggcctaccctacaaggtaaagccgtgactgtttacacaaactaccccttccctggcgaaacatttaacagggaaaagttccgctcacttgattgggagaatccgacagaaagagaggatgattccgataaatactgtaagctgaatctacagcagtctggatccttccaatactactttcttcagggcaatgagaaaagcggaggcggctacatcgtggtggaccccattctgagggtgggcgccgataaccatgtgctcccccttgattgcgtcacactgcagacctttctggcaaaatgtctgggaccttttgacgaatgggaatctcggctgcgcgtcgctaaagaatctggatataatatgattcatttcacgcctctacaaacgctcggactctctaggagttgttacagcctagcaaaccagctggagctgaaccccgattttagccgccccaaccgcaagtacacttggaatgacgttggccagctggttgagaagttaaaaaaagaatggaacgtgatctgcatcacggacgtggtctataatcatactgccgccaacagcaaatggatacaggagcatccagagtgcgcctacaatttggtaaattcacctcatttgaagcctgcttgggtgctggaccgggccttatggcgatttagctgtgacgtagctgagggaaagtacaaggaaaaaggcattccagcccttatagagaatgaccaccatatgaactcaatcagaaagatcatctgggaggatattttccctaagctgaagctgtgggaattctttcaggtggatgtgaacaaggccgtcgaacaattccgccgtcttttgacacaggaaaaccggcgagtcactaagtcagacccaaatcagcatctcacaattattcaggaccctgaatatagacgctttggctgcacggtggatatgaacatcgccctgactacgttcatcccacatgataaaggacccgctgccattgaagaatgttgtaattggtttcataaaaggatggaggaattaaattctgaaaaacatcgtctgataaattaccatcaggaacaggccgtgaactgtctcttagggaacgtattctatgagcgcctcgccggacatgggcctaaacttggtcccgtaacccggaagcatcctctcgtgactaggtatttcacattcccctttgaggaaatcgatttctcaatggaggagagtatgatacatcttccaaataaggcatgctttctgatggcccacaatgggtgggtcatgggagacgacccactacggaacttcgcagaacccggcagcgaagtctatctgaggcgggagctcatttgctggggagactctgtcaagctgagatacggcaacaagccagaagattgcccttacctttgggcacacatgaagaagtatactgagatcacagctacttatttccagggcgtgcgccttgataactgccacagcactcccctccatgttgctgaatatatgctggacgctgctcggaacctgcagcccaacctctacgtagtggcagagttattcacgggctctgaggatttagataatgtttttgtcacacgcctgggtatctccagcctcattcgagaagcaatgtcagcttacaactcacatgaggaaggccgcctggtgtatcgctatggaggggaacccgtaggctcttttgtccagccatgcctgaggcccctgatgcctgcgattgcccatgcactattcatggatataacccacgacaacgagtgccctatcgttcatcgatctgcctacgacgccctaccttccacaaccatcgtaagtatggcttgttgtgcttcgggatcaacacgtggatacgacgagctggtaccccatcagatttctgtggtcagcgaggagaggttttacaccaagtggaacccggaggccttgccaagcaatactggagaggtgaactttcagagtgggataatcgctgctcggtgcgcgatttccaagctgcaccaggagctgggggcaaaggggttcatacaggtgtatgtagaccaggtcgacgaggatattgtggccgttacgcggcactccccaagcatccatcagagtgtcgtggcagtgagcagaaccgcgtttcgtaacccaaaaaccagcttttactcaaaagaagtgccccaaatgtgcattcctggcaaaatcgaggaagttgtgctcgaagcacggaccatcgaacggaatactaagccttatcggaaggacgaaaactccatcaacggcacaccggacataacagtcgagatccgagaacacattcagctgaacgagtcaaagatcgtgaagcaggccggcgtcgccaccaagggccccaacgagtacatccaggagatcgaattcgaaaatttatcccccggcagcgtaattatattcagagtctcccttgatccacacgcccaggtggctgtggggatactgcgcaaccatctaacccaatttagtcctcattttaaatccggtagtttagctgttgacaacgccgatcccatactcaaaatcccctttgcctccctggcatccagactgactctggctgaactgaatcagatcctctatcggtgcgaatcagaagaaaaagaggatggtggtggttgttacgatatccccaattggtctgccttgaaatatgctggtctacagggtctaatgtctgtcctggccgaaatccgaccaaagaatgacctggggcaccctttttgcaataacctgcggtccggcgactggatgatagattacgtctctaaccggctgatcagtcggtctggtacgattgcggaagtcggcaaatggttgcaggcaatgttcttctaccttaaacagattcctcggtacctcattccgtgctatttcgacgccatcctcataggtgcctacaccactttactggacaccgcatggaagcagatgtcttcttttgtgcagaacggctccacctttgtgaaacacctgtcattagggtccgtgcaactgtgtggagtggggaagttcccatctctccccatactgagcccggccctcatggacgtaccgtatcgtttgaatgagatcacgaaagaaaaggaacagtgctgcgttagtctggccgcaggcttacctcactttagctccggaatcttccggtgttggggtagggatacatttatcgctctccggggcatactgctcattactggtcgctatgtggaggccagaaacattattctagcatttgcgggaaccctgcgccatggactcatcccgaacctattaggtgagggaatctacgcccgctataattgccgagatgctgtgtggtggtggctgcaatgcatccaggattattgtaagatggtgcctaacggtctagacattcttaagtgcccggttagccgaatgtatcccacggatgacagtgcccccctgcctgctggaaccttagaccaaccactattcgaagttatccaggaagcgatgcaaaagcacatgcagggaatacagttccgggagagaaacgcgggccctcagatcgatcgcaatatgaaggatgaggggtttaatattacggctggggtcgatgaggaaactgggttcgtgtatggaggcaataggttcaactgtggaacatggatggacaagatgggtgagtctgatagggcccggaatcgaggcattcccgctacccctagagacggatcggccgtggagattgtcggcctgtctaagtccgccgtccgctggctccttgaattgtctaagaagaatatcttcccctaccacgaggtgaccgttaaacgtcacggaaaggccatcaaggtttcctacgacgagtggaatcgtaaaatccaggacaacttcgagaagctgttccatgtgagtgaagatccaagcgatttgaacgagaagcatccaaacctggttcacaagcgcggcatatataaggactcatacggagcttctagcccatggtgtgactatcagctgcggccaaactttactattgctatggtagtggcacccgaactgtttacaaccgaaaaagcatggaaggcccttgagatagcagagaagaaacttttggggccattgggtatgaagactctggacccagacgacatggtgtactgcggaatttacgacaatgccctcgataacgataattataatttggccaaggggttcaactaccaccaaggaccggagtggctgtggccaatcggctacttcctgagagcgaaactgtatttctcgcggctcatgggaccggagacaaccgcaaaaactatcgttctcgtcaagaatgttctgagtcgccactacgtccacctggagcgcagtccctggaagggattgccagagctgaccaatgagaacgcccaatactgccctttttcttgtgaaacccaggcttggagcattgctaccatcctggaaactctctacgacctgtag

SEQ ID NO: 3569 - DNA, 4548 bp, synthetic construct
  misc_feature 1..4548: note = source = /note="Description of Artificial Sequence: Synthetic coding sequence"
  source 1..4548: mol_type = other DNA
atgagcctgctgacctgcgccttctacctgggctacgagctgcagtttcgcctgggtccaacgttgcagggcaaggccgtcactgtatacacgaattacccatttcctggagaaactttcaaccgggagaagtttcgtagtctggattgggaaaaccccacagaaagggaagatgattctgacaagtattgcaagctgaaccttcaacagagcggaagtttccagtattactttcttcaagggaacgagaagtcaggtggaggttatattgtggtggatcccatattgcgggtgggggcggacaaccatgtgttgcccctggactgcgtaactcttcagacatttcttgctaagtgcctaggcccatttgatgaatgggagtccaggcttagggtcgctaaggagtctggctacaatatgattcactttaccccactccaaaccctggggctttcccgcagttgttatagcctggccaaccaattggagcttaacccagatttctctcggcctaatcgcaagtacacatggaacgacgtgggccagttagtggagaaactcaaaaaagagtggaacgtaatatgtatcaccgatgttgtgtataaccacaccgcagcaaattcaaagtggatccaggaacaccctgaatgtgcttataatttggtgaactcaccccacctgaagccagcctgggttctggacagggcactgtggaggttcagttgcgacgtggctgagggtaagtataaagagaagggcatcccagcgctgatcgaaaacgaccaccacatgaactcaatccggaaaatcatctgggaggatatctttcctaaattaaagctgtgggaatttttccaggtggatgtgaacaaagccgtggagcagtttagacggctgctaacgcaagaaaatcgcagagtgactaagtctgaccctaaccagcatctgaccatcatacaagatcccgagtacagacgtttcggatgtactgttgacatgaatatcgccctgacaacgttcatcccccacgataagggtccagccgccatagaggaatgctgcaactggtttcacaaaagaatggaagagttaaactcagaaaaacataggcttattaactatcaccaggagcaagccgtcaactgcctcctgggcaatgtgttctacgaaagactcgccggccacggccctaaacttggaccagttacacgcaaacaccccctagtgacacggtacttcacttttccattcgaagagatcgacttcagcatggaggagtccatgatccaccttccgaataaagcgtgcttcctgatggcccataacgggtgggtcatgggtgatgatcctctgcggaattttgctgagcctggatctgaggtctacctgcggcgagagctgatctgttggggggattcggtgaagcttagatatggcaataagcccgaagactgcccatacctctgggcccatatgaaaaagtataccgagatcacagctacctacttccagggtgtcagattagataattgtcactcgacccctctgcacgtggcggaatacatgcttgacgctgctagaaaccttcaaccaaacctgtatgtcgtggcggagctctttaccggaagtgaggatctcgacaacgtttttgtgacgcgactgggtatcagctctctgatccgggaggcaatgtcagcatataactctcatgaggaggggaggcttgtgtaccggtatggaggcgagcccgtaggttcttttgtgcagccttgcctgagaccgctcatgccagccatagcacatgccctgtttatggacatcacgcatgacaacgagtgcccgattgtacatcggtccgcatatgacgcccttccaagcaccacgattgtgtctatggcctgctgcgcttcagggagcacacgtgggtacgatgagctggtgccccaccagatttccgtggtaagcgaggaaagattctacactaaatggaaccccgaggctttacccagtaacacaggagaggtcaattttcagtcaggcatcattgccgcacggtgcgccatcagtaaactgcaccaggagctaggggcgaaaggtttcattcaggtatacgtcgatcaggtggacgaggacattgtcgccgtgacaaggcactctcccagcattcaccagtcggtggtggctgtttcccgaaccgccttcaggaatcccaaaaccagtttttacagcaaggaggtgccacagatgtgtatccccggaaagatagaggaggttgtcctggaggcaaggaccattgaacggaacactaaaccctaccgcaaggatgaaaactccatcaatgggacacctgacattactgtggagatccgcgaacacatccagctgaacgaaagcaaaatagtcaaacaagcgggcgtggccactaaggggcctaacgaatacatccaggagatagagttcgaaaatctgagcccaggcagcgtgatcatttttcgggtctcgttggacccccatgctcaagttgcagtaggcatcttaaggaatcacttaactcagttctctccccacttcaagtcaggctcactcgccgttgacaacgctgatcctatactgaagatcccctttgcgagtctggccagtagattgacactggcagaactgaatcagattctgtaccgctgcgagtccgaggagaaagaggatgggggtggctgttatgacatcccgaattggagcgctctcaagtatgcgggtctccaaggcctgatgagcgtgttggccgagattagacccaaaaatgacctcggacacccattctgcaacaatctccggtcaggcgattggatgatcgactatgtcagtaaccggctcatatccagatctggtaccatagctgaggtggggaagtggctccaggctatgtttttttatttgaagcagatccctagatatttgattccctgctattttgatgcaatcctcatcggggcctatacaaccctgctagacaccgcttggaaacagatgagctcattcgtacagaatggctctacctttgtgaagcatctcagcttggggtccgtgcaactgtgtggtgtgggcaagtttccttcactgcctatattatcccctgctctgatggacgtgccctaccggctgaatgagatcacgaaggaaaaggaacagtgttgtgtatcactggcagctggactgccacacttctcaagtggcattttccggtgctggggccgggatacattcattgctttgcgagggattcttcttatcaccgggcgctacgttgaagcaagaaatattatactggctttcgctggcaccctacgtcacgggctgatcccgaatctcctgggcgaggggatttatgccaggtacaactgtcgggacgccgtatggtggtggcttcagtgcatccaggattactgtaaaatggtacccaacggcctggatattctaaagtgcccggtctctcgcatgtacccaaccgatgattctgctcccttaccagccgggacactcgatcagcccttgtttgaggtgatccaggaagcaatgcaaaaacacatgcaggggatacagtttcgagaaagaaacgcaggaccacaaattgaccggaacatgaaggatgagggctttaacattactgctggggtcgatgaagagacgggcttcgtgtatggggggaaccgcttcaactgcggaacttggatggataagatgggggagtccgatcgtgcacgcaacaggggcattccagctacaccgcgcgatgggtcagcggtcgaaattgtggggctgagtaagtcagccgttaggtggctccttgaactgagcaagaagaatatcttcccttaccacgaggtgaccgtaaagcgccatgggaaggctatcaaagtaagctacgatgaatggaacaggaagatacaggacaactttgagaagctgttccacgtgtccgaggacccatctgatctaaatgaaaaacaccctaatctggttcataagcgcggaatttacaaggattcctatggagcctcctcaccttggtgcgactaccaactgcgcccaaatttcacaatcgcaatggtggtggcacccgaactgttcaccacggagaaagcctggaaagcgctcgagatagcagagaaaaagctgttaggacccctcggtatgaagacactggatcccgatgatatggtgtactgcggcatttatgataatgcgctggataatgataactacaacctggcaaaaggtttcaactatcaccaggggccagaatggctgtggcctataggctatttcctccgagccaaactctacttttctcgactgatgggacccgaaactacagctaagactattgtcctggtgaaaaacgtgctatctcggcactatgttcatctggaacgtagcccctggaaaggactacctgagcttacgaacgagaatgcccagtattgccccttcagctgtgaaacacaggcatggtccatcgcaactatacttgagaccctttatgacttatag

SEQ ID NO: 3570 - DNA, 4599 bp, synthetic construct
  misc_feature 1..4599: note = source = /note="Description of Artificial Sequence: Synthetic coding sequence"
  source 1..4599: mol_type = other DNA
atgggccacagcaagcagatccggatcctgctgctgaacgagatggaaaaactcgaaaagaccctgttccggctggagcagggctatgagttgcagttccgacttggacccacattgcagggaaaagcagttactgtctacaccaactaccccttccccggggagacctttaacagagagaagtttcgctccctcgactgggaaaatccaactgagagggaggatgattccgataaatattgcaaactgaatttgcagcagtctggctcctttcagtactacttcctgcaggggaacgagaagtccgggggtggttacatcgtcgtcgatccaattctgagagtgggggccgataaccacgtcttaccactggactgtgtaaccctgcagaccttcctggctaaatgtctgggcccgttcgacgagtgggaatcccgcctgcgggtcgcaaaggagtctggctacaacatgatccacttcacccccctgcaaaccttaggcctcagccggtcctgctacagcctcgccaatcagctcgagctgaacccagattttagtcgaccaaacagaaaatatacatggaatgacgtagggcagctcgttgagaagctgaagaaggagtggaatgtcatctgtattaccgacgttgtctacaaccataccgccgccaactctaagtggattcaggaacatccagagtgcgcttacaatctcgtaaactcccctcacctgaaacctgcctgggtgttagaccgggccctatggcgattttcctgtgacgtggcagagggtaagtataaggaaaaagggattcccgcccttatagagaatgaccatcacatgaatagtatacgcaagattatttgggaagatatctttccaaagttaaagctctgggagttctttcaggtggatgtgaataaggccgtcgagcagttcagacgcctgctcacccaagaaaatagaagggtaacaaagtcagaccctaaccagcatcttaccatcatccaggaccctgaataccgccgattcggctgtaccgtggacatgaacattgctcttacaacctttatcccccatgacaaggggccagccgccattgaggaatgctgtaattggttccacaagaggatggaggaactgaatagcgaaaagcacagacttatcaactatcatcaggaacaggctgtgaattgcctgctcggaaacgtattctatgagagattagcaggacatgggccgaagctgggtcctgtgacaagaaagcaccccctggtgacccgctacttcaccttccccttcgaagagatcgatttctctatggaagagagcatgatccatctacccaataaggcatgtttccttatggcccacaacggatgggtgatgggagatgaccccctgcgtaatttcgccgagcctggaagtgaggtctacctccggagggaactgatctgctggggagattccgtgaagctaagatacggaaataaacccgaagactgcccttacctatgggcgcatatgaagaagtatactgaaatcacggctacttactttcagggagttaggctcgataactgtcacagcacacccctgcatgtcgccgaatacatgttggatgccgcccgtaacttacagcccaacttatacgtggttgcagagctctttaccggatccgaggacctcgataatgtgttcgtgacacgcctgggaatttcgtctctgattcgggaggccatgtcagcctacaatagtcacgaggagggaaggctggtgtataggtacgggggagagccggtgggatcattcgtgcagccctgtcttcgcccgcttatgccagcaatcgctcacgctctgtttatggatattacacacgataatgagtgtccaatagtccatcgatctgcctacgacgcattgccatccactactatagtcagtatggcgtgctgtgcatcagggtctactagagggtatgatgagttggtacctcatcagattagtgtcgtgtccgaagagaggttctacacgaagtggaaccccgaagcattgccttctaacacaggggaggttaatttccagtctggcatcatagctgccagatgcgccatcagcaagttgcaccaggagctcggggcgaagggattcattcaggtgtacgttgaccaggtggacgaagacattgtcgctgtaacccgacacagcccttcaatccaccaatctgtcgtcgcggtttcccggacggcatttagaaaccccaaaaccagcttttactctaaagaagtgccccagatgtgcattcccggcaagattgaggaggttgtactcgaggcccggacaattgagaggaatactaaaccgtaccggaaagatgaaaacagcatcaatggaacgcccgacatcactgttgagataagagagcatatccagctgaatgaatctaaaatcgttaaacaggcaggggtggcaaccaagggcccaaacgagtatatccaggaaatagaattcgagaatctcagtcccgggtcggtgatcatctttcgtgtcagtttagatcctcatgctcaggtggccgtgggcatcctgaggaaccacttgactcagttttcccctcacttcaagtcaggctcgcttgccgttgataatgccgatcccattctgaaaatcccgttcgcctctctggcctctagattgaccttggccgaacttaaccagatattatataggtgcgagagcgaagagaaagaagatggtgggggatgctacgacattcctaactggtctgctttaaagtatgctggcttacaaggtttgatgtctgtgcttgcagagatccgcccaaaaaatgatctgggccaccccttctgtaacaatttgcgcagcggagattggatgatcgactacgtatctaaccgtttaattagccgatctggaactatagctgaggtcgggaaatggctgcaggctatgttcttctatcttaagcagattcctcggtacctcatcccatgctacttcgacgcaatactgatcggcgcttatactacgctgttggacaccgcatggaagcagatgagcagcttcgtgcagaatggcagtacatttgtcaagcaccttagcctgggctccgtccaactgtgtggagtgggcaaatttccgagcctgcctatactgtcgcccgccctgatggacgtgccttatcgattaaacgagatcaccaaggagaaagaacagtgttgtgtgtcactggctgccgggttgccgcatttctcttctggaatctttcggtgctggggacgcgacacctttatcgccttacgcggcatcttgctgatcacgggacggtatgtggaagcccgaaatataatcctggcttttgccggaacgctgcggcatgggctgattcctaatttgctgggggaagggatatacgctcgatataactgtcgcgatgcggtttggtggtggctgcagtgcatccaggattactgcaaaatggtccctaacggattggatatcctgaagtgccccgtaagtcgcatgtacccaactgatgatagtgcccctttacccgcggggactttagaccagccgctcttcgaggtgatccaggaggctatgcaaaagcatatgcaggggattcagtttagagagcgaaacgccgggccccagattgatagaaacatgaaggatgaggggtttaacatcaccgccggagtcgacgaagagacagggtttgtgtacgggggcaatcggtttaactgtgggacatggatggacaagatgggtgagagcgatcgtgcccgaaatagaggcattcccgccacacccagggacggatccgccgtggaaattgtaggcctcagcaaatcagcagttaggtggttactggaactgagcaagaaaaacatctttccttaccacgaggtgacagtaaagagacacggcaaagcaattaaggtttcctatgacgagtggaacagaaaaatccaggacaactttgagaaattatttcacgtgagtgaagacccttccgatctcaatgaaaagcatcccaatttggtccataaacggggcatttacaaggatagctacggagcctcatctccctggtgcgattaccaactgagacctaacttcactattgccatggtggtcgctccggaactgtttactacagaaaaggcttggaaggccctggagatagcagagaagaagctgcttggtcccctgggcatgaagacactggatcctgacgacatggtgtattgcggaatttatgacaatgcccttgacaacgacaattacaatctggccaagggattcaattaccatcaggggcctgagtggttgtggcccatcggttacttcctgagagcaaagttgtacttttctagactgatggggcccgaaaccactgcaaaaaccatcgtactggtaaagaatgttctaagtcgacactacgttcatttggagcgttcaccctggaagggtttgcccgaactgactaacgagaacgcccaatattgtccgtttagctgtgagacacaggcctggtctattgctactattctggagactctctacgatctctag

SEQ ID NO: 3571 - DNA, 4551 bp, synthetic construct
  misc_feature 1..4551: note = source = /note="Description of Artificial Sequence: Synthetic coding sequence"
  source 1..4551: mol_type = other DNA
atggcccccatcctgagcatcaacctgttcatcggctacgagctgcaatttagactaggaccaactctccagggcaaggcagtcacagtttacaccaactatccttttcccggcgaaaccttcaaccgagagaaattccgctccctggactgggagaacccgacggagcgcgaagatgactctgacaagtattgtaagctgaatttgcagcaatctggctcattccaatactacttcctgcagggcaacgagaaatccggaggcggatacatcgtggtggacccaattcttagagtgggggctgataaccatgtccttcccctggactgtgtgactctccagacctttctggcaaagtgcctggggcctttcgatgaatgggaatctcggttgagggtggctaaggaatccgggtacaacatgattcactttacgcccctgcaaaccctcgggctgtcccgttcctgctattctctggccaaccaactggaactgaacccagatttcagccgacctaatcgaaaatatacctggaatgacgttggtcaactggtagagaagcttaagaaagaatggaacgttatttgcatcacggacgtggtgtacaatcataccgctgccaacagcaaatggatacaagaacaccccgaatgtgcctataatcttgtgaatagtccccatttaaagcctgcgtgggtgctcgacagagctttgtggcggttttcgtgcgacgtggccgaaggaaagtataaggaaaaaggcatacccgcactgatcgaaaatgaccaccatatgaacagcatccgtaagatcatctgggaggacattttccccaaactgaagttgtgggaatttttccaggtcgatgtgaacaaggccgtcgagcagtttcgcagactcctgacccaggaaaataggcgcgtgactaaaagtgacccaaatcagcatctcaccatcattcaagatcccgagtacaggagatttgggtgcaccgtggacatgaatatagcccttactaccttcatcccacacgacaagggccccgcagccattgaagagtgctgtaattggtttcacaaacggatggaagaattaaactcagaaaagcatcgactaatcaactatcaccaggaacaagccgtcaattgtctcctgggaaatgtcttttatgagcggctggctgggcacggaccaaagctgggccccgtgacgcgcaagcacccgctggtaactcgctacttcacctttccatttgaggagatcgactttagcatggaagagtctatgatacatctgccaaacaaagcctgcttcttgatggcccacaatggctgggtaatgggagacgatccgttgcgcaactttgctgaacctggatccgaggtttaccttcggcgcgaacttatctgctggggtgatagcgtgaaacttaggtatggcaacaagcccgaggattgtccctacctgtgggcgcacatgaagaaatacacagagataaccgctacgtatttccaaggagtgaggctggacaactgccactcaacaccactgcacgtcgccgagtacatgctggacgctgcacgcaacctccaacccaacctgtatgtggtggccgagctattcacgggctccgaagatctggataatgtcttcgtcacgcgcctggggatctccagcctcattcgggaggcaatgtctgcatacaatagccacgaggaaggccgtctggtgtatagatacggcggtgaacctgtcggctccttcgtacagccctgcctccggcccctgatgcctgcaattgcccacgccctttttatggatatcactcatgacaatgagtgcccgattgtgcatagatcggcgtacgacgcactaccctctacaacgattgtgagtatggcatgttgcgcaagtgggtctacccgcggatatgacgagctggtgccgcatcaaatttccgtcgtgagcgaagaacgcttctacacgaaatggaacccagaagctctgccttctaatactggcgaagtgaactttcagagcggaatcatcgccgctcgatgcgccatttcgaagctacatcaggagcttggggctaagggatttattcaggtgtacgttgaccaggtggacgaggatatagtggccgtgactagacactcgccctcaattcatcagagcgttgtcgcagtctcccgtactgcgttcaggaatcccaaaacctcattctattccaaagaggtgcctcagatgtgtatcccaggcaagattgaagaggttgtgcttgaagcgagaaccatcgagcgcaatacaaaaccataccggaaagacgaaaattctatcaatggcacgcctgacattaccgtggagattcgggagcatatccagcttaacgaaagcaaaatcgtcaaacaggcgggagtcgcaaccaaaggacctaacgaatacattcaagagatcgaattcgagaatctgagtcccggatctgtgattatttttcgtgtgtccttagatcctcacgcacaagttgctgtcgggatcttgcggaatcatctcacccagttttccccgcactttaaaagcgggagtcttgcagtggacaatgccgaccccatcctgaagattcctttcgcaagtcttgcttccagactgaccctggctgagcttaaccagatcctctacaggtgtgagagtgaggagaaggaagacgggggaggatgttacgatattcccaattggtccgccctgaaatacgcaggtcttcaaggcctgatgagtgtcctcgccgaaattagacctaagaacgaccttgggcaccccttttgtaacaatctcagatccggggactggatgattgattacgttagcaatcgtctgatctcaagaagcgggaccattgccgaggtgggtaaatggctgcaggccatgtttttctatctaaagcagattccacgttacctgattccatgctatttcgacgctatcctgataggggcctatacgactttgcttgataccgcttggaaacagatgagtagcttcgtccagaatggctccacgtttgtgaagcaccttagtttaggctccgtccaactgtgcggcgtgggaaagttcccgagcttgccaatcctttcccctgctctcatggatgtgccctatagactgaacgaaatcacgaaagagaaggagcagtgttgcgtctccctcgccgccgggctcccccatttcagctcgggcattttccggtgctggggacgggataccttcatcgctctgcgggggatactcttgatcacagggcggtatgtagaagcacgaaacataattctggcctttgcgggaaccctgaggcacggactcatccccaatttgttgggcgagggaatctatgcgagatataattgccgggacgcagtttggtggtggctgcaatgcatccaggattactgtaagatggtccctaatggcttggatatacttaaatgcccagtgagcagaatgtaccctacagatgacagcgcaccattacccgccgggactcttgaccaacccctcttcgaggtgatccaagaggccatgcagaagcatatgcaaggaattcagtttcgcgagcggaatgctggtcctcagatcgatcggaatatgaaagacgagggcttcaatattaccgccggggtagatgaagaaaccggattcgtatacggaggcaatcggtttaattgcggcacctggatggacaagatgggagaatccgaccgggcccgtaacagaggaattccagccactccccgggatggaagcgcggtcgaaatcgtcggactgagcaagtcagctgttcgttggctgctggaactgtccaaaaagaacatcttcccttaccacgaagtgaccgtgaagcgccacggtaaagccatcaaggtttcatacgacgagtggaatcggaagattcaggacaatttcgagaaattgtttcatgtcagtgaggatccctctgatctcaatgagaaacatccaaaccttgtccataagagggggatctacaaagatagttatggagcgtcatctccctggtgtgattatcagttgcggcccaactttactattgccatggtggttgcgccagaactttttactacagagaaggcatggaaggcactggagattgcggagaagaaactgttggggcccttggggatgaagacactggacccagacgacatggtgtattgcggtatatacgacaatgcactcgataacgacaactacaatctcgctaagggatttaattatcatcaagggcccgagtggttgtggcctatcgggtactttctccgagctaagttatacttttcaaggttaatgggtccagaaaccactgccaagaccatcgtgttggtgaaaaatgtacttagtcgacactacgtgcacctggagaggagcccatggaaggggctacccgaactgacaaatgagaatgcccagtactgcccttttagttgcgaaactcaggcatggtcaatagcaaccatcctagagacgctctacgatttgtag

SEQ ID NO: 3572 - DNA, 4599 bp, synthetic construct
  misc_feature 1..4599: note = source = /note="Description of Artificial Sequence: Synthetic coding sequence"
  source 1..4599: mol_type = other DNA
atgggccacagcaagcagatccggatcctgctgctgaacgagatggaaaagttggaaaagactttgtttcggctggagcagggctatgagctgcagtttcggctggggccaaccctgcaaggaaaagcggtcaccgtgtacacaaactaccctttccctggagagacgttcaaccgggagaagttcaggagtctggattgggaaaatccgaccgagcgagaggatgatagcgataagtattgcaagctgaacttgcaacagagcgggagttttcagtattatttcctgcaggggaatgaaaaatccggcggtggctacatcgttgtcgatcccatcctgagggtcggggccgataaccacgtgttgccactggactgcgtgaccctacagacctttttggcaaagtgcctgggaccatttgatgagtgggagtctagattacgggtcgccaaagaatccggttacaatatgatccattttacacctctgcagacactcgggctgtcccggagctgttactcactggccaaccagcttgaactgaacccggattttagtaggccaaacaggaaatatacatggaatgatgtcggccagcttgtcgagaaactaaagaaggagtggaatgtgatttgcatcactgacgtggtgtataaccacactgccgctaatagcaagtggatccaggagcatcctgagtgtgcttacaacctagtaaactctccgcacctgaaacctgcctgggttctggacagagcgctgtggcgcttcagctgcgacgtcgccgagggcaaatataaggaaaagggaatccctgccctgattgagaacgatcaccacatgaacagcatcagaaagattatctgggaggatatattccctaagttgaagctgtgggaatttttccaggtagacgtgaacaaggcagtggagcaatttcggaggctactgacacaggaaaataggcgcgtcacaaagtctgatccaaaccagcatctcaccataatacaggatccggagtatcggagattcgggtgtaccgtggatatgaacatcgcattgaccactttcatcccccacgacaaaggtcctgccgctatcgaagagtgttgtaattggtttcataagaggatggaggagttaaacagcgagaaacatagacttattaattaccatcaggagcaggccgtgaactgccttctcggaaacgttttctacgagaggctggctggacatggtcctaagcttggcccagttacacgtaaacacccactcgtgacccgatactttacatttccgttcgaggagattgacttcagcatggaggaatcgatgatacatctgcctaacaaggcgtgtttccttatggcacacaacgggtgggtcatgggagacgaccccctgcgaaacttcgccgagcctgggtcagaggtgtatttgcgccgcgaactgatttgttggggagatagtgtgaagctgaggtacggaaataagccagaggattgcccttatttgtgggctcacatgaaaaagtacacagaaattactgccacttattttcagggagtgcggctggataattgccactcgacaccactccacgtggccgagtatatgctggatgcagcccgtaacttgcaacccaacctctacgtagtggccgagttattcaccggctccgaggacctggacaatgtttttgttacccgactagggatttcctctttgattcgagaagctatgtccgcctacaactctcacgaggagggccgcctagtgtatcgctatgggggcgaacccgtgggtagctttgtgcagccttgcctgcggcctcttatgccagccattgcacatgccctcttcatggacattacccatgacaacgagtgtccaatcgttcacagatcagcgtacgatgctttaccgagcacaactatcgtgtctatggcttgttgcgctagcggaagcacccgcgggtatgatgagttggtgcctcaccaaatatccgtcgtgtcggaggagcgtttctataccaagtggaatcctgaagctctccctagcaacactggtgaagttaatttccagagcggcattatcgccgctagatgcgccattagtaagctgcaccaggagctgggtgccaaggggtttattcaggtctacgtggatcaagtggatgaggatatcgtggctgtcacacggcattctcccagcattcatcaaagtgtcgtcgcagtgtccagaactgcgttccggaaccccaagacatccttttactccaaagaggtgccccagatgtgcattccggggaaaatcgaggaagtcgtcctcgaggcacgtacaatagaacgaaatactaaaccatacagaaaggacgagaacagtatcaacggtacgcctgatatcacagtcgagatcagagagcacatccaattaaatgagagcaagatagtcaagcaagcaggagtggccaccaagggaccaaacgaatatatccaggagattgagttcgagaacctgtcaccagggtcagtaattatttttcgcgtttccttggatccacatgcccaggtcgcagtgggcatcctgcggaatcacctgactcagttctctcctcacttcaagtcaggttcactagccgttgacaacgccgacccaattctgaagataccattcgcaagcctggcttccaggctgacactggccgagttaaatcagattctctaccgttgtgaatccgaagaaaaggaggacggggggggatgctatgacattcccaactggagcgccctgaagtacgccggcctgcaagggctgatgtcagtgctggctgagattcgcccaaagaacgaccttgggcacccgttttgtaacaacctccgctccggggactggatgatcgactatgtttcgaaccgcctgatctcccggagcggaaccattgcggaagtgggaaaatggctacaggccatgttcttttatctgaaacaaattccaagatacttgattccatgctatttcgacgccatactgattggagcctacactactttgctggatacagcctggaagcaaatgtcatcatttgttcagaatggtagcacgtttgttaaacatcttagtcttggatccgtgcagctgtgcggtgttggtaaatttccttctctacctatcctgagccccgcattgatggacgttccgtatcgacttaacgagattactaaggagaaggagcagtgttgtgtatctctggcagccggcctgcctcatttttcaagcggaatctttaggtgttggggtcgggatacttttatcgcccttagaggcatccttctaataactggtcggtatgtcgaggccagaaatatcattcttgccttcgccggaactctgcggcatggtctgatcccgaaccttttaggcgagggcatatatgccaggtacaactgcagagacgcagtctggtggtggctccagtgtattcaagactattgtaaaatggtcccgaacggtctggatatcctcaaatgccccgtgagtcggatgtaccccacggatgactctgccccactgccagccggaactctagatcagccgctgttcgaggttattcaggaggccatgcagaagcacatgcaggggatccagttccgcgagagaaatgctggacctcagattgatcgcaacatgaaggacgaaggatttaatattacagcaggcgtcgatgaggagaccggctttgtatatgggggaaatcgttttaactgcggtacatggatggataagatgggcgaatcagaccgcgctaggaatcgcggcattccggctacaccacgggatggcagtgctgttgagatagtgggactcagtaagtcagcggttcgttggttgctggaattgagtaagaagaacatcttcccctatcacgaggtgaccgtgaagcgacatggaaaggccatcaaggtgtcctatgacgagtggaaccgtaaaattcaagacaatttcgagaagcttttccatgtttcagaggaccctagtgacctcaatgaaaagcatccaaatttagtccacaaaaggggcatctacaaggactcctacggtgcaagcagcccttggtgcgactatcagctcaggcctaacttcactatcgcgatggtggttgcccccgagctgttcacaacagaaaaggcttggaaagcgctggaaatcgctgagaagaagctgttaggacccctaggcatgaaaacactggatcctgacgatatggtgtactgtggaatttatgataatgccctggacaatgacaattacaaccttgccaagggatttaactaccaccaggggccagagtggctctggcccattggttactttctccgggcgaagctgtacttcagccggctgatgggccctgagaccaccgccaaaaccatcgtcctcgtaaaaaacgtactgtcgcgtcactacgttcatctggagagatccccatggaagggcttgccagaactcaccaatgagaatgcacagtactgcccattctcatgtgagacacaggcttggtccattgcaaccatattagagacgctgtacgatttgtag

SEQ ID NO: 3573 - DNA, 4599 bp, synthetic construct
  misc_feature 1..4599: note = source = /note="Description of Artificial Sequence: Synthetic coding sequence"
  source 1..4599: mol_type = other DNA
atgggccacagcaagcagatccggatcctgctgctgaacgagatggagaaactggagaagactctgttccgtctcgaacagggctacgaactccagttccggctggggcccactctccaggggaaagcggtgacagtctacaccaattatcccttccccggcgagacgttcaaccgcgaaaagtttaggtctctggattgggaaaatcccaccgaaagagaagacgacagcgacaagtactgtaagttgaatctccaacagtccggctcattccagtattatttcttacagggcaatgagaaaagcggggggggctacatagtggtggaccctattctgcgggtgggcgctgataaccatgtgctgcccctcgattgcgtcacattgcagacctttctcgctaaatgcctgggtccatttgacgaatgggagtcccgactgcgcgtggccaaagaatctggttacaacatgattcatttcacccccctacagactcttggactgagcagatcatgttacagcttggccaaccaactcgaactgaatccagactttagtaggcccaaccgaaaatatacatggaacgacgtgggacaactcgtggagaagctgaagaaagagtggaacgtcatatgcattactgatgtggtgtacaaccatacggccgccaacagcaaatggatccaggagcatcctgagtgtgcatacaatctggtgaattcccctcatcttaagcctgcttgggtactggaccgcgccctgtggcgcttctcgtgtgacgtggctgaaggtaagtataaggagaagggtattcccgctctgatcgaaaacgatcaccatatgaactctatacggaagatcatctgggaagatatttttcctaaactgaagctatgggagttcttccaggtcgacgtgaacaaggctgtcgaacagttccgcaggctactgacgcaggagaaccgcagggtcactaaatctgaccccaaccagcacctgaccatcattcaggatcccgagtatcgtaggttcggctgtaccgtcgatatgaacatcgccctgaccaccttcatcccccacgacaaagggcccgctgctattgaagagtgctgcaactggtttcacaagagaatggaggagctgaatagcgaaaagcataggctcatcaactatcaccaagaacaggcggtgaactgcttgcttggaaacgttttttacgaaaggcttgccggccacggccccaaactcggaccggtgactagaaaacatcccctggtgacacggtattttaccttcccgttcgaggaaatcgacttctctatggaagagagcatgattcatctgccgaataaggcatgcttcctgatggcccataacggatgggtgatgggtgatgaccccctgcggaactttgcagaacctgggagtgaggtctatttgcgacgggaactcatttgctggggtgatagtgtgaaactgcgatatggaaacaaacccgaagactgcccatatctttgggctcatatgaagaagtatactgagattacggcaacctactttcagggagtcagattggacaattgccactcgacgccccttcatgttgcggaatacatgctggatgccgcgagaaatctgcagcctaacctctacgtggtggctgagctgtttactggatccgaggacctagataacgtgttcgtaacaagactgggcatcagcagtttgatacgggaggccatgagcgcttacaattctcacgaggaaggacggctggtgtatcgttatggcggtgagcctgtcgggtccttcgtgcagccctgtctcagacccctaatgccagctattgcacacgccctgttcatggatatcacccacgacaacgaatgtcctattgttcacaggagcgcttatgacgcactgcccagcaccactatagtctccatggcatgttgtgcatcggggagcacaagaggttacgatgagctggtgcctcaccagatatccgtcgtttcagaggaaaggttttataccaagtggaaccccgaggccctgccaagcaataccggagaggtgaatttccagtcgggcattatcgcagccaggtgcgcgatcagcaagctgcaccaggaactgggggccaagggcttcattcaggtttacgtcgaccaggtggacgaggacatagtggctgtgacgaggcactctcccagcatccaccaaagtgttgtcgcagtctcacgcacagctttccggaaccccaagactagcttctatagtaaggaagtcccgcagatgtgcatcccagggaagattgaagaagttgttctcgaggctcgcacaatcgaaagaaacacgaaaccttataggaaagacgaaaacagcatcaatggcacacccgacatcacagttgaaatccgagagcacatacagctgaacgagtctaagatagtcaagcaggctggagtcgccacaaaaggacccaatgagtacatacaggagatagagtttgagaatctctccccagggagtgtaatcatctttcgggtctctctggaccctcacgcgcaggttgccgtcggaattcttcgcaaccacctgactcaattttcaccccacttcaaaagtggttcattggccgtggataacgcggatccaattctcaaaattcccttcgcaagcctggcaagcaggctaacacttgcggagcttaatcagattctttatagatgcgagtcagaagagaaggaggatgggggcggctgctacgatataccgaattggagtgccttgaagtacgcaggactgcagggactcatgtcagtgctggcagagattcgcccaaagaacgacctcggacaccccttttgtaataacctacgcagtggcgattggatgatcgactacgtgtctaaccgcctgatttctcgctcaggtactatcgccgaggtcgggaaatggctccaggctatgttcttttacttgaagcaaatccctaggtacctgatcccctgctatttcgacgccattctgatcggggcatacaccaccctgctggatacagcatggaaacaaatgagcagttttgtgcagaatggatcgacatttgtgaagcacctgagcctgggcagcgtccagctttgtggcgtggggaagtttccttccctacctatcctgtctccagctctgatggacgtcccatacagattaaacgaaattaccaaagagaaagagcaatgctgcgtttccttggccgctggtctgcctcactttagttctggtattttcaggtgttggggacgagatacctttatagctctgcgtgggattctgctcatcacggggagatatgtcgaagcccgcaatatcatcctcgctttcgctgggacactacggcatggcctcatcccgaatttgctgggagaagggatctatgctagatacaactgccgcgatgcggtatggtggtggttgcagtgcattcaagactactgtaagatggtgccgaacggactcgacattcttaagtgccccgtgagtagaatgtatcccactgacgattccgccccgttgcccgcaggcaccctggatcaaccactctttgaagtgatccaggaggccatgcagaagcacatgcaggggattcagttcagggaaaggaacgccggcccacagatagatcgtaacatgaaagacgagggatttaacatcacagctggcgtggacgaagaaaccggatttgtgtacggtggcaataggtttaattgcggaacctggatggacaaaatgggcgaatccgaccgtgcccgcaacagaggaataccagccactcctagagacggctctgcagtggaaatcgtggggctcagcaaatctgccgtccgatggttactggaactgagcaaaaagaatatttttccctaccatgaggtgacagtcaaacgacatggtaaagctatcaaagtcagttacgatgaatggaataggaaaattcaggataactttgaaaaactctttcacgtgagtgaggatcctagtgacctcaatgaaaagcaccccaatctggtgcataaacgtggtatatacaaggactcatacggtgcatcatccccttggtgcgactaccagctcagaccaaatttcactattgctatggtggtcgctcctgaattgttcaccaccgaaaaggcctggaaagcgctggagatcgccgagaaaaaactcctaggtccactgggaatgaaaaccttggaccccgatgacatggtctactgcggaatttacgataacgctctcgataacgataactataacctcgcaaaaggctttaattatcaccagggaccggaatggctgtggcctatcggttatttcctgagggcgaagctttactttagccggctaatgggccccgaaaccaccgccaagactattgtactagtgaagaacgtcctgtctcgccattacgtacacttggagcggagtccttggaaaggactgcccgagctgacgaatgaaaatgcacaatactgtcctttttcgtgcgagacacaagcatggagtattgccactatcttggaaacactctatgatctgtag

SEQ ID NO: 3574 - DNA, 672 bp, synthetic construct
  misc_feature 1..672: note = source = /note="Description of Artificial Sequence: Synthetic coding sequence"
  source 1..672: mol_type = other DNA
atgaacaagcccctgctgtggatcagcgtgctgaccagcctgctggaggcgttcgcccacaccgatctgtccggtaaagtgttcgtctttccaagggaatccgtgacagatcacgtgaatctcataactcccctggaaaagccacttcagaatttcactctgtgctttcgggcctattctgatctctctcgggcttacagcctgttttcttacaacactcagggccgcgacaacgaattactggtgtacaaagaacgagtcggcgaatattccttgtatatcggacgtcataaagtgacttctaaggtgatcgaaaagttccccgcccccgtccacatctgcgtgtcttgggaatcatcctctgggattgctgagttttggataaatggtactcctctcgtgaaaaaggggctgcggcagggctattttgtggaagcccaacccaagatcgttctgggacaggagcaggacagttacgggggaaagtttgatagaagccagtcatttgtcggagagattggagacctgtacatgtgggactcagtcctcccgcctgagaatattctgagcgcgtaccagggcacgcccctccccgcaaacattctcgattggcaggcccttaactatgagatacgggggtatgtcatcattaagcccctcgtctgggtctag

SEQ ID NO: 3575 - DNA, 2418 bp, synthetic construct
  misc_feature 1..2418: note = source = /note="Description of Artificial Sequence: Synthetic coding sequence"
  source 1..2418: mol_type = other DNA
atgagcagcagcagctggctgctgctgagcctggtggccgtgaccgctgctcaatcaaccattgaggagcaggctaagacatttctagacaaattcaaccatgaagccgaggatctattttaccaatcctcactggcttcctggaactacaataccaacattactgaggagaatgtccagaacatgaataatgcaggggacaaatggagcgctttcctgaaggaacagagtactctggcccagatgtatccgttgcaggaaattcagaacctaaccgtgaagttgcagctccaggcacttcagcagaacggctcctccgtgctgtccgaagataagtcaaagagactgaataccatcctcaataccatgtcaactatttattcaacgggcaaggtgtgcaatcccgacaatccccaagagtgtctgttgcttgagcctggactcaatgaaatcatggctaactcactggactataatgagcgcctgtgggcatgggagagctggaggtctgaagttgggaaacaactgagacctctttacgaggagtacgtggttctgaagaatgagatggcccgggcaaaccattatgaagactacggtgactattggcgaggtgattacgaagttaatggggtggacggatatgattacagccgtgggcaactgatagaggatgtggaacatacctttgaggaaatcaagcccctctatgaacaccttcatgcctacgtgagggcgaaactcatgaatgcttatccctcttacatctcgcccattggatgcctccccgcccatctgctcggagatatgtggggtagattctggactaacctctattctctcacagttccatttggccagaagcctaacatcgatgtgacggacgcaatggtcgaccaggcatgggatgcccaacgcatcttcaaagaggcagagaagttctttgttagcgtgggtctaccaaacatgactcaagggttctgggagaattccatgctgacagatccagggaatgtgcagaaagctgtgtgccatcccactgcctgggatcttggcaaaggtgactttcggatcctcatgtgtactaaggtgacaatggatgacttcttaaccgctcaccatgagatgggccatatccagtacgacatggcatatgccgctcagccattcctgctccgtaacggtgcaaacgagggcttccatgaggcggtgggagagatcatgtcgctgagcgccgcaacaccaaaacaccttaagtctattgggttgttgtcacctgacttccaggaagacaatgagaccgagattaactttttactaaagcaagccctgacaatcgtggggaccctgccattcacatacatgcttgagaagtggaggtggatggtgtttaaaggcgaaattcccaaggatcaatggatgaagaagtggtgggaaatgaagagagagattgtgggagtcgtggaacccgtaccacacgacgaaacgtactgcgacccagccagcctgttccacgtgagtaatgactacagcttcataagatattacacgcgtactctgtatcaattccaattccaagaggccctttgccaggccgctaagcacgagggaccgctgcacaaatgcgatattagtaacagtacagaagccggacaaaaattgttcaacatgcttagactgggaaagagcgaaccctggactctcgctctggaaaatgtcgttggcgcaaaaaatatgaatgtgcgcccattgctgaactacttcgagccattatttacatggctcaaagaccaaaataagaatagcttcgtcggttggtctacggactggagcccgtacgccgaccagagtatcaaggtgaggattagcctgaaatcggccttgggggacaaggcctacgagtggaacgataatgaaatgtatctgttcaggtccagtgtggcttatgccatgcgtcagtacttccttaaggtcaaaaaccaaatgatcttatttggcgaagaggatgtgcgggtggctaatctgaaaccgcgaatatcatttaactttttcgtcaccgcaccaaaaaatgtaagcgacatcattccacgtactgaggtcgaaaaggcgatccggatgtcgcggagcaggataaacgacgcatttcggctgaatgacaattccctggagtttctgggaattcagcccacactgggcccaccgaatcagcccccagtcagtatttggctgattgtgttcggcgtggtgatgggggtaatcgtcgtaggcatcgtgatcctgatttttacaggaatccgtgatcgtaaaaaaaagaataaggcgaggtccggcgagaatccatacgcatccatcgatatttccaagggcgagaacaatcctgggttccagaacaccgatgatgtgcagacttccttctag

SEQ ID NO: 3576 - DNA, 2418 bp, synthetic construct
  misc_feature 1..2418: note = source = /note="Description of Artificial Sequence: Synthetic coding sequence"
  source 1..2418: mol_type = other DNA
atgagcagcagcagctggctgctgctgagcctggtggccgtgaccgccgctcagtcgactattgaggaacaggctaaaacatttctcgataagtttaaccatgaggcagaagacctgttttatcagagcagtctggcctcatggaactataataccaacataacagaagaaaacgtacagaatatgaataatgctggggataaatggagtgcttttctgaaagagcagtccacgttagcacagatgtaccctctgcaggagatccaaaaccttacagtgaagttgcagctgcaggctctgcaacagaatggttcttcagtgctgtcagaagataagtcaaagagacttaacaccatactcaatactatgtcaacgatttactccaccgggaaagtgtgcaatccggacaatccccaggagtgcttgttgctagaacctgggctcaacgagatcatggccaatagtttggactataatgagcggctgtgggcttgggaatcctggcgcagcgaggtggggaaacaactccgccccctgtacgaggagtacgttgtacttaagaacgagatggccagagctaatcactatgaagactatggagactattggagaggcgactatgaagttaacggcgtggatggttatgactactcccgcggccagctcattgaagatgtcgagcacactttcgaggagatcaagcctctgtatgagcatctccacgcttatgttcgggccaagttgatgaacgcatacccgtcttacatctcacctatcggttgtctcccggcgcacctattgggagatatgtgggggcggttttggaccaatctgtacagcctaacggtgccatttggccagaagccaaacattgacgtgactgatgcaatggtagatcaagcctgggatgcgcagcggatcttcaaggaggcagagaagttctttgtctctgtgggcctgccaaacatgacccagggcttttgggagaatagcatgctgactgatcccggaaatgtgcagaaggccgtttgtcaccctacagcatgggacttaggcaagggagattttagaattctgatgtgtacaaaagtaacaatggacgacttccttactgcccaccatgaaatggggcacatccaatatgacatggcctatgccgctcaacccttccttcttcgcaatggggccaacgaagggttccacgaggccgtgggcgagataatgagccttagtgccgccacacccaaacatctgaagagcatcggcctgcttagcccagactttcaggaagacaacgagaccgaaattaacttcctgttaaaacaggccctcacaatagtgggaactctcccgttcacatacatgctggaaaaatggcggtggatggtgtttaagggcgaaatacctaaggaccagtggatgaaaaagtggtgggagatgaagcgggaaatcgttggtgtcgttgagcccgtgccacatgacgaaacctattgtgatccagctagtctgtttcacgtgagcaatgattatagttttatccggtactatactagaacgttgtaccagttccagtttcaggaagctctgtgtcaagcggcgaaacatgaggggcccctgcacaaatgcgatatcagtaactcaaccgaagcaggccagaagttgttcaacatgctgcgcctaggaaagtccgaaccatggaccctcgctctggagaatgtggtgggagcgaagaacatgaacgtgagacccctgctgaactatttcgaacctctatttacttggctgaaggatcagaacaagaactccttcgtagggtggtccactgattggagcccatatgcggaccagagtataaaggtgcgaatctctctgaaaagcgcccttggtgataaggcgtacgagtggaatgacaatgagatgtatctgttcaggagttcagttgcatacgccatgcgtcaatacttccttaaggtcaagaaccagatgatcctgtttggggaggaggatgttagagtggctaacctcaagccccgaatcagcttcaattttttcgttacagcacccaagaacgtctctgatatcatccctcggaccgaggttgaaaaggccattcgcatgtcgcgctctcgaattaatgacgccttccggcttaacgacaatagcctggagttcctcggaatccagcctactctgggcccaccaaatcagcctcccgtctccatatggttgatcgtcttcggagtagtgatgggcgtgatcgtcgtcgggatcgttattctcatctttaccgggattagagatcgcaagaaaaaaaataaagcacgcagcggagagaacccttatgctagcatagatatttcgaaaggcgagaataatcctggcttccagaatacagatgatgtccagacaagcttctag

SEQ ID NO: 3577 - DNA, 804 bp, synthetic construct
  misc_feature 1..804: note = source = /note="Description of Artificial Sequence: Synthetic coding sequence"
  source 1..804: mol_type = other DNA
atgaaggccgccgtgctgaccctggccgtgctgttcctgaccggctctcaggcccgccatttctggcagcaggacgaacccccacagagcccttgggaccgagtcaaagatctcgctaccgtgtacgtggatgtcctcaaggactctggcagggactatgtgtcccagtttgaggggtcagccctcggaaagcagctcaacctgaaactgcttgacaactgggacagcgttacctcgacgttttcaaagcttcgtgaacagctgggaccagtgacacaagaattttgggacaacctcgagaaggagacagagggccttaggcaagagatgtccaaagatttagaggaagtaaaggccaaggtccagccatacctagacgatttccagaaaaaatggcaagaagagatggaattatataggcaaaaagtggagccactgcgcgccgaactgcaagagggggctaggcagaagcttcatgagctccaagagaagctgtctccgttgggcgaggagatgcgtgatcgggccagggcacatgtggacgcacttagaacgcacctggctccctactcggacgaactgcggcagtgtcttgcagctcgccttgaagcactgaaagagaatgggggggcccgcttggccgaatatcacgctaaagcaactgagcacttgagcaccttgagtgaaaaggccaagcctgccctcgaggatctcagacaaggcctcctgcctgtgctagaaagtttcaaggttagtttcctgagtgcacttgaggaatacaccaaaaagctgaatactcagtag

SEQ ID NO: 3578 - DNA, 804 bp, synthetic construct
  misc_feature 1..804: note = source = /note="Description of Artificial Sequence: Synthetic coding sequence"
  source 1..804: mol_type = other DNA
atgaaggccgccgtgctgaccctggccgtgctgttcctgaccggctcccaggccagacacttctggcagcaggatgagccacctcagagcccctgggatcgcgtaaaggacctggccacagtatatgtcgatgtcttgaaagattcggggagggattacgtgtcacaatttgaggggagcgctttaggcaaacagctcaatctgaagttactggacaactgggactccgtgaccagtacatttagcaagcttagagaacagctgggcccggtgacacaagagttctgggataacctcgagaaagagactgaaggactgcgtcaggagatgtctaaggatcttgaggaagtcaaggcgaaggttcaaccttatctcgacgatttccagaagaagtggcaagaagagatggagctctaccgccagaaggtggagcctctgcgagcggagctgcaggagggagctcggcagaagctgcacgagctgcaggaaaaattgtccccactgggagaggaaatgcgggattgcgccagagcccacgtggacgctctcaggacccatctcgccccgtactccgacgagctgcgtcagcgactggcggctaggttggaagcactgaaggaaaacggaggcgcccgtcttgccgaatatcacgctaaggcaaccgagcacctctcaaccttaagtgagaaagccaaacctgctctagaagacctcagacagggtctgctgcccgttctcgaatctttcaaagtgagcttcctttctgctctggaagaatacaccaaaaagctcaatacacagtag

SEQ ID NO: 3579 - DNA, 804 bp, synthetic construct
  misc_feature 1..804: note = source = /note="Description of Artificial Sequence: Synthetic coding sequence"
  source 1..804: mol_type = other DNA
atgaaggccgccgtgctgaccctggccgtgctgttcctgaccggctcccaggcccggcacttctggcaacaggacgagcctccacaatctccttgggaccgggtcaaggatttagcgacagtgtatgtagatgtgcttaaagactcgggtcgagattacgtgagccagtttgagggttccgcactcggcaaacaattgaatttaaaactgctcgacaactgggactctgtaacttctacgttttccaagctgcgagaacagctggggcccgtgactcaggagttctgggacaatttggaaaaggaaaccgaggggcttaggcaagagatgtcaaaagatttagaggaggtaaaggcaaaggtacagccttacttagacgactttcaaaagaagtggcaggaagaaatggaactgtaccgacaaaaagttgagccactccgggcggaacttcaggaaggggcaagacaaaagctacacgagctgcaagaaaagttgagcccactgggagaagaaatgcgtgatcgggccagggctcacgtcgatgccctgcggacacacctcgccccctactcagacgagctgaggcagcggttagctgctagattagaggcactgaaggagaacggtggcgcccgactggccgaataccatgctaaggcaacagagcatctcagtaccctgagcgagaaggctaagccagcactcgaggacctgagacagggtctgctgcctgtgctggaatcctttaaggtcagtttcctgagcgctcttgaggagtacacaaaaaagctgaatacacaatag

SEQ ID NO: 3580 - DNA, 804 bp, synthetic construct
  misc_feature 1..804: note = source = /note="Description of Artificial Sequence: Synthetic coding sequence"
  source 1..804: mol_type = other DNA
atgaaggccgccgtgctgaccctggccgtgctgttcctgaccggctcgcaggcacgccatttttggcagcaagacgaacccccccagtccccctgggaccgagtcaaagacctggctaccgtgtacgtggatgtccttaaggacagtggtcgcgattacgtgtcgcaatttgagggctccgcactgggtaagcaacttaacctgaagctcctggataattgggacagtgttacatccacgttttccaagctgcgcgaacagctcgggccagtgacacaggagttctgggataatctggagaaggagacagaggggctgcggcaggaaatgtccaaggatcttgaggaggtgaaggcaaaagttcaaccatatctggacgatttccagaaaaaatggcaagaggaaatggagctatataggcagaaagtagaaccgcttcgggccgagctacaagagggggcccggcagaagctccatgaactccaagagaaactcagtcctctaggcgaggagatgagagaccgagcacgggcccacgtggacgccctgagaacccatctagcaccctactctgacgagttgagacagcggcttgcggctcgactcgaagctcttaaggaaaacgggggagccagactggctgagtaccacgccaaagctacagaacacctctcaactctctctgagaaagctaagcctgccttagaagaccttcggcagggattgctacccgttttggaatcctttaaagtgagcttcttatcagcattggaggaatatacgaagaagctgaatacccagtag

SEQ ID NO: 3581 - DNA, 804 bp, synthetic construct
  misc_feature 1..804: note = source = /note="Description of Artificial Sequence: Synthetic coding sequence"
  source 1..804: mol_type = other DNA
atgaaggccgccgtgctgaccctggccgtgctgttcctgaccggctcgcaggccagacacttctggcaacaggatgagccaccccagtctccctgggacagagtgaaggatctcgcaaccgtctacgtggacgtgctgaaggacagtggacgcgattacgtatcccagttcgagggttcggccctaggaaagcagctgaacttgaagctgctcgataattgggacagcgtgacttccacattttctaaattacgtgaacagttaggcccagtcactcaggagttttgggataacctagaaaaggagacagaagggcttaggcaagagatgtcaaaggacctcgaggaggtgaaagccaaggttcaaccgtatcttgacgattttcagaaaaaatggcaggaggaaatggagttgtacaggcagaaagtggaaccattgcgggctgaattacaggaaggcgctcggcagaaattgcacgagctccaggagaagctgtccccactgggcgaggagatgcgggaccgcgcacgagcacatgtggatgccctccgtacccaccttgccccgtattccgacgaactgcgccaacggctggcagctcgactggaagcactcaaggaaaacggaggggcgcgattggcagaataccacgcgaaggcaacggagcatctaagcacactgtccgaaaaagccaaaccggccctggaagaccttaggcagggcctactgccagtgctcgagtccttcaaggtctctttcctgagcgcacttgaagagtacacaaagaagctgaatacacagtag

SEQ ID NO: 3582 - DNA, 804 bp, synthetic construct
  misc_feature 1..804: note = source = /note="Description of Artificial Sequence: Synthetic coding sequence"
  source 1..804: mol_type = other DNA
atgaaggccgccgtgctgaccctggccgtgctgttcctgaccggcagccaggcccggcatttctggcaacaagacgagccaccccaatccccgtgggatagagtgaaggacctggccacagtttacgttgacgtgctgaaggactctggacgggactatgtgagccagtttgaaggaagcgccctggggaaacagctgaacctcaaactcctcgacaattgggattcggtgacgagcaccttcagtaagctacgggagcagcttgggcccgtcacacaggagttctgggacaatctggagaaagagaccgaagggctgaggcaggaaatgagtaaggatctcgaagaagtgaaagccaaagttcaaccctacctggacgatttccagaaaaagtggcaggaggaaatggagctttacagacagaaggtcgaacccctgagagccgaactgcaggagggagctcgtcagaagctgcacgagctccaggagaagctgagcccccttggcgaagagatgagagaccgggctagagcccatgtcgacgctcttaggacccatcttgccccgtattcagacgagttaagacaacggcttgcggcccgcttagaggctctcaaagagaatggcggtgctaggctcgccgagtatcacgccaaggcaaccgaacatctcagtacattaagtgaaaaagcaaagccggcgctagaagacttgcgtcagggcctcctccccgtgctagagtcctttaaggtttccttcttgtccgccctggaggaatacacaaagaagttgaatacacaatag

SEQ ID NO: 3583 - DNA, 1653 bp, synthetic construct
  misc_feature 1..1653: note = source = /note="Description of Artificial Sequence: Synthetic coding sequence"
  source 1..1653: mol_type = other DNA
atgaccggcgacaagggcccccagcggctgagcggcagcagctacgggagcatttcatcgccaacctcccccacatcacctggccctcagcaagcccccccgcgcgagacatacctgtccgagaaaataccaattccagacactaaacctggcaccttctctttgcgtaaactctgggctttcactgggccaggattcctcatgtctatcgccttccttgatcccggcaacattgaatccgacctccaggccggggctgtcgccggattcaagctcttatgggtactgctgtgggccacagttctcggactactgtgccagcggctcgccgcaagattgggagtggtgaccggcaaagacttgggcgaagtttgtcacctgtattaccccaaagtcccaaggaccgttctctggcttaccatcgagctagctatagttggctctgacatgcaagaggtgattgggaccgcaatagcgttcaacttactttccgcgggccgaatacccctgtggggtggcgttctgataactatcgttgacacattcttctttcttttccttgacaattacggactccgcaaattagaagcctttttcggactgttaatcaccataatggccctcacctttggctacgaatacgtcgtggctcgccccgaacagggtgcattactgcgaggcctgtttctcccatcttgccccggctgtggccacccggagctgttgcaggcagtgggcatcgttggcgctattatcatgccccacaatatctatctgcacagcgcactcgtgaagtctagagagatcgacagagctaggagagcggatatcagggaggcgaacatgtatttcctcattgaggccaccatcgcccttagtgtctctttcataataaatctgttcgtgatggccgttttcgggcaggctttctatcagaagacgaaccaggcagctttcaatatctgtgcaaacagttccctgcacgactacgctaaaattttcccaatgaacaacgccacagtggccgtggacatctaccagggcggagtgatcctgggatgtctgtttggccccgccgctctatacatctgggcaattggactcctggccgccggccagtcatccacgatgactgggacttacgcagggcaatttgtgatggaaggattcctgaggctgcgctggtctcgctttgcacgggtactgctgactcgctcatgcgcgatactcccaacagtgctggttgctgtgttcagggatctgcgcgatctgtccggcctgaatgacctgttgaacgtccttcaatcactactgcttccgtttgcggtgcttcctatcttaacatttacgtcaatgccgaccctgatgcaggaattcgccaatggcctgttgaacaaggtcgtaacttcatcgatcatggtgctggtatgcgcgattaacctctacttcgttgtttcatatttgccatccctaccccaccccgcatacttcgggttggccgctctgttagcagccgcctatctcggcctcagcacctatctggtgtggacgtgctgtctcgctcacggtgctacttttttggcccactcctcccatcatcactttctctacgggctgctggaggaggaccaaaagggggaaacctctggatag

SEQ ID NO: 3584 - DNA, 13035 bp, synthetic construct
  misc_feature 1..13035: note = source = /note="Description of Artificial Sequence: Synthetic coding sequence"
  source 1..13035: mol_type = other DNA
atggaccccccccggcccgccctgctggccctgctggccctgcccgcactgctcctcctcctgctggccggtgccagggccgaagaggagatgctcgagaacgtctccctggtgtgtccgaaggatgccacaagatttaaacacctgagaaagtacacctacaactatgaggctgagtcctctagcggtgtccctggcacggcagactcccgatccgccacaagaatcaactgcaaggttgagctagaagtgccgcaactgtgtagctttattctgaagacgtctcaatgtactctcaaagaagtatacgggtttaatccagaaggaaaagcccttcttaagaagacgaaaaacagcgaagagtttgccgcggctatgtcccgttacgaactaaaactcgctatccccgagggaaagcaagtgtttctgtaccctgaaaaggacgagcccacttatatactgaacatcaaaaggggtattatcagcgccctccttgtcccacctgaaaccgaggaagccaagcaggtgctttttttagacactgtgtacgggaattgtagcactcacttcacagtgaaaaccaggaaaggaaatgtagcgaccgagatatctacagagagggacttaggacagtgtgacaggtttaaaccaatccgcaccgggatttctcccctggccctaattaaaggcatgacccggccgctctccaccctcatctcttctagtcagtcgtgccagtacactttggatgccaaacggaagcatgtggctgaagcgatatgtaaggagcagcacctttttctgcccttctcctataagaataaatacgggatggtggctcaagtgacccagactctgaaacttgaggatacgccgaagatcaattctagattcttcggcgaggggactaagaagatgggcctggccttcgaatctaccaagtcaacttcacctcctaagcaggcggaagcggtgctgaaaactttgcaagaactcaagaagctgaccatctccgaacagaatatccagagggcgaacctgttcaataaattggtaactgagctgagaggcctgagcgatgaagccgttacttcattgctgccccagctgatcgaggtctcatcgcctatcacattgcaggctctagttcagtgcggtcagccccagtgttcaacccacattttacagtggctcaagcgagtacatgcaaatcccctgctcattgacgtggtgacttacctggtagccttgatccccgagccaagcgcacagcagttaagagagatttttaatatggccagagatcagcggagcagggccaccctgtatgctctgtctcacgccgtgaacaactatcataaaacaaatcctactggaacgcaagagctcctggatatcgccaactacctgatggaacaaatacaagacgactgcaccggggacgaggattacacgtatctgatcttgagagtgatcggcaatatgggtcagacgatggagcaacttacacctgagttgaaaagcagcattcttaagtgtgtccaatctacaaaacccagtcttatgattcaaaaagcagctatccaggccctgaggaaaatggagccaaaagacaaggaccaggaagtactgctgcagacattcctagatgacgcctccccaggagacaagcgcctggccgcctacctgatgcttatgcgtagccccagccaagctgatattaacaagatcgtgcagatcctgccctgggagcagaacgaacaggtaaagaacttcgtcgcctcccacatcgcgaacatcttgaatagcgaggagctggacatacaggacctcaagaagttggttaaggaggccctgaaagaaagccagctgccaactgttatggacttccggaagttctcccggaattaccaactgtataagagtgtttccttgccctctctcgaccctgcctcggccaaaatagaggggaatttgatttttgatccaaataattaccttcctaaggagtctatgttgaaaacaaccctgactgcattcggcttcgcctctgccgatttgatagaaattggacttgaagggaaaggattcgagcccactttagaagcactgtttgggaagcaggggtttttccctgattccgtaaacaaggccttatattgggtgaacggtcaggtgccggatggtgtgtctaaagttctggtcgatcacttcggttatacaaaggatgataagcacgaacaggatatggttaacggaatcatgttgagcgtggaaaagctcattaaggatctgaagagtaaggaagtacctgaagcaagagcatacctccgtatacttggagaggagctgggctttgcatccctccatgaccttcaactgttggggaaactgctgctgatgggcgcaaggaccttacaggggattccccaaatgatcggagaagtgataaggaaaggatccaaaaatgattttttcctgcactacatctttatggagaacgccttcgaattgcctacaggcgctggcctccaattacagatctcttccagtggggtgatagcgcccggcgccaaggccggggttaagctggaagtggcaaatatgcaagctgagcttgtggccaaaccttctgtctccgtcgagttcgttacaaatatggggattatcataccagacttcgccaggtccggagtgcagatgaataccaattttttccatgagagcggtctggaagctcatgtagccctgaaagctggcaagctgaagttcataattccttctcccaagcggcccgtcaaactccttagtgggggcaacacgctacatctggtgtccacaacaaaaacagaagttatcccccctctgatagagaacaggcagtcatggtctgtctgcaagcaagtgttcccaggactgaattattgcacgagcggcgcatactcaaacgccagtagtactgactcagcttcttactaccccctcacgggcgacactcggctggagctagaacttaggccaaccggagaaatagaacaatactccgtgtcagccacatatgagctccaaagagaggacagggccttggttgataccctcaagtttgtgacacaagctgagggagctaaacagactgaagccactatgacgttcaaatataaccgccaatctatgacactcagctccgaggtgcagatcccggatttcgacgtcgacctaggcaccatcttgagggtgaatgacgaatctacagagggcaagacatcctaccgacttaccctcgacattcagaacaagaagatcaccgaggtcgcactgatgggccacttatcctgcgatacaaaagaagagcggaaaatcaagggagtcatttctatcccccggctccaggccgaggcaagatctgagatcctggcccactggagtccagctaagctcctactgcagatggattctagtgcgactgcctatgggtccaccgtgtcgaaacgcgtggcctggcactacgacgaagaaaagattgaattcgagtggaacaccggtactaatgtcgacacaaagaagatgacttcaaatttccccgttgacctgtccgactaccccaaatcgcttcacatgtatgccaaccggctgctcgaccaccgggtgcctcagacagacatgacttttcgacacgtgggcagcaaactgatcgtggccatgagttcctggctccagaaggctagtggcagcctcccttacacacagacgctgcaggaccacctgaattctctgaaagagttcaatcttcagaacatgggcctcccggactttcatattccagagaatctgtttcttaagtcagacgggcgggtcaaatacaccttaaacaaaaacagcctcaaaattgagattccattaccattcggcggtaagagcagcagagatctgaaaatgctcgagaccgtgaggacccccgctctgcatttcaagagcgttggctttcaccttccctcccgggagtttcaggtaccaaccttcactattcccaaactgtaccagttgcaggtccccttgctcggtgtgctcgatctgtcaactaatgtatacagcaatttgtataactggagcgcatcctactctggggggaacactagcactgaccacttcagcttgagagctaggtaccacatgaaggccgattctgtcgttgatctactgtcctacaatgtgcagggttctggagagaccacgtatgaccacaagaatacatttacactgtcatatgacggctccctgagacacaaatttcttgatagtaacatcaagttttcccacgtcgaaaaactgggaaataatccagtcagcaagggcctcctgatcttcgatgcaagcagcagctggggcccccagatgagcgcctctgtccacctggactccaagaagaagcaacacctgtttgttaaagaggtgaaaatagatggacagtttagggtcagttccttttacgctaagggcacgtatggactcagttgccagcgtgaccctaataccggcaggttaaatggggaatccaacctgagatttaatagctcctatctgcagggcacaaaccaaatcacgggcaggtatgaagacgggacacttagtctgacatccacttccgatttgcagagcggcattatcaaaaataccgcctccctgaagtacgagaactatgaacttactctcaagtctgacaccaacggcaagtacaagaatttcgccacgtccaataagatggacatgacattctctaagcagaacgctctgctgcgctccgaataccaagccgactacgagagcctgagattcttcagccttttaagtggttctctcaacagccacgggcttgaactgaatgctgatattctgggaacggataagattaactcaggagctcacaaggccacacttagaattgggcaggacggtatctcaacatcagctaccactaacttgaaatgctccctgctggtcctcgagaatgagttaaacgcagaactcgggttatccggcgcctcaatgaagctcaccaccaatgggagatttcgcgagcacaacgccaagttttctctggatggtaaggcggcactcacagaattgagcttgggcagcgcctatcaagctatgattctgggcgtggattcaaaaaacatctttaatttcaaagtctcccaggaaggactgaaattgtcaaatgacatgatggggtcgtatgccgagatgaagttcgatcacaccaatagcctaaacatcgctgggcttagccttgacttcagttcaaagttggacaatatttactcctcagacaagttctacaagcagacagtgaatcttcagctgcaaccatattcactggtcacaacactaaacagcgatcttaagtacaatgcccttgacctgaccaataacgggaagctgagacttgaaccccttaaactgcacgtggctgggaatctgaagggagcctaccagaataatgagattaaacacatctacgcaatttcaagcgcagcgttgagtgcatcgtacaaagccgacacagtggccaaggtgcaaggcgtggaattctcacaccgcctcaacaccgatatcgcagggctggcaagcgcaattgacatgagtacgaactataactctgactcgttacattttagcaatgtctttcggtccgtgatggctccatttacaatgaccatcgacgcgcacaccaacgggaatgggaaactggccctctggggcgagcacacagggcagctttatagcaagttccttttgaaggcagaaccgctggccttcactttctcacacgactacaagggcagcacaagtcaccaccttgtgtcccggaagtctatatctgccgccctggaacacaaagtgtcagccctgctgacgccggcggaacaaactggtacctggaagctgaagacacaattcaataacaacgagtattcccaagacttagacgcctataataccaaagacaagataggagtcgagctcacggggcgaaccttggctgacctgacgcttctggatagccctattaaggtgcctctcctcctatccgagccaatcaacatcattgatgcgttggaaatgagagatgccgttgagaagccacaagaatttaccatcgtcgcatttgttaagtacgataaaaatcaggatgttcactcaataaacctgccgttctttgaaaccttgcaggagtacttcgaaaggaaccgccagaccataatcgtggtgttggagaatgtccagaggaatttgaagcacatcaacatcgaccagtttgttaggaaatatagagccgccctgggaaaattacctcagcaggctaacgactatttaaactcctttaattgggagcgacaggtcagtcacgctaaagagaagctgacggcgctgacaaagaagtatagaatcaccgaaaatgatatacagatcgcactggacgacgccaagatcaacttcaacgagaaattgtcgcagctccagacttatatgatacagttcgatcagtatattaaggactcttacgatcttcatgacctgaagatcgccattgccaacatcattgatgaaatcattgaaaaactcaagtctttggacgaacattaccacatacgggtgaacttggtgaagacaatccacgacctgcatttgttcatagagaacatcgactttaataaatctggctctagcacggcgagctggatccagaacgtggacactaagtatcaaatcaggatccagatccaagaaaaacttcagcagctcaagcggcacatccagaacatcgatattcaacacctggcggggaagctgaaacagcacatcgaagccattgacgtgagggttttgctggatcagctcggcacgaccatctcctttgaacggatcaacgatatactggagcacgtcaagcattttgtaatcaacttaattggcgatttcgaggttgcagaaaaaataaatgccttcagggctaaagtccatgaactaatcgaacgctacgaggtggatcagcagatccaggttctcatggataagctggttgagcttgcccaccaatacaaattaaaagaaacgatccagaagctgtccaacgtgctgcagcaagtaaaaatcaaagactactttgaaaagttggtcggattcattgatgatgccgtgaaaaagttaaacgaactgtcatttaagacctttattgaagatgtgaataagtttttagacatgcttataaaaaagctgaaatctttcgactaccatcaatttgttgatgaaactaacgataaaatccgcgaagtcacacagaggctaaacggagaaatccaggctcttgaactgccacaaaaggccgaagctttaaaattgtttctggaagagaccaaggctacggtcgccgtgtatctagaatcccttcaggataccaaaatcaccttgataattaactggttgcaggaagctctttcctcagcctccctcgcgcacatgaaagccaaatttcgagagacccttgaagatactcgggatcgcatgtatcaaatggatattcagcaagagctccaacgctacctctccctggtgggccaggtctacagcaccctggtgacctatataagtgactggtggactctggcagccaagaacctcacggattttgccgagcagtatagcatacaggattgggctaagcgtatgaaagcgctggtcgagcagggtttcacggttccggaaatcaagacgatattgggtaccatgccggcttttgaggtctctctccaggccctgcagaaggctacctttcaaactcctgacttcatagtgccactcacagatctgcggataccctctgtgcagattaacttcaaggatctcaagaatatcaaaatccccagcaggttttccacacccgaattcactatcctgaacacctttcatattccttcattcacaatcgacttcgtcgaaatgaaagttaagatcatcagaactatcgatcagatgctcaatagcgaattacaatggccagtacctgacatatatctgagagatttaaaggtggaggatatccccctcgctagaataaccctgccggacttccgcttacctgagatcgccatcccagagtttatcatccccaccctgaaccttaatgatttccaggtgcctgacctacatatccccgaatttcagctgccgcacatctcccatacaattgaggtgcccacctttggcaagctgtattcaatcctgaagatccagagccccctctttaccctcgatgcgaacgccgatatagggaatgggactacctcagccaatgaggcagggatcgcagcctctattactgctaaaggggaatctaaactggaagtcctgaattttgatttccaagcaaatgcccagctcagtaatccaaagatcaaccccttggccctgaaggagtccgtgaagtttagtagcaaatatctcaggaccgaacatggatctgagatgctgttttttggcaacgctatcgagggaaagtcaaatacggtggcgtctctccacaccgagaagaacacactggaactcagtaacggtgtaattgttaaaattaataaccaactgacactggatagcaacactaagtatttccacaagctcaacatccctaagctagacttctccagccaggctgacttaagaaatgagattaaaaccctcctgaaggctggacacatcgcttggacatcatctggcaagggctcttggaaatgggcttgtcctcggttctccgatgaaggtacccacgagtcacaaattagcttcactattgagggacctctcacctcctttgggctgtcaaacaaaattaactctaaacacctaagggtaaatcagaatctagtgtacgagtctggctctttaaatttttccaagctggaaattcagagtcaggtggactctcagcatgtcggacactcggtgttgaccgccaaagggatggccctgttcggcgaaggtaaagccgagttcactggccgtcacgacgcccaccttaacggcaaggttattggcacactgaagaacagcctgttcttcagcgctcagccctttgagataaccgccagcacgaacaacgaaggcaacttgaaagtgagattccctctgcgtcttaccgggaaaattgactttctcaacaactatgcactttttctgagcccaagcgcccagcaagcatcatggcaggtgtcagcgcgtttcaaccagtacaaatataaccagaatttctctgcaggaaataatgagaatattatggaagcccatgtgggtatcaacggggaagcgaacctagactttcttaacataccgctaacaatcccggaaatgcgtctcccatacactatcattacaacacctcccctgaaggacttttccctctgggaaaaaacagggttgaaggagttcttaaaaaccactaagcaaagctttgacctcagcgttaaggcccagtacaagaagaataagcatcgccacagcataacaaatcctttagcagtcctgtgtgagtttatctcgcagagcattaagagttttgacagacacttcgagaagaatagaaacaacgccctggacttcgtcacaaaatcctacaacgagactaaaataaaattcgataaatacaaagccgaaaagtcgcatgatgaactgccccggaccttccagatcccaggctatacagtacccgtggtaaatgttgaggtgtcccccttcactatagagatgagtgcttttggatatgtgtttcctaaggccgtcagcatgccaagcttcagcatcctaggctcagacgtacgtgtgccttcttatacactgattttgccatcacttgagctccccgtgcttcacgtgcccaggaaccttaagctgagcttgccagatttcaaggaactttgtactattagccatatcttcatcccagcgatgggtaacatcacatatgatttctcctttaagagttcagtaataacactgaacaccaatgcggagctctttaaccagagtgatattgtggcccacctgctcagttcttctagttctgtcattgacgcgctgcagtataagctggagggaaccacaagattgacccgtaagaggggactgaagttggctactgcactctctttgtctaacaagttcgtggagggaagtcacaacagcaccgtcagcctgactactaaaaatatggaggtgagcgtggccactacaactaaggcccagatacctatcctccggatgaatttcaaacaagaactgaacggaaacacgaagtcgaaaccgactgtgtctagtagtatggaatttaaatatgactttaacagtagtatgttatattctacggccaagggggccgtcgaccataagcttagtctggagagcttgacatcctactttagcatcgagagctcgacgaagggggatgtaaaagggtcagtacttagccgggagtatagtgggacaattgcttccgaagccaacacttatctcaactctaaatccactcgcagctcggtgaaactgcagggaaccagtaaaattgacgatatctggaatctggaggttaaagaaaattttgctggagaggccaccctccagagaatttactccctgtgggaacacagcaccaagaaccacctgcaactggaggggctgtttttcaccaacggggaacacacctccaaggcaaccctcgagctgtccccttggcagatgtctgcccttgtgcaagtgcacgcctctcagcctagctccttccatgattttccagatctggggcaggaggtagctttaaatgctaatacgaaaaaccagaagattcgatggaaaaatgaggtgcggattcactccgggtcatttcagtcccaggttgaattatccaatgatcaggagaaggcccatcttgacatcgctgggagtttagagggacatctgagattccttaagaatatcattctccccgtgtacgacaaatccctgtgggatttcctgaagttagacgtgaccacttctatcggccgtaggcagcaccttagagtaagcaccgccttcgtgtatacaaagaatcctaacggttattccttctcaatccctgtgaaagtgcttgccgacaagttcatcattcctggactgaagctgaacgacctgaattccgtgctggtcatgccaacgttccacgtcccatttaccgatttacaggtgccctcgtgtaagctagacttcagggagatccagatttacaagaaactgcgaacatcgtcattcgccctcaatctgccaaccttgcctgaagtgaagttccctgaagtggacgtgctgactaaatactctcagccagaagattcgctaatcccctttttcgagatcaccgtccccgagagccaactgaccgtgagtcagtttaccctcccaaagtccgtatcagatgggatcgccgcgctagatctgaatgctgtggccaataaaatcgccgacttcgaacttcctactattatcgtgcccgagcagaccatcgaaattccctcaatcaaattctcggtgcccgctgggattgtgatcccgtccttccaggcgttaaccgcccggtttgaggttgattcccctgtctacaacgccacatggtctgctagcttgaagaataaagcagattatgttgaaaccgtattggacagtacgtgttcaagcaccgttcagttcctcgagtacgagttgaacgtgttagggacacataaaattgaggatgggaccctggcttcaaagacaaagggcaccttcgcccatagggattttagcgcagagtatgaggaggatggcaagtacgagggcctgcaggaatgggaagggaaggctcacctgaacataaaatcgcctgcatttacagatctgcacctccgatatcaaaaggataagaaggggatctcaaccagcgctgcatctccagccgtagggacggtgggtatggacatggatgaagacgatgacttcagcaaatggaacttttactactctccgcagtctagtccggacaagaagctaaccatctttaagaccgagcttcgtgttcgcgagagcgatgaagagacacagattaaggtcaattgggaagaggaggctgctagcggcctgctgactagcctcaaggacaacgtgccaaaggcgactggcgtgctgtacgactatgtgaataaatatcattgggaacatacgggcctcacactgcgcgaggtgagctccaagttgagacggaatctgcaaaacaacgctgagtgggtgtaccaaggcgccatccgtcagatcgacgacattgacgtcaggtttcagaaggctgcgtcagggaccacaggcacgtaccaggaatggaaagacaaggcccagaacttatatcaggaactattaactcaggaagggcaggcctccttccagggcctcaaagacaacgtgttcgacggcctagtcagagtaactcaggagtttcacatgaaggtcaagcatctcatagactccctgatcgactttctgaatttccctcgatttcagttccccgggaagccagggatttatacaagagaggagctgtgtacgatgtttatcagagaagtcggtactgtgctcagccaggtttactcgaaggtgcacaatgggtccgaaatcttattctcctacttccaggatctggttattacgctgccctttgagcttagaaaacacaagttgattgatgtgatttccatgtacagagagcttctgaaggatctgtccaaggaagcgcaggaagtctttaaggccattcagtcactgaagacaaccgaagtcctgcggaatcttcaggacctgctccagttcatcttccagcttatcgaggataacatcaaacagctcaaagagatgaaatttacctacctcatcaactatattcaagacgagatcaacacaatcttttcagattatataccctgcttttag

SEQ ID NO: 3585 - DNA, 798 bp, synthetic construct
  misc_feature 1..798: note = source = /note="Description of Artificial Sequence: Synthetic coding sequence"
  source 1..798: mol_type = other DNA
atgaagaaggaggtgtgcagcgtggccttcctgaaggccgtgttcgccgagtttttagccacactgatcttcgtcttttttggcttgggcagcgccctgaagtggcccagtgccctgccaacgattttacagatcgcattagctttcgggttggcgatagggaccctcgcacaggctctgggtcctgtcagtggtggccatattaatcccgctattactttggcgttgttagtgggaaaccagatttctttgttaagggccttcttctatgtcgcagctcagcttgttggtgcaattgccggagctggaatcctatatggagtggcgcccctcaatgccagaggcaacctggctgttaatgcactcaataataatacgacccagggacaggctatggtggtggaactgatcctcactttccaactggctctgtgcatctttgctagcactgattctcgtcgaacttctcctgttggctcacctgccctgagcataggcctgagcgtgaccctcggacatctcgtggggatttacttcacgggatgctctatgaacccagcaaggagctttgggccagccgtcgttatgaacagattcagccctgcccactgggtgttttgggttgggcccatcgtcggggcagtgcttgccgccattttatatttctatctcctcttccccaattcactcagcttgagcgaacgggttgcaattatcaaaggtacttacgaaccagacgaggactgggaagagcaacgggaagagagaaagaagaccatggaattgaccacacggtag

SEQ ID NO: 3586 - DNA, 993 bp, synthetic construct
  misc_feature 1..993: note = source = /note="Description of Artificial Sequence: Synthetic coding sequence"
  source 1..993: mol_type = other DNA
atgagcgccaagagccggaccatcggcatcatcggcgcccccttcagtaaggggcagcctcggggaggcgtggaagaaggacctacagtgctccgaaaggcaggcttactggagaagctaaaggagcaggttacgcaaaatttcctcattcttgaatgcgacgtgaaggattacggcgatctgccctttgccgatatccctaatgacagcccattccagatagtgaagaatccacgtagtgtggggaaagccagtgaacagttggctggaaaggttgctgaagttaaaaaaaacggacgcatttctctggtactggggggggatcactccctggccattggctctatctctggacatgctagagtgcaccctgatttaggcgtgatttgggttgacgcgcacacagatatcaatactcccctgactacaacgtccggcaacttgcacggccaaccagtttcctttctccttaaggagctgaaaggcaaaattcccgatgtcccggggttcagctgggtgacaccatgcatcagcgctaaggatatagtgtacattggactccgggatgtagacccaggggagcattatatactgaagaccctgggcatcaagtatttctccatgaccgaggtagatcgcctcggaatcggcaaggtcatggaggaaaccctgagctatttactgggtagaaaaaaaagacccatccatctgtcattcgatgtggatgggctcgatccgtccttcactccggctaccggtacaccagttgtaggcggcctgacatatagagaggggctatacattaccgaagagatatataagaccggcctgctgtcaggcctggacataatggaagtgaatccatctcttggcaagaccccggaagaggtcacacggacagtcaacactgcagtggctattacactcgcatgttttgggctcgccagagaaggcaaccataaaccgatagattacctgaatcccccgaagtag

SEQ ID NO: 3587 - DNA, 969 bp, synthetic construct
  misc_feature 1..969: note = source = /note="Description of Artificial Sequence: Synthetic coding sequence"
  source 1..969: mol_type = other DNA
atgagcgccaagagccggaccatcggcatcatcggcgcccccttctccaaagggcaaccccggggcggcgtcgaagaggggcccaccgtgctgcgaaaggcaggcctacttgagaagctgaaggaacaagaatgtgacgttaaagactatggagatctgccattcgccgacatacctaatgactccccatttcaaatcgtaaaaaatcctagaagcgtcgggaaggcttcagagcaactggctgggaaggtggctgaagtcaaaaagaatggcaggatttccttagtactcggaggcgatcattctctggcaatcgggagcatcagcggacatgctcgagtacaccctgacttaggtgtgatttgggtggacgcccatacagatattaacactcccctgacaacaactagcggcaatttacacggccagccggtgtcatttctgcttaaggaactaaagggcaagattcctgatgttcctgggtttagttgggtgaccccgtgcatttctgccaaggatatagtctatataggacttcgtgatgtagaccccggcgaacactacatccttaaaacactagggatcaagtatttctctatgacggaggttgacagattggggattgggaaggttatggaagagacgctgtcttacctactgggaagaaaaaagaggccaattcacctctcttttgacgtcgatggtctagaccccagcttcacccctgcaacaggaacccctgtcgtgggtggtctgacttatagagagggactctacatcacagaagaaatttacaagacaggtctgcttagtggactggacataatggaggttaatccgagcctggggaagacgcccgaagaagttaccagaaccgtgaacacggctgtagccattactctggcctgctttggtctggccagggaaggtaatcacaagcccatcgattacctcaaccctcccaagtag

SEQ ID NO: 3588 - DNA, 711 bp, synthetic construct
  misc_feature 1..711: note = source = /note="Description of Artificial Sequence: Synthetic coding sequence"
  source 1..711: mol_type = other DNA
atgagcgccaagagccggaccatcggcatcatcggcgcccccttctctaaaggacagccaagaggcggggtcgaggagggtcccaccgtactgaggaaagccggcctgctcgagaaacttaaggaacaggagtgcgatgtcaaggattacggcgatctaccctttgctgatatcccaaacgacagccccttccaaattgtaaagaaccctcgatctgtgggtaaggcctccgagcagctggccggaaaggtcgcagaggtgaaaaagaatggccggatttctttggtactgggcggtgatcatagtctagctattggctctatcagcgggcacgctcgagtccatcccgatctgggtgtaatctgggtggatgctcacaccgatatcaacacacccctcaccactacaagtggcaacctccatggccagccagtgagcttcttattgaaggagctgaaaggcaaaatacccgatgtgcctggcttcagctgggtcaccccgtgtatttctgctaaggatatcgtgtatattggattgcgggacgtcgatccaggcgaacattacatactgaaaaccctcggaattaagtacttctctatgactgaagttacccgcactgtgaacactgcggtggccattaccctggcatgctttgggctcgccagagagggcaaccataagcctatagattatttgaacccccctaaatag

SEQ ID NO: 3589 - DNA, 1395 bp, synthetic construct
  misc_feature 1..1395: note = source = /note="Description of Artificial Sequence: Synthetic coding sequence"
  source 1..1395: mol_type = other DNA
atggccagcgagagcggcaagctgtggggcggccggttcgtgggcgccgttgacccaatcatggagaaattcaacgcctcgatcgcctatgataggcatctctgggaagtcgacgtccagggatccaaagcatatagccgcggactggagaaggccggcctgcttacaaaggccgaaatggaccagatacttcatgggctcgacaaggtcgctgaggagtgggctcaagggacattcaagctcaactcaaacgacgaggacattcataccgccaatgaacggagactgaaagagcttatcggggcaaccgctggtaagctgcacaccggccgaagccgaaatgatcaggtggttacagacctgcgactctggatgcgacaaacatgctccacgctgtccgggctgctttgggagcttattcggaccatggtggatcgagcagaggccgagcgcgatgtcctttttcccggctacacacacctgcagcgcgcccaacccattcgatggagtcattggatactgagccacgcagtagctctgacacgagatagcgagcggctgctggaagtgaggaaacggataaacgtgctcccactgggcagcggagccatcgccggcaaccccctgggagtagatagggaactgctgcgtgcggagttgaacttcggagccataaccctgaatagtatggacgctactagcgagagagacttcgtggcagagttcctgttctgggcttcgttatgtatgacgcatctgtccagaatggcagaggatctcattttgtactgtacaaaagaatttagctttgtgcaactgagcgacgcctacagtaccggtagctctctcatgccgcagaaaaagaaccctgactccctggagctcatcagatccaaagctggtcgcgtatttggacgatgcgccggccttctcatgacactcaagggtcttccaagcacttacaacaaagacttgcaggaggacaaggaggcagtgttcgaggtgtctgatacaatgtcggcggttttgcaggttgccacaggcgtgatctcaacactgcagattcatcaggaaaatatggggcaggcactgagccccgacatgttggcgacagacctagcctactacctcgtgaggaagggaatgccttttcgacaggcgcatgaggcttccggtaaggcggtctttatggctgagaccaaaggcgtcgccctgaatcaattatctctccaggaactgcagactataagccctctcttctcaggggatgttatttgtgtctgggactacgggcacagcgtggagcagtacggcgcgttgggcggcacagcccgctcttcagtggactggcaaattaggcaggtgcgggccctattacaagctcagcaagcctag

SEQ ID NO: 3590 - DNA, 1317 bp, synthetic construct
  misc_feature 1..1317: note = source = /note="Description of Artificial Sequence: Synthetic coding sequence"
  source 1..1317: mol_type = other DNA
atggccagcgagagcggcaagctgtggggcggccggttcgtgggcgctgtcgatcccatcatggagaagttcaacgcctccattgcgtacgaccgacatctctgggaggtcgatgtacaaggtagcaaggcctattcaagaggtctggaaaaagctggcctgttgacaaaggcagagatggatcagattctccacggcctggacaaggttgccgaggaatgggcacaaggcacattcaaattgaactccaacgatgaggatatccataccgccaacgaaagaaggttaaaagaactcattggtgctacagcaggcaaactccatacagggcgtagccgaaacgaccaggtcgtgaccgacctcaggctatggatgcgtcagacttgttctactctgagcgggctgctgtgggaactgattagaaccatggtcgaccgggcagaggcagaaagagacgttttattccccggatacactcatttacaaagggcccagcccatccgatggtcccattggattttatcaggcgccatagcagggaacccactaggggttgatcgcgaactcctgagagccgaattgaattttggtgccatcacactcaacagtatggatgcgacaagcgagagagattttgtagccgagtttctgttttgggcttctctttgtatgactcaccttagtagaatggctgaggacctcatcttgtactgtacaaaggaattctccttcgtgcagctgagtgacgcatactcgacaggctcctccctcatgccccagaagaagaaccctgactcactggagttaatccgaagtaaggccggccgcgtgttcggcagatgtgcaggtttactgatgaccttaaaagggcttccaagcacctataacaaagatttgcaagaggataaagaggcagtatttgaagtgtcagatacgatgagcgctgtgctgcaggtggcaacaggagtaattagcactctgcagatacaccaggaaaacatgggtcaggcgctgtctcccgacatgctggctactgatctcgcctactatttagttcgcaaaggcatgccgtttcgccaggcacacgaggcctcgggcaaggccgtgttcatggccgagactaagggcgttgccctcaatcaattgagtctgcaagaactgcagaccattagtcccctgttcagtggcgatgttatttgcgtgtgggactacgggcacagcgtggaacagtatggcgctttagggggcacagccaggtccagcgtcgactggcagatccgtcaggtgagggccctcttgcaagctcagcaggcctag

SEQ ID NO: 3591 - DNA, 1335 bp, synthetic construct
  misc_feature 1..1335: note = source = /note="Description of Artificial Sequence: Synthetic coding sequence"
  source 1..1335: mol_type = other DNA
atggccagcgagagcggcaagctgtggggcggccggttcgtgggcgcggtggacccaatcatggaaaagttcaatgcctccatcgcctatgaccggcacctgtgggaggtagacgtgcaggggagtaaggcatactcacgaggattggaaaaagctggcctgctcactaaggccgagatggaccagattcttcatgggctcgataaagtcgcggaggagtgggcacagggaacattcaagcttaactccaatgacgaggacatacacaccgccaacgagcgaaggctcaaagagttgataggggctacagcaggcaaactgcacacagggcgtagtcgaaacgaccaggttgtgacagacctgcggctctggatgagacagacatgttccaccctcagcgggctgctgtgggagctaatccgcaccatggtcgaccgagcagaagcagaaagagatgtcctctttcctggctacacacacctgcagcgggcacagccaatacgatggtcacattggatactgtcacacgccgtggccctcactcgcgacagcgaacgactcttagaggtaaggaagcggattaatgtgctgcctctcgggagcggcgccatcgctgggaaccctctgggggtcgaccgggagttacttcgcgcggagctgaacttcggagcaatcacattgaatagcatggacgccacatccgagagagacttcgtggccgagttcctcttctgggcatccctctgcatgacccacctttcccgaatggcagaagatttaattctgtactgtactaaagaattctctttcgtccagttgtcagatgcatatagtacaggcagctcattgatgccccaaaaaaaaaatccagattcgttggaactgatccgatctaaagccggaagggtgtttggacgcgaggataaggaagccgtttttgaagtgagcgacactatgtctgccgtgctgcaggtggcaacaggagtgataagtaccctccaaattcaccaagagaatatgggccaggcactctccccagacatgctggcaacagacctcgcgtactacttagtgaggaaggggatgccgttccgacaggctcacgaggcctccggaaaggcggtttttatggctgagactaagggggtggcgcttaatcaattgtctctgcaagaactacagaccataagtcctctgttctccggagatgtgatttgtgtttgggattatggccacagcgtggaacagtatggggcgcttggcgggaccgcccggtcatcagtggactggcagatccggcaagtgcgagcactgctgcaggctcaacaggcgtag

SEQ ID NO: 3592 - DNA, 1395 bp, synthetic construct
  misc_feature 1..1395: note = source = /note="Description of Artificial Sequence: Synthetic coding sequence"
  source 1..1395: mol_type = other DNA
atggccagcgagagcggcaagctgtggggcggccggttcgtgggcgcagtggacccgatcatggagaagttcaacgcaagtattgcatacgatcgccacctttgggaggttgatgtacaggggagtaaggcatactcccgggggttagagaaagccggactgcttacaaaggctgaaatggaccagatactgcatggcctggataaagtggctgaagaatgggctcaggggacattcaagctgaatagcaacgatgaagacattcatactgcaaatgagcgccgattgaaggaactcatcggcgctaccgccggtaagctgcacacaggtaggagcagaaacgaccaggttgtgaccgatctgaggctgtggatgcggcagacttgctctactctcagcggtctgttgtgggaactgatacgaactatggttgaccgggccgaagcggagcgcgacgtcctgtttcctgggtacacacacctacagcgggcacaaccaatcagatggtcacactggatcctaagccatgccgttgccctcacccgggattccgaacgcttactcgaggtgagaaagcggatcaacgtgttgcctctcggatccggagctatcgccggaaaccccctgggggtcgaccgggaacttttgcgtgccgagctcaattttggagctattactctgaattccatggatgctacatcagagcgggattttgtggccgagtttctgttctgggccagtctttgcatgactcacctgtctcgaatggccgaagatctgatcctgtattgcaccaaggaattcagcttcgttcagctcagtgacgcctactctacaggaagttctctcatgccacagaaaaaaaacccagactcattggagttgattcggagtaaggccggccgcgttttcgggcgatgcgctggcctgctgatgactttaaaaggactgccttcaacttacaacaaggatcttcaggaggataaggaggctgtctttgaagtgtccgacaccatgtctgccgtgcttcaggtcgctaccggggtaataagtaccctccaaatccaccaggaaaacatgggccaggccctgtctcccgacatgctggccacagacctggcctattatctggtacggaagggcatgccgtttagacaggcccacgaagcgtcaggaaaggcggtgttcatggccgagactaaaggcgtggccttgaaccagctgtctctgcaggagctacagacaatatcccctctgttctccggagatgtgatatgtgtgtgggactacgggcattccgtggagcagtacggggccctcggtggaactgcccgcagcagtgtggattggcagatacgccaggtgagggctctcttacaggcacagcaggcctag

SEQ ID NO: 3593 - DNA, 297 bp, synthetic construct
  misc_feature 1..297: note = source = /note="Description of Artificial Sequence: Synthetic coding sequence"
  source 1..297: mol_type = other DNA
atggagaagttcaacgccagcatcgcctacgaccggcacctgtgggaggtggatgtgcaggggtcaaaagcctacagccgaggacttgaaaaagctggcctgctgaccaaggctgaaatggatcagattctgcatggcctcgataaggtcgccgaagagtgggcccagggaaccttcaagcttaactctaacgatgaagatattcatactgcgaatgaacggcgacttaaagagctaataggagctacggcaggcaaacttcacactggccgctcacgcaacgaccaagtgctgtag

SEQ ID NO: 3594 - DNA, 1239 bp, synthetic construct
  misc_feature 1..1239: note = source = /note="Description of Artificial Sequence: Synthetic coding sequence"
  source 1..1239: mol_type = other DNA
atgagcagcaagggcagcgtggtgctggcctacagcggcggcctggacacatcatgtatactagtgtggctcaaagagcaaggctacgacgtgatagcctacctggcaaacatcgggcagaaggaagattttgaagaagccagaaagaaggcgctcaagctaggtgcaaagaaggtttttatcgaggatgtctccagggaattcgtggaagaattcatctggcccgcaatccagtcaagtgccctgtatgaggatcgttatctcttaggtacaagtctggcgcggccctgtattgctcgcaagcaggtcgaaattgcacagagagagggggcaaaatacgtgagccacggggcaaccggcaaagggaatgaccaggtgcggtttgaactcagctgctactctttggcacctcagatcaaggtcattgcaccttggaggatgcctgaattttacaatcgatttaagggtagaaacgatctgatggaatatgccaagcagcatggaatcccgattccagttacacctaaaaatccctggtctatggacgaaaacctgatgcatatctcttacgaagccgggattttggaaaaccctaagaaccaagcccccccaggtctatacactaagactcaggatccagctaaggcgccaaacacccctgacatcctggagattgagtttaagaaaggagtgccggtaaaagtgaccaacgtgaaggatgggacaactcaccagactagcctagagttatttatgtacctaaacgaagtcgcaggaaaacatggagtcggcagaattgatattgtggaaaatcgcttcattgggatgaagagccggggcatttacgaaacaccggctggcaccatcctgtaccacgcccatttagatatcgaggctttcaccatggatcgcgaagtgcgcaaaattaagcagggactcgggctgaagtttgcagagttggtatacactggcttctggcactcacctgaatgcgagtttgtgcggcactgtatagctaaaagccaggaacgggtggaaggtaaagtacaggtttccgtactgaaggggcaagtttacattctcggcagagaatctccgctctccctgtataacgaggagttggtgtctatgaatgtgcagggtgattacgagcctaccgacgcaacgggtttcataaatatcaattccttacggctaaaagagtaccatcgcctgcagtctaaagtcacagcaaagtag

SEQ ID NO: 3595 - DNA, 1239 bp, synthetic construct
  misc_feature 1..1239: note = source = /note="Description of Artificial Sequence: Synthetic coding sequence"
  source 1..1239: mol_type = other DNA
atgagcagcaagggcagcgtggtgctggcctacagcggcggcctggatacctcttgtatcctcgtttggctcaaggaacaagggtatgatgtgatagcctacctcgccaatatcggccaaaaggaggactttgaagaggcccgcaaaaaggcattgaaactaggcgcgaaaaaagttttcatcgaggacgtgagccgcgaattcgtagaagagtttatctggcccgccatacagtctagtgcactgtacgaagaccgctatctcttgggtaccagtctggctcgtccatgtatcgcccggaaacaagtggagattgcgcagagagagggcgctaaatatgtatcccacggcgccacagggaaggggaatgatcaggtaagatttgaactgtcatgttacagtctggccccacaaatcaaggtgatcgcaccttggcggatgccagagttctataaccgtttcaaaggcagaaacgacctcatggaatacgcaaagcagcacggtatccccatccctgttacccccaagaacccatggagcatggacgagaatctcatgcacataagctatgaggcgggaatactggagaatccaaaaaaccaagcaccaccggggctgtacaccaagacacaggaccctgccaaggcccccaatacacctgacatactggagatagagttcaagaaaggggttccggtgaaggttacgaatgtgaaggatgggactactcaccagacgtccctcgagctgttcatgtacctgaatgaggtagcagggaagcatggtgtcggccgcatagacatcgttgagaacagatttatcggcatgaaaagcagaggaatatacgagaccccagctggcacaatcctgtaccacgctcatcttgatatcgaggcctttacaatggaccgcgaggtgcggaaaatcaaacaggggttaggtctaaagttcgcagagctggtgtacaccggcttctggcattccccagaatgcgagtttgttagacactgcatcgcaaagagccaggagcgtgttgaaggaaaggttcaggtaagtgtgttaaaaggccaggtgtatatcctagggcgtgaatccccactcagtctgtacaacgaggaactcgttagcatgaatgttcagggtgactatgagcctacagacgctacagggtttatcaatatcaactcgctgcgcttaaaagaataccatcgcctgcaaagtaaggtcacggccaaatag

SEQ ID NO: 3596 - DNA, 510 bp, synthetic construct
  misc_feature 1..510: note = source = /note="Description of Artificial Sequence: Synthetic coding sequence"
  source 1..510: mol_type = other DNA
gagcccggccccctgcagctgatggtggtggccgaggcccagggcggcaagcacggagttgggcgcatcgatatagtggagaacaggtttataggcatgaagtccagaggaatttatgagaccccggccggcactattctgtatcacgctcacctagacatcgaggccttcaccatggacagagaggtgagaaagatcaaacaggggcttggactcaaatttgccgagctggtgtacaccggcttttggcacagtcctgagtgtgaattcgtgagacactgtattgctaaatcccaggaacgagttgaaggaaaagtccaggtcagcgtgctgaagggtcaggtgtatattctggggagagagagtcccctgtccctttacaatgaagagttagtctccatgaacgttcagggcgactatgaacccactgacgcgactgggttcatcaacatcaatagcttgaggttgaaggaatatcataggctacagagcaaagttactgcaaaatag

SEQ ID NO: 3597 - DNA, 1239 bp, synthetic construct
  misc_feature 1..1239: note = source = /note="Description of Artificial Sequence: Synthetic coding sequence"
  source 1..1239: mol_type = other DNA
atgagcagcaagggcagcgtggtgctggcctacagcggcggcctggacactagctgcatcctggtctggctcaaggagcaaggctacgacgtgatcgcctaccttgctaatatcgggcagaaggaagactttgaggaagctcggaagaaggctctgaagctgggggctaagaaggtctttatcgaggacgttagcagggagtttgtggaagagtttatctggccggctatccagagttcagcgctttacgaagacaggtacctcctggggacctcacttgcaaggccctgcatcgcaaggaaacaggtagaaatcgcccagcgggaaggcgcaaagtatgtatcacacggcgctaccggcaagggcaatgatcaagtcaggtttgagctgagctgctattctctggcccctcagatcaaagtgatagctccatggagaatgcctgagttctataatcgcttcaagggaagaaacgacctaatggagtacgctaaacagcacgggatcccaatccccgttactcctaagaacccatggagtatggatgaaaatctaatgcacatctcctatgaagccggaattctggagaaccctaagaatcaggctcctcccggactgtatactaagacccaagatccagcaaaggcaccaaacacacccgatattctggagattgagttcaaaaagggagtccccgttaaggtgacaaacgtgaaggacggaactacccaccagacatccttagaattgtttatgtatctgaacgaagtagcaggaaagcatggcgtggggagaattgatattgtggaaaataggtttataggcatgaaaagtagaggcatctacgaaacacccgctggaacgatcctgtaccacgcacacctggacattgaggccttcacaatggatagagaggtgaggaaaattaaacaggggctgggtctaaaattcgccgagttggtgtataccggcttttggcatagcccagagtgcgagtttgtgcggcattgtatcgccaaaagccaggagcgagtggagggcaaagtccaggtgagcgtgctgaaagggcaagtctacatcctgggccgcgagtcccccctctcattatataacgaggagctcgtttcaatgaacgtgcagggagactacgaacctacagacgcgaccgggttcattaacatcaattcgctgaggttaaaggaatatcaccggctgcaatctaaggtgaccgctaaatag

SEQ ID NO: 3598 - DNA, 1239 bp, synthetic construct
  misc_feature 1..1239: note = source = /note="Description of Artificial Sequence: Synthetic coding sequence"
  source 1..1239: mol_type = other DNA
atgagcagcaagggcagcgtggtgctggcctacagcggcggcctggacacctcctgtatactggtgtggcttaaagaacaggggtatgatgtcatagcttatctagcaaatattgggcagaaagaggattttgaggaagccaggaaaaaggctctcaaactgggggctaagaaggtctttatcgaggatgtctcccgcgaattcgtcgaagagttcatttggccagccattcaatccagcgctctctatgaggatcggtacttacttggaactagtttggctcggccttgcatcgccagaaaacaggtcgagattgcccaacgcgaaggcgccaaatacgtcagccacggagcaacgggcaaagggaatgatcaggtgcggtttgagctgtcctgttactctctggctccacaaatcaaagtcatcgcaccctggagaatgcccgagttctacaatcgctttaagggcagaaacgatctgatggaatacgccaagcagcacggaattccaattccggtgactccaaagaatccgtggagtatggacgaaaatctaatgcatatctcctatgaggcggggattctggaaaatccaaagaaccaggcacctcctggtttgtataccaagacacaagaccctgccaaagccccaaataccccagatatcctcgaaattgagttcaagaagggggtgccagtgaaagtcacaaacgtgaaggatggcaccacccatcagacctcactggagttattcatgtatctgaacgaagtcgccggcaaacatggtgtgggccggatagacattgtagagaatagatttatcgggatgaagtctaggggcatttatgaaacgccggctggaaccattctttaccacgcccacctggatatcgaagcgttcaccatggatcgtgaggtacggaaaattaagcaggggctggggctcaagtttgccgagcttgtttacaccggtttctggcacagccctgagtgtgagtttgtccgtcattgcatagctaagagtcaggagagagtggagggaaaggtgcaggtgtctgtactgaaaggacaagtatacattctgggccgcgagagtcctctctcactctacaatgaagagctggtctcgatgaacgttcagggggattacgaaccaaccgatgcgacaggctttattaacataaactccctgaggttgaaggagtaccaccgtctgcagagcaaggtgaccgcaaagtag

SEQ ID NO: 3599 - DNA, 597 bp, synthetic construct
  misc_feature 1..597: note = source = /note="Description of Artificial Sequence: Synthetic coding sequence"
  source 1..597: mol_type = other DNA
atgagcagcaagggcagcgtggtgctggcctacagcggcggcctggacacatcttgcattctcgtttggctgaaagaacagggttacgatgtgatcgcctatttggcgaatattgggcagaaggaagactttgaggaggcccgcaaaaaggcccttaaactgggtgccaagaaggtctttattgaggacgttagtagagagttcgttgaggaattcatctggcctgccatccagtccagcgcgctctatgaggatcggtacttgctcggcaccagtctggctcggccttgtatcgctcggaaacaggtcgagatagcacagagagagggagccaagtatgtctcacacggcgcaacgggaaagggaaatgatcaggtgcgatttgagctctcttgctatagcctggcacctcagattaaggtgatcgccccttggcgcatgccagagttctataacagatttaagggtagaaatgacctgatggaatacgctaagcagcacgggatccctatacctgtaacccccaaaaacccctggagtatggatgaaaatttaatgcacatctcctatgaagccggcatcctggagaacccatag

SEQ ID NO: 3600 - DNA, 540 bp, synthetic construct
  misc_feature 1..540: note = source = /note="Description of Artificial Sequence: Synthetic coding sequence"
  source 1..540: mol_type = other DNA
atgagcagcaagggcagcgtggtgctggcctacagcggcggcctggacacatcttgcattctagtgtggcttaaagaacagggatacgacgttattgcgtacctggcaaatattggccaaaaagaagactttgaggaggcccgcaagaaagcgctgaaactgggcgcgaaaaaagttttcattgaagatgtgagtcgcgaatttgtggaggaattcatctggccagccattcaatcatccgctctctatgaggacaggtatctcctcggcacaagcctggcccgcccctgtatagccaggaaacaggtggaaattgcgcagcgcgaaggggccaagtacgtctctcatggcgccaccggcaaagtgatagcgccctggaggatgccagaattttataatcgcttcaagggaagaaacgatcttatggagtatgccaagcagcacgggattcctataccagtgactccgaaaaatccatggagtatggacgagaacttaatgcatatcagttatgaagcaggcatactggagaacccttag

SEQ ID NO: 3601 - DNA, 663 bp, synthetic construct
  misc_feature 1..663: note = source = /note="Description of Artificial Sequence: Synthetic coding sequence"
  source 1..663: mol_type = other DNA
atggagctgggcctgggcggcctgagcaccctgagccactgcccctggccgaggcaacagcccgccctttggcccacgctggccgctttagccctactttcgtcggttgctgaggcaagtctgggatcggccccaagatcccctgcaccaagagaaggcccaccccctgtcctggccagccccgcggggcatctgcccggtgggcgaaccgctaggtggtgttctgggagagcccgtagaccaccacctcagccaagcaggcccgcccctccaccgcccgctcccccatccgctcttccacggggtggacgagcagctcgtgccggaggccccgggtctcgggctcgggcagcgggcgctcgcggatgccggctgcggtcacagcttgtgcctgtcagggctctgggattaggccaccgctcagacgagttagtgcggtttcgtttctgcagcggaagctgccgccgggctagaagccctcacgacctcagcctcgccagtctgttgggagccggggccctgcggcccccaccaggcagccgccctgtgtctcagccttgctgtagaccaacaaggtatgaggcagtcagctttatggatgtcaactccacctggaggacggtcgacagactctcagccaccgcttgtgggtgcctggggtag

SEQ ID NO: 3602 - DNA, 663 bp, synthetic construct
  misc_feature 1..663: note = source = /note="Description of Artificial Sequence: Synthetic coding sequence"
  source 1..663: mol_type = other DNA
atggagctgggcctgggcggcctgagcaccctgagccactgcccctggccccgacagcagcctgcgctctggccaaccctagccgctcttgctcttctctcaagtgtcgccgaagcaagtctgggatcggcccctcgcagccctgcgccacgtgaagggcccccccctgtgctcgcctctccggccgggcatcttcctgggggacgtacagctaggtggtgttccggaagagcccgcagaccacccccccaaccatctagacccgctccacctcccccagccccaccaagtgccttacccagaggggggcgcgccgctcgggccggagggccaggaagtcgagctagggcagcaggcgctagaggctgtaggctgcggtcccagttggtgccggttagggctctgggactcgggcatcgctcagatgaattagtgcgcttccgcttttgtagtggcagctgtcggagagcaagaagcccccacgatctatctctggcctctctgctgggggccggagctctgcggccccccccaggatctcgacctgtgtcacagccatgctgcaggcccacaagatatgaagccgtgtcatttatggacgtgaattcaacctggagaaccgtggatagactgtctgcgactgcctgcggctgcctgggttag

SEQ ID NO: 3603 - DNA, 687 bp, synthetic construct
  misc_feature 1..687: note = source = /note="Description of Artificial Sequence: Synthetic coding sequence"
  source 1..687: mol_type = other DNA
atggagctgggcctgggcggcctgagcaccctgagccactgcccctggcctaggcaacaagccccactgggtctatccgcccagcccgcactgtggcctaccctcgctgccttggctttgcttagcagtgtggccgaggcctccctgggctctgcgccccggagtcccgcccctcgggaagggcccccgccggtgctagctagcccggcgggtcacctaccaggcggccgaaccgccaggtggtgctccggacgagccagacggcctccacctcagccatcccgccctgcccctccaccccccgcccctccgagcgccctcccgcgcggtgggagggcagctagggccggcggcccggggagccgtgcacgtgccgctggcgcaaggggctgtaggctgcgcagccaactcgtgccagtccgcgcactcgggctggggcacaggtccgatgagctcgtgcgctttagattttgcagtgggtcatgtcggcgtgccagatcaccccacgacttgtcccttgcaagtctgcttggagccggcgcgcttaggccgcctccagggagccgtcccgtctcacaaccttgctgccgccccacaaggtacgaagccgtgagttttatggacgtcaactctacatggaggaccgtggatagactctccgcgacggcttgtggatgcctcggctag

SEQ ID NO: 3604 - DNA, 201 bp, synthetic construct
  misc_feature 1..201: note = source = /note="Description of Artificial Sequence: Synthetic coding sequence"
  source 1..201: mol_type = other DNA
atggagctgggcctgggcggcctgagcaccctgagccactgcccctggccccggcaacaacccgcactttggcccaccctcgctgcccttgctctgctttcctcggttgcggaggcctccctgggaagcgctcctaggtcgcctgctccacgcgaaggtcctccccccgtgctggcaagcccggcaggacacctcccgtag

SEQ ID NO: 3605 - DNA, 270 bp, synthetic construct
  misc_feature 1..270: note = source = /note="Description of Artificial Sequence: Synthetic coding sequence"
  source 1..270: mol_type = other DNA
atggagctgggcctgggcggcctgagcaccctgagccactgcccctggcctaggcagcaggcccctctcggcctgtcagctcagccggcactgtggcctacactcgctgctctcgcccttctctcatcagtggctgaggcaagccttggctcagccccaagaagccctgctccacgcgaaggaccgcctccagtactcgcatcacctgccggccacctgcctggaggccgcaccgcgcgctggtgttccggaagggcccggaggccctag

SEQ ID NO: 3606 - DNA, 201 bp, synthetic construct
  misc_feature 1..201: note = source = /note="Description of Artificial Sequence: Synthetic coding sequence"
  source 1..201: mol_type = other DNA
atggagctgggcctgggcggcctgagcaccctgagccactgcccctggccccgtcaacagccagcactgtggccaacattagctgcgttggctctgctctcgagtgtggccgaagcaagtcttggctctgctcccagatcccctgcacctagagaaggacctcctccggtgctcgcaagcccagccggccatctgccctag

SEQ ID NO: 3607 - DNA, 270 bp, synthetic construct
  misc_feature 1..270: note = source = /note="Description of Artificial Sequence: Synthetic coding sequence"
  source 1..270: mol_type = other DNA
atggagctgggcctgggcggcctgagcaccctgagccactgcccctggccccggcagcaagcacctctcgggctatctgcacaaccagctctgtggcctactttggcggccttagcactcctcagtagcgttgccgaggctagtctagggtctgctcctcgctccccagcccccagggagggccctcctccagtcctggccagccccgctgggcatttgcctgggggaagaactgcccgatggtgctccggtagagcccgcaggccatag

SEQ ID NO: 3608 - DNA, 687 bp, synthetic construct
  misc_feature 1..687: note = source = /note="Description of Artificial Sequence: Synthetic coding sequence"
  source 1..687: mol_type = other DNA
atggagctgggcctgggcggcctgagcaccctgagccactgcccctggccccggcagcaggcacccctgggactgagcgctcagccagctctgtggcctaccctggctgctctggctctactcagttcagttgccgaggctagcctaggaagcgctccccggagtccagctccccgcgaagggcctcctcctgtgctcgcctcacctgcgggacatctgcccggaggtagaactgcacggtggtgttcaggcagagcacgccgaccccctccgcaaccatcccgaccagcacctcccccaccagctcctcccagcgccctcccacgcgggggccgcgcagctcgcgccggcgggcccggaagccgcgcacgcgccgccggggccagggggtgcagattgcgctcccagctcgtccccgtgcgcgcattaggactaggacaccgctccgacgagctggtaagatttagattctgttccggcagctgcaggagggcacgctccccccacgacttatctctcgcaagcctgctgggtgcaggcgccttgcgtcccccaccaggatcccggcctgtctcccaaccatgctgtagaccaactaggtatgaggctgtgtcattcatggacgtaaactcgacttggcgcaccgtggaccggctgagtgccactgcctgtgggtgcctcgggtag

SEQ ID NO: 3609 - DNA, 1602 bp, synthetic construct
  misc_feature 1..1602: note = source = /note="Description of Artificial Sequence: Synthetic coding sequence"
  source 1..1602: mol_type = other DNA
atgggcccccggggcgccgccagcctgccccggggccccggcccccgccggttgctgttacctgtggtacttccgctgctcttgctacttctgctggcaccgccagggagtggggccggagcctccagaccaccccacctggtgttcctcctcgcggacgatctgggctggaacgatgtggggttccatgggagtaggattcgaactccccaccttgacgcgcttgccgccgggggcgtgctgttagataactactacacccagcctctctgcacgccctctagaagtcaactcctcaccggacgctatcagattaggactggcttgcaacatcagatcatttggccctgccagcccagttgcgttccactcgacgagaagctgcttccccagctgcttaaggaggctggctacaccacgcatatggtcggcaagtggcacctgggcatgtataggaaagagtgtctgcccacccgtcgtggatttgacacatatttcggctacctgctggggtcagaagattattattcgcacgaacggtgtacgctcattgacgccctaaatgtcacacggtgtgcccttgattttagagatggcgaggaggtcgccaccgggtacaaaaatatgtatagtaccaacatcttcacaaagagggcgatcgcactcatcactaatcatccccctgaaaagcccctgttcctgtatctggccctccaaagcgtccacgaaccacttcaggtccccgaggagtatctgaagccttacgactttatccaggataagaaccggcatcattatgccggaatggtcagtctgatggacgaagctgtgggtaacgttactgcagccttgaagagctctggtctgtggaataacaccgtcttcatttttagcacggataatggcggacagaccttggcaggaggaaataactggcccctgagaggcaggaagtggtccctctgggaggggggggtcagaggagtcggcttcgtcgcctctccgctccttaaacagaagggtgtgaagaaccgggaattaatccacattagcgactggcttcccacactggtgaagttggccagaggacacactaacgggacaaagccacttgacggattcgatgtatggaagacgatttccgaaggtagcccttccccccggatagagctgctacataacatagatcctaatttcgtagatagcagtccatgccctaggaacagcatggcgccagctaaagacgattctagtctgccggagtactcggcattcaacaccagcgtacatgccgcaattcggcacggtaactggaaactcctcaccggatatccgggttgtggttactggttccctcctccttcccagtataacgtgagcgagatccccagctctgatccgcctacaaaaaccctctggctgttcgatattgatagggaccccgaggagagacatgatttgtcacgcgagtacccccatattgtgaccaaactccttagccgcctccagttctatcacaagcactctgtccccgtttacttccccgctcaggatcctaggtgcgatcctaaagcaactggagtgtggggaccctggatgtag

SEQ ID NO: 3610 - DNA, 1602 bp, synthetic construct
  misc_feature 1..1602: note = source = /note="Description of Artificial Sequence: Synthetic coding sequence"
  source 1..1602: mol_type = other DNA
atgggcccccggggcgccgccagcctgccccggggccccggccccagacggcttttgctgcctgttgtcctccccctcctgctactgctgctgctggctccaccaggctccggagccggagcaagtaggccaccccatctagttttccttctggcagatgatctggggtggaacgatgtcgggttccatggctcgaggatccgcaccccccacttggacgctctagctgccggcggcgtcctgttggacaattattacacacagccactgtgtacgcccagccggtctcagttactgaccggccggtatcagattcgcaccggtctccagcaccagatcatctggccctgccagccttcttgcgtgccactggatgaaaaactgcttccccagctgttgaaggaggcaggttacacgacacacatggtgggcaagtggcacttaggaatgtacaggaaagagtgtcttcccactagaaggggttttgatacatatttcggttaccttctgggaagcgaagactattactctcatgaacgctgcacgcttatcgacgcccttaacgtgactcggtgcgccttggactttcgtgatggtgaagaagtggccactggatacaaaaacatgtacagcaccaatatcttcacgaagcgcgccattgctctgataacaaatcacccacctgagaaaccactcttcctgtacctcgccctgcagtctgtccacgagccactgcaggtgccggaagagtatctcaagccttacgacttcatacaggataaaaatcgtcatcattacgccggcatggtgagtttaatggatgaagccgtcggcaacgttactgccgccttgaaatctagcggcttgtggaacaatacagtctttatcttttctactgacaacgggggtcagactttagctggaggaaataattggccccttcgaggccgaaagtggagcctctgggagggcggagtccgcggtgtcggctttgtggcaagccccctgctgaagcaaaagggtgtgaaaaatcgagaattgattcatatatcggactggctgccgacactagtgaaactagcccgcggacacaccaacggcacaaaacctctggatgggtttgacgtgtggaagacaatcagcgaagggagcccgtcaccaaggattgaactcctccacaatatagaccctaatttcgtcgactcaagcccctgccccagaaacagcatggctcccgccaaggatgatagcagtttgcctgaatacagcgcatttaacacttctgtccatgccgccatccgccacgggaattggaaattgctcaccggatatcctggctgtggttactggttcccacccccttctcagtacaacgtctcagaaatcccttcctctgacccccctaccaaaacgctgtggctatttgatatcgatagagatcccgaggaaagacatgatctctcaagagaatatccgcacatagtcaccaagctcctttcacgtctccagttctaccacaaacactctgtgccagtgtacttccctgcacaggatccacggtgcgatcctaaggccacgggcgtctgggggccatggatgtag

SEQ ID NO: 3611 - DNA, 1242 bp, synthetic construct
  misc_feature 1..1242: note = source = /note="Description of Artificial Sequence: Synthetic coding sequence"
  source 1..1242: mol_type = other DNA
atgggcccccggggcgccgccagcctgccccggggccccggccccagaagactgctgctcccggtcgttctgcctctgttactgctcctgttgctggctccgccaggcagcggagccggggcttcacgaccacctcatctggtctttttgttggctgacgacctgggttggaacgacgtgggatttcatggcagccgcatcagaacccctcacctggacgcactggcagcggggggagtgcttctagataactactatactcaacccctgtgcacccctagccggagtcagctgcttacaggtcgctatcagatacgaactggcctgcagcaccagataatttggccctgccagccctcctgcgtgccactagacgagaagctgctcccccagcttcttaaggaagccggctatacaacccatatggtgggtaagtggcacctcggaatgtaccgaaaagaatgcctccccactaggcgggggttcgatacatacttcggttatctcctgggctcagaggattattacagccatgagcggtgtactttgattgatgccctcaatgtgacccggtgcgcactggatttccgggatggggaggaagtcgctacagggtataagaatatgtactctacaaatatattcaccaagcgagcgatagccctgatcaccaatcatccacccgaaaaacctctcttcttgtatctggctttgcagagtgtgcacgagccgctgcaggttcctgaagagtacctgaagccatatgacttcatccaggacaagaacagacaccactacgcggggatggtgagccttatggacgaagcggtgggcaacgtgaccgcggcacttaaaagctcaggtttgtggaacaacactgtctttatcttcagtactgataatggaggccagacactggctggtggtaacaactggccacttcgaggccgcaaatggagcctgtgggaaggcggcgtgagaggcgtggggtttgtggccagccctctgttaaagcagaaaggggtgaagaacagagaactgatccacatcagtgattggctacccactcttgtcaaactggcccggggtcatactaatggtacgaagcccctggacggatttgatgtgtggaaaacgattagtgagggctctcctagcccgcggatcgagttgctccataacatcgaccccaattttgtggattcaagcccatactggccggaatgctcactgctcctgtag

SEQ ID NO: 3612 - DNA, 138 bp, synthetic construct
  misc_feature 1..138: note = source = /note="Description of Artificial Sequence: Synthetic coding sequence"
  source 1..138: mol_type = other DNA
atgggcccccggggcgccgccagcctgccccggggccccggcccccgccgactgctgctgccagtggtgcttcctttgctactcctgcttttgctcgcgcctccaggcagtggggctggggcatctaggcctccatag

SEQ ID NO: 3613 - DNA, 1788 bp, synthetic construct
  misc_feature 1..1788: note = source = /note="Description of Artificial Sequence: Synthetic coding sequence"
  source 1..1788: mol_type = other DNA
atggccggccccagcccccccctgcgggccggcgtgggccggcggcttcttggggtagcccacccggacctgagaccatgcttgtgcggtgaactgcaggtggagggaggcccgggccccgtccctggcatgttgcgaacgtgctatgtgagatcgccgtggaggagaggacctagttcagctcgtggcgaacagtctggctctggtcaccttgagcaggaggaagtacagtccggctctctgttgtttagacttctcctcttcttgagcagaagccccgcgtccagaaaccagcgaatcttgtacaccgtgttggagtgtcagcctctgttcgatagctctgacatgaccattgccgagtgggtatgcttggcacaaacaatcaaacggcattatgaacagtaccacgggttcgtggtaattcacgggacagataccatggcttttgcagcaagcatgttgtcattcatgttagaaaacctgcagaaaactgtgatcctgacaggcgcacaagttcctattcacgccctgtggtcagatggcagggagaatttgctaggggccttattaatggctggccagtacgtaatcccagaggtgtgtctattcttccagaatcagctcttcaggggaaaccgggccactaaagtcgacgcacgcaggttcgctgctttctgttcacccaacctcctccccctagccacagtgggagctgacataactatcaaccgagagctggtcaggaaggtagatggcaaggccggtttggtggtccattctagcatggaacaggacgtcgggctcctgaggctctaccctggaatacccgccgcacttgttagagcattccttcagcccccactgaaaggtgtcgttatggaaacttttggctcaggcaatggacccaccaagcctgacctgctccaggagctgcgggtggcaaccgaaaggggtctagtcattgtcaattgcacccactgcctgcagggtgcggtgacaaccgactatgccgccgggatggctatggcgggtgcaggagtcattagtggtttcgacatgacaagcgaggcagcattagccaagctctcctatgtactcggacagcccggcctctcgttagacgtcaggaaggagctactgacgaaggatttgcgcggcgagatgacccctccttccgtcgaagagagacgtccatcacttcaaggcaacactcttggcggcggtgtgagttggttactcagccttagcggatcacaggaagccgatgccctcagaaatgccctggtcccgagtctagcttgtgcggctgcccatgccggtgatgtggaggcacttcaggcactggtggagttgggcagtgatctgggcctggtggacttcaatggtcaaacaccgctgcacgcggcagctagaggaggacacacagaggccgtaacaatgctattacagagaggagttgacgtaaacactcgggacacagacggtttctcacccttgctgctagcagtgaggggtcgtcatccaggcgtgatcggactgttgagagaagctggtgctagcttgtctacacaggagctggaggaggccggcaccgagctgtgccgcctagcctacagggccgacctggaggggttgcaagtttggtggcaagctggagccgacctgggccaacccggctacgatgggcattccgctctccatgttgccgaggctgccggtaatctggctgtcgtggcctttttacagtctctggaaggtgctgtcggagcacaggccccttgtccctag

SEQ ID NO: 3614 - DNA, 1740 bp, synthetic construct
  misc_feature 1..1740: note = source = /note="Description of Artificial Sequence: Synthetic coding sequence"
  source 1..1740: mol_type = other DNA
atggcccgggccgtgggccccgagcggcggctgctggccgtgtacaccgggggcaccattggcatgaggagtgaactgggagtgctcgtcccgggtaccggacttgccgccattctgagaactctgcccatgttccatgatgaggaacatgccagggctcgtggattatcggaggatacccttgtgctgccaccagcctccaggaaccaacgtatactctacaccgtgctggaatgccagcctctgtttgattcgtcagacatgacgatcgctgaatgggtgtgtttagcccagactatcaaacgtcactacgaacagtaccatggcttcgtggttatccacggaacagatacaatggcgttcgccgcctcgatgctaagtttcatgttagagaatctacaaaaaacggtgatcttgacaggcgctcaggtaccaatccatgctctgtggtcagatggccgagagaacctgttgggagcccttctgatggcaggacagtacgtcatccctgaggtctgcctgtttttccagaatcagctgttcagggggaatagagcgacgaaagtggatgccaggaggttcgccgcgttttgcagcccgaaccttctcccgctggccacagtgggggccgatatcacgattaacagagaactcgtgaggaaagtggacgggaaggctggtctggttgtccatagttctatggagcaggacgtggggctgctacggctataccccggtatcccggccgccctggtacgggctttcttacaaccgcccctgaaaggggtcgtgatggagacttttggctccggcaatggccccacaaaacctgatctccttcaggaactgcgcgtagctacagaaagaggactggtcatagttaattgcacgcactgtctacagggcgcggttacaaccgactacgccgccggaatggccatggcaggcgctggggtgattagcgggttcgatatgacaagcgaggccgccctcgctaagctctcgtacgtgctaggccagccggggcttagcctagatgtccgcaaagaactcctgactaaggacctcaggggcgagatgacaccccccagcgtcgaagagcggcggccctccctgcagggcaataccctaggcggtggagtgagctggcttttatctttgagcggatcacaggaggccgatgcccttcgaaacgccctggttccctccctggcctgcgccgctgcacacgcgggtgacgtggaggcgttgcaggccctggtcgaattggggtccgacctgggactggtcgattttaacggacagacaccactccacgcagctgcccgggggggccatacggaagctgtcacaatgctgctgcaacggggtgtcgacgtcaatacacgcgatactgacgggtttagccctttgctactggctgtgcgggggcgccaccctggtgttatcggactgctgagggaagcgggtgcatcactatctacccaggagctcgaagaagctggcaccgagctgtgtcgccttgcctaccgtgccgacctggagggactgcaggtgtggtggcaggcgggagcagatctggggcaacctggctacgacggtcactccgcgctgcacgttgcagaagcggccggaaatctcgccgttgtggcctttctccagagcctcgaaggcgctgtgggggcacaggcaccctgcccagaaccatcgtgctttcaagaggtcctcccaggtgtctag

SEQ ID NO: 3615 - DNA, 423 bp, synthetic construct
  misc_feature 1..423: note = source = /note="Description of Artificial Sequence: Synthetic coding sequence"
  source 1..423: mol_type = other DNA
gccgccgcccggggcggccacaccgaggccgtgaccatgctgctgcagcggggagtggatgtcaacacccgtgacacagacggattttccccactcctgctggccgtgcgtggaagacatcctggggtcattgggctgctgcgcgaggcgggcgcatccctctctacccaagagctcgaggaggcagggacagaactttgtagactggcttaccgggctgacctcgaaggactgcaggtgtggtggcaggccggagccgacctcggccagcctggctatgatggccactcggctttgcatgtggccgaggcagcgggaaacctcgctgtcgtggccttcctgcagagcttggagggcgccgttggggctcaggcaccatgcccagagccgagctgctttcaggaggtgttaccaggtgtgtag

SEQ ID NO: 3616 - DNA, 1722 bp, synthetic construct
  misc_feature 1..1722: note = source = /note="Description of Artificial Sequence: Synthetic coding sequence"
  source 1..1722: mol_type = other DNA
atggcccgggccgtgggccccgagcggcggctgctggccgtgtacaccggtgggaccattggaatgcggtccgagcttggcgtgctcgtgccaggtacaggtttggcagcaatactgagaaccctgccaatgtttcacgatgaagaacacgctcgagctcgcggcttatctgaagacactctggtccttccccctgcctcccggaaccagcggattctgtatacggtcttagaatgtcagccactgttcgattcatccgacatgaccattgcagagtgggtgtgcctcgctcagacaatcaaacgccattatgagcaatatcacgggttcgtggtgattcatggcaccgacacaatggcttttgcagcctcaatgctgagttttatgctggagaatttacagaagacagtgatcctgacaggtgcccaggtgcccatccacgcactgtggagcgacggccgcgagaacctcctgggggccttactgatggctggccaatatgtcattcctgaggtgtgcttgttctttcagaatcagctcttccgcggtaaccgcgcgacaaaagtggatgcccgccgattcgctgccttctgttcccctaatctgctaccgttggcaactgtcggagcagatatcacaataaacagggagctcgtgagaaaagtcgacgggaaggctggactggtggtccatagctctatggaacaagacgttggccttcttagattgtatcccggcatccctgccgccctcgttcgggcctttttgcaacctcctctgaagggagtggtcatggagacatttgggagcggcaatggacctacgaagcctgaccttttgcaagagctccgagtggccacagagagggggctggtgatcgttaattgtacacattgcctgcagggggcagtgaccaccgattacgccgccggaatggctatggctggagcaggtgtaatctctgggttcgacatgaccagcgaggctgctctcgctaaattgtcttacgtgctggggcagcccggattgagccttgacgtcaggaaagagctgctgactaaggacctccgaggcgagatgaccccacccagcgtggaagagcgcagaccatccctgcagggcaacacgttgggaggcggcgtcagttggctcctttccttgtcgggcagccaagaagccgacgccctcaggaacgcacttgtaccatccctggcctgtgcagccgcccacgctggtgacgtggaggcattacaggcactagtggagctaggaagcgacctgggcctagttgattttaacggccagacacccctgcacgctgccgcccgcgggggacacacagaggcagttacaatgctgttacagcggggcgtggacgtcaacactcgcgatacagacggcttttccccactgctgctggccgtgcgaggacgtcatcctggggttattgggcttcttagagaggcgggcgccagtctcagcacacaagagctcgaggaagctggcacagagttatgtagactggcatacagggccgatctagagggtctgcaagtgtggtggcaagccggcgcagacttagggcaacctggttacgatggacattcagcgctgcatgtggccgaagctgccggaaatctggctgtagttgcgttcctccagtctcttgaaggcgccgttggcgcccaggccccatgtcctgaggtgctcccaggcgtgtag

SEQ ID NO: 3617 - DNA, 942 bp, synthetic construct
  misc_feature 1..942: note = source = /note="Description of Artificial Sequence: Synthetic coding sequence"
  source 1..942: mol_type = other DNA
atgaccagctgccacatcgccgaggagcacatccagaaggtggccatctttggaggaacccatggtaatgagctaactggcgtgttcctagttaagcattggttagaaaatggagcagaaatccagagaactgggcttgaggtgaaacccttcatcaccaatcctcgcgccgtgaaaaagtgcactagatatatcgattgtgatctgaaccgtattttcgacctggagaacctcggcaaaaagatgagcgaagatctgccctacgaggtgcgtcgcgcccaggagattaaccacctcttcggccctaaagactccgaggatagctacgatataattttcgacttgcataacacaacatccaacatggggtgcaccctaatcttggaggacagtcggaacaatttcttaatccagatgttccattatataaagacctctcttgctccactaccctgttatgtgtacctgatcgaacaccccagccttaaatatgccaccactagatccatcgcaaaataccccgtggggatagaagtgggcccacaacctcagggggtcctgcgtgctgacattctggaccagatgcgtaaaatgattaaacacgctctggattttatccaccatttcaatgaaggaaaggaatttcctccctgtgccatcgaggtatacaaaattattgagaaggtcgattatccgagggatgagaacggggaaattgctgctataatccacccaaatctgcaagaccaggactggaagccattacatcctggagatccgatgttcctcactctcgatggtaagactatccctcttggcggcgactgcacagtgtatccggtctttgtgaatgaggccgcgtattatgagaagaaagaagccttcgctaaaaccacaaagctcaccctcaacgctaagagtatccgctgctgcctacattag

SEQ ID NO: 3618 - DNA, 942 bp, synthetic construct
  misc_feature 1..942: note = source = /note="Description of Artificial Sequence: Synthetic coding sequence"
  source 1..942: mol_type = other DNA
atgaccagctgccacatcgccgaggagcacatccagaaggtggccatttttggcggcacacatgggaacgagttaactggggtgtttctagtaaagcactggttggagaatggggccgagattcagagaaccgggctggaagtgaaaccctttattactaacccgcgtgctgtgaagaagtgtacacgctacatcgattgcgacttgaacaggatcttcgacctggaaaatttagggaagaaaatgtcagaagacctgccctatgaggttagaagggctcaggagataaatcacttatttgggccaaaagactccgaggactcctacgacataatatttgacctacataacacaacatcaaacatgggatgcaccttgattctagaggactcacggaataatttcctcattcagatgtttcactatattaagacaagtctggcccccctgccctgctatgtgtacctgattgagcacccaagccttaagtatgctaccacaaggtcaattgcaaagtatccggtcggaatagaagtaggtcctcagccccagggtgtgctgcgggcagacatattggaccagatgcggaaaatgattaagcacgctcttgattttattcaccacttcaacgaaggtaaagagttccctccatgcgcgatcgaggtgtataaaataatcgaaaaggtggattaccctcgcgatgagaatggtgaaattgcggctattatccaccccaatctgcaggaccaagactggaaaccactgcatcccggggaccctatgtttctcactcttgatgggaagacaattcctctcggaggggattgcaccgtgtaccctgtgttcgtgaatgaggccgcttactatgagaagaaggaggctttcgctaagactacaaagttgactctgaatgctaaaagcatcagatgctgccttcattag

SEQ ID NO: 3619 - DNA, 3756 bp, synthetic construct
  misc_feature 1..3756: note = source = /note="Description of Artificial Sequence: Synthetic coding sequence"
  source 1..3756: mol_type = other DNA
atgagcaccgagcgggacagcgagaccaccttcgacgaggacagccagcccaacgatgaggtcgtaccatattccgatgatgagacggaggacgagctggacgaccaaggctcggccgtcgagcctgagcagaacagggtcaaccgcgaggccgaggagaatcgagagccgttccggaaggaatgcacttggcaggtcaaagccaatgaccgcaagtaccacgagcagccacattttatgaacactaagttcctctgtatcaaggaatctaagtatgccaataatgcaattaagacctataagtataatgcctttacgttcatacccatgaacttatttgaacagttcaagcgggcagccaacctttattttttggcgttattaatactccaggcagtgcctcagatcagcactttggcctggtacaccaccctggtgccactactggttgtactgggggtcaccgcaataaaagacttggtggatgacgtggccagacacaagatggacaaggaaataaacaaccgaacctgcgaagtgattaaggacggcaggtttaaggtcgccaaatggaaagagatccaggtgggagacgtgatccgcctgaaaaaaaatgatttcgtacccgctgacatacttctgttaagctccagcgagcctaattccctgtgctacgttgagaccgccgagctcgatggggaaaccaatttgaagtttaaaatgagcttggagattaccgaccaatacctgcagcgggaggataccttggctacgtttgatgggttcatagagtgtgaagagccaaacaaccggttggacaagtttacgggtacccttttctggaggaataccagtttccccctcgatgccgacaagatcctcttacgaggctgtgtaatcaggaatacagatttctgtcacggcctcgtcatattcgctggtgccgataccaagatcatgaagaactctgggaaaacacgcttcaaaagaacaaagatagactacctgatgaactacatggtgtacacaatttttgtagtgctgatcttgttaagtgcagggctggcgatcggccatgcctactgggaggcacaggtaggcaactcttcatggtacctctatgacggcgaggatgacacaccgagctacagaggctttctcattttctggggctacatcatagtgcttaacacgatggtgcccataagcctgtacgtgtctgtggaagtcatccggttaggacagagtcacttcatcaattgggacctacagatgtactacgcggaaaaagatacccctgcaaaagcaaggactaccaccttaaacgaacagcttggtcaaatccattacatatttagcgataagactggaactttgacccagaacatcatgacattcaaaaaatgctgcatcaacggccagatctacggtgatcatcgcgatgcatcccagcacaaccataacaagatcgaacaggtcgacttctcttggaatacgtacgccgacgggaagctggctttttatgaccactatctcatagagcagatacagtcagggaaagagccagaggtgcggcaattttttttcttattagcagtatgccatacagtcatggtagaccgtactgacggacaactgaactatcaggccgcttctccggatgaaggagcgcttgtcaatgctgctagaaacttcggcttcgccttcctggcacgcacccagaacaccatcactattagcgagctgggaacagaacgaacatataatgtactggccatactcgactttaacagcgaccggaaacggatgagcatcattgtgcgtacgcccgaagggaacattaagctgtattgcaaaggcgccgacacagtgatctatgagagattgcatagaatgaacccaactaaacaggaaacacaggacgctctggatatttttgctaatgaaacccttaggaccctatgtctctgttataaggagattgaggagaaagagttcactgagtggaacaaaaagttcatggctgcatcagtcgcttcaacaaacagggatgaagctctggacaaagtttatgaagaaatcgagaaggacctcatcttattgggagctacagctatcgaggataagctccaggacggtgtgccagagactatttccaagctcgctaaagcggatatcaagatttgggtgctcacgggcgataagaaagaaacagccgaaaatattggtttcgcttgtgaattgctgacagaagacaccaccatctgctatggagaggatattaattccctgcttcatgcccgcatggagaatcagcggaaccgaggcggcgtgtacgccaagtttgctccaccagtgcaagaatcattcttccccccaggcggcaatcgtgctcttatcatcacggggtcctggctcaatgagatcttgctcgagaaaaagaccaagaggaacaaaatactcaagctcaaatttccccggactgaggaggagcgaagaatgaggacacagtcgaagaggcggcttgaggctaaaaaagaacaaagacagaagaacttcgttgacctcgcctgcgagtgctcagctgtgatttgctgtcgcgtgactccgaagcagaaggctatggttgtcgatctggttaaaaggtacaaaaaggccattaccctcgcgattggcgatggcgccaatgatgtcaacatgatcaagaccgcccatatcggtgtggggatctctgggcaggaagggatgcaggccgtaatgagcagcgactattcatttgcccaattcagatacctgcaacggttgctcctcgtgcatggaagatggtcttatatcaggatgtgtaaattcctgcggtacttcttctacaaaaattttgccttcactctggtgcacttttggtacagtttcttcaacgggtactcggcccagactgcatatgaggattggtttatcacgctgtacaatgtattatatacctctctgcccgttttgctaatgggccttctggatcaggacgtctctgataagctgtccctgcgcttcccaggtctgtatattgtgggacagagagatctcctgttcaactataagcggttttttgtgtcactgttacatggcgtgctgacgtcaatgatcttattcttcatccctctgggcgcatacctccagaccgtgggccaggatggagaagctcctagcgactatcagagcttcgctgtgacaattgcctctgctctggtaatcacagtaaattttcagatcggactggacacaagctattggacattcgtgaacgcattcagtatttttggcagtatcgccctctattttggcataatgttcgactttcattctgccggaatacatgtactgttcccatccgccttccagttcacaggcactgcctctaacgccttgcgtcagccgtacatttggctcacgatcatcctagccgtcgcagtctgtttgctgcccgtagtggctataagatttttatcaatgaccatctggcctagcgaatccgacaagattcagaaacatcggaagcgactgaaagccgaagagcagtggcagaggcggcaacaggtgtttcggagaggagtgtcaacccggcgtagcgcttatgctttttcccatcaaagaggttacgctgacctgatctcttctggacggagtatacgcaagaagaggtcacccttagacgcaatcgtcgccgacggtaccgcagaataccgcaggacaggagatagctag

SEQ ID NO: 3620 - DNA, 3756 bp, synthetic construct
  misc_feature 1..3756: note = source = /note="Description of Artificial Sequence: Synthetic coding sequence"
  source 1..3756: mol_type = other DNA
atgagcaccgagcgggacagcgagaccaccttcgacgaggacagccagcccaatgatgaagtggtcccgtacagcgacgacgagacagaggacgaactcgacgaccagggcagcgcagtggaacccgagcagaaccgggttaaccgggaggctgaagaaaaccgcgaaccctttaggaaggaatgtacctggcaagtgaaggcaaacgatcgcaagtatcacgagcagccacatttcatgaacactaagttcctgtgtatcaaggaaagcaagtacgcaaataacgctatcaagacatataagtacaacgccttcactttcataccgatgaacctatttgagcagttcaaaagggccgccaatctgtattttctggccctgttaatcctccaggctgtgcctcaaattagcactctggcgtggtacactacgctggttcctcttcttgtggtccttggggtcaccgctatcaaagaccttgtggatgacgtcgccagacacaaaatggacaaggaaattaataatcggacttgtgaagtcattaaagacggacgtttcaaggtagccaagtggaaagaaattcaggtcggcgacgtgattaggctcaaaaaaaatgacttcgtacctgctgatatccttttactgtccagctccgagccgaatagtttatgctacgtggagactgccgagttagacggcgaaaccaatttgaagtttaagatgtcacttgaaattaccgatcagtatctgcaacgggaagacacactcgccacgtttgatggctttattgagtgtgaggagcctaacaacaggctggacaagttcacgggcacacttttttggcgaaatacttcgttcccactggacgcggacaagatccttctccggggttgtgtgatcagaaacactgacttttgccacgggttggtaattttcgcgggagctgacacaaagatcatgaagaatagcggcaaaactcgatttaagaggactaagattgattacctcatgaattatatggtatacaccatctttgttgtgctcatcctgctgagcgcaggtctggcaatcgggcacgcctattgggaggcacaggtcggcaactcctcttggtatctatatgacggagaggacgacactccttcgtacagaggttttttaatattttggggctacattatcgtacttaacacaatggtccctatcagcctctatgtcagtgtagaggttattcggctgggacagagtcatttcataaattgggacttacagatgtactacgcagagaaggacacacccgcaaaagctcggactaccaccctcaacgaacaactggggcagatacattatatttttagtgacaagaccgggacattaacccagaacattatgacttttaagaagtgttgcattaatggccagatatatggtgaccaccgcgatgcttctcagcacaaccataacaagattgagcaggttgactttagctggaacacatatgccgacggcaagctcgccttttacgatcactatctgattgagcagatacagtccggcaaagagcctgaagttcggcagttcttcttcctcttggccgtgtgtcatacggtgatggtcgaccggacagacggccagttgaactatcaggctgcctctccggatgaaggcgccctggtcaacgctgccagaaatttcggattcgcgttcctcgcaagaactcagaatacaattaccatttctgaactcggtaccgaaaggacttataacgtgttggccatcctggacttcaatagcgatcgcaagcgaatgtcaatcatcgtacggacacctgagggaaatataaagctttactgcaagggcgcggataccgttatctatgagagactccatcgcatgaacccaaccaaacaggaaacacaggatgccctcgatatttttgccaacgaaaccttgcgtactttgtgcctttgctacaaagagattgaggaaaaagagtttactgagtggaacaagaaatttatggccgcctctgtggcttctactaaccgtgacgaggctcttgacaaggtgtatgaggagatcgaaaaagatctaatactgctgggagcaaccgctattgaagacaagttacaggatggggtgcctgagaccatcagtaagttggcaaaggccgacatcaagatctgggtgctgacgggcgacaagaaggaaactgccgaaaatataggtttcgcgtgcgagcttctgactgaggatacaaccatctgctacggcgaagacattaactcacttcttcacgcccgaatggagaaccagcgtaatagaggtggggtttacgctaaattcgcccctcccgtgcaggaatcattctttccaccggggggcaacagggccctcatcatcactggatcctggctgaatgaaatcctgctggagaagaagacaaagagaaacaaaattctgaagctcaaattcccaaggactgaggaggagcggcgcatgagaactcaatcgaaaagacggctcgaggctaagaaagagcaacgtcagaagaattttgtggacctggcctgtgagtgttctgctgtaatctgctgccgcgtcactcctaagcagaaggctatggttgttgatttggtcaagaggtacaaaaaggccattaccctcgcaataggcgatggcgccaacgacgtaaatatgatcaagaccgcccatattggcgtcggaattagcgggcaggagggcatgcaggcggtgatgtctagcgattattcctttgcacagttcaggtacctacagcgactgctgctggtgcatgggaggtggtcctatattcgtatgtgtaaattcttgcgctactttttttacaagaatttcgcgtttactctggtacacttctggtatagctttttcaatggctactccgctcagacagcatacgaggattggttcatcacgctgtacaatgtcctgtacacctcgctgcccgttttactcatggggttgctggatcaggacgtgtctgacaaactgtcgctgcgtttccctggcctgtacattgtggggcagagagatttattgtttaattacaagcggttctttgtatctctcctgcacggagtgctgacatcgatgatcctgttttttatccccctgggcgcttacttgcagactgtgggccaagacggagaagcaccaagcgactaccagagctttgctgtaaccattgcttccgcactcgtaatcaccgtgaacttccagatcgggcttgacacttcttactggacttttgttaacgctttcagcatatttggttccatcgccctttatttcgggatcatgttcgatttccatagcgccggaattcacgttctctttccatccgccttccagttcacaggcacagcatctaacgccctacggcaaccttacatatggctcacaataatcctggctgtggccgtgtgcctcctcccggtagttgcaattcggttcctgtccatgaccatatggccaagtgagtctgataagatacagaagcatcgcaaacggcttaaggctgaggagcagtggcagcgccgtcagcaagttttccgaagaggcgtttcaactagaaggagcgcatacgcctttagccatcagaggggctatgctgatctcatttccagcggccgaagcatcaggaaaaaaaggagccccctcgatgcaatcgtggcagacggcaccgccgagtatcggagaacaggcgactcctag

SEQ ID NO: 3621 - DNA, 4398 bp, synthetic construct
  misc_feature 1..4398: note = source = /note="Description of Artificial Sequence: Synthetic coding sequence"
  source 1..4398: mol_type = other DNA
atgcccgagcaggagcggcagatcaccgcccgggagggcgccagcagaaaaatactgtctaaactcagtctgcctacgagagcatgggaacctgcgatgaagaagtctttcgcattcgacaacgtcgggtatgaaggcggcttagatgggctcggtccatctagccaggtcgcgacttcaaccgtgcgcattttgggtatgacctgccagtcttgcgtgaagtcaatcgaggaccgcatttctaacctcaaggggatcatcagcatgaaggtaagtctcgaacaagggtctgcaacagtgaagtacgttccctctgtagtctgcctgcagcaggtctgccatcaaataggtgatatgggctttgaggctagtatcgcagagggcaaggccgccagctggccatcccgctccctgcctgcccaagaagctgtcgtgaaactgagagtggaggggatgacttgtcagtcttgtgtctcaagtatagagggcaaagtgcgtaagctccagggggtagttcgagtcaaagtctcactgtccaaccaggaggccgtgattacttaccagccttatttaattcaacccgaagatctgcgggatcacgtcaatgacatggggttcgaggcggccattaagtctaaggttgcacctctgtcactggggcccatcgatatcgagcgcctgcaatcaaccaatcccaagagacctctctcttctgcaaaccagaactttaacaattccgagactctggggcatcaggggtcacacgtggttaccctgcagctgaggattgacggcatgcattgtaagtcctgtgttctgaacattgaggagaatatcgggcagcttttgggcgttcagagtattcaggtgagtctggagaacaagacagctcaggttaagtatgacccatcctgcacatctcccgtggctctgcaacgagccatcgaggcactgcctcctggcaattttaaggtgtccttgccagacggggcggagggttcaggcaccgatcatcggtccagtagctcccattctccagggtcaccaccccggaaccaagttcaaggtacgtgtagcacaactctcattgcaatcgctggcatgacttgtgcctcttgcgtacactctatcgaaggaatgatttctcaattggaaggcgtgcagcagatctccgtctcactggccgaaggcaccgcaaccgttctgtacaatccttcagtgatcagtcccgaagaactgagagccgcaattgaagatatgggctttgaagcctcagttgtgtccgagtcatgcagcaccaacccccttggaaatcacagtgctggcaacagtatggtgcagaccactgacggaacaccaaccagtgttcaagaggtagcacctcatacaggtcggcttcctgctaaccacgctcctgatatattagcaaagtctccccagtccacccgcgctgttgctccccagaaatgtttcctccagataaaagggatgacttgcgcaagctgcgtttccaatattgagagaaatctgcaaaaggaggcaggagtcctgagcgtactcgtggcactaatggccgggaaggcggaaattaagtatgatccagaagtgatccagccactggaaattgcccagtttatccaggatctgggctttgaggccgccgtgatggaagattacgcggggtccgacggcaatattgaactgacgatcaccgggatgacatgcgcaagctgtgtccacaacatcgaatccaagttaactcggacaaacgggatcacttacgcctccgttgcgcttgccactagcaaagctctggttaagtttgacccagagataattggcccaagagatattataaagatcatagaagaaatcggctttcacgcctcgttagcacaacgcaaccctaacgctcaccatctggaccacaaaatggaaattaaacagtggaagaaatcattcctctgttcccttgtcttcggtattcccgtgatggcgctaatgatatacatgttaatcccttctaatgagccacatcagtctatggttctggaccacaacattatcccaggactgtctattctgaatctgatctttttcatcctctgcacattcgttcagttgctcggggggtggtatttctacgtacaggcttataagtccctgcgacacaggagcgctaacatggacgttttaatcgtgcttgctacaagtatcgcttatgtctattctctagttatactcgtcgtggccgtggcagaaaaggctgagcgctctcccgtaaccttcttcgatacacccccaatgctgtttgtctttatcgcccttggccgttggctggagcatctggctaagtcgaaaacctccgaagccctcgccaaactgatgagcctacaggctactgaagccacagttgtgaccctcggtgaagacaatctcattattcgcgaagagcaggtgcccatggagttggtccagaggggggacatcgtcaaggttgtgcccggggggaagttccctgtggacggcaaagtgcttgagggtaacaccatggctgacgagtcccttataactggcgaggccatgcccgttactaagaagcccgggtctactgtgatagctggtagcattaatgcccacggctcagttttgataaaagcaacccacgttggcaacgataccactctggctcagatcgtgaagctagtcgaagaggctcagatgagcaaagcccccattcagcaactcgccgaccggtttagcggatatttcgtaccattcattatcattatgagtactctgactctcgtggtgtggattgtcataggtttcattgatttcggcgtcgtgcagagatacttcccaaatcccaacaagcacataagccagaccgaggtgatcatcagattcgcattccagacgtctatcacagtattatgcattgcttgtccttgcagtctgggactggcaacgcccaccgctgttatggtagggacgggcgtcgcagcacaaaatggtatactgataaaagggggcaagcctctagaaatggcccacaaaatcaaaacggtgatgttcgataagacaggaaccataactcacggggtccctagggtgatgcgagtactcctcctcggggatgttgcgactctgcccctgcgcaaagtgttagctgttgtggggaccgcagaggcatcctctgaacatccactgggagttgcagtcaccaaatattgcaaagaagaactcggaaccgagaccttggggtactgcactgatttccaggccgtgccaggctgcggaatcgggtgcaaggtatcaaacgtagagggcattttggcccattctgaacgacccctgtccgcccccgcaagtcacctaaatgaagcaggcagccttcccgcagagaaggacgccgtgcctcagactttctccgtcctcatcggtaatagggaatggctccgaagaaacggactcaccatatcatccgatgtgtccgacgctatgactgatcacgaaatgaaagggcagacagccatacttgtggctatcgatggagtgctctgcggcatgatcgccatagctgacgccgtgaagcaggaggccgccctagcagttcacacattacagagtatgggcgtcgatgttgtgctgatcaccggagataaccgaaagacggctagagcaatagcgacacaggtcgggattaataaagtcttcgccgaggtcctgccttcccataaggtcgctaaagttcaggagctccagaataagggcaaaaaagtggctatggtaggagatggggtaaacgactcccccgctctggctcaagccgatatgggtgtcgcaattggaacagggactgacgttgctatcgaggccgctgacgtggtccttatacgaaatgacttgctcgacgtagtggcaagcattcatctgtccaaacgaaccgtgcgcaggattcgaatcaacctggtccttgccctgatttataacctggtgggcatccccatcgccgcaggcgtctttatgcccataggtatcgttcttcaaccttggatgggctcagcagctatggcggcttcatcggtgagcgtagtcctctcaagtctacagcttaaatgttataagaaacctgatctggagcgatatgaggcgcaggcgcatggtcacatgaaacctttaacagccagtcaagtctccgtgcatattgggatggatgaccgctggcgcgacagtccacgtgcaacaccctgggaccaagtatcctatgtcagtcaggtaagcctttccagcctgaccagcgataaaccaagccgacatagtgccgcggctgatgatgacggagataagtggtcactactgcttaatggtagggatgaggagcagtatatctag

SEQ ID NO: 3622 - DNA, 3777 bp, synthetic construct
  misc_feature 1..3777: note = source = /note="Description of Artificial Sequence: Synthetic coding sequence"
  source 1..3777: mol_type = other DNA
atgcccgagcaggagcggcagatcaccgcccgggagggcgccagccggaaaatcctctccaaactttcgctgccaacccgggcctgggaacccgccatgaagaagtcttttgcgttcgacaatgtgggttatgaaggcggcctggatggcctgggcccttcatctcaggtcgctacaagtactgtgcgaatacttgggatgacatgccaaagctgcgtgaaatcaatcgaagatcggatatcaaatctgaagggtattatctcaatgaaagttagtcttgagcaggggtccgctacggtcaaatacgtcccgagcgtggtgtgcctgcagcaggtgtgtcatcagattggcgatatggggtttgaggcttctatagctgaggggaaagcagcaagttggcccagccggtcattgccagctcaagaggccgttgtgaaactgagagtcgaagggatgacatgccagagctgtgtttcttccatagaggggaaagtgaggaaacttcagggagtggtgagagtgaaggtgagcttgagtaatcaagaagcagtgatcacctatcagccctatctgatacagcccgaggaccttagagaccacgttaatgatatgggattcgaggccgcgattaagagcaaagtggctccgctcagcctggggcctatcgacatagaaaggcttcagagcactaatccaaaacggcctctgtcatctgcgaatcagaactttaacaacagcgaaacacttggccaccagggcagtcatgtggtcactctgcaactgcgtatcgacggcatgcattgcaaaagctgtgtgctgaatatagaggagaacatagggcagctgttaggggttcagagtatccaggtttcgctggagaacaagactgctcaggttaagtatgatccgtcttgtaccagtcccgtggctttgcaacgggctatcgaggccctgccccccggcaacttcaaggtatcattgccggacggggcagaggggtccgggaccgaccataggtctagcagttcacactctccaggcagcccaccaagaaaccaagtgcagggaacttgctctactacccttatagccattgccggcatgacttgcgcttcgtgcgttcacagcattgaaggtatgattagccaattggagggggtgcaacagatcagcgtcagtttagcagagggaactgcaaccgtgctttacaatccaagtgtcatcagccccgaggaattgagagctgccattgaagacatgggatttgaggcctccgtggttagtgaatcctgttcaactaacccgctggggaaccacagcgccggtaacagtatggttcagaccactgacggtaccccaacctccgttcaggaggtggccccccatactggtaggctgccggccaaccatgctccggatatactcgccaagtcacctcaatccactcgggctgttgcccctcagaagtgcttcctgcaaatcaagggcatgacctgtgcgagctgtgtaagcaacatcgagcgcaatctccagaaggaggcaggggttctgtccgtgctggtcgctctgatggccggtaaggccgagatcaagtacgatcccgaagttattcagcctctggagatcgctcaatttattcaggatttgggcttcgaagccgccgttatggaggactacgcagggagcgacgggaatattgaattgacaatcacgggcatgacctgcgccagttgtgtgcataatattgagtccaagcttactcgcacaaacggcatcacgtacgcatccgttgcactggctacatcaaaagctctggtcaagtttgacccagagatcatcggccctcgtgatataatcaagatcatcgagagcaagacatctgaggcactggcaaaattaatgagcctgcaagccaccgaagccactgttgtgacactaggggaggataacctgatcatacgggaggagcaagtgccaatggaactggtgcaaaggggagatatcgtcaaggtggtcccagggggaaaattccctgtcgacggcaaagtgctcgaggggaatactatggcagacgagtctttgatcactggggaagcaatgccggtgaccaagaagccggggtccacagtgatcgccggtagcataaacgcccacgggagtgttctaattaaggccactcatgtgggcaacgatacaaccctcgctcagatcgtgaaactggtcgaagaggcccagatgtccaaaaacccgaataaacatatttctcaaacagaagtgatcattagattcgcgtttcagacgagcattacagttctgtgtattgcctgcccttgtagccttggactggccacgcccacagccgtgatggtggggacgggtgtcgcagcacagaatggaattctcatcaagggcggtaagccactagagatggcccacaagatcaaaactgtgatgtttgataagactggcactatcacgcacggtgttcctcgggtaatgagggttctcctgctaggcgacgtcgccacactgccgttgagaaaggtgttagcggttgtcggaacggcggaggcctcgagtgaacatcctctgggcgtagccgtgaccaagtactgcaaggaagagcttggcacagagactctgggctactgcactgatttccaagctgttcccggctgtgggatagggtgcaaggtgagcaacgtggaaggtattctcgcgcatagcgaacgacctctctcagctcctgcttctcatctcaacgaggccggcagcttaccagcagagaaagacgccgtgccgcaaaccttttctgtactaatcggcaatcgtgagtggttgaggcggaatggtctgacaatctcttccgacgtgagcgacgcaatgaccgatcacgagatgaaggggcaaaccgctattctggtagctattgatggggtgctgtgtgggatgattgccatcgcagatgctgttaaacaggaggcggccctagcagttcacaccttgcagtcaatgggggttgatgtagtgctcatcactggggataaccgtaaaaccgcccgggcaatagccacccaagtggggattaataaagtgtttgccgaggtgctcccctctcacaaagtagctaaagttcaggagcttcaaaacaaggggaaaaaagtggccatggtaggggatggggtcaatgactcacccgcccttgcgcaagctgacatgggtgtggccatagggaccgggacagacgtggctatcgaggcagccgacgtcgtgctcatccggaacgacctgctggatgtggtggcaagcatccacctgtcaaaacgtaccgtccgaagaatacggatcaatctcgtactagcgctgatctacaatctggttggaatccctatagctgctggggttttcatgccaattggcatcgtactgcaaccttggatgggcagcgccgccatggccgcgtcctccgtgagcgtggtgctgtctagcctgcaactgaagtgttataagaagccagatcttgagcgctacgaggcacaggcccatggccatatgaagccactgacagcatcgcaggttagcgtgcacatcggtatggacgatcgctggagggactcgcctagagcaaccccctgggaccaggttagctatgtcagccaagtttcactgtcaagtttgacatcagacaagccttctaggcattctgccgctgctgacgatgacggagataaatggtcattgcttctaaatgggcgggatgaggaacaatatatctag

SEQ ID NO: 3623 - DNA, 4065 bp, synthetic construct
  misc_feature 1..4065: note = source = /note="Description of Artificial Sequence: Synthetic coding sequence"
  source 1..4065: mol_type = other DNA
atgcccgagcaggagcggcagatcaccgcccgggagggcgccagccgcaaaatactgagcaagctctcactcccaactagagcatgggaacccgcgatgaagaaatcgttcgcattcgataatgtgggctatgaaggggggctggatggacttggcccaagctcacaggttgccacatctaccgtacgcattctcggaatgacatgccagtcctgtgtcaagtccattgaagatcggatatcaaacttgaagggaatcatatcaatgaaagttagcctggaacagggctcagccaccgtaaagtacgtaccttctgttgtctgcctccagcaggtttgccaccagataggtgacatgggatttgaagcctcaatagccgagggtaaggcagcctcttggccttcacgctccttgcccgctcaggaggcggtggtaaagctgagagttgagggaatgacctgccagtcttgtgtcagctcgattgaaggcaaagttaggaagctgcagggcgtggtccgcgttaaggtctcactgtcaaaccaggaggctgttatcacataccagccatacctgattcaaccagaagaccttagagatcacgtcaacgacatgggctttgaagcggctattaagagcaaggttgcacccttatccctggggccaatcgacatcgagaggctccagtccactaatcctaaacgacctctatccagtgctaaccagaacttcaacaatagcgagactctgggtcatcagggtagccatgtggtgactctccagcttcggattgatggtatgcattgtatgatcagtcagctcgaaggtgtgcaacagatttctgtcagcttggctgaggggacagccacggtcctctataacccctccgtgattagccctgaggagctgcgtgctgcaatcgaagacatgggtttcgaggcatcagtcgtctccgaatcctgttctacgaatccattgggcaaccattcggcaggaaactcaatggtgcagactacggatgggacacctacgtccgtccaggaggtggccccccatacagggcgcttacccgcaaaccacgcacctgacatactcgccaaatccccgcaaagtacgagggctgtcgcccctcagaaatgtttcctccagatcaaaggaatgacatgtgcatcgtgcgtgtccaacattgaacgtaatctgcagaaggaggcgggggtcctgtctgtcctggtggccctgatggctggtaaagctgaaatcaagtacgatccagaagtgattcagcccctcgaaatcgctcagtttattcaggacttaggctttgaagcagcagtgatggaagactacgctggcagtgatggaaacatcgagcttaccattaccggaatgacatgtgccagctgcgtgcataacattgaatccaagctgaccaggaccaatggtatcacgtatgcgagcgtggctctagctacttcgaaagctctcgtcaagttcgaccccgagattatcgggccccgagacatcattaagattatcgaggagatcggatttcatgcctctttggctcagaggaatcctaatgcccatcacttggatcacaagatggagatcaagcagtggaaaaagtcatttctgtgctccctggtgttcggaatcccggtgatggcactgatgatttacatgctcataccttctaacgagccccatcaaagtatggttctggatcataacataatacctggcctctcaattctaaacctcatctttttcatactctgtactttcgtccaactcttgggcggatggtatttttacgttcaggcgtacaagtccctgcgccacagaagcgcaaatatggatgttcttattgttctagctacttcgatcgcatacgtctatagtctggtgatactggtcgttgccgtggctgaaaaggctgagcgctctcccgtcactttctttgataccccgccgatgctctttgtatttatcgccctgggaaggtggctcgagcatttggccaaaagcaagacatctgaagccctagctaaacttatgtctctgcaggccactgaagctactgtcgtgaccctgggagaggataacctgatcatacgggaagagcaggttccaatggagctggttcagagaggggatatcgttaaagtggtgcctggaggaaagtttcccgtagacgggaaagtcttagagggcaataccatggccgatgaatcactaatcactggcgaggccatgcccgtgactaagaagcctggctcaacagtcattgcaggctctataaacgcccatggaagtgtcctcatcaaagccacacatgtggggaacgacactaccttggcccagatcgtcaagctggtggaggaggcccagatgtccaaggcacccatacagcagctcgctgaccgcttctcgggatactttgttccctttattatcatcatgagtactttgaccttagtagtatggatcgttattgggtttattgacttcggcgtggtccagcgatacttccccaaccctaataaacacatcagtcaaacagaggttatcattcgatttgcattccagacttccatcactgtgctgtgcatagcctgtccttgctccctgggtctggctacccctaccgcggtgatggtggggacaggtgtggctgctcagaacggcatcctcattaaagggggaaaaccgttagagatggctcataagatcaagactgtgatgttcgacaagaccgggacaatcactcatggagtgccccgtgtcatgcgggttcttctgctgggggatgtagcgaccctgcctctgagaaaggtgctggcagttgtgggcacagctgaggcaagctctgagcatccactgggagtagctgtcacaaaatattgcaaagaagagctgggaaccgaaactctcgggtattgcaccgattttcaggctgtacctggctgtggaatcggatgcaaagtatcgaatgtagaaggcatcctggcacattcagagaggcctcttagcgcacccgcctctcatctaaacgaggccggatctctgcccgctgagaaggacgccgttccccagacattttcagtacttataggcaatcgcgaatggctgcgcaggaacggtctgacgattagcagcgatgtgagtgatgctatgactgatcacgagatgaaaggccagaccgcaatactggtggctatagatggtgtgctatgcgggatgatcgctatagctgatgcggtgaaacaggaggcggcactggctgttcataccctgcaaagcatgggcgtcgatgtggtgcttattaccggagacaaccggaagactgctagagcaatagccacacaggttggcatcaataaagtgtttgccgaagttctgcccagtcacaaggttgctaaggtccaggagcttcagaacaagggaaagaaagtcgctatggtaggcgatggggttaacgatagtcctgctttagcccaggcggacatgggagtcgccatcggaacaggaactgatgtagctattgaagccgcagatgtagtgctaattcgcaatgacttgctggacgtggtggcttctattcacctatctaaacgcacagtaagacgcattagaattaacctcgttctcgcacttatctacaacttggttgggatacctatagccgccggtgtctttatgccgattggaatcgtcttgcagccctggatgggctccgcagccatggccgcctcgtcagtgagcgtggtactctcctcactgcaactcaaatgctacaagaagcccgacttggagcgttacgaagcgcaggcacatggccatatgaagccactgaccgcgtcccaggtgagcgtgcacattggtatggacgatcggtggcgtgattctccaagggccactccctgggatcaggtgtcttacgtgagccaggtttctttatcctcgttaacgtctgacaagccttcccgccattccgccgccgccgatgatgatggcgataaatggtcgctgctgttgaacggcagggacgaggagcagtacatatag

SEQ ID NO: 3624 - DNA, 3108 bp, synthetic construct
  misc_feature 1..3108: note = source = /note="Description of Artificial Sequence: Synthetic coding sequence"
  source 1..3108: mol_type = other DNA
atgcccgagcaggagcggcagatcaccgcccgggagggcgccagccggaagattctgagtaagctctccctgccaacccgggcctgggagcctgctatgaaaaagagctttgcgtttgataatgtgggttatgaggggggcttggacgggctgggcccctcaagccaggtggccacctctactgtccggattctggggatgacgtgtcaaagctgtgtcaagtcgatcgaggatagaatctcgaatctaaagggcattatttctatgaaagtgagcttagagcaagggagcgccaccgtgaaatacgtgccgtccgtcgtctgtctccaacaggtgtgccaccagattggagatatgggattcgaagcaagtatcgcagaaggtaaggccgcgagttggccaagcagaagcctcccggcccaggaagcagtagtaaaactgagagtcgaaggaatgacttgtcaaagctgcgtatccagcattgaagggaaggtgagaaaactgcaaggggtggtacgagtaaaagtgtccttgtcaaaccaggaggccgtcatcacctatcagccctatctgattcagcctgaggacctgcgggatcacgtgaatgatatgggcttcgaagccgctataaagagtaaagtcgccccgcttagcctcggccccattgatatcgagagactgcagtctaccaatcctaagagaccactctcttcggctaaccagaatttcaacaattccgaaaccttaggacatcagggctcccatgtcgttacactgcaactgcgaatcgacggtatgcactgcaagtcttgtgtgctcaatatcgaggagaatataggccagctattaggggtgcagtctatccaagtcagtctggaaaataaaactgcccaagtgaagtatgaccctagttgtacttcgccggtggctctccagagggcaatcgaagcactgccgcccggaaacttcaaggtgtccctgcctgatggcgcagaaggctcaggtactgatcaccgaagctcctcttcgcactctccgggcagtccacctagaaatcaggtgcaagggacatgcagcacaacacttattgccatagcggggatgacctgtgcatcctgcgtgcacagtatcgaaggtatgatctctcagctcgaaggcgtgcagcagatcagtgtctctttggcggaaggtactgctactgtgctgtacaatccctcagtaatcagtcccgaggaactaagagccgccatagaggacatgggattcgaagcttctgtcgtcagcggtgaggctatgccagtgaccaaaaaacctggttccactgtgatcgctggatctattaacgcacacggcagtgtcctgataaaggcaactcatgtcgggaatgatacgactctcgctcagatcgtgaagctcgttgaggaggcccagatgtctaaagcccccatccagcagttggccgaccgctttagtggctacttcgttccatttatcatcatcatgtcaactcttaccctggtggtttggatagtgatcggctttattgactttggcgtggtgcagcggtacttccccaatccaaacaaacacatttcccaaaccgaagtaatcatccgatttgcgttccagacatcaattaccgttctctgcattgcctgcccctgcagtctcggactggccacaccaacggccgtcatggttggaactggagttgccgcgcagaacggtatcctcattaaggggggtaagccactggagatggcccacaaaattaagactgtgatgttcgacaagaccggtactataactcacggagtccctagagtgatgcgggtgctgctgttaggagacgttgccactttaccgttgagaaaagtgctggccgtggtcggcacagcagaggcttcctctgagcatccccttggagtggccgttaccaagtactgtaaggaggaacttggtaccgagactctcggttattgcaccgacttccaggccgtgcccggatgcggcatagggtgcaaagtttcaaacgtcgagggcattctggctcactctgagcgcccgctctctgcccctgccagtcacctcaatgaagctggatccctgcccgccgaaaaggacgccgtgccacagaccttttcagttttgatcggcaatagagaatggcttcgacggaatgggcttacaataagcagcgacgtcagcgacgctatgactgatcacgaaatgaagggccagaccgcaatcctcgtggccatcgatggggtactgtgtggcatgatcgcaatcgctgatgccgtgaaacaggaggccgccctcgcagtgcatacccttcagagtatgggagttgacgtcgttctgatcaccggagataaccgaaagacagccagagccattgctacgcaggtcggcataaataaggtattcgccgaagtgctcccctcacacaaagtggccaaagtccaggagctgcagaataaggggaaaaaggtagctatggtcggcgacggagtcaacgattcacccgccctcgcacaggcagatatgggcgtggcgattggcaccgggacagatgtggcaatcgaggccgcagacgtggtgctcataagaaatgaccttcttgacgtggtggcaagtatccacctatctaagcgaacagtgagacgcatccggattaatctggtactggcacttatttataatctcgtgggaatccctattgctgctggcgtcttcatgcccattggcatagtgctgcagccctggatgggatctgccgccatggctgctagctccgtctctgtggtgctgagttccctacagctcaaatgttataaaaagcctgacctggagagatacgaagctcaagcccatggccacatgaaaccactcactgccagccaggtttcggtgcatatcggaatggacgaccggtggcgcgacagtccccgcgcgactccgtgggaccaggtgtcatatgtgtcccaagtttcattgtcgtctcttacgtcagataagccctccaggcatagcgcagcagctgacgatgatggcgacaagtggagccttctcctgaatggccgcgacgaggaacaatatatttag

SEQ ID NO: 3625 - DNA, 2031 bp, synthetic construct
  misc_feature 1..2031: note = source = /note="Description of Artificial Sequence: Synthetic coding sequence"
  source 1..2031: mol_type = other DNA
atggacgtgctgatcgtgctggccaccagcatcgcctacgtgtactcactcgtcatcctcgtcgttgcggttgcagagaaagctgaacgaagtccggtcacattttttgacacccccccaatgcttttcgtattcatcgctctgggacgatggttagagcatttggcgaagtccaagacgtctgaggccttggccaagctgatgtctcttcaggctactgaagctacagtcgtgaccctcggcgaggacaatttgatcattcgcgaagaacaggtgcctatggagttggtgcagcgaggtgatatagtgaaagtggtgcctggaggcaaattcccggttgatgggaaagtcctggaaggaaataccatggccgacgagtccctcatcacaggcgaggctatgcctgtgaccaagaagcccggtagtactgttatagccggcagcatcaacgctcacggctccgtactgatcaaagccactcatgtcgggaatgatacaacattggcccagattgtgaaactggtcgaagaagcccagatgtctaaagcacccatccaacagctggccgacagattcagcggttatttcgttcccttcatcatcattatgtcgactctgacgctggtcgtttggatagtcattggctttatcgacttcggagtcgtgcagcgttacttccctaatcctaataagcacatatcacagacggaagtaattatacggtttgcgttccagacttccatcacagtgctgtgcattgcctgcccatgcagtctgggcctggcaactcctacagcagtcatggtgggcactggggtggccgcgcagaatggcattctcattaaaggagggaaaccactcgagatggctcataaagagcttggcactgagactctcggatattgtacagactttcaggctgtgccagggtgtggtatcgggtgcaaggtatctaatgtggaaggcatactagctcacagtgaaaggcctctgtctgctcctgccagccacctcaatgaggccggatccctgccggccgagaaggacgccgtgccacagaccttcagcgtcttgataggaaacagggagtggctgagacgaaatgggctgacaataagctcggacgtgtcagatgcgatgaccgatcatgagatgaaagggcagaccgccattctggtcgcgatagacggcgttttgtgcggcatgatcgctatagcggacgcggttaaacaagaggccgctctagccgtgcatacccttcagtccatgggagtggacgtcgtcctgattacaggggacaacagaaaaactgcacgtgctatcgcaactcaggtgggaataaataaagtgttcgctgaagtgctgccttctcataaggttgccaaggtccaagaactgcagaataagggcaagaaagtggccatggtcggcgatggagtcaatgactcacctgcactggcacaggccgatatgggcgtcgctatcggaaccggcaccgatgtggctattgaggccgccgacgtggttctgatccgtaacgatctgctggacgtggtagcctcaatacacctgtccaagcgcacggttagacgcatcagaattaatctcgtgttggctttgatctacaacctcgtgggcatccccattgctgccggggtgtttatgccaattgggattgttctgcagccttggatggggtctgcagctatggccgctagttcggtatccgttgtgctatctagcctccagttgaagtgctataagaagccagacctggaaaggtatgaagcgcaggcgcacgggcacatgaagcccttgaccgcaagtcaggtctcagtgcacatcggcatggatgatagatggcgcgattctcctcgcgccacaccttgggatcaggttagctacgtgagccaggttagcctatcgtcactgacttctgataaaccaagtagacattcagctgccgcggatgatgatggggataaatggtccctgctgctcaacggccgagacgaggagcagtatatttag

SEQ ID NO: 3626 - DNA, 4203 bp, synthetic construct
  misc_feature 1..4203: note = source = /note="Description of Artificial Sequence: Synthetic coding sequence"
  source 1..4203: mol_type = other DNA
atgcccgagcaggagcggcagatcaccgcccgggagggcgccagccgaaagattctgtccaagctttcgctgccaacccgggcttgggagccagccatgaaaaaatccttcgcttttgacaatgtcgggtacgagggagggctggacggcctgggccctagttcccaagtagcaacttccacggttcgaattctgggaatgacatgtcagagttgcgtgaagtctattgaagaccgcattagcaacctgaaagggatcatatctatgaaagtcagtctcgagcaggggagcgcaaccgtcaagtacgtgccctctgtagtttgcctgcagcaggtctgtcaccagataggggatatgggttttgaggcttctattgctgagggcaaggccgcctcttggccctcacgctcactaccagcccaggaggcagtagtcaagctgagggtcgagggaatgacctgtcagagttgcgtctcctcaattgaagggaaagtgcggaaattacagggggtggttagagtcaaggtgtccctttccaatcaagaagccgtgatcacttaccaaccatatctgattcaacctgaagatctgcgagatcatgtaaatgatatgggattcgaagccgccattaagtcaaaagttgctcccttgagcttgggcccaatcgatatcgagaggctgcaatcaacaaacccaaagcgacccctatcaagtgccaatcagaactttaataactccgagacactgggccatcagggaagccacgtggtgacactgcagctccgtattgacgggatgcactgtaaatcatgtgtattgaatattgaggaaaatataggccagctcttgggtgtgcagtcaatccaagtttccttggagaataagactgctcaggttaagtacgatccctcgtgtacctctccggtggccctacagagggcaatcgaggcccttccccctgggaatttcaaagtctccttgcccgatggtgctgagggctccggaaccgaccaccgcagcagcagctctcattctcccggttctcctcctcgcaaccaggtacagggaacttgttcaaccacattgatcgccatcgctggaatgacctgcgcctcctgcgttcacagtatcgaaggcatgatctcccagctcgaaggagttcaacaaatatcagtgtctttggccgaaggcaccgcaacagttctgtataatccaagcgtgatttcccccgaggagcttagggccgctattgaggatatgggcttcgaagcctcagtggtgagtgaaagttgcagcactaacccactaggcaaccatagtgcgggaaatagcatggtgcagacaactgatggaacacccacttccgtgcaggaggtcgccccccacactggcaggttgcctgctaaccatgcacctgacatacttgccaagtcaccacagtccacccgggccgtggcgcctcagaagtgcttcctgcagatcaaggggatgacatgtgcttcttgtgtttccaatatcgagaggaatcttcagaaggaggcgggcgtgctgagtgtgcttgtggccctgatggcaggcaaggccgagattaagtacgatccagaggtgatacagccacttgagatagcccagttcattcaggacttgggcttcgaggctgccgtaatggaggactatgcaggtagtgacggcaacatcgaacttacaatcaccggcatgacatgcgcgtcatgcgttcataacatcgagagcaaacttaccaggaccaacggaatcacatacgcttctgttgccctagccacatcaaaagcccttgttaagtttgatccagaaatcataggacctagagacattataaagattattgaggaaatagggttccacgcatcgttggctcagagaaaccccaatgcacatcatctcgatcataaaatggaaataaagcagtggaaaaaaagtttcctttgttcactagtgtttggtatacccgtgatggccttaatgatctacatgcttatacccagtaatgaaccgcatcagagcatggttctcgatcacaatatcattcccgggctgagcatcctaaatctgattttctttatcctatgtacttttgtccagctcctcggggggtggtacttctacgtgcaggcatacaaaagccttcgacatcgtagtgccaatatggacgtcttgattgtgctggccacctcaatcgcctacgtttactcacttgttatactggtggtggccgtggccgagaaagcggagaggagcccagtgacattctttgatacaccccctatgctcttcgtttttatcgctctcggtaggtggctggagcacttggcaaaaagcaaaacttccgaagccctcgcgaagctgatgtccctgcaggccactgaggcaacagtcgtgactttgggtgaggacaatttgataatccgggaggaacaggtccccatggagctggttcaaagaggcgatattgtcaaggttgtgcccggaggaaaattccccgtcgacggcaaggtgctcgaggggaatacaatggccgatgagtctctgatcactggagaggctatgcccgtgacaaaaaaaccagggtctacggtaatcgccggctccataaatgcacatgggtcagtactgataaaagcaacgcatgtaggtaatgacacaaccctggcccagatcgtcaagctggttgaagaggcacaaatgtctaaagctcctatacagcagcttgcagaccgtttttccgggtatttcgtgccattcattatcattatgtcgacactgaccctggtggtgtggatagtaattggttttatcgactttggagtcgtgcagcgttactttcctatcaagactgttatgttcgataagactggaaccattacccatggggtgcccagagtgatgcgcgtgctgctcctcggcgacgttgccaccctacctctgagaaaggtgctagctgtagtcgggaccgctgaagcctcttccgagcatcctctaggcgttgccgtgaccaagtactgtaaggaggaattggggacagagactcttgggtactgtacagacttccaggctgtgcctgggtgcgggatagggtgtaaggttagtaacgtcgaaggcatcttagcccatagcgaacggcccctgtctgcccctgctagtcaccttaacgaggcagggagtctgcctgccgaaaaggacgccgtgcctcaaacgtttagcgtgctcattggaaatagagagtggctgagacgtaatgggctgactatttctagcgacgtgtctgatgctatgaccgaccacgaaatgaaaggccagactgcaatcctcgtagcgattgacggagtgctgtgtgggatgattgccatagctgacgcagtgaaacaggaagctgccctggcagtgcacacgctgcagtcaatgggcgtggatgtcgtgctcattacgggggacaacagaaagacggccagggctatcgccacgcaggtaggcattaacaaggttttcgccgaggtgctgccctctcacaaagtggctaaagtgcaggaactgcaaaataaaggcaagaaagtggcgatggtcggtgacggagtgaacgactctccagctctggcccaggccgacatgggcgtggctatcggaaccggaaccgatgtggcaattgaagccgccgacgtggtactcattagaaacgacctcttagatgtggtggcctccatacacctctcaaagcgtactgtgcggcgcattagaataaacctagtcttagctctgatctataacctggtaggcatccctatcgcggcaggggtgtttatgcctattggaatcgtgcttcagccctggatggggtcagcagcaatggcagcctcttcagtcagcgtggtcctatctagtctgcaactgaagtgttacaagaaacctgatcttgagcgatatgaagctcaggcccacggacacatgaaacctctcaccgccagtcaagtgtccgtacacattggtatggatgaccgatggagagattcccctagggctacaccatgggatcaggtaagctatgtttcccaggtctcactaagcagtttaaccagcgacaagcccagcagacactccgctgccgctgatgatgatggggacaagtggtctcttctgctgaatggtcgtgacgaagaacagtacatctag

SEQ ID NO: 3627 - DNA, 4164 bp, synthetic construct
  misc_feature 1..4164: note = source = /note="Description of Artificial Sequence: Synthetic coding sequence"
  source 1..4164: mol_type = other DNA
atgcccgagcaggagcggcagatcaccgcccgggagggcgccagcaggaaaattctctcgaaactttccctgccgactcgggcttgggaacccgccatgaagaagtctttcgcctttgataacgttggttatgaaggaggactggatggcctgggcccaagcagccaggtggcaaccagcacagtcaggattttgggcatgacttgccaatcatgcgtgaagagcattgaggatcggatttcaaatctgaagggcatcattagcatgaaggtaagcctggagcaaggctcggccaccgtgaaatacgtgccctcggtagtgtgtctgcagcaggtgtgtcatcagattggcgacatggggttcgaggcttccattgccgagggcaaggccgctagttggccctctaggtcacttccagcccaagaggccgtagtgaagctgcgcgttgaagggatgacttgccaatcttgcgtgtccagcatcgagggaaaggtcaggaaactccagggcgtggtgcgcgtgaaagtttcgctgagcaatcaagaagctgtaatcacctaccagccgtacctgatccagccagaggacctgcgtgatcacgtcaacgatatgggctttgaggccgctatcaaaagcaaggtggctcctctttcactaggccctattgacatcgaaagactgcagagcaccaatcctaaaaggccattgagcagtgcgaatcaaaattttaacaactctgagacgcttgggcaccagggatcacacgtagtgacgctgcagcttcgaatagacgggatgcattgcaaatcttgtgtcctgaacattgaagagaacatcggccaactgcttggggtgcagtcgatccaggtcagccttgaaaataaaaccgcccaagtgaaatacgaccccagctgcacttcacccgtggccttacagagagctatcgaagctctgccgcctggtaacttcaaggtgagcctacccgacggagctgagggatcaggcacagatcaccgtagcagcagctctcatagtcctggtagcccaccccgaaaccaggttcaaggcacctgctcaaccacactgattgctattgcaggcatgacctgtgctagctgcgtccacagcatagaggggatgatcagccagttagaaggtgtccagcagataagtgtttctctcgccgaaggaaccgccaccgttctctacaacccaagcgtaatttcgcccgaagagctgcgggcggcaatcgaagacatggggtttgaagcctccgttgttagtgagtcttgttctaccaatccattaggtaaccacagcgcaggcaactcaatggttcaaaccaccgacgggacccctacttccgtacaggaggtcgccccccacaccggccgtctgccagctaatcatgcgcccgatatcctggcaaaatcgccccagtctacacgtgcggtagcaccacagaagtgcttcttgcagatcaaagggatgacctgtgcttcttgtgtcagtaacatcgaacgaaacctgcaaaaagaggcaggcgtgctgtctgtactggtggccctgatggccggcaaagccgagatcaaatacgaccccgaggtcatccagccgctagagattgcccagttcatccaggacctgggttttgaggctgccgtcatggaggactatgccggttctgacggtaacatcgaactgacaatcacggggatgacctgtgcctcatgtgtgcacaatattgaatccaagctcacgcggactaacggcataacttatgcttctgttgccttggcgactagcaaggccttggtgaagttcgaccctgagattatcggtcccagggacatcatcaagatcattgaagaaatcggattccacgctagtctggctcagcgcaaccccaatgcccaccaccttgaccataaaatggagatcaagcagtggaaaaaatctttcctttgcagccttgtcttcggaatacccgttatggcccttatgatttacatgctcattccgagcaatgaaccccaccaatcaatggtgttagaccacaatatcatccccggactcagtatccttaatctgatcttctttatcctctgtacatttgtgcagagcaaaactagtgaggccctcgcaaaactgatgtccctacaggctaccgaggcaaccgttgtcactctgggcgaggataatctcatcatccgcgaagagcaggtgcctatggagctcgttcaaagaggcgacatcgtgaaggtcgttccagggggcaagttcccagtcgacggcaaggtgcttgaggggaacacaatggctgatgaatcccttatcacaggtgaggctatgccagtaacaaaaaagcccggttctaccgttattgcaggatccatcaacgcccacgggtctgttctcatcaaagccactcacgtggggaacgataccaccctggcgcagatcgtgaaattagtcgaggaagctcagatgtcaaaagctccaattcagcagttagctgaccgcttctccggctacttcgttccatttattattattatgtccacactaacattagtcgtttggatagtaatcgggtttatagatttcggggtcgtgcagaggtatttccccaaccctaacaaacatataagccaaactgaggtaatcatccggtttgccttccagacaagcatcactgtcctctgcatagcatgcccatgttccctgggattggctacccccactgcagtcatggttggcaccggcgtggcggcccagaacggcatacttatcaaagggggaaaaccactggagatggctcataagatcaagactgtgatgttcgataaaactgggactattacccacggggtgcccagagttatgcgagtgctgctgttaggtgacgtggccaccctgcctctgcgtaaggtgctggccgtcgttggaacagccgaagcctctagcgaacacccgctgggcgttgccgtaacgaagtattgtaaggaagaactcggaaccgagacgctgggctattgtaccgactttcaagcagtgcccggctgcggaatcggctgtaaagtgtccaatgttgaaggcattctggctcacagtgaaagacccctcagtgcccctgcatcacatttaaacgaggcaggaagcctgcctgccgagaaggacgctgtgccgcagacatttagcgtcctgattggcaatcgagaatggctgagaagaaatggccttacgatctctagtgatgttagcgacgctatgaccgatcacgaaatgaagggacagacagccattctcgttgctattgacggggtgctctgcggcatgattgcaatcgcagacgctgttaaacaggaggctgcactcgcagtgcacacattgcagtccatgggagttgacgtggtgctaatcactggcgataaccggaagaccgctagggcgattgccacgcaggtgggaattaataaggtgtttgccgaagttttaccctcccacaaagtagccaaagtacaggagctgcagaataaaggcaagaaagtcgcgatggttggggatggtgtaaatgatagtcctgccctcgcacaagcggatatgggagttgcaatcgggacggggactgacgtggccatcgaagccgctgacgtggttctcattaggaacgatctgctcgatgtggtcgcctccattcacctatctaagcgcaccgtccgaaggatcaggatcaacctggttctggctctcatctacaacttagtcggcatcccaattgccgctggcgtgttcatgccaatcggtattgtactgcaaccttggatgggctccgccgccatggccgcttcatcagtgtctgtggttctaagttctctgcagttgaagtgttataagaagcccgacctcgaaaggtatgaagcccaagcgcatgggcatatgaaacctctgactgctagccaggtttctgtccatatcggcatggatgacaggtggcgcgattcaccaagagccacgccatgggaccaagtgtcctacgtgtctcaggtgtccctcagcagtcttacgtccgacaaaccttcaagacacagcgcagctgcagacgatgacggcgacaagtggtccctcctgcttaatggaagagacgaggagcaatatatttag

SEQ ID NO: 3628 - DNA, 1587 bp, synthetic construct
  misc_feature 1..1587: note = source = /note="Description of Artificial Sequence: Synthetic coding sequence"
  source 1..1587: mol_type = other DNA
atgaagaagagcttcgccttcgacaacgtgggctacgagggcggcctagacggactcggaccatctagtcaggtggccacctccactgtgcgaatcttaggcatgacttgccaatcttgcgttaaatctattgaggatcgaatcagcaacttgaaagggataatttcaatgaaagtgtcactggaacaagggtctgctacggtaaagtacgtgccatccgtggtgtgtctgcagcaagtgtgccatcagataggggatatggggttcgaggctagtattgccgaagggaaggccgcatcttggccatcgaggtccctgcccgcacaggaggcagtggttaaactgcgggtcgaggggatgacatgtcagtcctgtgtatcttccatcgaagggaaggttcggaaactgcagggtgtggtgcgggtgaaagtgtctcttagcaaccaggaggccgtcatcacttaccagccctacctaattcagcctgaggacctccgtgatcatgtgaatgacatgggttttgaggcggccatcaagtcaaaggttgcccccctgtcactcggacctatcgatattgaacgcctccagagcacaaaccccaagagaccactttctagcgccaatcaaaacttcaacaatagcgaaactctcggccaccagggctctcatgtggtgaccctacagttaaggatagacgggatgcattgtaagtcttgtgtactgaacatcgaggaaaacattgggcagctgctcggcgttcagtctattcaggtgagcctggagaacaaaacggcccaggtgaagtacgacccgagttgtacatcccccgtggccttgcaaagggcaattgaggctctgccaccaggaaacttcaaagtgagcttacctgacggagcggaaggttcaggcactgaccaccgctcaagttcctcacacagcccagggagtccacctaggaaccaggttcagggaacatgtagtaccacactgatagccatcgcagggatgacgtgtgcttcctgcgtacacagtattgagggcatgatctctcaactagaaggcgtacagcagatctcagtgtccctggctgaggggactgccaccgtcctttacaatcctagtgtgatttctcccgaagaactgagagccgcgatcgaagatatggggtttgaggcttccgtcgtgtctgaatcttgctccacaaaccctctcggcaatcacagcgcagggaactctatggtgcaaaccacagacggcacgcctaccagcgtgcaagaagtcgcacctcatacaggccggcttcccgctaatcacgcgcccgacatcttagcaaaaagtccccagtctacgcgggcggtggccccacagaagtgcttcctacagatcaagggcatgacctgcgcctcttgtgtctcgaatattgagcggaacttacagaaagaagcagcccctcggtgggttgtgctgctacggtcgggtctgcaaatcagcgagacccaggtgagccagcatgggagggcccaccggcctgggcacaagcactgcctttgccttttttcaggccatcccggtggttgctgcggttag

SEQ ID NO: 3629 - DNA, 3966 bp, synthetic construct
  misc_feature 1..3966: note = source = /note="Description of Artificial Sequence: Synthetic coding sequence"
  source 1..3966: mol_type = other DNA
atgagcgacagcgtgatcctgcggagcatcaagaagttcggcgaggaaaacgatggctttgaaagtgacaagtcttacaataatgataagaagagccgcctccaagacgagaagaagggcgacggcgtccgggtcggcttctttcagctgtttcgtttctcttcctctaccgacatctggctgatgtttgtggggtccctgtgtgcttttctgcacggtatcgcacagccaggagtgcttttaatcttcgggacgatgacggacgtcttcattgactatgacgttgaactccaggagctgcagatccctgggaaggcatgcgtcaacaacaccatagtgtggacaaatagtagtctcaatcagaatatgactaacggaactagatgtggtctgctcaatatcgaaagcgagatgataaaatttgccagctactatgccggaatcgccgtagctgttctgataaccgggtacattcagatctgcttctgggtgatagctgccgcacgtcagattcagaagatgagaaagttttactttcggagaataatgcggatggagattggatggttcgactgtaacagcgtcggagaattaaatacacggtttagcgacgacatcaacaaaattaatgatgcgatagccgaccagatggcactcttcattcaaagaatgacctccactatttgcggctttctgctcggcttttttcgcggatggaaactcacattggtgataatttccgtatcacccctcattggaataggggctgcaactattggcctctccgtgtcaaaattcacggattatgaacttaaagcctatgctaaagctggggttgtggccgacgaagtaatctcatcaatgcggacagtggccgcttttggtggagagaaacgcgaggtagagagatatgaaaagaacctcgtgtttgcccaacgttggggtattcgcaagggcatcgtaatgggattctttaccgggtttgtttggtgtctgattttcctttgttatgcgctggctttctggtatgggtccaccctggtcttagatgaaggcgagtacacccccggaacccttgttcagatattcctgtcagtcattgtgggcgccctgaatctcggaaatgctagcccatgccttgaggcgttcgctacagggagagctgccgcgactagtatttttgaaacaatagatagaaagcctatcattgattgtatgtctgaagacggctacaaactggacaggataaagggagagatcgaattccataacgtcactttccattatccatcaagaccagaggtgaaaattctcaatgatctgaacatggtgattaaaccgggcgagatgacggccctggtgggcccatctggggctggtaaatctactgcactccaactgattcagcggttctacgacccatgcgaaggaatggtaaccgtcgacggacacgacatccgaagtctgaatatccagtggctccgggaccagatcgggatagtagagcaagagccggtgctgttcagcaccactattgcggagaatattcggtatggaagggaagatgccactatggaggatatcgtgcaggcggcaaaggaggcaaatgcttacaacttcataatggacctcccccagcagtttgacactcttgttggtgaggggggtggtcaaatgagcggaggtcagaaacaaagggtggcaattgcccgcgctttgatccggaacccaaaaatcctcctacttgacatggccacctccgcgctagacaacgaaagcgaggcgatggtccaggaggtgcttagtaagatccaacacgggcatactataattagcgtggcccataggctgagcactgttagagccgccgataccatcattggatttgaacacggaaccgctgtggagcgtggtacgcacgaagaactgctggagcgtaagggcgtgtatttcaccctggtcacactccaaagccagggcaaccaggctctgaatgaggaagatatcaaggatgctaccgaagacgacatgctggcacgaaccttcagccggggatcctaccaggacagcctcagagccagtattaggcagcgatcaaaatcgcagctctcctatttggtgcatgagcctcccctggcagttgttgaccataagagcacttatgaagaagaccggaaagataaagacatacccgtgcaggaagaggtggagcccgcccccgttcgtcgtatcctgaaattttccgcacccgaatggccctacatgctggtggggtcggttggggcagccgtgaatggcaccgtgacgcccttatacgcttttctgttttctcagatcctgggcacctttagcatacctgataaagaagaacagcgtagtcagataaatggcgtgtgcctgctctttgtggcgatggggtgcgtcagtcttttcacccagttccttcagggctatgcgttcgcgaagagcggagagcttctgactaaacggctcagaaaatttggctttcgcgctatgctgggacaagacatcgcgtggtttgatgacctgagaaattcccctggcgctctgacaaccaggctggcaacagacgcaagccaggtccagggcgcagcaggttcccagatcggcatgattgtcaacagcttcactaacgtgacagtcgccatgataatagccttcagtttctcgtggaagctgtcgttagttatcctctgtttcttccccttcctcgctctgtccggcgccacccagactcgaatgctcactggctttgccagccgggacaaacaggctctggaaatggttggccaaatcactaacgaagccctctctaatattagaacggtcgcaggcatcggcaaagagcggcgcttcattgaggcgcttgagacagaacttgaaaaaccgttcaagaccgccattcagaaggctaatatctatggcttttgtttcgccttcgcccagtgtattatgtttattgccaactcagcctcttatcggtatgggggatatctcatcagcaatgaggggctgcattttagttacgttttcagagtcatcagtgctgttgttctgtccgccactgccctgggacgcgcgttctcgtacactccctcttacgccaaagctaaaatcagtgccgcccgcttctttcaacttctcgaccgccagcccccaatttcggtctacaacactgcgggcgagaagtgggataacttccaggggaagatcgatttcgtggactgtaagttcacatacccttctcgacccgattcccaagtcctgaatggactgagtgtatccatctctccgggccagacactcgccttcgttggctcctcagggtgtggcaagtctactagtatacagctgctcgagcggttctacgaccctgatcagggcaaagtgatgatagacggtcacgactccaagaaggtgaatgttcagtttctccgatccaatatcgggatagtatcccaggagccagtgctgttcgcatgttcaattatggacaacatcaagtatggggacaacacaaaagaaatacccatggagagagtgatagccgccgcaaagcaagctcagctgcatgacttcgtgatgagcctcccggagaagtacgagaccaatgtagggtcccaggggtctcaactttctcggggcgagaaacagcgaatcgcaatcgccagggcaatcgttcgtgacccaaagatcctgcttcttgacgaggctacaagcgccctggacactgaaagcgaaaaaaccgttcaggtggccctggacaaagccagagagggccgtacatgcattgtaatcgcccacaggctctccacaatacagaacgccgacatcatcgccgttatggcccagggggtggtgatcgaaaaggggacccatgaagagttgatggcccagaaaggagcttactacaagcttgtgaccaccggtagtcctatctcctag

SEQ ID NO: 3630 - DNA, 3861 bp, synthetic construct
  misc_feature 1..3861: note = source = /note="Description of Artificial Sequence: Synthetic coding sequence"
  source 1..3861: mol_type = other DNA
atggacctggaggccgccaagaacggcaccgcctggcggcccacctctgccgagggagactttgagctcggcatttctagcaagcagaagcggaaaaaaacaaaaacagttaagatgatcggcgttttaacactgttccgatacagcgactggcaggataagctgttcatgagccttggaacgatcatggccatcgcacatggctctggcttacctctaatgatgattgtgttcggagaaatgacagataaatttgtggacacagctggtaacttctcatttcctgtcaattttagcctctccctgctgaacccaggaaagatccttgaagaggagatgacccgctacgcctactactattcgggcctcggggccggcgtgcttgtggccgcctacattcaggtctcattctggactcttgcagccggtcgacaaataagaaaaatccgccagaagttcttccatgccattcttcgccaggaaattggttggtttgacataaacgataccaccgagctgaacacccgcctgacagacgatatttccaagatttccgaaggcattggagacaaggtaggaatgttctttcaggctgtagctaccttttttgcaggtttcatcgtgggtttcatccgcgggtggaaactgaccctcgtcatcatggccataagtccgattctcggactttccgctgccgtgtgggcgaaaatcctgtctgccttttctgataaagaattagccgcttatgctaaagccggcgctgttgctgaggaagccctgggcgcaatcaggacggtcatagccttcggtggtcagaataaggagcttgaaaggtatcagaagcatctggaaaatgctaaggaaatcggcattaaaaaggcaattagcgcgaacatctctatgggcatagcttttcttctcatctacgctagctacgcgctggccttttggtatggcagtactcttgtcatcagtaaggagtacaccatcggaaacgccatgaccgtgttcttctctatcctgattggagcattctccgtagggcaggcagcgccctgcatcgacgcattcgccaacgctagaggagccgcttatgtaatcttcgacatcatcgataacaatcccaaaatagactctttttctgagagaggccacaagcctgactcgatcaagggaaatctggagtttaacgacgtccacttctcttaccccagtcgcgcgaacgtgaagatcctgaagggcctgaatctgaaggtgcaatccggtcagactgtggcactagtcgggtcttcaggatgcggcaagtcgaccacagtgcagctcatccagaggctgtacgacccggacgaggggacaatcaatattgatggccaggatatccggaacttcaatgtcaactacctgcgcgaaatcattggcgtggtgtctcaagagcccgtgctcttttccacaacaatcgcagaaaatatttgttatggcaggggtaacgtgacaatggatgagattaagaaagccgtaaaggaggccaatgcctacgagttcattatgaagttgccgcagaagttcgatacactcgtgggtgagaggggcgcccagcttagcggtggacagaaacaaaggattgctattgctagggccctcgtgaggaaccctaagattcttctgctggatgaagccacctccgccctcgacacagagtccgaagctgaagtccaggcagccctcgacaaggctcgcgaaggcagaaccaccatagtgatcgcccatcgcctgagcacagtgagaaatgcagacgtgatcgctggcttcgaggatggtgttatcgttgaacaaggtagccacagtgaactcatgaaaaaagagggggtatactttaagctggtgaacatgcagacgtccggttcacagatccagtcagaagagttcgagctcaatgatgagaaggccgctaccaggatggctccaaacgggtggaagagccgactttttcggcatagcacgcagaaaaacctgaaaaattctcagatgtgtcagaaatcactggacgtagagacggacggcctcgaggcaaatgtgccccccgtttcttttctgaaagttctgaaactgaacaagacagaatggccctatttcgtggtcggtacggtctgcgctatagcgaatggcgggctccaaccagctttctccgtgatcttctctgaaataattgccatctttgggcccggagatgacgcagtaaagcagcagaagtgcaatatcttctcgctgatctttcttttcctgggtattatctcattcttcacattcttcctgcagggatttacatttggcaaagctggggagattttgacacgacgattgagatctatggcctttaaagctatgctgcggcaggacatgagttggtttgacgaccacaaaaattccactggcgctctgagcacccggctagcaaccgatgcagctcaggtccaaggcgctactggcactcggctcgcgttgatcgcccagaacattgctaatctggggaccggaataattatttcctttatctacggatggcagctcactctgttgctgctggctgtggtgcccataatcgcagtttcgggtatagtcgagatgaagctgctggctgggaacgccaagagggacaagaaagaactggaggcagccggcaagattgccaccgaggccatcgagaatatcagaactgtggtaagcctgacacaggagagaaagttcgagtccatgtatgtggagaagctctacggcccatatcggaattcagtccaaaaggctcacatctacgggatcacattcagtatttcacaggctttcatgtacttcagttacgccggctgctttaggttcggcgcttacctcatcgttaacggtcacatgagattcagagacgtgatactggttttcagcgccattgttttcggagccgtggccttgggtcacgcatcttcctttgcccccgattatgcaaaagcaaagctcagtgccgctcacctgtttatgctcttcgagcggcagccactgatcgatagttactcggaggagggtttgaaacccgacaaattcgaaggcaacatcacatttaacgaggtcgttttcaattatcctacccgggcgaatgtgccagttctacaggggctctccctggaagtgaaaaaaggccaaacccttgcactcgtcggaagttctggctgtggcaagtccacagtggtgcaactgttagagcggttttacgatccactggcgggaacagtctttgtggactttggtttccagcttctagacgggcaagaggctaagaagttgaatgttcagtggctaagagctcagctgggcatcgtgagtcaggagcctatactgttcgattgctccatcgctgagaatatcgcttacggtgacaacagtcgcgtggtatctcaagacgaaatagtcagtgcagcaaaggctgctaacatccaccccttcatcgaaaccctgccccacaaatacgagacaagggttggagataaagggacccagctgtctggcggacagaaacagcggatcgccatcgcgcgggcactcatccgacagcctcagatcctactgctggacgaggcgacctctgctctcgacaccgagtcagagaaggtggtgcaggaagcactggacaaggcccgcgaagggcgcacatgtattgtaattgctcacagactttctacaatccagaacgcagatctcatcgtggtttttcagaatgggcgagtgaaggaacacggcacccaccaacagctgctggctcagaaaggcatctacttctccatggtatccgttcaggccgggactcagaacctctag

SEQ ID NO: 3631 - DNA, 3699 bp, synthetic construct
  misc_feature 1..3699: note = source = /note="Description of Artificial Sequence: Synthetic coding sequence"
  source 1..3699: mol_type = other DNA
atggacctggaggccgccaagaacggcaccgcctggcggcccaccagtgccgaaggagatttcgagttggggatctcaagcaagcagaagcgaaaaaaaaccaaaaccgtgaagatgataggcgtgttgacactgtttagatactccgattggcaagacaagctatttatgtcactcggcactatcatggccatagcccacgggagcgggctgccactgatgatgatcgtattcggggagatgacagataagttcgtagatacagccggaaacttctcattccccgtcaatttctctctgtctctgctcaatcctggcaagattctcgaagaagaaatgacaaggtatgcctactactattctggtctgggggcgggggtgctcgtcgcagcatacatccaagtcagcttctggactctcgcagccggtaggcaaatcaggaagattcgccagaaatttttccacgctatactgagacaggaaattggatggttcgatattaacgataccactgaactgaacacacgcctgacggacgatatttcgaagatcagcgaggggattggcgacaaggtaggcatgtttttccaagccgttgcaaccttcttcgctggattcattgttggtttcatccggggctggaaactgacactcgttatcatggctatcagtccgattctggggttatcagccgccgtgtgggccaagatactgtctgctttttccgataaggagctggctgcttatgctaaggccggtgccgtggctgaggaggccttaggagcgattcggaccgttatcgcgtttggtggacagaataaagagctcgagcgctatcagaagcaccttgagaatgcaaaagagattggtattaaaaaggccattagtgctaatattagcatgggaatcgcctttctattaatttacgccagctacgctctggctttttggtatggttccacgcttgtcattagcaaagagtacacaatcggcaacgccatgactgtgttcttttcaattctgataggcgcttttagcgttgggcaggccgccccctgcattgatgccttcgcaaatgctcgcggggccgcttacgtcattttcgacatcattgataacaatcccaagatcgacagcttttctgagcgagggcataaaccagatagcataaaaggtaacctcgaatttaatgatgtgcacttcagctatccctccagagctaacgtcaagatcctgaaggggctgaatttgaaggttcagtccggccaaaccgtcgctcttgtgggtagctctgggtgcggaaagagcactaccgtccagctgattcagcgcttgtatgatcctgacgaagggacaataaacatagatggccaggacattcggaatttcaacgttaattaccttcgggagataattggcgtggtttctcaggaacccgtccttttctccacaacaattgccgaaaatatctgctatgggcgaggtaacgtcactatggacgaaattaagaaggctgtaaaagaggccaacgcctatgagtttattatgaagctgcctcagaagtttgatacgctggtcggcgagaggggtgcgcaactgtctggcggacagaagcaacgcatcgctatcgcaagagctctagtgcggaatccgaaaatcttactgcttgatgaagccacctccgccctggatacggagagtgaggcagaagtgcaggcggctctagataaagctcgagagggaaggacaaccatcgtaattgcacacaggctgtctactgtccggaatgcggacgtcatcgccgggtttgaggacggtgtgatagtggagcaaggcagccactccgaactgatgaaaaaagaaggggtctactttaagctcgtgaatatgcagactagcggtagtcagattcagagcgaggaatttgagctgaacgacgaaaaggccgccacgagaatggcccctaacggttggaaatctagattgttccggcattcgacacagaaaaaccttaaaaattcccaaatgtgccaaaagtcactggacgtggagaccgatggcctggaggcaaacgtgcctcctgtgtcatttttaaaggtcctgaagctgaacaaaacagagtggccctactttgtcgtgggaaccgtgtgtgctatcgcaaacggtggccttcagcctgccttctctgtcatcttctctgagattatcgctatcttcggaccaggagacgacgccgtgaaacaacagaaatgcaatattttcagtctgatttttctatttctgggtattatttcattttttactttctttctgcaaggcttcacctttggaaaggctggggaaattttgactcgccgactgagaagtatggcattcaaggccatgttacgtcaggacatgagttggtttgacgaccacaaaaatagcacgggcgccctatctacccgcttggccaccgacgctgcccaggttcaaggagcgaccggtactagactggccctaatagcgcaaaacatcgcgaatctgggcaccggcattatcatctcttttatttatggctggcagctgaccctgctgttgttggcagtggttcctatcatcgcggtttcaggaattgtcgaaatgaaattactcgctggaaatgccaagcgagataaaaaggagcttgaggcagccggtaaaatcgctactgaagcgatcgagaacattcgaaccgtggtcagtctaactcaggaaaggaagttcgaaagcatgtacgtggagaagctctacggtccttatcgggtgttctccgcgatcgtgttcggcgctgtggccctgggacacgcatctagcttcgcccccgactatgctaaggctaagctcagtgcggcccatttgtttatgctcttcgagcgccagcccctgatcgacagctattccgaagagggccttaaaccagataaattcgagggaaatattactttcaacgaggttgtgttcaactacccaacgcgggctaatgtgccggtgctgcagggcctgtctttggaagtgaagaaagggcaaacactggcactcgtgggcagtagcggatgcggcaagagcacagtggtgcagttgctggagaggttttatgatcccctcgcgggaaccgtgcttctggatggacaagaagccaagaaactcaatgtgcagtggctgcgggcacaattgggcattgtctctcaggagccaatcctttttgactgcagtattgctgaaaacattgcttatggcgacaacagtcgggtggttagccaggatgagatcgtctctgctgccaaggccgcgaacatacatcccttcattgaaactctccctcacaaatacgagacacgcgtgggcgacaaaggcacccagctctcaggaggccagaagcagcgcattgccatcgccagagctttgatcaggcagccgcagatcctgctgctggacgaagccaccagtgcgctagacaccgaatcggagaaagtggtgcaggaagcccttgacaaggcgcgggaaggaaggacctgtatagtgatagcccacagactgtccactatccagaatgctgatctgatcgtcgtgtttcagaatggcagagtcaaagaacacggcacgcatcagcaactgctcgcgcagaaaggaatttacttctccatggtttctgtgcaggctgggacccagaacctatag

SEQ ID NO: 3632 - DNA, 3840 bp, synthetic construct
  misc_feature 1..3840: note = source = /note="Description of Artificial Sequence: Synthetic coding sequence"
  source 1..3840: mol_type = other DNA
atggacctggaggccgccaagaacggcaccgcctggcggcccacctccgctgagggagatttcgaactgggaatctccagcaagcagaaacggaaaaagaccaagactgtcaaaatgattggagtgctgactctgtttagatatagtgattggcaggataaactgtttatgtctctgggcaccatcatggccatcgcccatggttcagggctgcccctgatgatgatagtctttggagaaatgacagacaaattcgttgatactgcaggtaactttagctttccggtgaacttttcgttgtcattgctcaacccaggcaaaattctggaagaagaaatgacaagatacgcttactactattccgggttgggcgcgggcgtgctggtcgccgcctacatccaggtaagcttctggaccctcgccgcaggccggcaaatccgaaaaatccgacagaagttcttccacgccatcctacggcaggaaatcggttggttcgacataaacgatacaacagaacttaatacacggctgacagatgatatctcaaaaatctcagagggcatcggtgataaagtcggcatgttctttcaggcggtggccacctttttcgccggcttcatcgtaggcttcatacgcggctggaagcttaccctagttatcatggccatctctcccatactggggctgagcgccgcagtctgggctaaaatcttatccgcattttccgataaagaacttgcagcgtatgccaaagctggagcagtcgccgaggaagccctcggggccatccggaccgtaatcgcgttcgggggacaaaataaggagttagaacggtaccaaaagcacctcgaaaatgcaaaagagattggtataaagaaagctattagtgccaacatcagcatggggatagcatttttactgatttacgcctcttacgctctggcattctggtacggctccacgcttgtgataagtaaggaatacactattggaaacgccatgaccgtgttcttcagtattttgatcggagccttttccgttggccaggccgctccctgcattgacgcctttgctaatgcgagaggggccgcttatgtgatcttcgatatcattgataataaccccaaaatagatagtttctctgagaggggccataagcccgattctatcaaagggaatttggaattcaacgacgtgcactttagctatccaagccgcgccaacgttaagatcctgaaggggctgaaccttaaggtgcagtctggtcagactgtggcactggtaggttcaagcgggtgcgggaaaagcactacagtgcagctgattcagcgtctgtacgaccccgatgagggcacaatcaacattgacgggcaggacatccgcaacttcaatgtcaactatttgagagagattattggagtcgtctcacaggaacctgttttattctctacgacaatcgctgagaatatctgctatggtcgcggcaatgtgacaatggatgaaatcaaaaaagcagttaaagaggcaaatgcatatgaattcattatgaagctccctcagaagttcgacaccctggtgggagaaaggggtgctcaactatccggagggcagaagcagaggatcgctattgccagagccctggtcagaaaccccaagatcctgctgctggatgaggccacctccgcactggatacagagtcagaggctgaggtgcaggccgcgctggacaaggcccgagagggcagaacaactatagtgattgcgcatagactgtcgacagtgcgcaatgcagacgtgatcgctggttttgaagacggcgtaatagtggagcagggctctcactctgagttgatgaagaaagaaggtgtgtattttaagctggtaaatatgcagacttccgggagccaaatccagagcgaggagttcgaactcaatgacgagaaagcagctacccgcatggcccccaacggttggaagtcgagactttttcggcattctacacagaagaaccttaaaaactcccagatgtgccagaaatcactcgacgtggagacagatggccttgaagcgaacgtccctcctgtgtcgttcctgaaagttctcaaactaaacaaaacagaatggccctatttcgttgtgggcaccgtgtgtgccatcgccaacggcggccttcagcctgccttcagtgtcattttttctgaaatcatagctatattcggacctggtgatgatgctgtgaagcaacaaaaatgcaatatcttcagcctaatttttcttttccttgggattatctctttcttcactttcttcttgcaaggtttcacgttcgggaaggccggtgaaattttaactaggagactgcgaagcatggcttttaaggccatgctccgtcaggatatgagttggttcgacgatcataagaattctactggtgcattaagcacaagattagctaccgacgcggctcaagtgcaaggcgccacaggcacccgcctggccttaattgctcagaatatcgccaacctgggcactgggataatcatctcatttatttatggatggcaactgaccctgctcctgcttgctgtggtgcccattatcgcagtgagcggaatagtggaaatgaagcttctggccggcaacgccaagagagataagaaggaactggaagccgcaggcaagatcgccaccgaggccattgaaaatatccgtactgtagtaagcctcacacaggagaggaagttcgagagcatgtacgtggaaaagctctacggaccttaccgtaacagcgtccaaaaggctcatatctacgggatcactttttcaatctcccaggcatttatgtacttttcctatgccggctgctttaggttcggagcgtaccttatagtgaatggtcacatgagatttcgcgatgtcatcctcgtttttagcgccatcgtcttcggcgctgtagcgctgggccatgcctcctcttttgccccagactatgccaaggccaagctgagtgcagcacacttattcatgctgttcgaaagacagcccttgattgacagttatagtgaagagggtctcaaacctgacaaattcgaagggaacattacattcaacgaagtggtgtttaattaccccacccgggcaaacgtacctgtacttcagggcctgtctcttgaagtgaaaaagggtcaaaccttggctttggttgggtcctctggttgcggcaaatccactgtagtgcagctgcttgagaggttctatgaccctttggcaggaactgtccttctggatggccaggaggccaaaaagctcaatgtacagtggctgcgggcacagcttggcatcgtgtcccaagaacccattctgttcgattgctccatcgccgagaatatcgcttacggagacaactctcgcgtggtgagtcaggatgaaattgtgtcagctgctaaggcagctaatattcatcccttcattgagactctcccacacaagtatgagactcgagtgggcgacaagggaacccagctctccggcggccagaagcagagaatcgctatagcacgagcgctcattaggcaaccacaaatcctcctcctcgatgaggccacatctgccctggatactgagtcagagaaagtagtgcaggaagctttggacaaagctcgcgagggtcgcacctgtattgtgatcgcacatagactcagcacaatccagaatgctgacctgatcgtcgtgttccaaaatggtcgagtcaaagaacacggaacccatcaacagctcctggctcagaaggggatctacttctcaatggtgtccgtccaggccggtactcagaacctttag

SEQ ID NO: 3633 - DNA, 186 bp, synthetic construct
  misc_feature 1..186: note = source = /note="Description of Artificial Sequence: Synthetic coding sequence"
  source 1..186: mol_type = other DNA
atggacctggaggccgccaagaacggcaccgcctggcggcccacctctgcagagggggactttgagctgggcatttcatcaaaacagaagaggaaaaagaccaaaaccgtgaagatgatcggggtgctgactttgttcagatactcggattggcaggacaagttgttcatgagcctggggacatag

SEQ ID NO: 3634 - DNA, 3699 bp, synthetic construct
  misc_feature 1..3699: note = source = /note="Description of Artificial Sequence: Synthetic coding sequence"
  source 1..3699: mol_type = other DNA
atggacctggaggccgccaagaacggcaccgcctggcggcccacctccgccgaaggggatttcgaattgggtattagctctaaacagaaaagaaagaagactaagaccgtaaagatgatcggagtgttgactctcttcagatacagtgattggcaagataagctgtttatgtcccttggtaccatcatggcaattgcccatgggtctggactgccgctgatgatgattgtgttcggtgagatgaccgacaagttcgtggacacagccggcaacttctcgttccccgtgaacttctccctctcgctgcttaatccaggaaagatcctggaggaggaaatgacacgttatgcatactattattctggactgggggccggtgtgctcgtagcggcctatatacaggttagcttctggaccctcgctgcgggacggcagattcgaaaaataagacagaagttctttcatgcgattctgcgacaagaaattggatggttcgacatcaacgatacaactgagcttaatactcggctaaccgatgatatcagcaagatttccgagggcatcggggataaagttggaatgttcttccaggccgttgcaacattcttcgccggatttatagtcggtttcatacgaggatggaagctgacattggtgatcatggccattagtccgatcttaggtctatccgccgctgtatgggctaaaattctctccgctttttccgacaaggagcttgcagcttacgcaaaagccggggctgtggccgaggaagccctcggggccattcgtactgtcattgcattcggcggtcagaacaaggagctcgaacgctatcagaagcacttagagaacgccaaggaaatcggcatcaagaaggccattagcgcaaacatctctatgggcatagctttcctgctaatttacgcaagctacgctctggcgttttggtatggtagtaccctggttatctccaaggagtacaccataggtaacgctatgaccgttttctttagtatacttatcggcgcttttagcgtgggacaggcagccccctgtattgacgcgtttgccaatgctaggggcgcagcctacgtgattttcgacataattgacaacaatcccaaaatagattcctttagcgagcgtggtcataagcccgattcaattaaaggcaaccttgagtttaatgacgtccacttctcgtatccctcacgagccaacgttaagatactgaagggactaaacctgaaggtccaatcgggtcaaactgtcgctctggttggttcctctggatgtggaaaaagtacaacggttcagctaattcagcggctgtacgaccctgacgagggaaccataaacatcgacggccaggacattaggaattttaatgtgaactacctgcgagagatcattggcgtggtgagtcaggaacctgttctgttttctacaacgatcgcagagaatatctgttacggcaggggcaacgtgacgatggatgagatcaaaaaggccgtgaaagaagcgaacgcttatgagtttatcatgaagctcccgcagaagttcgacacacttgtgggggagcgaggggctcagctgtctgggggtcagaagcagagaattgcaatcgctcgagcactcgtccggaatcctaaaatcctgctgctggacgaggccaccagcgcactggacactgagtccgaggctgaggtgcaagccgccttggataaggccagagaggggcggactaccatcgtgatcgcacatagactatcaaccgtgcggaatgcggatgtcatcgcaggatttgaagacggagtgattgttgaacagggatcgcactcagagctgatgaaaaaagagggggtgtactttaagctcgtaaatatgcagacctcagggagccagatacaaagcgaagaatttgagttgaatgacgagaaagcggccaccagaatggctcctaacggatggaagagccgccttttcaggcacagtacacagaaaaatctcaagaattctcagatgtgtcagaaatctttggacgtggaaaccgatgggctggaggccaacgtgcctcccgtgtctttcctgaaagtgctcaaattgaacaaaacagaatggccgtactttgtggtaggaacggtctgtgccattgccaacgggggcctccagcccgccttcagtgtcatcttctccgagataattgcaattttcggcccaggagatgacgccgtaaaacagcaaaagtgtaacattttcagcctaatattcctgtttctgggtatcatcagcttctttacatttttcctacagggcttcacctttgggaaagccggtgaaatcctcactcggcgactccgctccatggccttcaaggctatgctgagacaggacatgtcatggtttgacgaccacaaaaattcaaccggagctctgagcacacggcttgcaaccgatgccgctcaggtacagggggctacaggaacccgccttgcgctcatcgcccagaacatcgcgaacttagggactggcataatcatctcttttatctatgggtggcaacttaccctcctgttgctggccgttgttcccattatagcagtaagtggcattgtggagatgaagcttcttgcggggaatgcgaaaagagataaaaaggaattagaggcagccgggaagatcgcaaccgaggctattgagaatattcgcaccgtcgtgtctcttacccaggagagaaagttcgagtcaatgtacgtcgaaaaactgtacgggccctacagagttttctctgcaatagtgtttggggcagtggctctcggtcacgcctctagttttgctcccgactatgcaaaagcaaagctgtcggccgcacatcttttcatgctttttgaaagacaaccactgatagacagctattctgaggagggattgaaaccagacaagttcgaggggaatatcactttcaatgaggtggtgttcaattatccaacacgggcgaatgtgcctgtgctgcagggactgagtctggaagtcaagaagggccaaacccttgcactggttggctcaagcggttgtggcaagagtacagtcgttcagctccttgaacgattttatgacccacttgcaggtaccgtgctgctggatggccaggaagcaaagaaactgaacgtccagtggctgcgagcccagttggggattgtgtcccaggaaccaatactgttcgattgctccatcgcagaaaacatagcctacggagacaactcccgggtggtgtcccaggatgagatcgtctcagctgcaaaagccgcaaacatacacccatttatagaaacactgccccacaaatatgagacacgagtcggtgacaaggggactcagctgagcgggggtcagaaacagcggattgcgatcgcgagggctctgatcagacagcctcagattctgctgctcgatgaagctaccagcgccctggataccgaaagtgaaaaagtcgtccaggaggcacttgacaaggcacgagaggggagaacttgcattgtcattgcccaccggttgtccacaatccagaacgccgatttgatcgtggtgtttcagaatgggagggtgaaagagcacgggacacatcagcagctgcttgcccagaaggggatctatttttccatggtaagtgtgcaggccggtacacagaatctgtag

SEQ ID NO: 3635 - DNA, 3840 bp, synthetic construct
  misc_feature 1..3840: note = source = /note="Description of Artificial Sequence: Synthetic coding sequence"
  source 1..3840: mol_type = other DNA
atggacctggaggccgccaagaacggcaccgcctggcggcccaccagcgctgaaggtgactttgagcttggaattagtagtaagcagaagaggaaaaagactaagacagttaagatgattggagtgctaaccctcttccggtactcggattggcaagacaaactattcatgagtctgggcactatcatggcaattgcacatggctcaggtcttcctcttatgatgatagtttttggcgagatgaccgataagttcgtggatacagccggaaatttcagctttccagtgaacttctccttatccctgctgaatcctggaaaaatacttgaggaggagatgaccaggtacgcctactactacagtgggttgggtgctggcgtcctggtggccgcttacatccaggtgtccttctggacactggctgcggggcgccagattcgtaaaatacggcaaaagtttttccatgccatattgcgccaggagattggatggttcgacattaatgacaccaccgaactcaatactcgcctcactgatgacatcagtaagattagtgagggaatcggcgataaggttggcatgtttttccaggccgtggctactttctttgccggttttatcgtgggctttatcagaggctggaagcttactctagtcattatggctatcagccctatcctgggtctttctgcagcagtgtgggcgaaaattctgtctgcattctcggacaaggaactggccgcctacgcaaaggctggcgcggttgcggaggaagctctgggcgccattcggacagtgatcgcttttggtggccagaataaagaattagagaggtatcagaagcatctggaaaacgctaaggaaataggaattaagaaggctataagcgccaatatctcgatgggaatcgccttcctgctgatttatgccagctatgccctcgcattttggtatggctcaaccctggttatttcaaaggaatacaccatcggcaatgcaatgaccgtatttttttccattctaattggagcatttagtgtcgggcaggcagctccatgtattgatgctttcgcgaacgctaggggagcagcctatgttatctttgacattatcgataataatcccaaaatcgatagtttttccgaacgagggcacaagcctgactccattaaaggtaacctggagttcaacgacgtgcacttcagttatccctcacgtgctaatgtcaagattctgaaaggtctcaatcttaaagtccagtcaggacagaccgttgccctggttggcagcagcgggtgtgggaagagcactacggtgcaactgatccagcggttatatgacccagacgaagggaccatcaacatagacgggcaggacattagaaacttcaatgtgaattacctgcgcgagattatcggagtcgttagtcaggaacctgttctgtttagtacaacaattgcggagaatatctgctacgggagagggaacgttactatggacgaaataaagaaagctgtgaaggaagctaatgcctatgagttcataatgaagctcccacagaaatttgacacacttgtcggggagagaggagcccagttgagcggcggtcagaagcagcgcattgcaattgccagggcattagtacgcaatcccaagatccttctcctggatgaggccacttctgctctggatacagaatccgaagctgaggtgcaggcagcactggacaaggccagggaggggcggactaccatagttatcgcacatagactttccacagtacgcaacgccgacgtgattgccggatttgaggatggtgtgattgtggagcagggatcgcactccgaactgatgaaaaaagaaggggtttatttcaagcttgtgaacatgcagacatccggatcccagatccagagtgaagaattcgagttgaacgatgagaaagctgctaccagaatggctcccaacggatggaagtcaaggctgttccgccatagcacccaaaagaacctaaaaaactcacagatgtgtcaaaagtccttggatgttgaaacagatggcctcgaagccaatgtgccgcccgtctcattcctaaaggtactgaagctcaataaaactgagtggccgtattttgttgtaggaactgtgtgtgctatcgcgaatgggggtcttcagcccgccttttccgtaattttctcagagataatcgccatttttggtccaggagacgacgccgttaagcagcagaagtgcaacatcttcagtctgatcttcttatttctggggatcatatcattttttacgttctttctgcagggattcacctttggaaaggctggcgagattcttaccaggaggctgagatctatggccttcaaggctatgctgcgtcaagatatgagttggtttgacgaccataagaattccaccggcgcactgtccactcgattagccaccgatgccgcccaggtgcaaggggccactggtaccagactggccctcatcgcacaaaatattgcaaacctgggcaccggaatcataattagcttcatctatggatggcaattaacactgctgctgttagctgtggtgcctattatcgcagtcagtggaatcgtggaaatgaagttattggccggtaatgcaaagagggacaagaaagagttagaggccgccggtaaaatcgcgactgaggccatcgagaacatacggaccgttgtgtccctgacccaagaacgcaagttcgaaagcatgtacgtggagaagctgtatgggccctaccggaattcagttcagaaagcccacatctacggtatcactttttcaatcagtcaagccttcatgtacttctcctacgctggatgtttcagattcggagcttacctgatagtgaacggccatatgaggttcagagatgtcatccttgtgttttctgctatagtatttggggcagtcgctctgggccatgcatcctccttcgcccctgattacgctaaagccaagctgagcgcagcgcatctgttcatgctgttcgagagacaacccttgatagactcatactccgaggaggggctcaaaccggataaattcgaagggaatatcacattcaacgaggtcgtgttcaactaccctacacgcgcaaatgtgccagttcttcagggcctgagcctcgaagttaaaaaggggcagaccctggcgttggttgggtcttccggatgtggaaaaagcaccgtagtgcagctcttggagcgtttctacgatccactagccggtacggtgctcctcgatggccaggaggcaaagaaactgaacgtccagtggctcagggcccagttggggattgtgagccaggaaccaatcctgttcgattgtagcatagcagaaaacattgcctacggcgacaattccagggtggtgtctcaggatgaaattgtatccgccgctaaggctgcgaacatacacccctttatcgaaacactcccgcacaaatacgagaccagagtgggcgataaaggcactcagctctctggagggcagaaacagcgcattgcaatcgcaagagctctgattagacagcctcagatacttctgctggatgaggccacaagtgccttggacacggaatcagaaaaggtagttcaggaagctctggataaggcacgcgagggccgcacctgcattgttattgcccatagactcagcactattcaaaatgccgacctgattgtggtattccagaatggccgagtaaaggagcacggaacccaccagcagctgctggcgcagaaggggatctacttcagcatggtgtccgtgcaggccggaacccagaatctgtag

SEQ ID NO: 3636 - DNA, 1464 bp, synthetic construct
  misc_feature 1..1464: note = source = /note="Description of Artificial Sequence: Synthetic coding sequence"
  source 1..1464: mol_type = other DNA
atgcgggagaacatggcccggggcccctgcaacgccccccggtgggccagtctgatggtgttagtagctattggcacagccgtgaccgccgccgtgaacccgggcgtggtggttcgtatctcacagaaaggcctggattacgcgagccaacaggggaccgctgccctccagaaggaactgaaaagaatcaaaatcccagattactccgattcttttaaaatcaagcacttgggaaaagggcactactccttctacagtatggacatacgtgagttccagctcccttcatctcagattagcatggtgcccaacgttggactgaagtttagcattagtaatgcgaatatcaaaatctctggaaagtggaaggcacaaaaacgatttcttaaaatgagcggtaatttcgacctgagcattgagggcatgtcaatttctgcagacctgaagttggggagtaaccccacctccggcaagcctacaattacctgtagcagttgttccagccatataaattctgtgcatgtacatatcagcaaaagtaaagttggatggctcatacagctgtttcacaagaagatcgaaagcgctttgcgtaataagatgaactcccaggtttgtgaaaaagtgacaaattctgtatcgagtgaattgcaaccctacttccaaactctgcctgtaatgactaaaattgactcagttgccggcataaattatggcctcgtcgcaccacccgcaactactgccgaaacactggacgtgcaaatgaagggcgaattttatagcgagaatcatcacaatccaccaccatttgctcctccagtaatggagtttcccgccgcccatgaccgcatggtgtacctcgggcttagtgattactttttcaacactgctgggctcgtgtaccaagaagccggagtcctgaaaatgaccctgcgcgacgacatgatccccaaagaatccaagttccggctcaccaccaaattcttcggcacattcctccccgaggtggctaaaaagtttcccaacatgaagattcaaattcatgtcagcgctagcactccacctcacctgtccgtccaaccgacaggtctcacattttaccccgccgttgacgttcaggctttcgccgttctccccaacagttctctcgcttccttgttcctcattgggatgcataccacaggctcgatggaggtgtctgccgagagcaatcgtcttgtaggcgaacttaaattagatagactgctcctggaactgaagcacagcaacattgggccattccctgttgaacttctgcaggacatcatgaattatattgtcccaatcctcgttctgcctcgggtgaatgaaaaacttcagaagggattccccttgcctacccctgcccgggtccaactttataatgtcgttctccagccacaccagaattttctcctttttggagccgacgtggtttacaaatag

SEQ ID NO: 3637 - DNA, 1449 bp, synthetic construct
  misc_feature 1..1449: note = source = /note="Description of Artificial Sequence: Synthetic coding sequence"
  source 1..1449: mol_type = other DNA
atggacgagggcatcccccacctgcaggagcggcagctgctggagcatcgagacttcattgggttggattacagttccctttatatgtgcaaacctaagcggtccatgaaacgtgacgacacaaaggatacgtataaattaccccacagacttattgagaaaaaacgacgggacaggattaacgagtgcatcgcccaactgaaagaccttctacctgaacatctcaagctgacgaccctgggacatctggagaaggccgtcgttctggagctgaccctgaaacacctgaaagctctaaccgctctcacagaacagcagcaccaaaagataattgccctgcagaatggagaacgttcgttgaaatcacctatccagtcggatctggatgctttccatagtgggtttcaaacctgtgctaaggaggtcctacaatatctgagccgatttgagtcgtggacgccacgcgaaccgaggtgtgtacagcttatcaaccatctgcatgcggtggcgacgcagttcctgccaactccgcagctcctaacacagcaggtgcccctttctaagggcacaggtgcaccatctgccgcaggaagcgcagctgcaccttgtctggaacgagccggacaaaaactagagccattggcatattgtgtgccagtgatccagcggactcaaccgagcgcagagttggccgccgaaaacgacaccgatacagattcaggctatggcggcgaggccgaggctcggcccgacagagagaaagggaagggcgccggagccagtagagtgactatcaaacaagagccacctggcgaggactcccctgcgcctaagagaatgaaattagactccaggggaggaggatctggagggggtcctggcggtggcgcagccgctgcggccgccgcactattgggtcccgacccagcagctgcagctgcactgctcaggccagacgccgctctgctgagttctctggtcgcttttggcggaggaggaggagcccccttcccccagcccgccgctgccgcagcacccttttgcttgcctttctgcttcctgtctccttccgcggctgccgcctacgtgcagcccttcttagataaaagcgggctcgagaaatatctctatccagctgccgccgctgccccttttccactgctctaccccggaatacccgccccggctgcagccgccgctgcagctgctgctgcagccgcggcagctgcagcattcccttgtttatcatccgttctaagtcctccccccgaaaaagcaggggccgcagcggctactttactcccacacgaggtcgctcctctaggcgcccctcaccctcagcacccacacgggaggacccacttgccatttgcaggcccgagggaacccggcaatcctgagagtagcgctcaggaggatccctcacagccaggaaaagaagccccttag

SEQ ID NO: 3638 - DNA, 1113 bp, synthetic construct
  misc_feature 1..1113: note = source = /note="Description of Artificial Sequence: Synthetic coding sequence"
  source 1..1113: mol_type = other DNA
atggacgagggcatcccccacctgcaggagcggcagctgctggagcacagggatttcatcggcctggactacagctcactgtatatgtgcaagccaaaaaggtccatgaaacgggatgatacaaaagatacatacaaattgccacaccggctcattgagaagaagcgacgcgacagaataaatgagtgcatcgcccaacttaaagatttactacctgaacatcttaagttgactacactcggacacctcgagaaggctgtcgtgctggagctaactctcaaacatttgaaagccttaaccgctctcaccgaacaacagcaccaaaagatcatcgccttgcaaaacggcgagagatccctaaaaagccctattcagtctgacctggacgcatttcattcaggcttccagacctgcgccaaggaggtcctccagtacctgtccagatttgaatcctggacaccgcgggagcctcgatgcgttcagctgattaaccaccttcatgctgttgctacacaatttcttccaacaccacagctcttgacacagcaggtgcctctgagcaagggtacgggggctccctcagcggccggatctgccgctgctccctgcctggagagagcaggacagaagctcgaacccctggcatactgcgttcccgtcattcagcgcacccagcccagcgccgaactggccgccgaaaacgacacggacacagattcgggttatggcggggaggccgaagcccggccagaccgcgagaaagggaagggagccggcgctagccgtgttaccatcaagcaggaaccaccaggagaggacagccctccaccacctcctcgctctccggcgtgccccagatgctgtagaccactgcctcgacgccgggccccaccaccccgtccgtcgtgcaggactcggtggagacctctcggaaggcgaacaccttcaacccgcacagccgctcccacctgcccctcacccgggcctgcatcaagggggacacggcgggcattgctgagaaagattccacggtcccaggagaggaagctgcctgagagcctgaggcccgaaggtcgccggtttaagcagagtgagaagctcaaatacccgtag

SEQ ID NO: 3639 - DNA, 1191 bp, synthetic construct
  misc_feature 1..1191: note = source = /note="Description of Artificial Sequence: Synthetic coding sequence"
  source 1..1191: mol_type = other DNA
atggtggccggcacccggtgcctgctggccctgctgctgccccaggtgctactcggcggagcagccggccttgtgcctgagctgggcaggaggaagtttgccgcagcctctagcgggaggccctccagccagccatccgatgaagtgcttagcgaattcgagctgcggctcctgtcgatgtttgggctgaagcagcgccctactccctccagggacgctgtggtgccgccttatatgttggacctgtatcgccgccatagcgggcagccgggaagtcctgccccggatcacaggctcgaaagggccgccagccgcgccaacacagtcagaagtttccaccatgaggagtctttggaggaactgccagagactagcggtaaaactacgcggcgtttctttttcaatctaagctctatccctacagaggagtttattaccagcgcagaactgcaggtgttcagagagcagatgcaggacgcactgggaaataacagctctttccatcatagaattaacatatatgagattatcaaaccagctaccgctaactcaaaatttccggtgacccggcttctggacacccgactcgtaaaccaaaatgcctcacggtgggagtctttcgatgtgacccccgctgtaatgcgatggaccgctcaaggccacgcaaatcatgggtttgtggtggaagtcgcccatcttgaagaaaagcagggtgtgagtaagcgccatgtgaggattagtagaagtctgcaccaggatgagcattcctggtctcagatccgccctctcctggtcacgtttggacacgatggtaagggacatcctctgcataagagggagaagagacaagctaaacacaagcagcgcaagcgactaaagtcctcctgcaagaggcatccgctctacgtggatttttctgatgttggctggaacgactggattgtggcaccacccgggtaccatgcgttctattgtcacggtgagtgccctttcccactggccgaccatctcaatagcaccaaccacgcgatagtccagacactagtgaactctgtaaatagcaagattcccaaggcctgttgtgtgcccaccgagctgagtgctatctctatgctgtatctagatgaaaacgagaaggttgtcctgaagaattatcaggatatggtagtagaaggatgcggctgtcggtag

SEQ ID NO: 3640 - DNA, 1296 bp, synthetic construct
  misc_feature 1..1296: note = source = /note="Description of Artificial Sequence: Synthetic coding sequence"
  source 1..1296: mol_type = other DNA
atgcacgtgcggagcctgcgggccgccgccccccacagcttcgtggctctttgggcgcccctgttcttactgagaagtgctctcgctgacttctcactggataatgaggttcattcttctttcatacaccggcggctgcgatctcaggaaagacgagagatgcagagggagattctttccatcttaggcctgcctcacagaccgagacctcacttacagggtaaacacaattctgcgcccatgttcatgctggatctgtataatgccatggccgtcgaggaaggaggtggccctgggggacagggattttcctatccttataaggccgtattttcaactcaaggtccccctctggcctcattgcaggacagccatttcctcacagatgccgacatggtcatgtccttcgtgaatcttgtcgaacacgacaaagaatttttccatcccagataccaccacagggagtttaggtttgatctctccaagatacccgaaggagaggccgtcactgccgcggaattcaggatttataaagactacattcgggagaggtttgacaacgaaacatttcgtatatctgtataccaagtattacaggaacacctgggaagggagtcagacctgttcttgttggattcccggacgctgtgggcgtccgaggaaggatggctcgtgttcgacattaccgccacatcgaatcactgggtagtgaatcccagacacaacttaggcttacagttatccgtggagaccctcgacggccagagcattaatcctaaactcgctgggctgataggaagacatggccctcagaataaacagcctttcatggtcgcattctttaaagccacagaggtgcatttcaggagcatacgctctacagggagtaagcagagatctcaaaatcgcagtaagacccctaaaaatcaggaggctttacggatggccaacgttgctgaaaactcctcaagcgaccaacggcaagcatgtaaaaaacatgaactgtacgtatcattccgggacctgggctggcaggactggatcatcgcaccagagggctacgcggcttattattgcgaaggcgagtgtgctttcccactaaactcctacatgaacgctacaaatcatgccattgtgcagaccctcgtacacttcataaatccagaaacagtgcctaagccatgctgcgcacccacacagcttaacgccataagcgtcctatattttgacgactcaagcaatgtgatattgaagaagtatcgtaacatggtggtgcgcgcctgtggatgtcactag

SEQ ID NO: 3641 - DNA, 1098 bp, synthetic construct
  misc_feature 1..1098: note = source = /note="Description of Artificial Sequence: Synthetic coding sequence"
  source 1..1098: mol_type = other DNA
atgcacgtgcggagcctgcgggccgccgccccccacagcttcgtggccctatgggcccccctcttcctgctccggagcgccctggcagatttcagtctggacaacgaggtacatagttcttttatacacaggagactgcgcagtcaggaaagacgagagatgcagagggaaatcctctccatcctgggattgccgcaccgtccaaggcctcacttgcaggggaagcacaatagcgctcctatgtttatgttggatctgtataatgctatggcagtagaagaaggagggggccccggcggtcagggtttttcatacccctataaggcggtcttttcaacgcaaggccctccattggcaagcctgcaggattctcacttccttacagacgctgacatggtgatgtcttttgttaacctagtggagcacgacaaggaatttttccatccacggtatcaccatcgagagtttaggtttgacctgtccaagattccagagggggaggccgttactgccgccgaattccgcatatacaaagattatattagagaacggtttgacaatgaaaccttcaggatttctgtttaccaggtattgcaagagcatcttggtagagagtcagacctgtttttactggattcaagaaccttatgggccagcgaggagggttggctcgtgtttgatataacagcaaccagcaaccactgggtcgttaatcctcgacataacctgggactgcagttatcagtcgagactttggacgagaattcatcctccgaccagagacaggcatgcaagaagcacgagctgtacgtgtcttttagagacctcggttggcaagattggatcattgcccctgaaggctacgcggcttattattgtgagggggagtgtgccttcccgttaaacagttacatgaacgcaacaaatcacgcaatcgtacagacattagtgcactttataaatccggagacagtccccaaaccatgctgtgcgccaacacagctgaatgccatttctgtgctgtatttcgatgattcgagcaacgtaattctgaaaaagtatcgcaatatggtggttcgcgcatgtggatgccactag

SEQ ID NO: 3642 - DNA, 1656 bp, synthetic construct
  misc_feature 1..1656: note = source = /note="Description of Artificial Sequence: Synthetic coding sequence"
  source 1..1656: mol_type = other DNA
atggccggcgacctgagcgccggcttcttcatggaggagctgaacacataccggcaaaaacaaggggtcgtcttgaaataccaggaactgcccaacagtggtccaccccacgatcggcgctttacattccaggtcattatcgacgggcgagagttccctgagggagagggacggagtaaaaaggaggccaaaaacgccgccgccaagctggccgttgagatccttaataaggagaaaaaagccgtgtccccattactcctgaccactacaaatagtagtgaaggtctgtccatgggtaattatataggcctgatcaataggatcgcacagaaaaagcggttgacagtgaactacgaacaatgtgctagcggggtgcacggacccgaaggttttcactacaaatgtaaaatgggccagaaagagtacagtatcggtaccgggtcaaccaaacaggaggctaaacagttagccgcaaagctggcctacctacagatccttagcgaggaaacttccgttaaatctgactatctgtcctctgggtcatttgcgaccacctgtgaatcgcagtcgaactcgctggtgacctcaacactcgccagtgagagttcttccgaaggtgacttctctgccgacacgtctgagatcaactccaattccgactcattgaatagctcctctctgttaatgaacggcctgcggaacaaccagagaaaagctaagcgctcccttgcaccccgtttcgatctgccagatatgaaggagacaaaatacacggtcgacaagcgcttcgggatggactttaaggagattgaactgatcggcagcggtgggtttggccaggtttttaaagcaaagcaccgaattgacggaaaaacatacgtgattaaacgcgtaaagtataataacgagaaggctgagagggaagtcaaagccctggcaaagctggatcacgtgaacattgtccactacaatggctgctgggatggattcgactacgacccagagacgtctgatgatagcctggaaagcagcgactatgatccagagaattccaagaatagttcaaggtcaaagactaaatgcttattcatccagatggagttctgtgataaagggacgttggaacaatggatagagaaaagaagaggcgaaaagctcgataaggtccttgcattggagctgttcgagcagatcaccaagggagtcgactatatacattcgaaaaaactaatccaccgggaccttaagccttctaacattttcctcgtcgacacgaagcaggtaaaaataggcgattttggtctggtcacctccctcaaaaacgatggtaagcgtactcggtctaaaggaactttgcgctacatgagccctgaacagatcagctcccaggactatggaaaggaagtggacctttacgctctcggattgatccttgccgagttactgcatgtttgcgatactgcctttgaaaccagcaagttttttactgacttgcgggatggaataatttcagatattttcgacaagaaggaaaaaacgctgctgcagaagcttctttccaaaaagccagaagacagacccaatacctccgagatcctgagaactttaacagtgtggaagaagagccctgagaaaaacgaaaggcacacttgctag

SEQ ID NO: 3643 - DNA, 366 bp, synthetic construct
  misc_feature 1..366: note = source = /note="Description of Artificial Sequence: Synthetic coding sequence"
  source 1..366: mol_type = other DNA
atgacccggatcctgaccgccttcaaggtggtgcggaccctgaagacgggattcggcttcacgaacgtcacagctcaccagaagtggaaattttctaggcccgggattcggctcctctccgtaaaagctcagacggctcatatcgtcctggaagacgggactaagatgaaaggttactcgtttggccaccccagcagtgtggccggggaagtggtcttcaatacaggcttgggggggtaccctgaggccataaccgaccctgcatataaaggccaaatcctgaccatggccaatcccattatcggaaacggcggggccccagacactactgcccttgatgagctgggtctgtcaaaatatctctag

SEQ ID NO: 3644 - DNA, 4521 bp, synthetic construct
  misc_feature 1..4521: note = source = /note="Description of Artificial Sequence: Synthetic coding sequence"
  source 1..4521: mol_type = other DNA
atgccccagatcatcaagatgacccggatcctgaccgccttcaaggtcgtgcgcacactcaaaaccgggtttggtttcaccaacgttactgcccaccagaagtggaaattttcaagacctggcatcaggctgctatcggtgaaggctcagactgctcacattgttttggaggatgggactaaaatgaaaggatactcatttggacatcccagctctgttgccggagaagtcgtctttaataccggactgggaggctacccagaagccatcactgatcctgcgtacaaggggcaaattctgacaatggcaaatcctatcattggcaacggcggggcccctgatactacggccttagacgagctaggactctctaagtacctcgagagcaacggcattaaggtatcgggccttttagtgctcgactactccaaggactacaaccactggctggccactaagtctctagggcagtggctgcaagaggaaaaagttcctgccatatacggtgtggatacaaggatgctgactaaaatcatccgggataaaggcacaatgctcggcaagattgagttcgaaggacagccggtagattttgtggatcctaataaacagaacctcatcgctgaggtatcgaccaaggatgtgaaagtgtacggcaaagggaacccgactaaagttgtggcagtcgactgcgggattaagaacaatgtcataaggctgctggtaaagagaggcgcagaggtccacctcgtgccatggaaccatgatttcaccaaaatggagtacgatggaatcctcattgctggcggcccaggtaatccggcattggccgaaccattgattcagaacgtacggaagatactggagtccgatcggaaagaacccctatttgggatcagcaccggcaacctgattaccggccttgctgccggggccaagacctacaagatgagtatggctaaccgtggacagaatcaacctgttctcaatatcactaacaagcaggccttcatcaccgcgcaaaaccacgggtacgccctggacaataccttgcccgccggctggaaacctttgttcgtgaatgtgaatgaccaaaccaacgaaggcattatgcatgaatccaaacccttcttcgcagtccagttccacccggaagtgacccccggacccatcgacacagagtaccttttcgatagcttcttttctctgattaagaaggggaaggccacaacgatcacttctgtacttccgaaaccagcgctagttgcctccagagtggaggtgtctaaggtcttgatcctgggaagtggcggcctgtcaattggccaagcaggagagtttgattactcaggatctcaagctgtgaaagccatgaaggaggagaacgtaaagactgtacttatgaaccctaacatagcctcagttcagacaaacgaagtgggcctgaagcaggcggacactgtgtactttttacccataacacctcaatttgtgacagaggttataaaagctgaacagccagacggtctgatcttgggaatgggcggccagaccgccctgaattgcggagtggagctctttaaaagaggagtgctaaaagaatacggagtgaaagtgcttggaacgtcagtagaatcaatcatggctaccgaggatagacagctctttagcgataagctaaacgaaatcaacgagaagattgctccatcatttgctgtcgagtcaattgaagacgccctgaaggctgctgataccatcggctatcccgttatgatccgtagtgcttacgccttgggcggcctgggaagcggaatctgtccgaatcgggagactctcatggacctgagtaccaaagccttcgctatgacaaatcagattctggttgagaaaagcgtcaccgggtggaaggaaatcgaatatgaagtcgtccgggacgccgacgacaactgcgtgacagtgtgcaacatggagaatgttgacgcgatgggagtgcacaccggggatagcgtcgtagtggcacctgcgcagactctttctaatgcggaatttcagatgctgcgtaggacctcaatcaacgtcgtgcggcatctgggaatcgtaggggaatgcaatattcagtttgccctgcaccccacatcaatggagtattgcattattgaggtgaacgccagattatctcggtccagtgccctggccagtaaggccaccggctaccccctcgccttcattgccgccaagatcgcactaggcatcccactgccggaaattaaaaacgttgtgtctgggaagaccagcgcctgttttgaaccaagtttagactacatggtgacgaagattccaaggtgggaccttgatcggttccacggcactagttccagaattggatccagtatgaaatcagtaggggaagtgatggcgatcggtcgaacatttgaggaatcctttcaaaaggcacttcgaatgtgccaccctagcatcgaaggcttcacgccccgcctccccatgaataaggagtggccctcaaatctcgatctacgaaaagaacttagcgagccaagcagtacacgcatatacgccattgccaaagcgattgacgacaacatgtccctcgacgaaatcgaaaagctcacctacatagacaaatggttcttgtacaaaatgagagatatccttaatatggaaaagacgttgaagggactgaatagtgagagcatgactgaagaaaccctgaagcgcgcgaaagaaatcggattcagtgacaagcaaatctccaaatgccttggactaacagaggcacaaacccgggaactccgtctgaagaagaatattcacccctgggtgaagcagattgatacacttgccgctgaatacccttccgtaaccaactatctgtatgttacatataacggacaagagcacgacgtcaactttgacgaccacggaatgatggttttaggctgcggaccctatcatattggaagcagcgtagagttcgactggtgtgctgttagtagcatacggactttaagacagcttggaaagaagacagtagtggtcaattgcaaccctgaaacagtgagcacagatttcgacgagtgtgacaagctgtattttgaggagttgagtttggaacgaatcctcgacatttatcaccaagaagcctgcggcggatgcataatcagtgttggcgggcagattcctaacaacctcgcagtgcccctttacaagaatggcgtgaagataatgggcacaagccccctgcaaatcgatcgcgccgaagatcgctccatttttagcgcagtgttggatgagctgaaggtggcacaggccccgtggaaggccgtgaatactctcaatgaggccctggagttcgctaaatctgttgactatccctgcctactaaggcccagctatgtactaagcggcagtgccatgaacgtagtgttctcagaggatgagatgaaaaaattcctggaagaggcgactagggtttcccaggaacacccagtggttttgacaaagttcgtcgagggtgcacgggaagttgaaatggacgccgtggggaaagacggaagagtgatttctcacgccatatctgaacacgttgaagatgcaggcgtgcacagtggcgatgctaccctgatgttgccaacacagacgatcagccagggtgcgattgagaaggtgaaagatgccacaaggaagatagcaaaagccttcgccatttcaggcccgtttaatgtacagttcttggttaaaggcaatgacgttctcgtcattgagtgtaatctaagggcctcgcgctcattcccctttgtaagtaagacactgggcgtcgacttcattgatgtggctaccaaggtgatgattggtgagaatgtggacgagaagcaccttcccaccctggatcatcccattattccagctgactatgttgcaatcaaggcacccatgttttcttggccccgcctgcgggatgccgatcctatacttagatgcgagatggccagcaccggcgaggtggcctgcttcggcgaagggatccacaccgcatttttgaaggccatgctcagtactggatttaagatcccccaaaaaggcatattaataggaattcagcagtcgttccggccacggtttctcggagtcgccgagcaactccacaatgaaggcttcaagctattcgctacggaggcaacctctgattggctgaatgctaataacgtcccagcaacaccagtcgcttggccaagtcaggaaggtcagaatccaagtttgtcgagtatacggaaactcatccgggatgggtctatcgatctcgttatcaacctccctaacaacaacacgaagttcgttcatgacaattatgtcattcgtcgcacagccgttgatagcggcataccacttctcactaatttccaggttaccaagctgttcgctgaagcagtgcagaaatctcgaaaagtcgatagcaagagtctctttcattatagacagtatagtgcgggaaaagctgcctag

SEQ ID NO: 3645 - DNA, 3150 bp, synthetic construct
  misc_feature 1..3150: note = source = /note="Description of Artificial Sequence: Synthetic coding sequence"
  source 1..3150: mol_type = other DNA
atgaaggaggagaacgtgaagaccgtgctgatgaaccccaacatcgcctctgtacagactaacgaggtagggctgaagcaggccgatacggtttactttcttcctatcactcctcagttcgtgaccgaggtcatcaaggccgagcagccagacggtctaatcttaggcatgggcggtcagacagcgctgaactgtggcgtcgagctgtttaaacggggggttctcaaagaatatggagtgaaagtgctcggcacatctgtggagagcataatggcaacagaagatcgccagctgttcagcgacaagctgaatgagataaacgagaagatcgctccatcatttgccgtagaaagtatcgaagacgcattgaaagcagcagacacaattgggtaccccgtgatgatccgctctgcctatgcgctaggcggcctcggatcgggtatttgcccaaatcgggagactcttatggatctatccacaaaagcattcgcaatgacaaaccagatactggtcgaaaaatccgttactggatggaaggagatcgagtacgaggtagttcgtgacgcagatgataattgtgtgacggtctgcaatatggaaaatgtggacgcgatgggagtccatacaggggactcagtcgtcgtcgcccctgcgcaaacactgtctaatgcggagttccagatgctgcgccgcacctccataaatgtagttaggcacctgggcatcgtgggcgagtgtaatatccagtttgcccttcacccaaccagcatggaatattgcattatagaggtgaacgccagattgtcccggagtagtgcccttgcaagtaaggccacgggttatccccttgcatttatcgctgctaaaattgcattaggaattccattgccagagataaagaacgtcgtgtctggaaaaacctcagcctgttttgagcctagcctcgattacatggtgactaaaatcccacgttgggacttggacagattccatggaacatcatcgaggattgggagctctatgaagtccgtcggagaagttatggctatcggcagaacctttgaggaatccttccagaaagctctgcgcatgtgtcatccatccattgagggattcaccccgagactgccaatgaataaggagtggccaagcaacctagacctgcgtaaagagctgtccgagccgagctctactcgcatctatgccatagcaaaagccattgatgataacatgagcttggatgagattgagaagttgacatacattgataagtggtttctctacaagatgagagatattttgaatatggaaaagactctgaagggactcaattccgagtctatgacagaggagactcttaaaagagctaaagagataggcttttcggataagcagatctctaagtgcttgggtctcacagaggcacaaactagagagctgagactgaaaaagaatatccacccctgggtcaaacagattgacacattggcggcggaatatccgagtgtcacaaactacttgtatgtaacttacaacggacaggaacacgacgtgaacttcgacgaccatgggatgatggttttggggtgtggaccctaccacattggttcaagcgtcgaattcgattggtgtgccgtgtcctcgatcagaacacttcgtcaactggggaaaaagacggtggtggtcaactgtaaccccgagacagtctctaccgactttgatgagtgcgacaaactgtattttgaggaattatcccttgaacgcattctggatatctaccatcaggaagcttgtggcggttgcatcattagcgtaggtgggcaaatcccaaataatctggctgtgcctctgtacaagaacggggtgaaaatcatggggaccagtccactgcaaatcgacagagcagaggacaggagcatatttagcgcagtactagacgagttgaaggtggctcaggccccctggaaggcagtcaacactctgaatgaagccctggagtttgctaagtctgtcgattacccgtgcctcctcaggcctagctacgttctctccggttctgccatgaatgtcgtgttcagtgaagacgaaatgaagaaattcctcgaggaagcaacacgcgtttctcaggagcatccagtggtcctgacaaaattcgtggagggggccagggaggttgaaatggacgccgtcggaaaagacggtcgcgtgatctcccacgctatatccgagcacgttgaggacgcaggtgtgcattctggcgacgctaccctcatgctgcctacccagaccatttcacagggtgctattgagaaggtgaaagacgccactaggaagatcgccaaggcatttgcaataagcggcccctttaatgtgcaattcctagtcaaaggcaacgacgtgctggtgatcgaatgtaacctcagagcttccagatccttcccatttgtctcaaagaccttgggagtcgactttatcgacgtggctacgaaagtaatgatcggagaaaatgttgacgagaagcacctgccaactttggatcaccccattattcccgcagactacgtggccattaaggcgccaatgtttagctggccacgcttaagggacgcagaccccatcctgagatgcgaaatggcttcaactggagaggtggcctgtttcggagagggcattcacactgcctttcttaaggccatgctcagtaccggatttaagatccctcagaaaggaattcttatagggatccaacaatcattccggccaaggttcctgggagtcgccgaacaattgcacaatgagggctttaagttattcgcaactgaagctacatccgactggctaaatgctaataatgtaccagccacaccagtggcctggccaagccaggagggtcaaaaccccagtctgtcaagtatccggaagctaattagagatggttcaattgatcttgtaattaacttaccaaacaacaataccaagtttgtgcacgacaactatgtgattcgccgcaccgccgtagatagtggcatccctctcttaactaattttcaggtgactaaattgttcgccgaggctgttcagaaatctaggaaagtcgactctaaaagcctctttcactatcgtcagtattcagcagggaaggctgcgtag

SEQ ID NO: 3646 - DNA, 366 bp, synthetic construct
  misc_feature 1..366: note = source = /note="Description of Artificial Sequence: Synthetic coding sequence"
  source 1..366: mol_type = other DNA
atgacccggatcctgaccgccttcaaggtggtgcggaccctgaagacggggtttggcttcacaaacgtcaccgcccatcagaagtggaaattctctagaccaggcattcgacttctgtccgttaaggctcaaactgctcacatcgtgttggaggacggaacgaagatgaagggatatagtttcgggcatccctcctctgtggcgggcgaggtggtctttaataccggcctgggcggataccccgaagctataacagatccagcctataaagggcaaatcttgacgatggccaaccctatcattggcaacgggggcgctccagacacaacggccttagatgaactggggctgtctaaatacctctag

SEQ ID NO: 3647 - DNA, 1542 bp, synthetic construct
  misc_feature 1..1542: note = source = /note="Description of Artificial Sequence: Synthetic coding sequence"
  source 1..1542: mol_type = other DNA
atgacccggatcctgaccgccttcaaggtggtgcggaccctgaagaccggattcgggttcaccaatgttactgctcaccaaaaatggaagttctctcgccctgggattagactgctgtccgtcaaagcacaaactgcgcacatcgtactggaggatggtacgaagatgaaggggtactcatttgggcaccccagttctgtcgctggagaggtagtatttaacaccggattgggaggttaccccgaagcaattacggacccagcatacaaaggtcagatcctgaccatggcaaacccgatcattggcaatggcggtgctcctgacacgactgctcttgatgaactaggcctcagcaagtaccttgagtctaatggcattaaagtttctggtctcctcgtgttggactatagcaaagactataaccactggctagccaccaaatccctagggcaatggttgcaggaggagaaggtccccgccatttacggcgtggacacaaggatgctgacaaagattattcgggataaaggtaccatgctgggaaagatcgaatttgaaggccagcctgtcgactttgttgacccgaataaacagaacctaatcgccgaagtcagtactaaggacgtgaaggtgtatggcaaagggaaccccacgaaggtggtggctgtcgattgcggcataaagaataacgtgattcgactcctggtgaaacggggcgccgaagtgcacctcgtcccttggaaccacgacttcaccaagatggaatatgatggtatcctcatagcagggggccctggaaaccccgccttagctgaacctctcatccagaacgtccgtaaaattctcgaatccgaccggaaggagcccctttttgggattagcacaggcaacctaatcacaggcctagctgcaggggccaagacttacaaaatgtccatggccaataggggccaaaatcagccagtcttgaatatcaccaacaagcaggcgtttatcactgcccagaaccacgggtacgccttagataatactctcccagccggctggaagcccctgtttgtgaatgtaaacgatcagacgaacgagggaataatgcacgagtccaagccgttcttcgccgttcagttccaccctgaagttactcctggcccgattgacactgagtatttgttcgacagttttttttccctgatcaaaaaggggaaagctactacaattacctccgtattgcctaagccagccttagtggcatctcgcgtggaggtgtcaaaggtgctgattctcggatccgggggtttgtcaattgggcaggccggtgagtttgattattccggctctcaagctgtgaaagcaatgaaggaggagaatgtaaagacggttttgatgaatccaaacatcgccagcgttcaaacaaacgaagtgggcctcaagcaggctgataccgtttattttctacccataactccccagttcgttaccgaggtcattaaagccgagcagcctgatggcctcatactgggtatgggagccaggcaactctag

SEQ ID NO: 3648 - DNA, 4527 bp, synthetic construct
  misc_feature 1..4527: note = source = /note="Description of Artificial Sequence: Synthetic coding sequence"
  source 1..4527: mol_type = other DNA
cggccccggccccagatcatcaagatgacccggatcctgaccgcctttaaagtcgtgaggacactgaagacggggtttgggttcaccaacgttactgcccatcagaaatggaagttttcacggcctggaatcagactgttaagcgtgaaggctcagacggcacacatagtgctcgaagacgggactaagatgaaaggatacagcttcggtcacccaagttctgttgccggagaagtggttttcaatactgggctgggcggctatccggaggcgattacggatcccgcgtacaagggccagattttgactatggctaatccaataatcggaaatggtggagccccagacacaaccgctctcgacgagctgggactgagcaagtacctggagtccaatgggatcaaagtctccggccttctcgtgctagactactccaaggattacaatcattggttggcgaccaagagcctcggacaatggttacaggaggagaaagtccctgccatatacggtgtggatacccggatgctgacaaagatcattcgtgataagggcacaatgcttggtaagatagagtttgagggccagcctgtggactttgtggatcctaacaagcagaacctgatagcagaggtgtctacaaaggacgtcaaggtgtacggaaagggcaatcctacgaaagtcgtggccgtggactgtgggataaaaaataatgtgattcggcttctcgtgaagagaggagccgaggtgcatttagtgccctggaatcacgactttacaaagatggaatacgatggcatcctgatagcgggaggcccagggaaccccgccctggctgaaccactgatccagaatgtgcgtaaaattctggaaagcgaccgtaaagagcccctctttgggatttccacagggaatttgatcacaggtttagcagcaggagcaaaaacctacaaaatgtctatggccaaccgcggacagaatcaaccagttttaaacattacaaataaacaagcttttattacagctcagaaccacggctacgcgcttgacaacaccctgccagccggttggaagcctctctttgtaaatgtgaatgaccagacaaacgaaggaattatgcatgaaagcaagcccttctttgctgtgcagttccaccctgaagttactcctggccctattgacactgagtacctgtttgactccttcttttctttaattaagaagggaaaagcaacgaccatcacgtccgtgttgcccaagcctgccctagtggcctcaagagtcgaagtgtcgaaggtcctgattttagggtcaggcgggctcagcatcgggcaggccggcgaatttgactacagcggaagccaagccgtcaaagctatgaaagaggaaaatgttaagactgtcttgatgaaccccaacatagcttctgttcagacaaacgaggtgggcctgaagcaagctgataccgtatacttcctcccaattaccccccagtttgtcactgaggtcattaaggctgagcagcctgacggactcattcttggaatgggggggcagacggcccttaattgcggggtggaactgtttaagagaggcgttttgaaagagtacggagtaaaagttctgggaacatccgtggaaagcatcatggccactgaagatcgccagttatttagcgataagctgaatgagattaacgaaaaaatcgcaccaagctttgccgtcgaatcaattgaagacgctctcaaggctgctgataccatcggctacccagtcatgatccggtctgcatatgccctcggaggcttgggctccgggatctgtcccaatcgcgagaccctgatggatttgagcactaaagctttcgccatgaccaatcagattttggtggagaaatctgtgacaggttggaaagagatagagtacgaggtggtgcgcgatgcagacgataattgtgtcacagtgtgcaatatggagaatgtcgacgctatgggggtgcacactggagattccgtggtggtggcgcccgcacagacgctctccaatgcagaatttcagatgctgcgacgcaccagcatcaatgtcgtcaggcatctaggcattgtcggggaatgcaacatccagttcgcactccatcccacttctatggagtactgtataatcgaggtgaatgctcgattgagtcggtcaagcgccctggcctccaaagctaccggttaccccttggcttttatcgccgcaaagatcgccctggggataccgcttccagagatcaaaaatgtagtctctggcaaaacctctgcctgttttgagccctccctggactatatggtcacgaaaatcccacggtgggacctcgatcgttttcatggaactagctcccggataggctcctcaatgaagagcgtgggtgaggtcatggcgataggaagaacattcgaggagagcttccagaaagcgttaagaatgtgtcacccttcaattgagggctttacgccacgcctacctatgaataaagaatggccttcgaatctggacctgcggaaagaactcagtgaaccaagcagcactcgaatttatgcaatcgccaaggccatagacgacaacatgtcacttgatgagatcgagaagctgacgtacattgacaagtggtttctatataaaatgcgggatatactgaatatggagaagaccctcaaaggcctgaacagcgagtccatgacagaggagaccttaaagagagctaaggaaatcgggttctctgataagcagatcagtaagtgtctgggactgaccgaggcccagacgcgtgagctcagactaaagaagaatatccatccttgggtcaaacagattgacacattagctgccgagtacccttctgtcactaactacctgtacgtgacctataatggccaggagcatgatgtgaatttcgacgatcatggaatgatggtactgggctgcgggccgtatcacatcggcagttctgttgagtttgactggtgcgcagtgagcagtattcgcaccttgagacaactcggtaaaaaaacagtcgtggtcaattgtaaccccgagactgtgtcaaccgatttcgacgaatgcgataaattgtactttgaagaactttccttggaacgcatcctggacatctaccatcaagaggcgtgcggaggctgcatcatcagtgtgggcggacagatccctaacaatctggcagttcccctgtataagaatggagtgaagattatgggaacctcaccactccaaattgatcgggctgaagatcgctcaatctttagcgccgtgctagatgagctcaaggtggcacaggcaccttggaaagcagtaaatacgcttaatgaggctctagaatttgctaagagtgtagactacccatgtctgctccggcccagttacgtgttgagcggtagcgccatgaatgtggtgttcagtgaagacgaaatgaagaagtttttggaggaagctacgcgagtgtcgcaggaacatcccgttgtacttactaagtttgttgagggcgctcgggaggtcgaaatggacgcagttggtaaggacgggagagtaatctcccacgcaattagtgagcatgtcgaggacgccggtgttcatagcggtgatgcgaccctcatgcttcctacccaaacaatctcacaaggggcaatcgagaaagttaaggacgccacgcgtaagatagccaaggctttcgcaatcagcgggccattcaatgtccagtttctggtgaaaggaaatgacgtgctggttatcgagtgcaatttgcgcgctagtcgttcatttcccttcgtctccaagaccctgggtgttgacttcatcgatgtcgccaccaaggtgatgattggggagaatgtagacgaaaaacacttaccaaccctcgaccatcccatcattcccgctgactacgtggccattaaggcacccatgtttagttggcctcgactccgcgatgccgatcccatcctgcgctgcgaaatggcaagcaccggtgaagtcgcctgcttcggggaaggcattcacaccgctttcctgaaggctatgttgagcaccgggttcaaaatacctcagaaagggattctgatcggcatacaacagagcttcagaccccgctttctgggcgtcgccgagcagctccataacgagggctttaagctgttcgcaacggaggctacaagcgactggctcaatgctaataatgttccagccactcctgtggcgtggccatcacaggagggacaaaatccctcactgagctccattcgcaaactaatcagggacggatcaatcgaccttgtgattaatctccccaataacaataccaagtttgtgcacgacaactatgttatacgaagaaccgccgttgattctggtattccgcttctgacgaacttccaggtcactaaactgtttgctgaagctgtgcagaaatccaggaaagtggacagtaaatccctctttcactataggcagtattccgcgggaaaggcagcatag

SEQ ID NO: 3649 - DNA, 213 bp, synthetic construct
  misc_feature 1..213: note = source = /note="Description of Artificial Sequence: Synthetic coding sequence"
  source 1..213: mol_type = other DNA
atgacccggatcctgaccgccttcaaggtggtgcggaccctgaagactggatttggtttcacaaacgtgacagcccaccagaagtggaagttctcaagaccgggcatccggctgctgagcgtgaaggcgcagaccgcacatattgtgctggaggatcgggatgctgatacccccgcacctctcttaaaccagccagaacctcacgttatttag

SEQ ID NO: 3650 - DNA, 606 bp, synthetic construct
  misc_feature 1..606: note = source = /note="Description of Artificial Sequence: Synthetic coding sequence"
  source 1..606: mol_type = other DNA
atgagccggcgggagggcagcctggaggacccccagaccgacagcagcgtgtcccttcttcctcatttagaggctaaaatacgccagacccactccctcgcccatctcctaaccaagtatgccgagcaacttttacaggagtacgtgcagctgcagggtgacccctttgggctcccctcattctctccacctagattgcccgttgcaggactctccgccccagcaccatcccatgccggcctgcccgtacatgagcgcctgcggttagacgctgctgcactcgccgccctcccacccctgctcgatgctgtctgcagacgacaagcagagcttaatcctcgagccccaagacttcttcggaggctcgaggacgcagctcgccaggctcgagccttgggtgccgccgtggaggcactcctggctgccttgggggccgcaaaccgaggccctcgggctgagccacctgccgctactgcctcagccgcctctgctaccggggtgttccctgctaaagtcttagggctgcgagtgtgcggactatatcgggagtggttaagcagaaccgaaggagaccttggacagttgctgccgggtgggtccgcgtag

SEQ ID NO: 3651 - DNA, 603 bp, synthetic construct
  misc_feature 1..603: note = source = /note="Description of Artificial Sequence: Synthetic coding sequence"
  source 1..603: mol_type = other DNA
atgagccggcgggagggcagcctggacccccagaccgacagcagcgtatctctcctgccacatctcgaagccaaaattcgccaaacccacagcctggcacatcttctgactaagtacgccgaacagttgctgcaagagtatgttcaactccagggtgatccctttggactgccctcctttagcccccctagattaccagtcgctgggttaagcgcgccagcgccttcacatgccggcctgcctgtgcacgagcgcctccgtctggatgctgcagctctggcagcgcttcctccgttactggacgccgtctgtagacgccaggctgagctaaatcccagagcaccaagactcctcagaaggcttgaagatgctgcacgccaggctcgggctttgggagccgcggtggaggctttgcttgcagccctgggagcggccaacaggggaccccgagctgaaccacccgccgccaccgcctccgctgcttctgctacaggcgtgttcccagccaaagtgctaggcctgcgggtctgtggtctgtatcgcgagtggctgagccggaccgagggagatcttggacagcttcttcccggcggcagcgcttag

SEQ ID NO: 3652 - DNA, 513 bp, synthetic construct
  misc_feature 1..513: note = source = /note="Description of Artificial Sequence: Synthetic coding sequence"
  source 1..513: mol_type = other DNA
atgaagacccagcgggacggccacagcctgggccggtggagcctggtgcttctgctgttggggctggtaatgccactagccattattgcacaggtgctgagctacaaggaggcagtgctgcgcgccatagatggaatcaaccagagaagcagcgacgccaacctgtatcgcctacttgacctggacccccggcctactatggatggggaccccgacacccccaagcccgtcagctttactgtcaaggagaccgtgtgccccaggaccacacagcagagccccgaggattgcgatttcaaaaaggacggtctggttaagcgatgcatgggaacggtaactctgaaccaggctcgtggctccttcgacatctcttgcgataaggacaataaacggtttgcattgctaggagacttcttccgcaaaagtaaggagaagattgggaaagaatttaagcgcattgtccagcggataaaggattttctcaggaacctagtccctcgcacagaatcctag

SEQ ID NO: 3653 - DNA, 1692 bp, synthetic construct
  misc_feature 1..1692: note = source = /note="Description of Artificial Sequence: Synthetic coding sequence"
  source 1..1692: mol_type = other DNA
gcctgctgctgcggcggcggctgcacctgctgcggctgcacctgcacaactgggtgctgcaccacatgcacttgttgtgcatgtgcctgtaccaccggtacaaccacaggtgctggcgcatgttgcaccggtggctgcgccgctggaggcaccggctgcgggggggccggctgttgctgtacttgctgtgcaggcgccgctggcacaggctgtggcggtacttgcgccgcaggttgcggagggtgcgctggatgtggaggtgctggggcttgtgggggctgtggcgcaggatgctgcgccggtggcgccgcttgttgcacatgttgttgttgctgttgtggttgtggtacatgttgctgttgcgccggctgtactacctgctgctgtgctgggtgcggcacaggcggatgtgggggctgcggaggcgccgcttgctgctgttgctgcggcggcgctggcgccgctgccggagccgcaaccgcagctgctggtgcgtgcacaggcggtgctaccgcatgcgcaggaggcacatgttgtgcaaccacagcgtgtgggacctgcgccacaacatgcaccggttgcgcgggaggttgctgtgcagccaccacaaccgctaccggcgcgggtggcgctgccacctgctgtgctgccggcgccaccggcgctgcgacgaccactggtggcgctggatgcgcggggggtgccggggcaggtgggtgttgtggaaccacgactggcacttgcactgggtgtgctggcacgggctgctgctgttgtgcaggtgggtgtacaggatgcacatgctgttgcgccgggtgtggctgtactacatgttgctgtgcggcctgcgctggggccggaggggcttgctgcgccacttgtactggcgctaccggagccaccacctgcgccaccgctggcggctgtgcgtgtgccgctgcctgcgcgacaggcgcagcagcaaccggggcctgcaccacaacaggagcagcaggcactaccacttgttgtaccacttgcgccgctaccgcagccgcagctgcgtgtgccggcgcatgcgccgccactgccactggaaccaccgcaacctgtgccggcgcaacttgtgccgctgcttgcacttgctgtggcgcctgctgttgttgtgccgcctgcggagcaggagctactacctgctgcaccggcgcggcgggagcagcttgtacaggatgcggtgccgggggtgctggtggtactggcgggggttgctgcacctgtacgacttgtgctggatgcggtgcaggttgcaccggaggggcttgcacgggctgcacctgttgctgcacaggtggtgcaggctgtgcttgcggcgcgggcacgacgtgtgccgggggcgccgcgggcggatgcacgtgcgcaggtggcgctgccggggctgggggagcgggcgcaggctgcgctggctgcgccgcagggtgcggcggagccgccaccgccacttgtacatgtggcgccactggttgtgctacagctgcaacgggatgtgctgggacgacaggagggacgggagggggcggctgctgcgctacgggagcgtgcggaggcggagggtgctgttgtgggggagctgcatgtacgtgcgcctgctgcgcaggctgcactacggcgggctgcgccggttgcggctgcacctgcggtggatgtacaggctag

SEQ ID NO: 3654 - DNA, 555 bp, synthetic construct
  misc_feature 1..555: note = source = /note="Description of Artificial Sequence: Synthetic coding sequence"
  source 1..555: mol_type = other DNA
atggccgaccacctgatgctggccgagggctaccggctggtgcagcgacctcctagcgccgccgctgcccatggacctcacgcgctgcgcactcttccaccttacgcaggccctggcttagatagcggccttagaccgcggggtgcacccctgggccccccacctcctcggcaaccaggcgcccttgcctacggagcgtttggtccacccagctcttttcagccgttccctgccgtccctccacccgcagcaggcattgcccatcttcagcccgtagccaccccttatccgggaagagcagccgccccccctaatgccccgggggggccacccggccctcagcctgccccatccgcggctgctccaccacctcctgctcacgccttgggagggatggacgcagagctgattgacgaggaagctctgacgagtctggaactggagctaggcctgcaccgggtccgcgagctgcctgaattgttcctcgggcaatccgagttcgactgtttctccgatctgggcagcgcgccccccgctggaagcgtgagttgttag

SEQ ID NO: 3655 - DNA, 3198 bp, synthetic construct
  misc_feature 1..3198: note = source = /note="Description of Artificial Sequence: Synthetic coding sequence"
  source 1..3198: mol_type = other DNA
atgaagatcctgatcctgggcatcttcctgttcctgtgcagcacccccgcatgggccaaagagaaacattattatatcgggattatcgagaccacatgggactatgcttccgatcatggcgagaagaagcttatcagcgttgatactgagcactcaaatatctacctgcagaatggcccagatagaatcgggaggctctacaaaaaggccctatacctgcagtacaccgacgagacctttagaacaactatcgagaagcccgtctggctgggtttcttaggcccaatcatcaaggcggaaaccggagataaagtctacgtgcatctaaaaaatctggccagtagaccctacacgtttcattctcacgggattacgtattataaggagcatgaaggggctatataccctgacaacaccacagatttccaacgcgccgatgacaaagtgtatcccggcgagcagtacacttacatgctgctggccacagaggaacagtcacccggtgaaggcgacgggaactgcgtgactcggatctatcactcccatattgacgcccccaaggatatagcctcaggcctgatcgggccgcttattatttgtaagaaggactcattagacaaggaaaaagagaaacacatagacagggaattcgtggtgatgtttagtgttgtagatgagaatttctcctggtaccttgaagataacatcaaaacatattgttcagagccagaaaaggtagacaaggacaacgaggactttcaagaatccaatagaatgtactctgtgaatggatacacgttcgggagcctgcctggccttagtatgtgtgctgaagatcgggtcaagtggtacctgttcggcatggggaacgaggtggacgttcatgctgcattttttcacggtcaggctctcaccaacaagaattatcgtattgataccattaacctgttccctgcgacactctttgacgcctatatggtggcacagaacccaggggagtggatgctctcttgccagaatctcaaccacttaaaagcaggactgcaagcctttttccaggtccaggagtgtaataaatccagctctaaagataatatccgcggcaaacatgttaggcactattatattgcagctgaagagatcatctggaattatgctccctcagggattgatatctttaccaaggaaaatctgacagcccctggctcagatagtgccgtttttttcgagcagggcacgacccgtatcggggggtcctataagaagctcgtctacagggaatacacagatgcatctttcaccaacagaaaagagcggggacctgaggaggagcatcttgggattctgggtccggtgatatgggcggaagtcggtgacactattcgggtgacgttccacaacaagggagcctatccactttccatcgaacccattggcgtcaggtttaataagaataacgaaggtacgtactactctccaaactacaacccacagagtcggtcggtaccaccttccgccagccatgtggctcccaccgagactttcacttatgagtggacagtccccaaagaggtggggcctaccaacgccgatcctgtctgcctcgcgaagatgtactattctgcagtggaaccaacgaaagacatatttaccggccttattggtcctatgaaaatctgtaagaaaggatctctgcacgccaatgggaggcaaaaggacgtggacaaagagttctatttatttcccacagtcttcgatgaaaatgaatctctgctattagaagataacatacggatgtttaccaccgctccagaccaggttgacaaagaagatgaggatttccaagaaagtaacaagatgcatagcatgaacggtttcatgtacggaaatcagcccgggctgacaatgtgcaagggtgatagcgtggtctggtatttattctctgcaggcaatgaggcagatgtgcacggcatttatttcagcgggaacacatacctctggaggggagagaggcgggatacagctaatctgttccctcagacctcactgacactgcacatgtggcccgataccgaaggtaccttcaacgtcgaatgtttgacaacagatcactatacaggaggcatgaaacaaaagtatacagtcaaccaatgtcgccgtcaaagcgaagatagtacattctatttgggtgaaaggacctattacatcgctgccgtggaagtggagtgggattacagtccgcagagagagtgggaaaaagaactgcatcatttacaggagcaaaacgtatcgaacgccttcctggataagggagagttttatatcgggtctaagtacaaaaaagtggtttatcggcagtataccgatagcaccttccgtgtcccagtggaaaggaaagcggaggaggagcacttaggtatcctcgggccgcagctccatgccgacgtgggcgacaaggttaagatcattttcaaaaatatggcgacccgaccttactctatacacgcccacggcgtccagaccgagtcttcaacagtcactccaaccctcccaggggaaacacttacatacgtgtggaagatcccagagcgctcaggggccggcacagaggattctgcgtgcatcccatgggcttactactccactgtcgaccaggttaaagacttatattctgggctgatcggacctctcatcgtgtgtcgccgcccgtatttgaaagtgttcaatcccaggcgcaaactggagtttgccctcctttttctggtgtttgatgaaaacgagtcctggtacctggatgataatatcaagacatactccgatcatccagaaaaggttaataaagatgatgaagagtttattgagtcaaataagatgcacgccatcaatggtcgaatgtttggcaacctgcaaggattgaccatgcacgtcggagatgaggtgaactggtatctgatggggatgggaaatgaaatcgacctgcacacggttcacttccatggtcactctttccagtacaaacaccgcggcgtatattctagtgatgtgtttgatatatttcccggtacctatcagacgctggaaatgttcccacggacaccaggtatctggctgcttcactgccacgtgacagaccatatccatgctggaatggaaacaacttacacggtgctgcagaatgaggacactaaaagtggttag

SEQ ID NO: 3656 - DNA, 603 bp, synthetic construct
  misc_feature 1..603: note = source = /note="Description of Artificial Sequence: Synthetic coding sequence"
  source 1..603: mol_type = other DNA
atggccttcaccgagcacagccccctgaccccccaccggcgggacctctgttcccggagcatttggctggccagaaagatacgttccgatttgacagcccttaccgagagctacgtgaaacaccaagggcttaataaaaacatcaatttagactccgctgatggcatgcctgttgcctccacggaccagtggagtgagttaaccgaggctgagcggcttcaggagaacctgcaggcgtacaggacgtttcacgtgctgttggctaggctcctggaggatcaacaagtgcatttcactcccactgagggcgattttcaccaggctatccacacactcctgctccaagtcgctgctttcgcttaccagatcgaagaactgatgatcctcctggagtataagatcccaagaaacgaagctgacggaatgccaattaacgtcggggatggaggcttatttgagaaaaaactgtgggggctgaaggtcctccaggaactcagccagtggacagtgaggagcatccacgacctgagattcatctcatcccatcaaaccggaatacccgccagagggtcacactacatcgctaataataaaaagatgtag

SEQ ID NO: 3657 - DNA, 1869 bp, synthetic construct
  misc_feature 1..1869: note = source = /note="Description of Artificial Sequence: Synthetic coding sequence"
  source 1..1869: mol_type = other DNA
atggcccacgtgcggggcctgcagctgcccggctgcctggccctggctgcactctgttccctagtgcattcacagcacgtctttttggccccccaacaggcccgaagccttctgcagcgcgttcgaagagccaacacctttctggaagaagtgagaaaggggaacctggagcgggaatgcgtcgaagagacctgcagctacgaggaagcctttgaggccttagaatccagcaccgctacagacgtgttctgggcaaagtacaccgcatgcgagactgccagaacacctcgggacaagttggccgcttgcctagaaggaaactgtgccgaggggttagggaccaactacagaggtcacgtgaacatcacacgctccggaattgagtgtcagctgtggagaagtcggtacccacacaagcccgagattaatagtacgactcaccccggagccgacctgcaggagaatttctgtcggaatcctgattcttctaccaccggcccatggtgctacaccaccgaccccaccgtgcgccgacaagagtgttcgattccggtgtgcggacaggaccaggtcacggtggccatgacaccccggtcagaaggcagcagcgttaacttatcacctcctctcgagcaatgtgttcccgataggggccagcagtatcaaggcaggcttgctgtgactacgcatggcctgccgtgcttagcctgggcatctgctcaggccaaggcactcagtaagcaccaagactttaattccgccgttcagttggtggagaacttctgcagaaaccctgacggagatgaggagggcgtttggtgttatgtcgcagggaaacccggagacttcggatactgcgacctgaattactgcgaggaagcggtggaggaggaaacaggcgacggtctggacgaggatagcgatcgggccattgaaggaagaactgccacatctgaatatcagacattttttaatccccggacatttggctctggagaggccgattgcggtctgcgcccgttgttcgagaaaaagagcctggaggataaaacggagagggagttgctcgaatcttacattgatggaaggatagtcgaaggctcagacgcggaaattggcatgagcccgtggcaggtgatgctattcagaaaaagtccacaagaattgttatgcggtgcaagcctgatctccgatcggtgggttctgaccgcagcgcattgcctgctgtatcctccctgggacaaaaacttcactgaaaatgacctgcttgtaagaatcgggaagcattcacgaactcgctacgaacgcaacattgaaaaaatttccatgctggagaagatctacatccacccccgatacaattggcgcgaaaacctggaccgtgacatcgcgctcatgaagctcaaaaagcccgtggcattctcagattacattcaccctgtgtgcctccccgatcgtgaaaccgcagcaagtctgctccaggcagggtataaggggcgggtaaccggttggggcaatcttaaggaaacgtggactgctaatgtgggaaaaggccagcctagcgtgctccaggtcgtcaacctgcccattgttgagcgacccgtgtgcaaagatagtacccgcattcgaataactgacaatatgttttgtgctggctacaagcctgacgaaggaaagaggggcgatgcttgtgagggagattctggcgggccatttgtgatgaaaagtccttttaacaataggtggtaccagatgggcatcgtgtcttggggtgagggctgcgatagggatggcaaatacgggttctatacccacgtgtttaggctcaaaaagtggatccagaaggtgatcgaccagtttggcgagtag

SEQ ID NO: 3658 - DNA, 195 bp, synthetic construct
  misc_feature 1..195: note = source = /note="Description of Artificial Sequence: Synthetic coding sequence"
  source 1..195: mol_type = other DNA
ctgcagggcgagttcctgccccagccccggcagcagcaccacggcactctggtactgcattacaggccacaccgagaggaggcaggcatgcagcatccgtgtctctggccaggcagttctcactgtagcgatgacagtaccctacgtcgattgcagtgtgagtccgtcacgtctatcggggcagtgtgtccctag

SEQ ID NO: 3659 - DNA, 1752 bp, synthetic construct
  misc_feature 1..1752: note = source = /note="Description of Artificial Sequence: Synthetic coding sequence"
  source 1..1752: mol_type = other DNA
atggcccacgtgcggggcctgcagctgcccggctgcctggccctggctgcactctgtagcctggttcatagccagcatgtgtttcttgcacctcagcaggcacgaagcctgctccaacgtgtccggagagccaatactttcttagaggaggtgcgcaaggggaacctggaaagagagtgcgtggaggaaacatgttcctatgaggaagctttcgaggctctcgagtcatcgaccgcaaccgacgtattctgggccaagtatactgcatgtgagacggcccgaacccccagggataaactggcagcgtgcttagaggggaattgcgccgagggattggggaccaactatcgcggccacgtgaatatcacacgaagtggtattgaatgccagctgtggcgtagtagataccctcataagccagagattaattctaccacacaccccggagcagatttgcaagaaaatttctgcagaaatcctgattcttctaccacaggaccttggtgttacacaacagatcccacagtgaggagacaagagtgctctatccccgtttgtgggcaggatcaggtcaccgtggcgatgactccacgcagcgaggggtcttcggttaacctttcaccaccactggagcagtgtgtacccgatcgcggccagcaataccagggcaggcttgctgtgactacacacggcctaccctgtctggcatgggcctcagcccaggcaaaagcactcagcaagcaccaagattttaactccgccgtacaattggtggagaacttctgcagaaatccagatggcgatgaagagggggtttggtgttatgtagcagggaagcctggcgattttggatactgtgacctcaactactgcgaggaggcagtggaagaagagaccggagatgggctggacgaggactctgacagagccatcgaaggacgcacggctacttccgaatatcagacgttctttaatccgaggaccttcggctccggggaggctgactgcggtctgcggcccctcttcgaaaagaagtccttggaggacaagaccgaacgggagttactggagagctacatagacgggcggattgtcgaaggatctgacgcagagataggcatgagtccttggcaagtgatgctgttccggaagtctccccaggagctgctgtgcggcgcgtccctaatcagtgatcggtgggtgctgactgctgctcattgtctgctgtatcccccatgggataagaattttaccgagaacgacctcctagtgaggattggcaagcattcccggacaaggtacgagaggaatatagaaaagatttccatgttggagaaaatatacatccatccttccctgttacaggccggatacaagggccgcgtgactgggtgggggaacctgaaggagacgtggacagccaatgtgggcaaagggcagccttcagtgctacaggtggtgaacttacctattgtcgaacgtccagtgtgcaaagactccacacgcatacgcatcaccgacaacatgttctgcgctggatacaagccagatgagggtaaaaggggagacgcatgcgaaggggactccggtggccctttcgtgatgaagtcccctttcaataacagatggtatcagatgggcatcgtgagctggggtgaaggttgcgaccgcgatgggaagtatggcttctacacacacgtttttaggctcaaaaaatggatccagaaagttatagatcagtttggggaatag

SEQ ID NO: 3660 - DNA, 888 bp, synthetic construct
  misc_feature 1..888: note = source = /note="Description of Artificial Sequence: Synthetic coding sequence"
  source 1..888: mol_type = other DNA
atggagacccccgcctggccccgggtgccccggcccgagaccgccgtcgcccggacattactgctggggtgggtgttcgctcaggtagccggagcatcaggcaccaccaataccgtggcagcctacaatctgacttggaaaagcaccaatttcaaaacaattctcgagtgggaacccaagcccgtaaaccaggtgtacacagtccagatcagcactaagagcggagactggaagagtaaatgcttctacacaaccgatacagaatgcgatctgacagacgaaatcgttaaggacgttaagcagacataccttgcccgggttttctcttatcctgcaggcaacgtcgaatcaactggatctgcaggcgaaccactgtacgagaactcccccgaattcaccccctacttggagactaacttggggcagcccacaatacagtccttcgagcaggtgggaacgaaagtcaatgtcacagtagaagacgaacggacactggtccgccgaaacaacactttcctttcattgcgagacgtcttcggtaaagatctcatctacacgttgtactactggaaatccagctcgtccgggaagaaaacagcaaagactaacactaatgagttcttaatcgacgtcgataagggcgagaattactgcttttctgttcaagctgtgatcccctctaggaccgtaaatagaaagagtaccgattcaccagtggagtgcatgggacaggagaagggggaatttcgcgagattttttacataattggagctgttgtgttcgtcgttatcatcctcgtaattattttagcaatttcactccacaagtgtagaaaggctggggtcggtcagtcgtggaaggagaattctcctctcaacgttagctag

SEQ ID NO: 3661 - DNA, 717 bp, synthetic construct
  misc_feature 1..717: note = source = /note="Description of Artificial Sequence: Synthetic coding sequence"
  source 1..717: mol_type = other DNA
atggagacccccgcctggccccgggtgccccggcccgagaccgccgtggcccggacactgctgctgggctgggtcttcgcacaagttgccggggcatcaggtaccacaaacaccgttgccgcctacaacttgacatggaaatcaactaatttcaagactatccttgaatgggagcccaaaccagtgaaccaagtctatacagtacaaatctccacgaaatccggcgattggaagagcaagtgtttctacaccactgacactgaatgcgatctgactgacgaaatcgtgaaagatgtcaagcagacatacctcgcacgcgttttctcttatcccgcaggaaacgttgaaagcactgggtcagcaggcgagcctctgtacgagaactcccccgagtttaccccctacctcgaaacaaacttgggacagcccaccatccaatcttttgagcaggttgggacaaaagtgaacgtgaccgtggaggacgagcgaaccttagtgcgccgcaataatacttttcttagcttgcgggatgtgttcgggaaggatctaatctataccctgtactattggaaatccagctcctctggaaagaagtatagcacctccctggaactctggtatctttggagctcctcactgagtagctcctggttgtacctgtatactagcgtagagcgtcaggaatggggacgcgctgggcggcgtacaccccattag

SEQ ID NO: 3662 - DNA, 3807 bp, synthetic construct
  misc_feature 1..3807: note = source = /note="Description of Artificial Sequence: Synthetic coding sequence"
  source 1..3807: mol_type = other DNA
atgatcgccgcccccgagatccccaccgacttcaacctgctgcaggagtccgaaacacacttcagctccgacacggacttcgaagatattgagggtaagaaccaaaaacaggggaagggtaagacatgcaaaaaagggaaaaaaggccccgccgagaaaggaaagggcggaaacggcggcggcaagccaccaagcggtcccaatcgcatgaacggccatcatcagcagaacggcgttgagaacatgatgctgtttgaagtcgtgaagatggggaagtctgcaatgcaaagcgtggtggatgactggatcgaatcctacaagcatgatagggacattgccctcctggatctgatcaactttttcatccagtgctccggctgcaagggggttgtgacagccgaaatgttcaggcacatgcagaactccgagatcatccgaaagatgaccgaagagtttgatgaggacagcggggactatcctctgacgatggcaggccctcagtggaagaaatttaagtcctccttttgcgaattcataggcgtgctcgtgaggcaatgccagtactctattatatacgacgaatatatgatggacacggtgatatccctgttaaccggtctttccgatagccaggtgagggcctttcggcacacaagtactctggctgcaatgaagttaatgactgccctggttaacgtcgcgctgaacctgtccattaatatggacaatacgcaaagacagtacgaagctgagcggaacaaaatgatcggcaaacgcgctaatgaacgacttgaacttctattgcagaaaaggaaggagttacaggaaaatcaggacgaaattgaaaacatgatgaacgccatatttaaaggagtctttgtgcatcggtatcgagacgccatcgccgagattcgagcaatctgcattgaagagatcggaatctggatgaagatgtacagcgacgcatttctgaacgatagctacctcaagtatgtggggtggacaatgcacgataaacagggcgaggtcaggctgaagtgcctgaccgcgctgcagggcctctactataacaaagagctcaatagcaaacttgagctgtttacatctagattcaaagatcgcatcgtctcaatgacactcgacaaggagtacgacgtggcggtccaagctattaaactgctgacattggtgttgcaaagtagtgaggaggtacttactgcggaagactgtgagaatgtctatcacctggtgtacagcgcccacaggcccgtggctgtggcagccggggagttcctgtataaaaagttatttagccgacgggaccctgaggaggacggcatgatgaaaagaagaggccggcaggggccaaacgcaaacttagtgaaaactctggtgtttttttttctcgagtccgagttgcatgagcacgccgcatatcttgtggactctatgtgggactgtgccaccgagctactgaaggattgggagtgtatgaattccctgctattggaagaacccttatctggagaggaagctctaacagacaggcaagagagcgcccttattgaaataatgctgtgcactatcaggcaggccgcagaatgtcacccccctgtgggtcgggggactggaaagcgggttctgaccgccaaggaaaaaaaaacgcagctggacgaccgcaccaagataactgaattgttcgccgtggcactgccccagcttctagctaaatattctgttgacgcagaaaaggtcactaatctgctgcagctaccacagtactttgatctggaaatctacaccacaggacggttggagaagcacctcgacgccctgctgcgccagataaggaatattgtggagaaacacacagatactgacgtcttggaggcatgctctaagacataccacgcgctgtgcaacgaggaattcaccatattcaacagagttgatatcagccgcagccagctgatcgacgaactggctgacaaatttaatcggctgttagaggactttttacaagaaggcgaggagccggatgaagacgatgcttaccaggtcctgtctacattgaaaagaatcacggccttccacaacgctcatgatcttagcaagtgggatctgtttgcctgcaattacaagctgttgaaaaccggcatagaaaacggcgacatgccagaacagatcgtgatccacgctcttcagtgcacccactatgttatcctgtggcaactggccaaaatcaccgagtcttctagcaccaaggaagatttgctgcgcctaaaaaaacagatgcgcgtgttttgtcagatctgtcagcactaccttacaaatgtgaacaccacagtgaaggagcaggctttcacgatcctgtgcgacatcctgatgatattctcacatcaaatcatgtctggcggacgcgatatgttggagcccctggtgtacacccccgattcttcactgcagtcagagctactgtcttttattcttgatcatgtgtttatcgaacaagatgatgacaacaatagcgctgatggacagcaagaagatgaagctagcaaaatcgaagctctgcataaaaggcgcaacctcctggccgccttctgcaaattgatcgtatatacagtggtcgagatgaacactgcggcagacatcttcaagcagtatatgaagtattacaacgactacggggacatcatcaaagagacaatgtcaaagacgcgtcagattgataaaatccagtgcgccaaaactctgatcttgagcctgcagcaactgttcaatgaaatgattcaggaaaatgggtataatttcgacagatcgagctccactttttcagggataaaggaactcgcaagaaggtttgccctcacattcgggctggaccagctgaagaccagggaggcaatcgccatgttgcacaaggacggcatcgagttcgcctttaaagagccaaacccacagggggagagccatccaccactgaatcttgccttcctggacatccttagcgaatttagcagcaagctactcaggcaagacaaaaggactgtctacgtgtatctggaaaagtttatgacctttcagatgagcctgcgcagagaagatgtgtggctgccactaatgtcctaccggaattctctcttagctggcggagacgatgataccatgtccgtgatctcaggaattagctcccggggaagtaccgtgcgcagcaagaaaagcaagcccagtactggcaagcgaaaggttgtagagggcatgcagctgagccttaccgaggagagttcttcaagtgactcaatgtggctttcccgtgaacagaccctgcatacaccagtgatgatgcagacccctcagctcaccagtactataatgagggaacccaagagactacgtcccgaggactccttcatgagtgtctatcctatgcagaccgaacaccaccaaacacccctagactataacacacaggttacctggatgctggcacagagacagcaggaggaggcccgtcagcagcaggaacgcgcggcaatgtcctacgtgaagttacgcacaaatctgcagcatgccatccgtagaggtacctcattaatggaggacgatgaggagcctatagtcgaggacgtaatgatgagctccgaggggcgcatcgaggacctgaacgaggggatggatttcgacaccatggacatagaccttcctccttctaaaaataggcgggaaagaacagaacttaaacccgacttttttgatcctgcttcaatcatggacgaatctgttttaggcgtcagcatgttttag

SEQ ID NO: 3663 - DNA, 1272 bp, synthetic construct
  misc_feature 1..1272: note = source = /note="Description of Artificial Sequence: Synthetic coding sequence"
  source 1..1272: mol_type = other DNA
atgcagcgggtgaacatgatcatggccgagagccccggcctgatcacaatttgcttactgggttatctattatctgccgagtgcacggtgttccttgaccacgagaacgcaaacaagatcttaaacagaccaaaaagatacaactccggtaagttggaagagtttgtacagggaaatctcgagagggagtgcatggaggaaaaatgctctttcgaggaagcgcgcgaagtgtttgagaatacagagcggacgacggaattctggaagcagtacgtggatgtgacatgtaatatcaagaacggccggtgcgaacaattttgtaaaaacagcgccgataataaggtggtctgtagctgtacagaagggtaccgactcgctgaaaatcaaaagagctgtgagcccgccgtccctttcccttgcgggcgggtttccgtctctcaaacttcgaagctcactcgtgcagagacagtattcccagatgtggattatgttaactcaaccgaggctgagactattcttgacaacattactcagtctacccaatccttcaatgacttcacccgtgttgtgggcggtgaggatgctaagccaggtcaatttccctggcaagtggtgctgaacggtaaagttgacgccttctgtggcggatcgatcgtgaacgagaagtggatcgtgacagccgctcactgcgtggaaacaggagtgaaaatcactgtggtcgcgggggaacacaacattgaggaaacggagcataccgagcaaaagaggaatgtaattcggatcattccccaccataattacaacgccgcgatcaataagtacaatcacgacattgccctgctagagctcgatgagcctctggtactgaattcatacgtgacaccaatttgcatcgctgacaaagaatacactaacatttttctcaaatttgggtccggctacgtctcaggttggggtagggtgtttcacaagggcaggtctgccctggtgctgcagtacctaagggtgccactcgtcgatcgcgccacctgcctccgctccactaaattcacaatctacaataatatgttctgcgctggatttcatgagggggggagagactcttgccagggcgattcaggcgggccccatgttaccgaggtagagggcacatcattcttgacaggaattatctcctggggcgaggaatgcgcgatgaagggcaagtacggtatttacacaaaggtatcgcggtatgtgaattggatcaaagagaagactaaactaacatag

SEQ ID NO: 3664 - DNA, 6690 bp, synthetic construct
  misc_feature 1..6690: note = source = /note="Description of Artificial Sequence: Synthetic coding sequence"
  source 1..6690: mol_type = other DNA
atgttccccggctgcccccggctgtgggtgctggtggtgctgggcactagctgggttggctggggcagtcagggcacagaggccgctcaattgcggcagttctatgtcgccgctcagggaatcagttggtcttacaggcccgagcctactaactcaagtttgaacctgagtgtaacaagctttaagaagatcgtgtatagagagtatgaaccctacttcaagaaggagaagccccaaagcacgatcagcggccttctgggacctacactgtatgcagaagtgggcgacatcatcaaagtgcactttaagaataaagctgataagccccttagtattcaccctcagggcatcaggtactcaaagctatctgagggggcatcttatctcgatcacaccttcccagccgagaagatggatgacgctgtggcacctgggcgcgagtatacttacgagtggtcaatttccgaagatagcgggcctacccacgatgaccccccatgtctcactcacatctactattcgcacgaaaatctgatagaggattttaattctgggctgataggtccattgctcatctgcaagaagggaaccctgacggaaggaggaacacaaaagactttcgacaagcagattgttttgttgttcgcagtcttcgatgaatccaagtcctggagtcagtcatcctctcttatgtatacagtgaacggctatgtgaatggcactatgcctgacattactgtctgtgcacacgaccatatctcatggcacctcttggggatgtccagtggaccggagctgttttccattcacttcaatgggcaagttctggagcagaatcaccacaaggtaagcgctatcacattggtcagcgccacctctactaccgcaaacatgacagtgggccccgagggaaaatggattatttctagcctaactccaaaacacctccaggctggaatgcaggcctacattgacatcaagaactgccccaagaagacccgtaacctgaagaagattaccagggagcagcgaaggcacatgaagcggtgggagtacttcatcgcagccgaagaagtaatttgggattacgctcccgttatccccgccaacatggacaagaaataccggagtcagcacctggataatttctcaaatcagattgggaaacactacaagaaagtgatgtatacacagtatgaggatgaatccttcactaaacatacagtaaacccaaacatgaaagaggacggaattctggggccaattatccgtgctcaagttcgagatacgcttaaaattgtcttcaaaaacatggcctccagaccatactctatctaccctcatggggtcacatttagtccttacgaggacgaggttaattcttcctttacatctggccgcaataataccatgatcagagcagtgcaaccaggcgagacttatacttataaatggaacatcctcgagtttgacgaacctaccgagaatgatgcccagtgcctgacccgcccgtattactctgatgtggatatcatgagagacattgcatcgggtttgattggtttgttgcttatttgcaagtcccggagtttggatcggcagggaatccaaagagctgcggatatagagcagcaagccgtgtttgctgtgttcgatgaaaacaagtcttggtatttagaggataacataaataagttctgcgaaaatcctgatgaagttaagagagatgatcccaaattctacgaatccaacatcatgagcaattttacattatcagctatcaatggttatgtccccgagtccatcactaccctggggttctgcttcgacgacaccgtacagtggcacttctgcagcgtgggtacccagaacgagattctgaccattcactttactggccactcattcatttacgggaagcgccatgaagacaccctgacactattcccaatgcgaggggaatctgtcactgtgacaatggacaatgtcgggacctggatgctgacatccatgaatagcagcccgaggagcaagaagctccggctaaaattcagggacgtgaaatgcataccggatgatgatgaggattcctatgaaatattcgaacccccggagtctaccgtgatggccacaagaaaaatgcacgacaggctggagcccgaggatgaagaatccgacgccgattacgactaccagaaccgcctggccgctgcactcggaatccgaagcttcagaaactcgtccttgaaccaggaagaggaagagttcaatctaaccgctctggccctagagaacggtacagaattcgtgtcctctaatacggatatcattgtggggtcaaattactcttcacccagtaacatttctaaattcacggtgaataatctggcggagccccaaaaagctccaagccatcagcaagccacgaccgctggtagtcctctgcggcatctgatcggaaagaattctgtgctgaattcgagcaccgccgagcactccagcccctactcagaggaccccatagaagatccccttcagcccgacgtgaccggaatcagactcctctcactgggggccggcgagttcaagtcccaggagcacgccaaacataaggggcccaaagttgagcgggaccaggcggcaaagcaccggtttagctggatgaagctgttggcgcacaaggtcggacgacaccttagccaggatactggatcaccatccggtatgaggccgtgggaggacctgccaagccaggacaccgggtccccctcccgcatgagaccatggaaagaccccccgtctgacctgttactgctcaagcagtccaattcctccaagattttagtgggtcggtggcacctggcctcagaaaaaggtagctatgaaatcatacaagacacggacgaagacaccgcagtgaataattggctaatatccccgcagaacgcgagccgggcttggggcgagtctacccccctggccaacaagcctggaaagcagtcaggccacccgaaattcccacgcgttcgccacaaatcactacaggttcggcaggatggtggtaaaagtagacttaaaaaatcacaattcctgattaaaacccgcaagaagaaaaaagagaagcacactcaccacgcaccattatcccctcggacttttcatccgttgcgtagcgaagcctataacactttcagcgagaggcgtctaaagcactccctagtactgcataagtccaacgaaaccagcctcccaactgacctgaaccagacactgccctccatggactttgggtggatcgcatcgctccctgatcataaccagaactccagcaatgacaccggacaggctagctgcccacccggtttgtatcagaccgtcccgccggaggagcattatcaaacgttccccatccaagatcccgaccagatgcactctacctcagacccatctcaccgcagctctagccctgagctttccgaaatgttagaatacgatcgctcccataagtctttccccactgacatctcccaaatgtcgccttcatctgaacatgaggtctggcagacggtgatttctcctgatctttcacaggttacattgtcaccagaactcagtcagaccaacctgtcacctgatctgagccacacaaccctttcacctgagctgatacagcgtaacctgagccctgcattaggccagatgcccatttctcctgacctctctcacacaaccctcagcccggatctttcccataccactctctctttggacctttcccaaactaatctgtcgcctgagctgtctcaaactaatttgtcacctgccctggggcagatgcccttaagccctgacctgagccacactactctgagccttgattttagtcagaccaaccttagccctgaattatctcatatgacgctttcacctgagttatcccaaacaaatctcagcccagccctgggtcaaatgcccataagccctgacctatcccatacaaccctttcactggacttcagtcagacaaacctctcccccgagttgagccagaccaatctgagccccgcactgggacagatgcctttaagccctgatccatcacacacaaccctgagcctggacctctcacaaacgaacctgagtccggaactctctcaaactaacttaagcccagatttaagcgagatgccactgtttgctgacttatcacaaatcccactgacaccggatctagaccagatgactctatccccggatcttggggagactgacctgtctcccaactttggccagatgagcctctcccccgacctgtctcaagttaccctgtcacctgatatctcggacacaaccctgctccctgatctgagtcagatctccccccccccagacttagatcagattttttacccgagcgaaagttcccagagcctgttgttacaggaattcaatgaatctttcccgtatcctgatctgggccagatgccaagcccttcttctccgaccctaaacgacaccttccttagtaaggagttcaaccctcttgttattgtagggcttagcaaagatggtactgactatattgagatcatcccgaaggaggaagtccagtccagcgaagacgactacgcagagatcgactatgttccatacgatgacccctacaagacagacgtcagaactaacataaattcctcgagagatccggataacatagctgcctggtacttaaggtccaacaatgggaatcgccgtaattactacattgccgcagaagaaatcagctgggactattccgagttcgtccagagggaaaccgatattgaggactccgatgatattcccgaagacacaacttataagaaagtggtcttcagaaagtaccttgatagcacttttaccaaacgggacccacggggtgaatatgaggaacatcttggtattctgggccctatcatccgggccgaggttgatgatgtgatacaagtcagatttaaaaacctcgcgagcagaccatactcactgcacgcacacgggctgtcatatgagaagtcctccgaaggcaaaacgtacgaggacgatagcccagagtggtttaaagaagataacgcggtacagccaaacagctcctatacgtacgtttggcatgccactgagcggtcaggtcctgaatctccaggtagtgcctgtcgcgcctgggcgtactacagcgctgtcaacccggagaaagacatccattcaggcctgataggaccactcctgatctgccagaagggaatcttacacaaggacagcaacatgccaatggacatgagggagtttgtcctactctttatgacttttgatgagaagaagagttggtattacgagaagaaatctcggtccagctggcggctgacttcaagtgaaatgaaaaaaagccacgaattccacgcaattaatgggatgatttactccctccccggtctgaagatgtacgaacaggagtgggtccggctgcatttactgaatatagggggttctcaggatatccatgtggtccattttcacggccaaacattgctggaaaatggtaataaacaacaccagctgggggtctggccactacttccaggatcgtttaagactctcgagatgaaggctagcaagcccggatggtggttgctcaataccgaggtgggggagaatcagagggccggcatgcagactccctttctgatcatggaccgagactgtcggatgcctatggggctttcaaccggtatcataagcgatagccagattaaagcctctgagttcttggggtattgggaaccccggctggccaggttgaataatggcggaagctataacgcctggagtgttgagaaactcgccgccgagtttgcctccaagccatggattcaggtagatatgcaaaaagaagtgattattacaggcattcaaacacagggagcaaaacactacctgaaatcatgctacacaacagaattctatgttgcgtattctagcaaccaaatcaattggcagattttcaaagggaacagtacccgcaacgtcatgtactttaacgggaattccgacgcctccactatcaaggagaaccagttcgacccgcccattgtggccaggtacatccgcatctcaccaactcgtgcttataaccgcccaacgctgagactggaattgcagggatgcgaagtcaacggctgtagcacgcctctcggcatggagaatgggaagatcgagaataaacagattactgcaagttcctttaaaaagagctggtggggcgattactgggagcctttccgcgcaagactcaatgcccaggggcgagtgaacgcctggcaggcaaaggctaataataacaaacagtggcttgagatcgacctgctgaagataaaaaagatcactgcgatcataacccaaggctgtaaaagtctctccagcgagatgtatgtcaagtcttataccatccactactccgaacagggtgtcgagtggaagccatatagactcaaatcttccatggtcgacaaaatctttgaaggcaatacaaataccaagggccatgtgaagaatttcttcaaccctcccatcatcagtcgcttcatcagagtgatacccaaaacctggaaccaaagtatcgcactgcgcctggagttgtttggctgcgatatctactag

SEQ ID NO: 3665 - DNA, 6675 bp, synthetic construct
  misc_feature 1..6675: note = source = /note="Description of Artificial Sequence: Synthetic coding sequence"
  source 1..6675: mol_type = other DNA
atgttccccggctgcccccggctgtgggtgctggtggtgctgggcacctcttgggtgggctggggctcccagggtaccgaggccgcacagctccgccagttctatgttgcggcccaaggtatcagctggagctacagacctgagccaacaaactccagcttgaatttatcagttacaagcttcaagaagatcgtataccgcgagtatgagccctattttaagaaagaaaagcctcagtccaccatttctgggcttctcggcccaacgctctacgctgaagtgggcgacatcatcaaagtgcacttcaagaacaaagcggataagcctttatccatccacccacaaggaatcagatattccaagctttccgagggtgcaagttacctggatcacacctttcctgccgaaaaaatggatgatgctgttgcccctggccgggaatacacctatgaatggtcgatcagcgaagacagtgggccaacccacgatgaccccccctgtctaactcacatatactattctcacgaaaacctcatcgaggacttcaactccgggttaataggacccctgctgatctgtaaaaaagggactctaacagaagggggcacacaaaagaccttcgataaacaaatcgttctcctcttcgctgttttcgacgaatctaaatcttggagccagtcatcctcactgatgtacacggtgaatggctacgtcaatggaaccatgcctgatattaccgtgtgtgcccatgaccatatttcatggcacctgcttgggatgtcctccggccctgaactcttcagtatccacttcaatgggcaggtgcttgaacagaaccaccacaaagtgtccgccatcaccctcgtgtcagccactagtaccacagccaatatgactgtcgggccagaggggaagtggataatctcttctctgacccctaaacacctccaggccggcatgcaggcttatatagacattaagaattgtcccaagaagaccaggaacctgaaaaaaatcacaagggaacagcgcaggcacatgaagcgctgggagtattttatcgcggccgaggaagtcatttgggactatgcacctgtcatccccgccaacatggacaagaaataccgcagccaacatctcgacaatttcagcaatcagatcggtaagcattataaaaaggtaatgtacacgcagtacgaggatgagtcttttacaaaacacacagtgaatcccaatatgaaggaggacggcattctagggcctatcattcgcgcacaagtaagagacaccctcaaaattgtgtttaaaaatatggcatctagaccatattcaatatatccccatggcgtcaccttctctccttacgaagatgaagtgaactcttcattcacctcagggcgaaataacacgatgatcagggctgttcagcctggggagacatatacttacaaatggaacatacttgaattcgacgagcccacagagaacgatgcccaatgtcttacacgtccctactattctgatgtggatattatgagggatattgcttccggccttataggactcttgctcatctgcaagagtcgctcactggatcgccagggcatccagcgggcggccgacatcgaacagcaagctgtctttgctgtttttgacgagaacaagtcgtggtacctggaggataatattaacaagttctgcgaaaaccccgacgaggtgaagagagatgatcctaaattctatgagtcaaacatcatgtcaacgataaacggttacgttccagagtccatcactacgctcgggttctgctttgacgatactgtgcaatggcatttttgctccgttggcactcagaatgaaattctgaccatccacttcactggccatagtttcatctacggtaaacggcacgaggacaccttgactttgttcccaatgcgcggtgaaagcgtgacagtcaccatggacaatgtggggacttggatgctgacatccatgaactccagcccgagatcgaagaagctgcgcctaaaatttcgcgacgtcaagtgcatccccgacgacgacgaggactcttatgagatatttgaaccacccgagagtacagtgatggcgactagaaaaatgcacgaccgactggagcccgaggacgaggagtcagacgctgattatgattatcagaatcgcctggctgccgccctgggcatcaggagctttcgtaactcctccttgaatcaagaagaagaagagttcaacttgacagctctggctctagaaaatggaacagagtttgtttcttctaataccgacataatcgtagggagcaattatagctccccttcaaatatttcgaagttcacagtgaataatcttgcagaaccacagaaggctcctagccaccagcaggccactactgccgggtctccactgcggcacctgatcgggaaaaattcagtgctcaatagtagcaccgctgaacatagtagcccatactccgaggatccaattgaagatccgctccagcctgatgttacaggcatccgtctgctctccctcggcgcaggggagttcaaatcccaagagcacgccaaacacaagggtcccaaggttgagcgggatcaggccgctaaacaccgattctcttggatgaagctgctggcacacaaagtcgggagacatctgagccaggatacaggtagtccctctgggatgcggccttgggaagatctgccaagtcaagacaccggaagcccctcacggatgagaccctggaaggaccccccaagcgacctgctgctcctgaaacagagcaattcttctaagatccttgtggggcgatggcacttagcgagcgagaagggtagttatgaaataattcaggataccgacgaggacactgccgtcaacaactggctgataagcccccagaacgcctctcgcgcatggggcgagagcacacctcttgcgaataaaccaggcaagcagtccgggcatccaaagtttcctcgggttcgccataaatctctacaggttaggcaggatggcggaaaatcacggttaaagaagtcccagttcctgataaagacacgaaagaaaaaaaaggaaaagcacacacaccatgccccattatccccaagaacctttcaccctcttaggtctgaggcatataatacgttctcagaaagaaggctgaagcattctctggtcctgcataagtctaacgaaacctcactcccaacggatttaaatcagacgctaccatccatggacttcggttggattgctagcctgccagaccataaccagaacagcagtaacgacactggtcaggcaagttgccccccgggactttatcagacagtccccccggaagagcactatcaaactttcccgattcaggatccagatcagatgcatagcacctccgatcctagccacagaagttcatcgccagaactgtccgagatgctggagtacgaccggtcccataaaagctttccgaccgatattagccagatgagtcctagcagtgagcacgaggtttggcagaccgttatcagccccgacctatctcaggtcacactcagccccgagctatcacagacaaacctgagcccagacctgtctcacactactttatccccggagttgatccagcggaatcttagtccagcactgggccagatgcccatctcccctgacctcagtcacacaacactttcaccagacctgtctcacaccacactctctctggacctgtctcagactaatttgagccctgagctcagtcagactaacttgtcaccggccttgggacaaatgccgctctccccagacctcagtcacactaccctctctctggacttcagccaaacaaacctctccccggagctcagccacatgactcttagtcccgaactgtcacaaaccaatttgtcccccgccctcggtcagatgcctatttctcccgacctgtcacacacgactctgtcacttgacttctctcaaactaacctctcaccagagctctcccaaacgaatctatctccggccctggggcagatgcctttgtcaccagaccctagtcacactaccctctctctggacctgtcccaaactaacctgagcccagagttgagtcaaacaaatctttcacccgacctaagtgagatgccactcttcgccgacctgtcccagattcctttaacccccgacctcgatcagatgactctgtctcctgatctgggcgagactgacctgtcaccgaactttggacagatgagcctgtctcctgatctgagccaagtgaccttatcgccagatatcagtgatacaaccctcttaccagacctttcccagatctctcctcctcccgacctggatcaaattttctatccttctgagagcagccaaagtctgctcctacaggaattcaacgagtccttcccttaccctgatctgggacaaatgccctcaccgagtagtcctaccctcaatgacacatttctgtcaaaggagttcaatccactggtgattgtcgggctgtctaaggacgggacagactacattgagatcattcccaaggaggaggtgcagtctagcgaagacgattacgcggaaattgattacgtgccctatgatgatccttataaaaccgacgtgaggaccaacattaattcgtccagggatccggacaacatagcagcctggtatcttagatccaataacggcaatagacggaactattacattgccgcagaggagatcagctgggattacagtgagttcgtccagcgggagactgacatcgaagacagcgacgacattcctgaagataccacctacaagaaagtggtctttagaaagtatctggactctacattcactaaacgcgacccaagaggggagtatgaagaacacctcggcatcctcggacctataatcagggctgaggtcgacgatgtgattcaggtgagattcaaaaatttagccagccggccttactctttgcacgcacacggcctgagttatgagaaatcttcggaggggaaaacgtatgaggatgacagccctgaatggtttaaagaggataacgctgttcaacccaactccagttacacctatgtgtggcatgcaaccgagagaagtggaccggagtctcccggatcggcatgccgcgcttgggcctactattcagctgtcaacccggaaaaggatatacattcggggctgatcggtcccttgctcatatgtcaaaaaggcatcttgcataaagattctaacatgcccatggacatgcgcgaatttgtgctcctgttcatgacattcgacgaaaaaaaatcttggtactacgaaaaaaaaagccggtcatcgtggcgccttacatccagtgagatgaaaaagtcacatgagtttcatgccattaatggaatgatatatagccttcccggtttgaagatgtacgagcaggaatgggtgagacttcatctgttgaatatcggcggatcgcaggatattcatgtggtacacttccacgggcagacactgctggaaaacggtaacaagcagcatcagttgggcgtctggcctctgctccccggttcctttaagacactcgaaatgaaggccagtaagcctggatggtggctcctgaatactgaggtgggggaaaaccagagggcgggaatgcaaacacccttcttgattatggaccgagactgcagaatgccaatggggctgtccacaggcataatctctgattcccagattaaggcctcagaatttctgggttattgggagcccaggctggccagattaaacaatgggggatcttacaatgcttggagtgttgagaaacttgctgccgaatttgcatcgaaaccttggattcaggtggatatgcagaaagaagtcattataaccgggatccagacccagggggctaagcattatctcaagagctgttataccactgagttctatgtggcctacagcagcaaccagattaactggcagatctttaaggggaactccacgagaaacgtgatgtacttcaacggcaatagcgacgcctctaccatcaaagagaaccagtttgatccaccaattgtcgctagatacatcagaatatcccccaccagagcatataatcgacccactttaaggctcgagctgcagggctgcgaggtgaatgggtgctccactccacttgggatggagaatgggaagatagaaaataagcagatcactgccagttcctttaagaagagctggtggggcgactattgggaacccttcagagcccgcttgaacgctcaaggtcgagtgaacgcctggcaggcaaaagctaacaacaacaagcagtggctggagattgatctcctgaagattaaaaagattacagcaattatcacacaaggctgcaagtcactcagcagtgagatgtatgtaaaatcctacactatccactacagcgagcagggcgttgagtggaagccgtacaggctcaaatcgtctatggtggataagattttcgagggcaatacaaatactaaagggcacgttaagaattttttcaaccctccaataatctctcgatttataagggtgattcccaagacctggaaccagtcaattgcgctgaggttagagctgttcgggtgtgatatatattag

SEQ ID NO: 3666 - DNA, 999 bp, synthetic construct
  misc_feature 1..999: note = source = /note="Description of Artificial Sequence: Synthetic coding sequence"
  source 1..999: mol_type = other DNA
atggacgacgccgtggcccccggccgggagtacacctacgagtggagcatctctgaagactctgggcccacgcacgatgaccctccatgtctcacacacatctactacagccatgaaaacttgattgaggactttaactctggactgattgggcctcttctcatttgtaaaaagggcacgctaactgagggtggcacccagaaaacttttgacaaacagatagtgctgttatttgccgtctttgacgaatcaaagagctggagtcaatctagcagcctgatgtacacagtgaatgggtatgtcaacgggactatgccggacattaccgtgtgcgcacacgatcatataagctggcacctgcttggtatgagttcgggccccgagctattcagcatccatttcaacggccaggtgttggagcagaatcaccataaagtgagcgccatcacactggtgagcgctacatccaccacagccaacatgaccgtgggacctgagggcaagtggattataagcagcctgaccccaaagcacctgcaggcaggtatgcaggcatacattgacattaaaaactgtcctaaaaagacgcgtaacctaaaaaagattacccgggagcagagacgccacatgaagcgctgggagtattttatcgctgccgaggaagtgatttgggactatgcacccgtgatcccggcaaacatggataagaaataccggtctcagcacctcgacaacttctcaaaccagataggaaaacactacaagaaagtcatgtacacccaatatgaggatgaaagctttaccaagcataccgtcaatccgaatatgaaggaggacgggatcctcgggcccattattcgggcccaggttcgggacacccttaaaattgtgtttaaaaacatggctagtagaccctatagtatctaccctcatggggttacattttctccatatgaagacgaggtgaacagctctttcacatcaggaaccacaccctag

SEQ ID NO: 3667 - DNA, 1335 bp, synthetic construct
  misc_feature 1..1335: note = source = /note="Description of Artificial Sequence: Synthetic coding sequence"
  source 1..1335: mol_type = other DNA
atggtgagccaggccctgcggctgctgtgcctgctgctgggcctgcaggggtgtttggccgctgtatttgttacccaggaagaggcgcacggcgtcctacatagacggcggcgcgctaatgccttcctggaggaactgcggcccggatctctggaacgcgagtgtaaggaggagcaatgttcttttgaagaagcacgggagatcttcaaggatgcagaacgcactaaactcttttggatatcatattctgacggtgaccagtgcgcctcatcaccctgccaaaacggcggttcatgcaaggaccagctgcagtcttacatctgcttctgtctccccgccttcgaaggccgcaattgcgagacccataaggacgatcagctgatctgcgtgaacgagaatgggggctgtgaacagtattgcagtgatcacacggggaccaaacggtcctgcaggtgtcatgaaggatacagcctcctggcagatggggtgagctgcacccctaccgttgaatatccctgtggcaagatccccatcctagagaagcggaacgcctccaagccacagggacggatagtgggtgggaaagtttgcccgaagggcgagtgcccttggcaggtactattactcgtgaacggtgctcagctatgtggcggaacgctaatcaacacaatctgggttgtgtcggcagcgcactgctttgataagatcaagaattggagaaatctgattgccgtgttgggggagcatgatctctcagaacatgacggcgacgaacaaagcagacgtgtcgctcaggtaattattccctcgacttatgtgcccggaaccactaaccacgacatcgcccttctgagattgcaccagccagttgttctgacagatcacgtggtgcctctgtgcttgccagagagaacttttagcgaacggacactggcgtttgttcgcttttccttggtttcagggtggggccaacttcttgaccggggagccaccgctctcgagctgatggtgctaaatgttccacggctcatgacacaggattgcctgcagcaatcccgaaaagtgggggatagtcctaacatcaccgaatacatgttttgcgctggctatagcgacgggagcaaagattcttgtaagggggatagcggagggccacatgctacccattatcgtgggacgtggtatctgactgggatcgtctcttggggccagggctgtgccacggtcggccacttcggggtgtacactcgcgtctcacagtatatcgaatggctccaaaaattgatgagaagtgagccccgaccgggagtgctgttgcgtgctccattcccatag

SEQ ID NO: 3668 - DNA, 1401 bp, synthetic construct
  misc_feature 1..1401: note = source = /note="Description of Artificial Sequence: Synthetic coding sequence"
  source 1..1401: mol_type = other DNA
atggtgagccaggccctgcggctgctgtgcctgctgctgggcctgcaggggtgtctggcagccggtggtgtcgccaaggcgtccggtggggagacaagggatatgccatggaagcctggtcctcatagggttttcgtgacacaagaggaggcacacggcgtgctgcatcgccggcgccgtgctaacgcatttctggaagagttaagacctggctccctggaaagggagtgcaaggaagaacaatgttcattcgaggaagccagggaaatctttaaggatgccgagagaacaaagttgttctggatttcatacagcgacggggatcagtgcgcttcctctccatgccagaacggaggtagttgtaaggaccagctgcagtcgtatatttgcttttgcctgccagcgtttgaagggcggaattgcgagacgcataaagacgatcagctaatatgtgtcaacgagaacggaggttgcgagcagtactgcagcgaccacacgggaacaaaaagatcttgcaggtgccatgaaggctatagtcttctcgcagatggcgtttcctgtacgccgacagtggaatacccttgtgggaagatacctattcttgaaaaaagaaacgcctctaagccacaaggcagaatcgtcggaggtaaggtttgccctaaaggagagtgtccatggcaggtgctgctactggtgaatggagcccagctgtgcggggggactctgattaacaccatctgggtggtttccgcagcccactgctttgacaaaattaaaaactggcgtaatttgatcgcagtgctcggagaacacgacctgagtgagcatgatggcgatgagcagtcaaggcgggtggctcaggtcatcattccttcgacctatgtgccaggaaccacaaaccacgacatcgccttgctgagacttcaccagccggtggtcctgaccgatcatgtggtgccactatgtctgcctgaaaggaccttcagtgaacggaccctggcctttgtccgtttctccctggtctccggctgggggcaactattagatcgaggtgccaccgccctggagctcatggtgctcaacgtgcccaggctgatgacacaggactgcttgcagcagagccgcaaagtgggcgactcccccaacataacagagtatatgttctgcgcaggctactcggacggatcgaaggatagttgtaagggagatagtggcgggcctcacgccacacactacagaggcacttggtatctaactggtattgtgtcttggggccaaggctgcgccaccgtggggcatttcggcgtttatacgcgcgtgagtcagtatattgaatggctccagaaactgatgagatctgagcccagacccggcgtcctccttagagcacctttcccatag

SEQ ID NO: 3669 - DNA, 1194 bp, synthetic construct
  misc_feature 1..1194: note = source = /note="Description of Artificial Sequence: Synthetic coding sequence"
  source 1..1194: mol_type = other DNA
atgggcaacgtgaaccggcagggccagcactgccgggacttcatcatggtgagtcaggccctgcgcctactctgcctgctgcttggccttcagggctgtcttgcagcagacggagatcaatgtgcaagttcaccatgccaaaatggcggcagctgtaaggatcagctgcagagctacatctgcttctgtttacctgcctttgagggaaggaattgcgagacacacaaggatgatcagctgatatgtgtgaatgaaaacgggggttgcgagcagtactgcagcgatcacaccggcacaaaacgaagttgccgctgccacgagggctattctctgctggccgatggggttagctgcacaccaacagtcgagtatccctgtggtaaaatccctatactggagaaaagaaacgccagcaaaccgcagggccgaatcgtgggcggtaaggtctgccctaaaggcgaatgcccctggcaggtattgctcctagtcaatggtgcacaactatgcggaggaaccctaatcaacactatctgggtggtcagcgcagcacactgtttcgacaaaatcaaaaactggagaaatctgatcgccgtgctgggggagcacgatttaagcgaacacgacggcgatgagcaatccaggcgtgtcgctcaggtgattattccaagtacatatgttcctggtaccaccaatcacgatattgcactgctgcgactgcaccaacccgttgtgctcactgaccacgtcgtccccctttgcctgccggaacggacgttttcagaacggacgctagcctttgtcagatttagcttggtgagtggctggggtcaactgcttgatcgaggcgctactgctctcgaactgatggtattgaacgtacccagactcatgacacaggactgtctgcagcaatcacgcaaggtcggcgactctccaaatatcaccgagtacatgttctgtgccggatacagtgatgggtccaaagatagctgcaaaggtgacagcggggggcctcacgctacccattatcgcggtacgtggtatttaaccggaattgtgtcttggggtcagggttgcgctactgtggggcacttcggagtctacactcgagtgagccaatatatagaatggttgcagaagctcatgcgcagcgagcctcggcctggcgttctccttagggctccgtttccgtag

SEQ ID NO: 3670 - DNA, 651 bp, synthetic construct
  misc_feature 1..651: note = source = /note="Description of Artificial Sequence: Synthetic coding sequence"
  source 1..651: mol_type = other DNA
atgcggatccaggaccccggcaaggtgttcttcggcaacgtggactcatctggcataaaacacaatattttcaatccccctattatagcgcggtacatccgcttgcatcctacacattactctattaggagcaccctacggatggaactcatggggtgcgatctcaactcctgctccatgccactgggcatggagagcaaggctattagtgacgcacagatcactgcctctagttactttacaaacatgtttgctacctggagcccgagcaaagcacgcctgcacctgcaggggaggagcaacgcatggcgtcctcaagtgaacaatcctaaagagtggcttcaagtggatttccagaagacaatgaaggtgactggcgttaccacccagggggtgaagtccctcttgaccagtatgtatgttaaggagttccttatttccagctcacaagatgggcaccaatggaccctcttcttccagaacggtaaagtgaaagtgtttcaggggaatcaagactcttttacgcctgtggttaacagcttggatccccctcttctcactagatatctgaggattcacccccagtcgtgggtccaccaaattgctcttcggatggaagtcttgggctgcgaggcgcaggatctttattag

SEQ ID NO: 3671 - DNA, 7056 bp, synthetic construct
  misc_feature 1..7056: note = source = /note="Description of Artificial Sequence: Synthetic coding sequence"
  source 1..7056: mol_type = other DNA
atgcagatcgagctgagcacctgcttcttcctgtgcctgctgcggttttgttttagcgccacaaggaggtactacctgggcgctgttgagctttcatgggattacatgcagagcgatctcggcgagctgcccgtggatgcacgcttcccacctcgggtaccaaaatctttcccattcaatactagcgtagtgtataagaagactctctttgttgagtttactgatcatctgtttaatatcgccaagccacggcctccctggatggggctcctgggacccactatccaggcagaagtttatgatacagtcgtcatcactttgaagaatatggcatcccatccagtgagcctgcatgccgtgggcgtgtcgtattggaaggcctctgaaggcgcagagtatgacgatcagacttcgcagcgtgagaaggaggatgataaagtcttcccaggaggtagccatacctatgtttggcaagtgcttaaggaaaacggccccatggccagcgaccccttgtgcctgacttacagttacttgagccacgtggacctggttaaagatctgaacagcgggctgatcggggccctcttggtctgtcgggagggcagcctggctaaggaaaaaactcagacactgcataaattcatccttctattcgccgtgttcgatgagggaaagtcatggcacagcgaaacgaagaatagtctcatgcaggatcgtgatgccgcctctgcccgcgcttggccaaagatgcataccgtgaacggatacgttaaccgcagcctgcccggactgatcgggtgccacaggaagtcagtgtactggcacgtgatagggatgggcacaacacccgaagtccacagtatattcctcgaaggccatactttcctggtacggaaccaccggcaagcatctctggagatcagccccataacgttcctcaccgcacaaacgcttctgatggacctgggacagttccttctgttctgtcacatttctagccatcagcatgatggaatggaagcatacgtgaaggtcgactcctgtcccgaagagccccagctccgaatgaaaaataatgaagaggccgaggactacgatgacgacttgacggactctgaaatggatgtggttcggtttgacgacgacaacagtccatccttcattcagatccggtctgtggctaagaaacaccccaagacatgggtgcactatatcgccgccgaggaggaggattgggattacgcccctctggttctggctcctgacgatcgatcctacaaatcccagtacctgaacaacggcccccagcgcattggcagaaagtacaaaaaggttcgattcatggcatacacggatgagacattcaagactagagaagccattcagcacgaatccggaatcctgggaccattgttgtacggagaggtgggtgatactctgttgatcatttttaaaaatcaagccagtcgtccttacaacatttatccccatggcataaccgacgttaggcccctgtactcaaggcgcctccccaagggggtgaaacacctgaaggacttccccattcttcccggcgaaatattcaagtacaagtggacagtgaccgtggaagatggcccgacaaaaagcgacccgcggtgcctgacccgatattattcttctttcgtgaacatggagcgcgatttagccagtggcctcattggccctttactgatttgttataaagaatctgtggatcagaggggaaaccagatcatgagcgacaagcgaaatgtgatcctgttctccgttttcgatgagaataggagttggtacctgacagagaacattcaacgtttcctgccgaatcccgccggcgtgcagctcgaggatcccgaattccaagctagcaatattatgcacagcatcaatggctatgtgtttgactccctccagctctccgtatgtctgcacgaggtggcatactggtacattctgagtatcggtgctcagacagacttcctgtctgtctttttttcaggctatacttttaagcacaaaatggtgtatgaagacactttgacactcttcccctttagcggagaaaccgtgttcatgtcaatggagaaccctgggctgtggatcctgggttgtcataactcagactttaggaatcgtggaatgaccgcgcttctcaaggtgagctcctgcgataaaaatacgggcgattactacgaggattcatacgaagatattagcgcctacctgctgagtaagaacaacgccatcgagcctcgcagctttagccagaacagccggcatccctcaactaggcagaagcagttcaatgcgaccaccatcccagaaaacgatatcgaaaaaactgacccctggtttgcccatagaacacccatgcccaaaatccagaatgtcagctctagcgacctgctgatgctgctccgacagtcccccacccctcacggtctctcgctgtcagatctgcaagaggccaaatacgaaacattttctgatgatcctagccccggcgccattgattctaacaattccctctccgagatgacacacttcaggccccagctgcaccattccggtgatatggttttcacacctgaaagcggactccagttacggctgaatgaaaaactgggaaccacggctgccacagaacttaagaaattggacttcaaggtttcttccacgtcgaacaacttaatttccaccatcccctcagacaacctcgcggccggcacagacaacacaagctctctgggccctccctcaatgcccgtccattacgacagccagttggacaccacactcttcggaaaaaaaagttcgcctctcacagagagcggcgggcccctgagtctgagcgaggaaaacaatgattctaaactgcttgagtcaggcttgatgaattctcaagaatcaagttgggggaaaaacgttagctctactgagagtggacgactgttcaaagggaagagggctcacggacccgccctgttaacaaaagataatgccctgttcaaagtgtccattagcctgctcaagaccaacaaaacctcaaataactctgcgaccaacaggaaaactcacattgacggcccatcgctgctcatcgaaaattctccatctgtatggcagaatatacttgagagcgacactgaattcaaaaaggttacaccacttatccacgaccgcatgctgatggataagaatgccactgctttgcggctgaatcacatgagtaataagaccactagctctaagaatatggaaatggtacaacagaaaaaggaaggtccaattcctccggatgcacagaaccctgatatgagttttttcaagatgctgttcctccccgaaagcgccagatggatccagaggacacacgggaagaattcgctaaactctggccagggacctagtcccaagcagctggttagccttgggcctgaaaagtcggtggaaggccagaattttttgtcggagaagaataaagttgtggtaggaaaaggcgaatttaccaaagacgtgggcttgaaggagatggtttttcccagctctcgaaacctgtttctcaccaatttagacaacctccacgaaaacaacacccacaaccaggagaagaaaatacaagaagagattgagaagaaagaaacgctcatccaggagaacgtagtcctgccccagatacacactgtgacggggacaaagaatttcatgaaaaaccttttcttgcttagcacccggcagaatgttgaaggcagctacgatggagcatatgcccccgtcctgcaggattttcggagtctcaacgacagcaccaacagaactaaaaaacacaccgcacatttctctaagaaaggggaagaggaaaacctcgaggggcttggaaaccaaactaagcagattgtggaaaagtatgcatgtaccacaagaatatctccaaatacctctcagcagaacttcgtaactcagaggtctaagcgcgccctgaaacagtttcgcttaccactcgaagagaccgagctcgagaagcgcattatcgtggacgatacctccacccagtggagcaaaaatatgaagcacctgactccgtcaaccctgacacagattgactacaatgaaaaggagaaaggggctataacccagagtcctctctccgattgtctcactaggtcacacagtatccctcaggctaacagatcaccactgcctatcgcaaaagtgagctcttttccctcaatcaggcctatttatctcacccgagtgttgtttcaggacaatagtagtcatctgcctgcggcctcgtatcgcaagaaggacagcggagttcaagagtcctctcattttctacagggtgccaaaaagaacaacctttcactggccatcctcacactcgagatgaccggagatcagcgtgaagtgggcagcctcggcacctctgccacaaatagcgtgacatacaagaaggtcgaaaacacagtcctaccaaaaccggatctgcccaagacctctggtaaggtagagctgcttcctaaggtacacatataccaaaaggacctgtttcctaccgaaacttccaatggatcccccgggcatctggacctggtggagggttccctgctccaagggacggaaggggccatcaaatggaacgaagccaatcgcccggggaaagttccttttctgagagtcgcgactgagtcctcagctaagactccttcaaagctcctggatcccttggcctgggacaaccattacggaactcagattccaaaagaagagtggaagagtcaggaaaagtctccggaaaagacagcttttaagaagaaagacacaattctgtctctcaatgcctgtgagtccaaccacgccatcgcagccattaacgagggccagaataaacccgagattgaggttacctgggccaagcaggggcgcaccgagagactgtgcagtcagaatccaccagtcctgaaacgtcaccagagagagatcacccggactactctccagagtgaccaggaagaaatcgactacgacgatacaatcagcgtggaaatgaaaaaagaagacttcgacatatatgacgaagatgagaaccagagcccgcgctctttccagaagaaaactagacattattttattgcagctgtagagcgcctatgggattatggcatgtcttcctctccgcatgttctcaggaatcgagcccagagcggcagtgtacctcagttcaagaaggttgtttttcaggagttcaccgatggttcctttacacagcctctgtaccggggcgagcttaatgagcacttaggattgctgggaccttatatccgggcagaggtggaagataacattatggtcactttcaggaaccaggcatctcggccatacagtttctacagcagtctaatctcctacgaggaagatcagcggcagggagccgaaccaaggaagaatttcgtgaagcccaatgaaacaaagacctatttctggaaagtgcagcatcacatggccccgacaaaggatgagtttgattgcaaggcatgggcgtacttttccgacgtggatctggagaaagatgtgcactctgggcttataggcccactgctggtctgccacacaaacacattgaatccggcccacggtagacaggttactgttcaggagttcgccctgttcttcaccattttcgacgaaacaaaaagctggtacttcactgagaatatggagagaaattgccgcgcaccttgtaacattcagatggaggaccccaccttcaaggaaaattaccgctttcacgcaatcaatggctatatcatggataccctcccaggccttgtaatggcacaggatcagcgtatcaggtggtatctgctgtccatgggaagtaacgagaacattcactctattcacttctccggacacgtgttcaccgtcaggaagaaagaagagtataaaatggccctgtataatctatatcccggtgtgtttgagaccgtcgagatgctgccctcaaaggcaggaatttggagagttgaatgcctcattggcgaacatctacacgctggcatgagcacactgttcctcgtgtactccaataaatgccagacaccgttgggtatggcctcaggtcatattcgggactttcagataactgcttcaggccagtatggacagtgggctccgaagctggcacgcctgcattactctggcagtataaatgcatggtcaacaaaagagccctttagttggatcaaggtcgacctgctagctcccatgatcatccatggcatcaagacacagggtgctcggcagaaattctcttcgctttacatatcacagttcatcattatgtacagtcttgatggcaaaaaatggcagacttacagaggcaacagtactggtacactgatggtgtttttcgggaacgtcgattcatctgggatcaaacataacatcttcaatccccctatcatagctcggtacattcggttgcatcctacccactattcgattcgaagcactctaagaatggaactgatggggtgtgacctcaatagctgctcaatgcccctgggcatggagtccaaggccatttccgacgctcagataacggcgtcctcctacttcactaatatgttcgctacctggtctccaagcaaggcccgactgcatctacaaggacgctctaacgcctggcggccgcaggtgaataaccccaaggagtggctccaggtcgacttccaaaaaaccatgaaggttactggggtgactacgcagggggtcaaaagcctgcttactagtatgtacgttaaggagttcctgatttcttcgagtcaggatggacaccaatggactctgttctttcagaacgggaaagtgaaggtttttcaggggaatcaggactcctttactcccgtcgtgaattccttagacccgcccttgctcacaaggtacttaaggattcacccacagtcatgggtacaccagatcgccctgcggatggaagtcctgggctgtgaggctcaggacctgtattag

SEQ ID NO: 3672 - DNA, 999 bp, synthetic construct
  misc_feature 1..999: note = source = /note="Description of Artificial Sequence: Synthetic coding sequence"
  source 1..999: mol_type = other DNA
atgggccggcccctgcacctggtgctgctgagcgccagcctggccggattgttgcttttaggggaatcccttttcatccgcagagaacaggccaataatattctggcaagagtcactcgggctaattctttcctggaagagatgaaaaaaggccacctcgagcgagaatgcatggaggagacctgtagctatgaggaagccagagaggtctttgaagattccgacaaaacgaatgagttttggaacaagtataaagacggcgaccagtgtgaaacgtcaccctgccagaaccagggaaagtgcaaagacgggctcggcgagtacacgtgcacttgccttgagggatttgagggcaagaactgtgaactgttcaccaggaaactgtgcagtctggataatggagactgcgaccaattttgtcacgaggaacagaattcagtggtctgctcctgtgcgcgaggctacaccctagctgacaacggtaaagcctgtatacccacaggaccctatccgtgtggaaagcagacacttgaacgcagaaaaaggtccgtcgcccaagcgactagtagctcgggggaagcccctgattccattacctggaaaccttacgatgccgccgacctggaccccacagagaacccctttgaccttcttgacttcaatcagacccaaccagaacggggtgataataacttgacacggatcgtgggtgggcaggagtgtaaggatggagaatgtccatggcaagcgctgttaattaacgaagagaatgaggggttttgcggcggcactattctatcagaattttacatactcaccgctgctcattgtctctaccaggctaaacggttcaagggtaccggcacacggtctaggcgcagggccgtacggaggtgcactagatggagatggtcatcgagcaccactgggagtcagaggcgacccatgacaagcacgtctccatgctccgggtctcgcccaccctctccttccgcatag

SEQ ID NO: 3673 - DNA, 1467 bp, synthetic construct
  misc_feature 1..1467: note = source = /note="Description of Artificial Sequence: Synthetic coding sequence"
  source 1..1467: mol_type = other DNA
atgggccggcccctgcacctggtgctgctgagcgccagcctggccgggttgctccttttgggcgaatccctatttataagaagggagcaggccaacaacattctggccagagtcacccgggccaactcttttctggaggagatgaagaaggggcatctcgagcgcgaatgcatggaagagacatgctcatatgaggaggcccgcgaggtgtttgaagattccgacaagactaacgagttctggaataagtataaagacggcgaccaatgtgagacatccccgtgtcaaaaccaaggtaagtgcaaggatggtttgggcgaatatacttgtacgtgtctggaaggctttgaaggaaaaaattgtgaactgttcacaaggaagttgtgtagtctcgataacggtgattgtgatcagttttgccacgaagagcaaaattccgtggtgtgcagttgtgcaagaggctacacactggcagataacggaaaggcatgcattcctaccggcccatatccctgcggcaaacagacactagaaagaagaaaaagaagcgtggctcaagcaacatctagcagcggcgaggcgccagactccatcacttggaagccttacgatgctgccgacctggacccaacagagaaccctttcgatctactggacttcaaccaaacccaacccgagcggggagataataacctgacacgcatcgttggggggcaggagtgcaaggacggggagtgtccctggcaagcccttttaattaatgaggaaaacgagggcttttgcggtggcaccatcctgagcgaattttacatactcacagccgcccattgcctctaccaggccaagcgattcaaagtgcgcgtaggagatcgaaacacagagcaggaggaaggcggagaggccgttcatgaggtcgaggttgtcatcaagcacaatagatttacaaaggagacctatgatttcgatatcgccgtcctcagattgaaaaccccaatcacattccggatgaacgtggcacctgcttgtttgccggagcgtgactgggctgagtccactctcatgacacagaaaactgggattgtgtcaggcttcggcagaacacacgagaaaggtaggcagtcgacacgccttaagatgcttgaggtgccatacgtcgacaggaattcctgcaaactctcctccagctttatcatcacacagaatatgttttgtgccggttacgacaccaaacaggaggacgcatgccagggagactcagggggaccccatgtcacacgtttcaaggatacttactttgtgacagggatagtgtcttggggcgaaggatgtgctagaaaggggaagtacggtatctatacaaaggtgactgcctttttaaagtggatcgaccgttcaatgaagacacggggcctgccaaaggccaaaagccatgccccagaggtgattacaagcagtcccttaaagtag

SEQ ID NO: 3674 - DNA, 1005 bp, synthetic construct
  misc_feature 1..1005: note = source = /note="Description of Artificial Sequence: Synthetic coding sequence"
  source 1..1005: mol_type = other DNA
atgggccggcccctgcacctggtgctgctgagcgccagcctggccggactgctgcttctcggcgaatctctattcattcgtcgggagcaggctaacaatatcctcgcaagagtcacccgtgccaactccttcctcgaggagatgaagaagggtcatttagagcgagagtgcatggaggaaacctgctcttacgaggaggcgcgggaggtcttcgaggactccgataaaaccaatgaattctggaataaatataaagatggcgatcagtgcgagacaagcccttgccagaaccaggggaagtgcaaagacggattgggtgagtacacttgcacatgccttgaaggttttgaaggaaaaaactgcgaactgtttacaaggaaattgtgttcgttggacaacggcgactgcgatcagttctgtcatgaagagcaaaactctgtggtctgtagttgcgcgagaggatacactcttgccgataacggtaaggcatgcatccccacaggcccatatccatgcgggaagcaaactttggagaggaggaaaaggagcgtagctcaggccacatcaagctcaggcgaggcacctgacagcatcacctggaagccctacgatgctgcagacctggaccctacagagaatcccttcgatctgttggactttaatcagacccaaccagaacgcggggacaacaacctcacaaggatcgttggcgggcaagagtgcaaggatggcgagtgcccctggcaggccctgttgatcaatgaagaaaatgaaggcttttgcggtggtacaattctgagcgagttttatatcctcacagccgcacactgcctataccaagctaaacgtttcaaggtacgcggtacgggtactcggagcaggagaagagccgtgagacgatgtactcgctggagatggtctagctctactaccggttcacagcggcgccctatgacctcaacatctccgtgctccggttcccgccccccctccccaagcgcctag

SEQ ID NO: 3675 - DNA, 1722 bp, synthetic construct
  misc_feature 1..1722: note = source = /note="Description of Artificial Sequence: Synthetic coding sequence"
  source 1..1722: mol_type = other DNA
atgatcttcctgtaccaggtggtgcacttcatcctgttcaccagcgtgtccggggagtgcgttacacagctgttaaaagacacatgcttcgagggaggcgacattactacggttttcacccccagcgctaaatactgccaggtcgtgtgcacataccatcctcgttgtttgctctttacgtttacagccgagtcaccatcagaggaccctaccaggtggttcacatgcgttttaaaggattccgtgacggagactctccctcgcgtgaaccgcaccgccgccatctcaggctactccttcaaacaatgttcacaccaaatctcggtgaacaatatttgtctgttgaaacacacacaaacagggaccccaacaagaatcaccaagctagacaaagtggtatcaggcttctctttgaaaagttgcgccctatcaaacctagcatgtattagggatatcttccctaataccgtgttcgctgacagcaatatagattctgttatggctccggacgctttcgtgtgtggacgaatctgcacacaccatcctggctgccttttctttacttttttctcacaagaatggcctaaagagagtcagaggaacctttgtctcctgaagacctcggaaagtggcttacccagcactcgtatcaagaaaagtaaagcactgtctgggttctcactgcagagttgccggcatagcattccagtgttctgtcatagttcattttatcacgataccgatttcctgggcgaggagctcgatatcgttgctgctaaatcacacgaggcatgccagaaactgtgcaccaatgcagtgagatgtcagttcttcacatacacacccgcccaggcatcatgtaacgagggaaagggcaaatgctatctgaaactctctagcaatggctctcctacaaagatcctccatggtagggggggcattagcggatacaccctgcgcctgtgcaaaatggataacgaatgtaccaccaagattaaaccacgcattgtgggcggtacagccagtgtaagaggcgagtggccctggcaggtcacccttcacactacaagccctacacagaggcatctgtgtggagggagtataattggcaaccaatggattctcaccgccgcacattgcttttacggcgtggaatcgcctaagatattgagagtatacagcggcatcttgaaccagtcagagataaaagaagacacgtcttttttcggcgtgcaggaaatcatcatccacgaccagtataagatggcagaatccgggtacgatatagctctgctcaaattggagacaactgtaaattacaccgattcacagagaccaatctgtctcccctccaagggagatcggaacgtcatctatacagactgttgggtgacaggatggggttaccgcaagctcagagacaaaattcagaatacccttcaaaaggcaaagatccccttagtcaccaacgaggaatgccagaaacgatatcgcggccacaaaatcacacacaagatgatctgcgccggctacagagaaggggggaaggacgcttgtaagggcgattccggaggcccattaagttgcaaacacaatgaggtgtggcaccttgtgggcatcaccagttggggtgagggctgtgcccagcgcgaaaggccaggcgtttatacaaacgtcgtcgagtacgtggattggatcctggaaaaaacccaggccgtctag

SEQ ID NO: 3676 - DNA, 1878 bp, synthetic construct
  misc_feature 1..1878: note = source = /note="Description of Artificial Sequence: Synthetic coding sequence"
  source 1..1878: mol_type = other DNA
atgatcttcctgtaccaggtggtgcacttcatcctgttcaccagcgtatctggagagtgcgtgacacagctgctgaaagacacgtgctttgaaggcggtgatattactaccgtctttacccctagcgcgaagtactgccaggtcgtttgcacctaccacccgcgatgtctgctttttacatttacggccgaaagcccttctgaagaccctacacgctggtttacatgtgtcctcaaagacagcgtgacagagactctgccaagggtaaatcgtaccgcagccattagcggctattcatttaaacagtgctcccatcagatctcagcatgcaacaaggacatttacgttgacttggacatgaaggggattaattacaactctagcgtggccaaaagcgcacaggaatgccaggagcggtgcaccgacgatgtgcactgccactttttcacgtatgcaacccgtcagttcccaagtctggaacatcggaatatttgcttactgaagcacactcagacaggtactcctacaaggatcaccaagctagacaaggtggtatcgggcttcagtctaaagtcctgtgccttaagcaatctggcatgcatccgcgacatattcccgaatacagttttcgccgactccaatattgactcagttatggcgcctgacgctttcgtctgtgggcggatctgcactcaccacccgggctgcctgttcttcacattcttctctcaggagtggccgaaggaatcccagcgcaacctgtgccttctcaaaaccagtgagagcggtttgccctcaacgaggatcaaaaagtccaaagctttgtctggcttttccctccaatcttgcagacactcgatccccgtgttctgccatagctccttctaccatgatacagattttctcggcgaggaattggacatcgttgcggccaaatcacatgaggcatgtcagaaactgtgcacaaatgccgttcgctgtcagtttttcacctatactcctgctcaggcctcttgcaacgagggcaagggtaagtgttatttgaagctctcgagcaatgggagtccgaccaaaattttgcacggacgggggggcatctcagggtacactcttcggctctgtaaaatggataatgaatgcacgaccaaaattaagccacgcatcgtgggcgggacggcgagcgtgaggggggagtggccatggcaggtgactctgcacaccacttctccaactcagcgccacttgtgcgggggatccattataggcaatcagtggatactcactgctgcccactgtttttacggggtcgagagccccaagatcttacgcgtttatagtggtattcttaaccaaagcgagatcaaagaagacaccagtttctttggagttcaggaaatcatcattcacgaccaatataaaatggccgagtccggatacgacatagcactgctcaaactggaaaccactgtcaattacacagattcacagcggcctatttgtctccccagcaagggcgataggaatgtgatctacacggactgttgggtcactggttggggataccgaaagcttagagacaagatccaaaacacactgcagaaagcaaagatcccgctggtgactaatgaggagtgtcagaaaaggtaccgtgggcacaagattacgcataaaatgatatgcgccggataccgggaggggggaaaggacgcttgcaagggcgactcaggcggccccttgtcatgcaagcacaatgaggtttggcatctggtggggataacatcctggggcgagggatgcgcccagagagaaaggccaggcgtctacacaaacgtcgtggaatacgtggactggattctggagaagactcaggccgtgtag

SEQ ID NO: 3677 - DNA, 633 bp, synthetic construct
  misc_feature 1..633: note = source = /note="Description of Artificial Sequence: Synthetic coding sequence"
  source 1..633: mol_type = other DNA
tgaagcggcttcagcctgaagagctgcgccctgagcaacctggcctgcattcgggacatttttccaaataccgtgtttgctgatagcaatatcgattccgtgatggctccggacgcctttgtctgtggccgcatttgtacccatcacccaggctgtctgttcttcactttcttttctcaagagtggcccaaagaaagccagaggaacctgtgtctgctaaaaacttcagaaagtggactcccttctaccagaataaagaagtcaaaagccctctctggtttcagcctccagtcctgtcggcactctataccagttttctgccactccagtttttatcatgacaccgattttctcggcgaggagttggatatcgtcgccgcgaagagccatgaggcatgtcagaagctgtgcacgaacgctgtgcggtgtcaattctttacatacacacccgcacaggccagttgcaacgaaggcaaaggaaaatgctacctcaagctgtcttcaaacggtagtcccactaagatcctgcatggtagaggagggatttcgggatataccttgcggctgtgcaaaatggacaatgagctgaggggtgccccaatgaagataagcggctggctgaagacttcctag

SEQ ID NO: 3678 - DNA, 2199 bp, synthetic construct
  misc_feature 1..2199: note = source = /note="Description of Artificial Sequence: Synthetic coding sequence"
  source 1..2199: mol_type = other DNA
atgagcgagaccagccggaccgccttcggcggccggcgggccgtgcccccaaacaattctaacgccgccgaagatgaccttcccaccgtggaactccaaggtgttgtacctcggggagtgaacctccaggagtttctcaatgtgacttctgtgcatctttttaaagaacgctgggatacaaataaagtggaccaccacacagacaaatatgagaataataaattgattgtgcgaagaggccagtccttttatgtgcagatcgacttctcacggccgtacgatcctaggagggatctttttcgcgtcgagtatgtaataggccgctatcctcaggaaaacaaagggacctatattcccgtcccaatcgtgtctgaactccagagcgggaaatggggtgcaaagatcgttatgcgggaggacagatcagtgcggctgagcattcagtccagccctaaatgtatcgtgggcaagttccgaatgtacgtcgcggtgtggaccccttacggagtattgcggaccagcagaaatccagagacagacacatacatcctgtttaatccctggtgtgaggatgacgctgtctatctggacaacgaaaaagagagggaagagtacgttttaaacgacattggcgtgattttctatggggaagttaacgacattaaaacccggagttggtcctatggccagttcgaggatggcatcctggacacgtgcctttacgtgatggatagggcccagatggatttgtctgggagggggaacccaatcaaggtatctagggtcggtagcgcgatggttaatgcaaaagacgatgaaggtgtgctcgttgggagctgggataatatttacgcgtacggcgtgcccccatcagcttggacgggatcggtcgacatcctcctggaatatcgctctagtgagaatcccgtgcggtatggacagtgctgggtattcgccggtgtgttcaatacatttttaaggtgcttgggcatacctgcccgaattgtaaccaattacttcagcgcacacgacaacgacgccaatctgcaaatggatatcttcctggaagaagacgggaacgtgaattccaaactcaccaaagatagcgtgtggaactatcactgctggaacgaggcctggatgacccgccccgatctgcctgttggattcggcggatggcaggccgtcgattctactcctcaagaaaattctgacgggatgtatagatgtggtccagctagtgtgcaagccataaaacatggtcacgtctgctttcaatttgatgccccttttgtgttcgcagaagtaaattccgacctcatctacattaccgccaaaaaggacgggactcacgtggtggagaacgtggacgccacccatatcgggaagctgatcgttacaaagcagattggcggcgacggcatgatggacatcaccgatacctacaagttccaggaaggccaggaggaagaaaggttagccctggagactgcactaatgtatggcgcaaaaaagcccttaaataccgagggagtcatgaaatcaaggtccaacgtggacatggacttcgaagtcgagaacgcggtgctaggaaaagattttaagctgtctatcacctttaggaataactcccataatcggtacaccattaccgcctacctgtctgctaacattaccttctatacaggggtacccaaagcagagttcaaaaaggaaacctttgatgtcaccctcgaacccctctccttcaagaaagaagcagtgttgatacaggcgggggaatatatgggccagctgcttgagcaagcgtccctacacttcttcgtgaccgcccggatcaatgagaccagagacgtgctggccaagcagaagtcgaccgtgttgacaattcctgaaatcatcattaaggtacggggaacacaggtggtgggatctgatatgacagtgaccgtagagtttaccaatccactgaaggaaacactcaggaatgtgtgggtacatcttgatgggcccggggttacccggcctatgaaaaagatgtttcgagagatccggccgaacagtacggtccagtgggaagaagtgtgcagaccttgggtaagcggccaccgcaaacttatcgccagcatgtcgagcgactcactgagacatgtctatggcgaattggacgttcagatccaacggcggccctccatgtag

SEQ ID NO: 3679 - DNA, 417 bp, synthetic construct
  misc_feature 1..417: note = source = /note="Description of Artificial Sequence: Synthetic coding sequence"
  source 1..417: mol_type = other DNA
atgagcgagaccagccggaccgccttcggcggccggcgggccgtgccaccaaataactctaatgccgcggaagatgacctacccaccgtggaactgcagggtgtggtgccacggggagtgaaccttcaggagtttctaaatgtgaccagcgtgcatctgtttaaggagagatgggatacgaacaaggttgaccatcatacagacaagtatgaaaataacaagctcattgtgagaaggggccaatctttctacgttcagattgatttctctaggccttacgacccaagacgggatttatttcgagtcgagtacgtgattggccgctacccccaggaaaacaaggggacctacatacccgttccaatcgtgtccgaactgcaaagtggcaaatggggtgcgaagatcgtgatgcgctag

SEQ ID NO: 3680 - DNA, 1881 bp, synthetic construct
  misc_feature 1..1881: note = source = /note="Description of Artificial Sequence: Synthetic coding sequence"
  source 1..1881: mol_type = other DNA
atgagcgagaccagccggaccgccttcggcggccggcgggccgtgccccctaacaactccaacgctgccgaggatgatctgcccactgtcgaactgcaaggagtggtgccccggggggtgaatcttcaaggtaggtaccctcaagagaacaagggcacttacataccagttcctattgtttctgagctacagtccggcaagtggggggcaaagatcgtgatgagagaagatagatcggtgcgcctttcaatacagagctcccctaagtgcatcgttggaaaattccgaatgtatgtggccgtctggactccgtatggcgtactccgtacatcccgcaaccccgagactgatacatatatcttattcaacccttggtgcgaagatgatgctgtgtacctagataacgaaaaagagagagaagaatatgtgctgaatgatattggtgtaatcttttacggggaggtaaacgacattaaaacaagatcttggagttatgggcagtttgaagatggcatactggatacatgcttgtatgtgatggaccgggcacaaatggaccttagcggtcgggggaaccctatcaaagtgtcccgtgtggggagtgctatggtgaatgctaaggatgacgaaggagtcctcgtaggtagctgggacaatatttacgcctatggtgttccgcctagtgcctggacaggaagcgtagacattctcctggaataccgtagctccgaaaaccctgtaaggtatgggcagtgttgggtgttcgctggtgtcttcaatactttcctgcgctgtctcggcatacccgctcggattgtcacaaattacttttccgcgcacgacaatgatgcgaacctgcagatggacatctttctcgaagaggacggtaatgttaatagtaaattgacaaaagattcagtgtggaactaccactgctggaacgaggcttggatgacccgtccggatctccccgtcggcttcggcggctggcaggccgtggacagcacgccccaagagaactccgacggcatgtaccggtgtggccctgccagcgtgcaagccattaaacacggacatgtctgttttcagtttgatgcaccattcgtgttcgccgaggtcaattctgaccttatctatatcaccgctaagaaagacggaactcacgtggtggaaaacgtagatgccacacacattggtaagttaattgtgaccaagcagatcggcggggatggaatgatggatataactgacacgtataagtttcaggaagggcaagaggaggaaaggctagctctcgaaaccgctctgatgtatggggcgaagaagccactgaacaccgagggtgttatgaagagccggtccaacgtcgatatggactttgaggtggagaacgccgtcctcggaaaggactttaaactctcaattacatttcggaataattcccataacaggtatactattaccgcttaccttagtgcaaatatcaccttctacactggagtgccgaaggccgagtttaagaaggaaaccttcgatgtaactcttgaacctctctcttttaagaaggaagctgtactgattcaggcaggcgagtacatgggccagctcctcgaacaggccagtctgcatttctttgtgacagctcgaattaacgaaaccagagatgttctcgctaagcaaaaatccacagtgctcactatccccgaaattatcattaaggtgagaggaacccaagtggtgggcagcgacatgaccgtcactgaagtgtgtagaccttgggtgagtgggcatcgaaagctgatagccagtatgtcctctgactccctgaggcacgtgtatggcgagctggacgtgcagatccagcgccgcccctccatgtag

SEQ ID NO: 3681 - DNA, 8835 bp, synthetic construct
  misc_feature 1..8835: note = source = /note="Description of Artificial Sequence: Synthetic coding sequence"
  source 1..8835: mol_type = other DNA
atgaccctgcggctgctggtggccgccctgtgcgccggcatcctggcagaagccccaagggtgagggcgcagcatcgcgaacgggtgacctgcacacgcctgtacgcagcagatatagtgttcctcctcgacgggtcctcttctattggccgctcaaatttcagagaagtgcgttcgttcctggaaggactagtgctgcccttctcaggcgcagccagcgcccaaggagttcgcttcgctaccgtccaatacagtgacgaccccagaacagagttcggcctcgatgcacttggcagcggcggcgatgttattcgggccatcagggaattgtcctataaggggggtaacaccaggaccggcgctgctattctccacgtggctgaccacgtcttcttacctcagttagcccgaccaggggtgcccaaggtctgcattcttatcaccgacgggaagtcccaggacttagttgacactgcagcccagcgcttgaaagggcaaggcgtgaaactgtttgccgtaggtatcaagaatgctgatcctgaggaactcaagcgggtcgcaagtcaacccaccagtgatttcttcttctttgttaacgacttctccatattgcgcacactgcttcccctggtgtctagaagagtgtgcactacagccggaggcgtgcccgtgaccagacctcccgacgattccacatcagccccacgagatctggtgctgtcagaaccaagttcccagagcctgcgagttcagtggactgcagcctccggacctgtgaccggctataaagtccagtataccccattaactggcttgggacagccactgcccagtgagcgccaggaagtgaacgtacccgctggcgaaacatccgtcagactgcggggcctaagaccactaaccgaataccaggtcacggtcatcgcgctgtacgcgaatagcattggagaagccgttagtggcaccgcacgcacgaccgccctggagggcccagaattaacaattcagaatacaaccgcacactcactgcttgtcgcgtggcgatcggtccctggagccaccggctaccgggtgacatggcgagtactgtccggcgggccaacgcagcagcaggaactcggtcccggtcaaggctctgtgctgctaagagatctggagcccggaaccgattacgaagtaacggtttcaacgctgttcggaagaagcgttgggcctgctacatcactgatggcacgtacagacgcctcagtcgagcagaccctgagacccgtcatcctgggccccacctccatcctgctttcatggaatctcgttccagaagcccgaggttatcgcttggaatggaggcgcgagaccggcctagaacccccgcagaaagtggtgctcccatccgatgtaactaggtatcagctagatggcctgcagccagggactgagtatcgactaaccctttatactttactggagggacacgaggtcgctactccagcaacggtagtcccaaccgggccggagcttcctgtttctcctgtgaccgatctacaggctaccgagctgccaggccagagagtccgggtcagctggtctccagtgccaggcgctacccagtatcggataatcgtgagatcaactcaaggcgtggagagaactttggtccttccaggatcccagaccgcttttgatctggatgacgtgcaagctgggctttcatatacagtgcgcgtgagcgccagggtgggcccacgtgagggctctgccagcgtgttaacggttagaagggagcccgagacccctctggccgtccctggattacgagtagtcgttagcgacgctactcgcgtgcgggtggcctgggggccggtgcctggagcctcaggcttccgcatcagctggtctactggaagcgggcctgagtcctcccagaccctgccgcctgactcaacagccactgatatcactggcttgcaacctggcactacctaccaggttgctgtcagtgtactgagaggacgcgaagagggccccgccgcagtgattgttgctagaacagatccactgggccctgtgaggaccgtgcacgtgacccaagccagcagttctagcgtgaccatcacctggactcgagttcctggcgcgacaggttacagggtttcctggcacagtgcacacggcccggaaaagagtcagctggtctccggcgaggcgacggtcgcggagctggacggtctcgaacctgacacagagtacactgtacatgtccgcgcccatgtcgccggagtcgatggcccacccgcctctgtggtggtgaggacagcgcctgagccggttgggcgtgtatcacgcctgcagatattgaacgcctcgtcagatgtcctgagaatcacgtgggtgggcgtaactggcgccacagcgtaccgactggcatgggggcgctcagaaggcggtccaatgcgacaccagatcctgcctggaaacacagattccgccgaaatcaggggactcgaaggcggggtctcctatagtgtgagggtgactgccctggtgggcgatcgcgaaggaacccccgtgagcatcgtggtgaccactccacctgaggccccacctgcactcggcacgttgcacgtggtacagaggggggaacacagcctgcgactgagatgggaacctgtgccccgtgcccagggcttcctgctgcactggcaaccagagggagggcaagagcagagtagagttctcggccccgagctgtcttcctatcacctcgatggcctagaaccagcgacgcagtaccgggttcgtctgagtgtgctaggacccgccggcgagggaccttcagccgaagttactgccaggaccgagtctccacgcgtgccgtctatcgaactgagggtcgtagacaccagtatcgacagtgttactctcgcctggacgcctgtgtcacgtgcatcctcatatatcctgtcttggcggcctctacggggccctggccaggaggtgcccggctctccacagacattgccaggcattagtagttcccagcgcgtgaccggcctggagccaggggtgtcctatatctttagcctcacacctgtgctggacggcgtgcggggaccggaagcatctgtaactcaaacacccgtgtgccctcgtggcctggctgacgtcgtgtttctgccacatgctacacaggataacgcgcacagggccgaggccactagacgcgtactggagcgactggtgctcgcacttggaccactggggccccaggccgtccaggtaggcctcctgtcctatagtcaccggccctccccacttttccccctgaacggatctcatgacttgggcatcatcctccaacgcatacgcgacatgccctacatggatccgagcggcaacaatctgggaacagccgttgtgacagctcaccgctacatgctggccccagatgcgccggggcgaaggcaacatgtccccggtgtaatggtactattagtggacgagccactccgaggagacattttttctccaattagggaggcccaggcctcaggactaaacgttgtcatgcttggtatggctggtgcagaccctgagcaattgcgccggctggcccccggtatggattccgtgcaaaccttttttgcggtggatgatggcccctcactggatcaggctgtgtccggactcgcaacagctctgtgccaggcctcgtttactactcagccgaggcccgagccatgtccagtatattgcccaaaagggcagaaaggcgaacctggtgaaatgggcctacgggggcaggtcggtccccccggtgatcccggcctgccaggtaggactggagcccccggtccccagggccccccaggttctgcgacagcaaagggggaacgagggtttcctggggccgatggcagacccgggtcaccggggcgcgccggaaaccccggtacccctggggcaccgggcctgaaagggtctcccgggctgcctggaccacggggggaccccggggagcgcggtcccaggggcccgaagggtgaaccaggtgcaccaggccaagtgatcgggggagaagggccaggcctgcccggtaggaagggcgatcctggaccaagcgggccccccgggccacgaggacctctgggggatcctgggccccggggcccgcccggactccctggcaccgccatgaagggtgacaaaggagacaggggagaacgcgggcctcccggccctggggaaggggggattgcccccggcgaacctggcctgcccggactgccaggatcaccgggtccacagggcccagtgggccctcccggaaagaagggtgagaaaggagattcagaggatggtgcccccgggctgccaggacagccaggtagccccggtgagcaagggcccagaggcccacccggagctattggtccaaaaggggatagaggcttccccggtcctctcggtgaagctggggagaaaggagagaggggccctccaggcccggccggaagcagaggcttacctggggtggcaggacgccctggcgcaaagggacccgagggccccccaggtcctacaggccggcagggagagaagggggagcctggacgaccaggcgatcctgccgttgttggaccggccgtagcaggtcctaagggcgaaaaaggcgacgtcggtcccgccggtccacgtggagcaaccggcgttcagggcgaacgcggaccgcccgggctagtattgcctggggaccccggccccaaaggggacccaggtgatcgagggcccatcggtctaacagggcgggcaggcccacccggggattccgggcctcccggcgaaaaaggagaccccggcaggccaggccccccagggcccgtgggcccacgcggaagagacggagaggtgggcgaaaagggagacgaaggccctccgggggatcctgggctgcccgggaaggctggcgagaggggactacggggagcccctggggtgcggggaccggtcggcgagaagggggatcagggagatcctggggaggatggccgcaatgggagccccggctcgtcaggacctaaaggagacaggggggagcccggaccccccggcccgcccgggaggctggtagatacaggtcccggcgcccgcgagaagggagagccgggcgatcgcggacaagagggccctcgaggcccaaaaggggatccaggacttccaggcgcacccggggagaggggcattgagggatttcggggacccccaggacctcagggagaccccggtgtgaggggcccagcgggcgagaagggcgataggggtccaccagggctggacggaagatccgggttagacggcaagcctggcgccgccggaccatcaggccctaatggagctgcgggaaaggccggagacccagggcgagacggtttaccgggtcttcgaggtgaacagggtctacccggacccagcgggcccccaggattacctggaaagcctggcgaggacgggaagcccggtttaaacggcaagaatggggagcccggcgaccctggtgaagatggaaggaagggggagaagggagactccggagcttccgggagagaaggacgcgacggtcctaaaggggagcgcggggccccaggtatccttggtccacagggcccacccggcctcccgggtcccgtgggtcccccaggccaaggattccccggagttcccggcgggaccggccccaaaggagacaggggtgagacgggtagcaagggtgagcaagggttacccggcgagcgggggttgcggggggagcccggatccgtgcccaacgtggatagactgctggaaactgccggcataaaggcgtctgccttgcgggaaatcgtagaaacctgggatgaatcctctggatcattcctgccagtccccgagcggcgccgaggtcctaaaggtgatagtggggaacagggtccacccggcaaagaagggcccattggctttccaggagagagaggcttgaagggagatcgcggcgatcctggccctcagggtccacctggcctggccttaggcgagcgggggccacctggaccatcaggcctggctggggagcccggcaaaccaggcattccaggactccccggaagggctggcggagttggtgaagcggggaggcccggcgagaggggcgagagaggagaaaagggtgagcggggagaacagggtcgtgacggaccacctggcctaccgggcactcccggccctccaggccctcctggacctaaagttagcgtcgacgaacctggccctggtctttccggggagcagggtcctccgggcttaaagggtgcgaagggggaaccagggtccaatggtgaccaggggccaaagggggatcgcggcgttccaggcattaagggcgaccgtggtgagcctggtccccggggccaggacgggaatccaggtcttccgggcgaacgcggaatggccgggccagagggtaaacctggactccaggggccccgaggcccacccggtccagttggtggacacggtgaccctggaccaccgggcgctcccggccttgctgggccagcgggaccacaagggccgtccggactgaagggggagccaggcgagacaggacctccaggccgcggtttaacaggacccacgggtgccgtgggcctaccgggtcctcctggccctagcggactcgtgggacctcaggggtccccgggcctgcctgggcaggtcggggaaacagggaagccaggggctcccggccgagacggagcttctgggaaagatggcgatcgagggagccctggggtccccggtagccctggactgcccggcccggtgggccccaaaggcgagcctggaccgacaggggcccccggccaggccgtagttggcctgcctggggctaaaggagagaagggcgcccccggggggttagcaggtgacctggttggtgaaccaggagctaaaggcgaccgaggcctgcctggacctcggggggagaaaggagaggccggcagagccggtgagcccggggaccctggggaggatggacagaaaggagccccaggacccaaaggcttcaaaggagacccaggcgtgggcgttcccggctcacccgggccccctggacccccaggagtgaagggggatctcggactgccggggttacccggggctccaggtgtggtcggattccctggacaaaccgggcctcggggagaaatgggacagccaggaccgagcggagaaagaggactggccggccccccaggccgggaaggcatccctgggccactgggcccccctggaccccccggttccgttgggccacccggggcctcgggtctcaagggcgataagggcgaccccggggtcggtctgcctgggcccagaggcgagcgcggagaacccggcatcagaggcgaggacgggaggccgggacaagaagggcccagaggccttacgggccctccaggcagccggggcgaacggggggagaagggagatgtgggctcagcaggattaaagggagataagggagactcagctgtgatcctggggccccccggaccccggggcgcgaaaggcgacatgggcgagcgcggaccacgaggattagatggcgacaagggcccccgaggagacaacggagaccctggcgataaaggatcaaaaggagagcccggagataaagggagcgcaggactccctggactccgtggcttgctcggcccacaaggacagccaggggctgcgggtatacccggagatccaggatctccagggaaagatggagtgcccgggattcggggggagaaaggcgacgtcggattcatgggcccaagaggattaaagggggagcggggggtcaaaggagcctgcgggctcgacggggagaagggtgataagggtgaggccggtccacccgggcgccccggtctggctgggcacaaaggcgaaatgggcgaaccaggcgtcccgggtcagtctggagcacccggtaaggaggggcttattggacccaaaggggaccgaggatttgacggccagcccgggccgaaaggcgaccagggggagaagggagagaggggtacacccggaataggcggattcccaggacctagtgggaatgacggcagtgccggcccaccaggacctccggggtctgtaggcccaaggggacctgaaggcttgcagggccaaaagggtgagagaggcccacctggcgagagagtcgtaggagctcccggggttcctggggcgcctggagaacggggtgagcaaggcaggcctgggcctgccggacctcgaggcgaaaaaggtgaggcggctctcaccgaggacgatatcagaggctttgtgcggcaggagatgagtcagcactgtgcttgtcagggacaatttatcgccagcggctcacggcccctgcccagttacgccgctgatacagcaggctcccagcttcacgccgttcccgtactccgggtgagccacgcggaggaggaagagcgggtgcctccggaagatgatgagtacagtgagtactcagagtattctgtggaggagtaccaggacccggaagcgccatgggactcggacgacccctgctccctgcccttggacgaaggctcttgtaccgcttatactcttcggtggtaccacagggcggtgactggttctacagaagcatgtcatccgtttgtttacggaggctgtggggggaacgccaatcggttcgggactagagaggcttgtgagcgcaggtgccccccccgggtggtgcagtctcagggtactgggaccgcccaggactag

SEQ ID NO: 3682 - DNA, 8739 bp, synthetic construct
  misc_feature 1..8739: note = source = /note="Description of Artificial Sequence: Synthetic coding sequence"
  source 1..8739: mol_type = other DNA
atgaccctgcggctgctggtggccgccctgtgcgccggcatcctggcagaggcaccccgggtgcgcgctcagcatagagagcgggtgacttgcactcggctatacgcggccgatatcgtgttcctgctggatggaagctcttctattggcagaagtaattttagggaagtgagatcgttcctggagggattagtgctccctttctccggagctgctagcgcgcagggggtgcggtttgccaccgtgcaatattctgatgacccacggactgaattcggcctggacgcgttgggttcaggcggcgacgtaattagagccataagggaactgagctataagggcggtaatacaaggaccggagctgccattcttcacgtggctgaccacgtcttcctcccacagctggcacggcccggcgtgccaaaggtgtgcatccttataactgatggaaagtctcaagacttagtggacaccgcggcccagcggctaaaaggccagggcgttaagttgtttgcggtgggaattaagaacgccgacccagaagagctcaagagggtggccagccagccaactagtgacttctttttcttcgttaatgatttttccatccttagaacccttctccctttggtgtcgagaagggtttgcaccacagctgggggcgttcctgtgactcgcccccctgacgacagcacgtctgcaccccgtgacttggttttgtctgagccctccagccagagcctgcgtgtacagtggaccgctgccagtgggccggtaacagggtataaagttcagtatacaccccttacaggcttgggacagccattgccttccgagcggcaggaggtaaacgtgcccgcaggggagacctctgtaagattgaggggactgcggccactgaccgagtatcaggtcacagtcatcgctctttacgctaattccattggcgaagcggtgagtggcaccgcccgaactactgccttggaagggcccgagctcaccatccaaaacactacagcgcactcactgctggtcgcctggagaagcgttccaggagccacaggatatcgggtgacatggcgagtactgagcggcgggcccacacagcaacaggagttgggccctgggcagggcagcgttctcttgcgggatctggagccaggaaccgattacgaagtgaccgtctcaaccctgttcggcagaagtgtcggcccagcaacctctctcatggcccggactgatgcatccgtggaacaaaccctgcgccctgtcatcctgggccctactagtatattgctgagctggaacctagtacctgaggctcgggggtaccgactcgaatggagacgggaaactgggctagagcccccacagaaagtcgtccttccaagcgatgtgacacgttatcagcttgacgggctgcagccgggcacggaatatcggttgacactgtacacactgctggaaggacacgaagtggcgacacctgccactgttgtgcccaccggacccgagctacctgtgtcgcccgtcacggacttgcaagccaccgagctcccagggcaaagagtgagagtgagttggtcccccgttcctggggctacccagtatcggattattgtgcgctctacccagggcgtcgaaaggacactggtgttgcctgggagtcaaaccgctttcgacctcgacgatgtacaggccgggcttagttacacggttcgggtctcagcacgggtagggccccgtgaaggaagtgcgtctgtgctcaccgtgcgaagagaaccagaaacccctctcgccgtgcctggattaagggttgtggtgtcagacgcaacccgggtgcgggtggcttggggccctgtccccggagcttcaggattccgaatctcctggtccaccggaagcggacctgaaagctcccagactctgcctcctgactcgacagcaaccgatatcacaggcctccagcccggaactacctatcaggtggccgtcagcgtgctaaggggccgcgaagagggcccagccgccgtgatcgttgctaggactgaccccttgggtccagtgaggacagttcacgtgacacaggcctcctcgagctccgtgactattacctggactcgagtgccaggtgctacaggatatagagtcagctggcacagcgcccatggccccgagaagtcccagcttgttagtggagaagcgaccgtggcggagctggatggactggagcctgataccgagtatactgtgcatgtgcgggcacacgttgcgggagttgacggtccacccgccagcgtcgttgtgcgcacagcccctgaacccgtgggacgcgtttcccgacttcagatcctgaacgcatcaagtgacgtgctgagaatcacatgggtaggagtaacaggtgccacagcgtataggctagcttgggggagaagcgaggggggccctatgaggcatcagatcctgcctggcaataccgactccgccgagataagaggactggagggcggtgttagctactctgtccgagtgacggcgctggtgggggatcgtgaaggcacacctgtatccatcgtcgtcacaacccccccagaagcccctcccgcccttggcaccctccacgtcgtacaaagaggagagcatagcctccgcctgaggtgggagcccgtgccaagagcacaaggattcctgttacactggcagccggaaggaggacaagaacagtccagagtgctgggacccgagttgtccagctatcacttggacggtttagagcctgccacgcagtatcgcgtccgactgagcgtgctaggccccgctggtgaggggccgagtgcagaagtgaccgcgaggacagagtccccacgggtgccatccattgaacttagggtcgtggacacaagtatcgatagtgtaacactggcttggacgcccgtttcgcgggcctcttcttacatactgtcctggcgaccgctccgtgggccagggcaggaagtgcccggcagccctcagactctgcccggaatcagctctagccaacgtgtgactggcttggagcccggcgtgtcctacatcttcagtttaactccagtcctcgacggagtccgcggccccgaggcatcagtgacacagacgccagtgtgtcctagaggactggccgacgtggttttcctaccacacgcaacacaagacaatgcccatcgggccgaggcgacacgtcgggtgcttgagagactagtgctggcccttggccctttggggccccaggcggtgcaggtcggactgctgtcttactcacaccgacccagtcccctcttcccactgaatggttctcacgatcttggcataattcttcagagaataagggatatgccttatatggatccctccggcaacaatcttgggacagcggtcgtgacagcacatcgctatatgctcgctcccgacgctccaggccggaggcaacacgttcccggtgtgatggtgctcctggtcgacgagccactgcgaggagacatctttagtcctatacgagaggcacaggcctcaggcttgaatgttgtgatgctgggcatggccggcgccgacccggagcagctaaggagactggcacccggcatggattctgttcagacttttttcgctgtcgacgacgggccatctttggatcaggcagtgtccggcttggccaccgccctttgtcaggcaagttttactactcagccccggccagagccctgcccagtgtattgcccaaagggccagaagggggaacccggcgagatgggcctcaggggtcaggtgggtcccccaggcgaccccgggctgccgggacgtaccggcgcgcccgggccacagggcccaccaggttccgctacggctaagggagagaggggtttccccggcgctgacggccggccaggcagccctggccgcgccggcaatccagggacaccaggggctccaggtcttaaggggagccctggccttccgggtccaaggggcgaccccggagaacgaggtccacgcggaccaaagggggagcctggcgccccaggacaagtcataggcggggaggggcctggcctgccgggcaggaagggcgacccaggcccttccggccctcccggacctcgtgggccactgggagaccctgggccccgtggtcctcccggccttccaggcacagctatgaagggcgataaaggcgacagaggtgagagaggccctcccggacccggcgaaggggggatcgcccccggcgagcccgggttacctggcctgcccgggagcccaggccctcaggggccggtcggcccacccggaaagaagggtgagaagggtgacagcgaggatggggcccccggcctgcccggtcagcctggatctcccggggaacagggaccccgggggccccccggggcaattggaccaaagggggataggggctttcccggccctttgggtgaagctggggagaagggggagcgtgggccacccggtcccgccggttcaagaggtttgccgggcgtggctggtaggccaggagcaaagggtccagaaggcccccccgggccaaccggtcgccaaggcgagaagggcgagcctggacggcccggagatcctgctgtggtcggtcctgctgtcgccggtcccaaaggcgaaaaaggggatgtgggacctgccggtcctcggggggctactggcgttcagggtgaaagagggccacctggcctggtgttgccaggggatccaggccctaagggtgaccctggcgaccgaggtccgattggtctcactggcagagctggcccaccaggagacagtgggcccccaggcgagaagggggaccctggcaggccaggacctcccggaccagtcgggccgcggggacgtgatggggaagtaggcgagaagggtgacgagggtccacccggcgatcctggactgccgggtaaagccggggagcggggcctccggggagccccgggcgttaggggccctgtgggcgaaaaaggtgatcagggggacccaggcgaggatggacgcaacggcagcccaggctccagtggaccaaaaggagaccgaggggagccgggcccccccggcccccctggacgcctcgtggacaccggtccaggggccagggagaagggggaaccgggcgatcgtggccaggaagggcccaggggccccaagggggatcccgggttacctggtgctccgggtgagcgtggcatcgagggattcaggggtccaccagggccccagggtgatccgggggtcagggggcctgccggcgaaaaaggagatagaggtccacccggactggacgggcggtctggactcgatgggaagcctggggcagccggacccagcggccccaatggcgctgcagggaaagcgggcgaccctggaagagatggcctccctggacttcggggcgagcaggggctgccaggccccagcgggccgcctggacttccaggaaagcctggagaggatggaaagccgggcctgaacggcaaaaacggcgagccaggggaccccggggaggacggcaggaaaggagaaaagggggattctggtgcctctggcagagaaggattccctggggtgcctggaggtacgggcccaaaaggcgaccgaggagagaccggaagcaagggcgaacaagggctgcccggggagagaggattaaggggggagccgggttccgtccctaacgtcgacagacttttggagactgcaggtatcaaagccagcgcattacgggaaatagtcgagacctgggacgaatcttcaggcagctttctgcccgttcctgaacgaaggcgtggaccaaaaggcgacagcggtgagcaggggccacctggtaaggaagggcccataggatttccgggcgaacgcggactgaagggtgatagaggagacccaggacctcagggccccccaggactggccttgggtgagagaggtccgcccggcccaagtggcctggcaggagaaccaggaaagccaggtatccctggcctgccaggccgcgctggtggcgtcggagaagccggtcgtccaggagagcgcggagaaagaggagaaaagggggagagaggggagcaggggcgggacggaccgccaggccttcccggaacgcctggcccacctggcccccctggacctaaagtctccgtcgacgagcctgggcccggcctctctggcgaacagggtccgcctgggctgaaaggagctaagggggagccaggaagcaacggggatcaaggccctaagggcgaccggggcgttcccgggatcaagggcgacaggggtgaacccggcccaaggggacaggatgggaatcccggcctgccaggggaacgcggtatggccggacctgaggggaaaccaggcctgcagggaccaaggggccccccaggccctgtaggtgggcatggggatcctggacctccaggggcccccggattggccggacccgcagggccccaggggccttctggattaaaaggtgagcctggcgagaccggaccacccggtcgaggactaactggccctacaggggcagtgggcctccccggcccccccggcccatctgggctggttggaccgcaaggatctcctggcctaccgggccaggtgggagagacgggaaaaccaggtgccccaggaagggacggggccagtgggaaggatggcgatcgcgggtctccgggagtaccaggctcacctggcctgccaggccctgtgggcccgaagggagaacctgggcccaccggggcccctggtcaggccgtcgtgggcctgccaggcgcaaagggggagaagggtgccccagggggactggccggcgacctggtcggagaacccggcgctaagggcgatcgaggtctccccggaccacgcggtgagaagggggaggctgggcgtgccggcgaaccaggagatcctggggaagacggacaaaagggtgcacccggccccaagggctttaaaggggaccctggggtgggtgtccctggcagtccgggtcctcctgggccccccggtgtgaaaggagatctcggactgccaggcctgcccggagcacccggagttgtgggtttcccaggccagaccgggccgcgaggggaaatgggccagccagggccatcaggggagagaggcttggccggtccgcctggacgggaagggattcccggcccactcggtccccctggccctcccggcagtgtgggacctcccggcgcgagtggccttaagggcgataagggggatccgggggtcggacttccgggaccccggggcgaacgtggcgagcccggaattaggggcgaggatgggcggccgggccaggaaggtccaagggggctcacaggcccgcctggatctcgcggggagagaggggaaaagggcgacgtcggcagcgccggtctgaaaggagacaagggggactctgctgttatcctcgggcctccaggaccaaggggggctaaaggcgacatgggtgagaggggcccgaggggtctggatggtgacaaaggtcctcggggcgataacggcgatcccggcgataagggctcaaaaggcgagcctggcgacaagggctcggccggcctgccaggactgcggggtctgttaggaccccagggccagcccggggctgctggaattcctggggatccgggaagccctggcaaggacggcgtccctgggattagaggcgaaaaaggcgacgtgggcttcatgggcccaagaggactgaaaggtgagaggggtgttaagggcgcttgtggcttggacggagagaagggagacaagggagaagccggcccacctggtagacccggactcgcaggtcataaaggcgagatgggtgagccaggagttcccgggcagagcggagcccctggcaaagaagggttaattgggccgaaaggagataggggctttgacggacagccaggacccaagggcgatcagggggagaaaggcgaaagaggcacacctggtattgggggcttccccggaccttctggcaatgatgggtctgctggcccgccgggcccccccggctcagttggccccagaggacccgaggggctgcagggccagaagggggaaagaggtcccccaggcgagcgggtagttggggcccccggggtgcctggggcacccggtgagaggggggaacagggtaggccaggtccagccggtccccgtggcgagaagggggaagccgccctgaccgaggacgatatcagaggatttgtgaggcaggaaatgtcccagcactgcgcgtgccagggtcaatttatcgcttccggttctcgcccacttccctcctacgccgcagacaccgcagggagccagttgcacgctgtcccagtattgcgggtgagtcacgcagaggaagaagaaagagttccacctgaggatgacgagtacagcgagtattccgaatactcagtggaagagtatcaggatcccgaggccccctgggattccgacgatccctgttccctaccgctggacgaaggaagctgcaccgcctataccttgcgttggtaccacagagcagtaacgggctcaacagaagcttgccacccatttgtgtacggtggctgcggtggaaacgcaaatagattcgggacccgcgaggcctgcgagcgacggtgccccccacgcgttgtccagtcccaaggaactggaactgcccaagattag

SEQ ID NO: 3683 - DNA, 435 bp, synthetic construct
  misc_feature 1..435: note = source = /note="Description of Artificial Sequence: Synthetic coding sequence"
  source 1..435: mol_type = other DNA
atgtggctgcagagcctgctgctgctgggcaccgtggcctgcagcatttcagcgcccgcccgttcaccttccccctccacccaaccttgggaacatgttaatgccatacaggaggctagacggcttctcaatctgtccagggacactgcagccgaaatgaacgaaactgtggaggttatatcagaaatgttcgacctgcaagaaccgacctgtctacagacccgattggaactatacaagcaaggactgagagggtcgctcactaaattgaagggccctctgacaatgatggcaagtcattacaaacagcattgtcccccaaccccagagacgtcgtgtgctacccagatcatcacttttgagtctttcaaggagaatctgaaagatttcctgctcgtgattccctttgattgctgggaacccgtccaagagtag

SEQ ID NO: 3684 - DNA, 1218 bp, synthetic construct
  misc_feature 1..1218: note = source = /note="Description of Artificial Sequence: Synthetic coding sequence"
  source 1..1218: mol_type = other DNA
atggaggccagcttcgtgcagaccaccatggccctgggcctgagctcgaaaaaagcatctagccgcaatgtggccgtggaacgtaaaaatctgattaccgtctgcaggttcagcgtcaagaccctcctggaaaaatatactgccgaaccgatcgacgattctagcgaggaattcgtaaacttcgccgccattcttgagcagattctgagccacaggttcaaagcatgtgcgccagctgggcccgtgtcctggttttcctccgacggccaacggggtttttgggattatatccgcctggcgtgcagtaaggtgccaaataactgcgtgtcttccatagaaaatatggagaatatctctacggcgcgcgccaagggcagggcatggatccgggtggcactgatggagaagcggatgtccgagtacattactactgctcttcgagacactcgaactactcgtcgtttctacgacagtggggctattatgctgagagacgaagccacaatcctgaccggcatgctgatcgggctctccgccattgatttttcattctgcctgaagggggaagtcctggatggcaagacaccagttgtcatcgattacacaccgtatcttaagttcactcagtcttacgattacctgacagatgaggaggagagacattcggccgagagctccacgtccgaggataacagtccagaacacccgtacctgcctcttgtgaccgatgaagactcgtggtatagcaaatggcacaagatggaacagaaattcagaatcgtctatgctcaaaagggctacctcgaagagctcgtacgcctgcgggagtcgcaactgaaagatctcgaggcagaaaaccgcagactgcagttgcaattggaggaggcggccgctcagaatcagagagaaaagagggaactcgaaggcgtgatcctcgagctgcaggagcagctgaccggattgatcccttcggaccatgccccactcgcccagggaagtaaggagcttacgacaccattggtgaaccagtggccaagcctggggacactgaatggtgcagaaggtgcttcaaattctaagctgtatcggaggcactctttcatgagcaccgaacctctttcagccgaagccagtcttagcagtgactctcaaagactgggcgaagggacccgtgacgaagagccatggggccctatcgggtcttctgagcctaattag

SEQ ID NO: 3685 - DNA, 603 bp, synthetic construct
  misc_feature 1..603: note = source = /note="Description of Artificial Sequence: Synthetic coding sequence"
  source 1..603: mol_type = other DNA
atgagccccgagcccgccctgagccccgccctgcagctgctgctgtggcatagcgcgctttggactgttcaggaagccaccccgctgggtccagctagttcgctcccgcagtcatttttgttgaaatgcctggaacaggtgagaaaaatacagggcgacggcgctgctctccaggagaagctgtgcgccacctacaagctctgtcatccggaggaactcgtgctgttgggacacagtttgggaatcccctgggcacccctctcaagctgtccttcacaggccctgcagctagctgggtgcttgagccagctgcactcaggtctgtttctgtaccaaggcctactgcaggccttagaaggtatcagccccgaattgggacccacgctggacacactgcaactggatgtggctgacttcgccacaacgatctggcaacagatggaggagttgggtatggcccccgcattacagccaacccagggagctatgcctgccttcgccagcgccttccagcgccgtgccgggggcgtgctggtggcaagtcacctgcagagctttctggaggtgtcttatagggtgctccgtcacctggctcaaccatag

SEQ ID NO: 3686 - DNA, 516 bp, synthetic construct
  misc_feature 1..516: note = source = /note="Description of Artificial Sequence: Synthetic coding sequence"
  source 1..516: mol_type = other DNA
atggccggccccgccacccagagccccatgaagctgatggccctgcagctgctgctgtggcatagtgccctgtggactgtgcaggaggccaccccactgggaccagcctcctctctgccgcaaagcttcctcttaaaatgcttggaacaggtccgcaagattcagggcgacggtgccgcactgcaggaaaaactggtctctgaagccggctgcctctcacagctgcacagcggactgtttctgtatcagggcctgcttcaggccctggaaggaatctctccagaactgggtccaacgttggacaccctgcaactggatgtggccgactttgccacgacaatctggcagcaaatggaagaactaggtatggccccagcacttcagcctacccaaggggccatgcccgcattcgcgtccgcattccaacgaagggccggaggcgtgcttgtcgccagccacttgcagtcttttttagaggttagctacagggtcctgagacatcttgcccagccttag

SEQ ID NO: 3687 - DNA, 615 bp, synthetic construct
  misc_feature 1..615: note = source = /note="Description of Artificial Sequence: Synthetic coding sequence"
  source 1..615: mol_type = other DNA
atggccggccccgccacccagagccccatgaagctgatggccctgcagctcctgctgtggcattcagctctttggacagttcaggaagctactcctctcggaccagccagttccctgccgcagtcatttctacttaaatgcctcgagcaggtacgcaagattcagggtgacggcgccgccttacaggagaaattatgcgccacctataaactgtgccaccctgaggagctagtgctgctggggcactctctggggatcccctgggctccattgtccagctgcccatctcaggctctccagctggccgggtgtctgtcccaactgcactcgggtttgtttctgtaccagggactgctacaggctctggagggaatttctcctgaacttggtccaaccctggataccctgcagttggacgtcgcggactttgcaaccacaatctggcagcagatggaggagctgggaatggcacccgcattgcagccaacccagggcgctatgcccgcttttgcgtctgcattccagaggcgtgccggcggagtcttggtggcttctcacctgcagagcttcttggaggtgtcgtatagagtcctccgccatcttgcccagccatag

SEQ ID NO: 3688 - DNA, 3696 bp, synthetic construct
  misc_feature 1..3696: note = source = /note="Description of Artificial Sequence: Synthetic coding sequence"
  source 1..3696: mol_type = other DNA
atgcggctgctggccaagatcatctgcctgatgctgtgggccatctgtgtcgcagaggattgcaacgaacttcctccaaggagaaacaccgagattctgactggatcttggtcggaccagacatacccagaaggcacccaggctatttacaaatgcagaccaggctacaggtcgcttgggaacgtcattatggtgtgcaggaagggcgaatgggtcgctctgaatccccttcgcaagtgtcagaagagaccctgtggccaccctggagacactccattcggaacattcacactgactggaggaaacgtgttcgagtacggggtcaaagccgtctacacatgtaatgagggatatcagctgctaggcgaaatcaactaccgagagtgcgacacagatggatggaccaatgatattccaatttgcgaagtggtgaaatgtctgcccgtcaccgcccccgagaacggcaagatcgtctcctctgccatggagcccgacagggaataccacttcggacaggcggtccgatttgtttgcaactctggttacaaaattgagggcgacgaggaaatgcactgtagcgacgatggcttctggagcaaggagaaaccaaagtgtgtggagattagctgcaagagtcctgatgttatcaacggtagccccatctcccagaaaatcatatacaaagaaaacgagcggtttcagtacaagtgcaacatggggtatgaatactctgagaggggtgatgccgtctgtactgagagcggctggcgtcctctcccctcttgtgaggagaagtcctgcgacaatccctacatcccaaacggcgactattcgccactcaggatcaaacaccgaacgggggatgagatcacttaccaatgcaggaacggattttaccccgcaacaagaggaaatactgccaaatgtaccagcacaggatggattccggcccccaggtgtacgttaaaaccttgcgattacccagatatcaaacatggcggtttgtaccatgagaatatgcgcaggccatacttccccgttgcagttggcaaatattactcttactattgtgacgaacacttcgaaacccctagcgggtcctactgggaccatatacactgtactcaggacggctggtcacctgcagttccatgcctaaggaaatgctatttcccttatctagagaatgggtataaccagaatcatggccggaaattcgtgcagggaaagtccatcgacgttgcctgtcaccccggatacgccctgccgaaagctcagactaccgtgacatgtatggaaaatggttggtccccaacccctagatgcattcgtgtgaaaacctgctcgaagtcctccatagacatagagaatgggttcatttccgaatctcagtacacatacgcccttaaggaaaaagctaagtaccaatgcaagctggggtacgtcactgctgacggtgaaacctccggctccatcacctgcggaaaggacggttggtctgcccaacccacgtgtataaagagttgcgatatacctgtgtttatgaatgcacgcacaaagaatgactttacttggtttaaactgaatgataccctggattacgaatgtcatgacggttacgaaagcaacactggctcgacaacagggagcatagtgtgcggatacaacggatggagcgacctgcctatatgttacgagcgcgagtgtgagctgcctaagattgacgtgcacttggtgcccgatcgaaaaaaggaccaatacaaggtgggggaggtgctgaagttctcgtgcaagcctggatttacgatagtgggtcctaacagcgtgcagtgttatcacttcgggctcagtcccgatctgcctatatgcaaggagcaagttcagtcctgtggacccccaccagagctgctgaatggcaatgtcaaggagaagaccaaggaggaatacggccacagtgaggtggttgaatactattgcaatcctcgattcctgatgaaagggccaaacaagattcaatgcgtggatggcgaatggacaaccctgcctgtgtgtattgttgaagagtctacgtgtggcgatatacctgagctggagcacggttgggcgcaattaagctcccctccatattattacggggactctgtcgaatttaactgttcagagagtttcactatgattgggcacaggtccattacatgcatccacggtgtttggactcaacttccacagtgtgtggctattgataaactgaaaaagtgtaagtctagtaatctcatcatcttagaggaacatcttaaaaacaagaaagaatttgatcacaattccaacattcgctatcgctgccgaggcaaagaaggctggattcacacagtatgcatcaatgggagatgggatccagaggtgaactgtagcatggcccagattcagctttgcccacccccaccgcaaatcccaaacagtcacaatatgacgacgaccctcaactacagggacggcgaaaaagtgtctgttctgtgccaggagaactacttgatccaggagggggaggagatcacctgtaaagatgggcggtggcagtccattccactgtgtgtggagaaaattccgtgttcgcagcccccccagatcgagcatggtactattaattcatcgcgttcatctcaggaatcatacgcccatgggactaagctgtcatacacatgtgaaggcggattccggatctcagaggaaaacgagactacatgttacatgggcaagtggtcctcaccaccgcagtgcgagggactgccctgcaagtctccgccggaaattagccacggcgtggtggcccatatgtccgattcataccagtatggggaggaagtaacatacaagtgctttgaaggattcgggattgatggacccgccattgccaagtgcctgggcgagaagtggtcacacccaccctcttgtattaagactgactgcttaagtcttcctagcttcgaaaacgctattcccatgggcgagaaaaaagatgtatacaaagctggagaacaggtgacttatacgtgtgctacatattataagatggatggggcttcaaatgtgacctgcatcaactcgcggtggactggtcgacctacatgccgggacacttcatgcgtcaaccctcctacagtccagaacgcctacatcgttagcagacaaatgtcaaagtaccctagcggcgaaagagtgaggtatcagtgtaggtctccttacgagatgtttggagatgaggaagttatgtgtttgaatgggaattggacagagccaccgcaatgtaaagatagtactggcaagtgcggaccaccccctcccatcgacaatggagatatcacaagcttccccctttctgtctacgcaccggcttcttcagtggaatatcagtgccaaaatctataccaactggaaggcaacaaaagaattacctgcagaaatggccagtggagcgagccccctaaatgcctgcacccatgcgtgatcagcagggagataatggagaattacaatatcgccctgagatggacagctaagcagaagctctactccagaacaggcgaatccgtcgagttcgtgtgtaaacgcgggtatcgcctttcgagtagatcacacacattacgcaccacttgctgggacgggaagcttgaatatccaacctgcgccaagcgatag

SEQ ID NO: 3689 - DNA, 1350 bp, synthetic construct
  misc_feature 1..1350: note = source = /note="Description of Artificial Sequence: Synthetic coding sequence"
  source 1..1350: mol_type = other DNA
atgcggctgctggccaagatcatctgcctgatgctgtgggccatctgcgtcgccgaagactgcaatgaactgcctccacggagaaacactgagatcttaactggctcctggagtgaccagacataccctgaaggcacccaggccatatacaaatgccggcccggataccgtagtctgggtaatgtcataatggtttgccgcaaaggtgagtgggttgcacttaacccccttagaaaatgtcagaaaagaccatgcggtcatcctggggatacaccgtttgggactttcacccttacaggaggtaatgtgttcgagtatggggtcaaggctgtgtatacatgtaatgagggctatcagcttctcggagagattaattaccgggaatgtgataccgacggctggaccaatgacattccaatttgtgaggtggtcaaatgtctgcctgtcaccgcaccggaaaacggaaagattgtgagttctgccatggaaccagacagggaataccatttcggtcaggcagtacgctttgtttgcaactcaggttacaagatcgagggagacgaggaaatgcactgttcagacgatggcttttggagcaaggagaaaccaaaatgcgtcgaaatcagttgtaagagccccgatgtcatcaacggctctcccatttctcagaaaatcatttacaaggagaatgaacggtttcagtacaaatgcaatatgggctatgaatatagtgaaagaggagatgccgtgtgtaccgagtcaggctggcggcctctgcccagttgcgaggagaagagttgcgacaatccttacatccccaacggtgactactctccacttaggataaagcataggactggcgatgagatcacgtatcaatgtagaaatggattttatcctgcgactcgcggaaatactgctaaatgcacttctaccgggtggatacccgccccacggtgcactctgaagccttgtgattacccagatatcaagcacggcggcctgtaccacgagaacatgcgacggccgtattttcctgtcgctgtcggcaagtattactcgtattactgcgatgagcacttcgagaccccatccgggtcctactgggatcacatacactgtactcaggatggctggtctcccgccgttccctgtctgcgaaagtgttacttcccatacttagaaaacggatacaaccaaaaccacggccggaaatttgtacagggtaaatccattgatgttgcctgtcacccaggatacgccctgcctaaggcacaaaccacagtgacgtgcatggaaaatggctggtcacctacccccagatgcattagagtcatcttccagttgtag

SEQ ID NO: 3690 - DNA, 1350 bp, synthetic construct
  misc_feature 1..1350: note = source = /note="Description of Artificial Sequence: Synthetic coding sequence"
  source 1..1350: mol_type = other DNA
atgcggctgctggccaagatcatctgcctgatgctgtgggccatctgcgtagcagaggactgcaatgagcttcccccgcggcgtaacacagagatactaactggatcatggagcgatcagacatacccggaaggcacccaggcgatctataagtgccgccccgggtaccggtctctgggaaatgtgatcatggtgtgccggaagggggagtgggtcgctctcaaccctctgcgaaagtgccaaaaaagaccgtgcggacatccaggcgatactccatttgggacctttactctgacggggggtaatgtgtttgaatatggggtgaaggcagtgtacacctgcaacgagggttatcagctgctgggtgaaatcaattatcgtgagtgtgacaccgatggctggacaaatgatatccccatctgtgaggtggtgaagtgtttacctgttaccgcccccgagaacgggaagatcgtcagctccgctatggagccagatagggagtaccattttggtcaggcagtcaggttcgtttgcaacagcgggtacaagatcgagggcgatgaagaaatgcactgcagtgacgacggcttttggagcaaagagaagccaaaatgtgttgagatctcttgcaagagtcccgatgttatcaatggcagcccaatcagccaaaaaatcatctacaaagagaacgagcggttccaatacaagtgtaacatggggtatgagtacagtgaacgcggtgacgccgtgtgcactgaatccggctggaggcccctgccaagctgcgaggagaagagttgtgacaacccttatattccaaatggggactactcacccctgcggatcaagcataggacaggtgacgaaatcacttaccagtgccggaacggcttttaccctgccacacggggaaacactgccaaatgcacgagcacaggttggatacccgcccccaggtgcaccttaaagccatgtgattatcctgatataaagcatggcgggctctaccacgagaatatgcgccggccatattttccagtagccgtgggcaagtattattcatattactgcgacgaacatttcgagaccccaagcggttcgtattgggaccatatccactgtacacaggatggctggtccccggctgtcccatgtcttaggaaatgttacttcccatatctggaaaacggctacaaccaaaatcacggcagaaagttcgtgcaaggaaagtctatcgacgtggcctgtcatcccggatacgctttacccaaagcacaaaccactgtcacctgcatggaaaacgggtggtcacccaccccacgttgcatcagggtgtcttttaccctgtag

SEQ ID NO: 3691 - DNA, 573 bp, synthetic construct
  misc_feature 1..573: note = source = /note="Description of Artificial Sequence: Synthetic coding sequence"
  source 1..573: mol_type = other DNA
atggccgccggcgagctggagggcggcaagcccctgagcggcctgctgaatgccctggcccaggacacatttcatggttatccgggaattaccgaggagcttttacgtagccaactgtatccggaggtgcctcccgaggaatttaggccgttcctggctaagatgcgagggattcttaaatctatcgctagtgcagacatggattttaatcagctggaagctttcctgaccgcccagactaagaaacaaggcggcatcacaagcgaccaggccgccgtgatcagcaaattttggaagagccataagaccaagattcgcgagtctctgatgaatcagtctcggtggaatagtgggctgcgcggactgagttggagagtggacggcaagtctcagtcccgacatagcgcccagattcacactccagttgctatcatcgagctggagcttgggaagtacgggcaggagagcgagttcctctgcctggagtttgatgaagtgaaagtcaatcagattctgaagactctgagtgaggtggaggagtcaatcagcaccttaatctcacagccaaactag

SEQ ID NO: 3692 - DNA, 117 bp, synthetic construct
  misc_feature 1..117: note = source = /note="Description of Artificial Sequence: Synthetic coding sequence"
  source 1..117: mol_type = other DNA
tgacaggagagcgagttcctgtgcctggagttcgacgaggtgaaggtcaaccaaatcctgaaaactctaagcgaggtggaggagagcatttcaactttgatttcacagcctaattag

SEQ ID NO: 3693 - DNA, 99 bp, synthetic construct
  misc_feature 1..99: note = source = /note="Description of Artificial Sequence: Synthetic coding sequence"
  source 1..99: mol_type = other DNA
tgatgcctggagttcgacgaggtgaaggtgaaccagatcctgaagacactaagcgaggtcgaagaaagcatttcaaccctgatctctcagcccaactag

SEQ ID NO: 3694 - DNA, 117 bp, synthetic construct
  misc_feature 1..117: note = source = /note="Description of Artificial Sequence: Synthetic coding sequence"
  source 1..117: mol_type = other DNA
tgacaggagagcgagttcctgtgcctggagttcgacgaggtgaaggtcaatcagattttgaagaccctctctgaagtggaggaatccatctcgacacttatctctcagcctaactag

SEQ ID NO: 3695 - DNA, 480 bp, synthetic construct
  misc_feature 1..480: note = source = /note="Description of Artificial Sequence: Synthetic coding sequence"
  source 1..480: mol_type = other DNA
atggccgccggcgagctggagggcggcaagcccctgagcggcctgttgaacgccctggcccaggacacattccatggttatccgggcattaccgaagagctgctgagatcccagctatatccagaagtgcctccggaagagtttaggccttttctggccaagatgcgtgggatcctgaaatctattgctagtgccgacatggacttcaaccagttagaggcttttttgactgcgcagacaaaaaagcagggtggaatcacttctgaccaggcagcagtgatttccaagttctggaagtcacataaaacaaagatccgggagtcgcttatgaaccagagtaggtggaattctggactgcgtggtctcagctggcgtgtcgacgggaaaagccagtcccgccacagcgcccagattcacactccagtggcaatcattgagctggaactaggcaaatacggccaagtgcactgcaatcagtag

SEQ ID NO: 3696 - DNA, 591 bp, synthetic construct
  misc_feature 1..591: note = source = /note="Description of Artificial Sequence: Synthetic coding sequence"
  source 1..591: mol_type = other DNA
atgcggctgcccctgctggtgagcgccggcgtgctgctggtggccctgcttccctgccccccttgccgcgccctcctgtcaaggggtcccgtgcctggtgctcggcaagccccccagcatcctcagcccctggacttttttcagcctccaccccagtcagagcagccacagcagcctcaggcccgtccagttctcctccgtatgggcgaagagtatttcttacggctcggcaacctgaataaaagcccagccgctcccctgtcacccgccagttctctccttgcagggggaagcgggtcaagacctagccctgagcaggctacagcaaattttttcagggtgcttctgcagcaattacttttgccacgcagatctctggattcccccgccgcacttgcagagcgcggtgcaaggaatgccctcggaggccaccaagaggcccctgaacgcgaacgccgttctgaggagccacccatatcactagatctcaccttccaccttctgcgcgaggtcctcgagatggcccgggcagagcagctcgcacagcaggcgcattccaatcgaaagctcatggagatcatcggcaaatag

SEQ ID NO: 3697 - DNA, 4443 bp, synthetic construct
  misc_feature 1..4443: note = source = /note="Description of Artificial Sequence: Synthetic coding sequence"
  source 1..4443: mol_type = other DNA
atgcagcggagccccctggagaaggccagcgtggtgagcaagctgttctttagctggacacgtcccattctccgcaaaggctacagacaaaggctggagctcagtgatatctaccaaatcccctctgtcgactccgctgacaacctgtcagaaaaactcgagagagaatgggaccgcgaactcgcctccaagaagaacccaaagttgataaacgcccttcgacggtgtttcttctggaggttcatgttctatgggattttcttgtatctgggagaggtaacaaaggccgtccagcctctgctcctgggtcgcatcatcgcgagctacgatcctgataataaagaggagagaagcattgccatatatcttggaatcggcctttgcctcctgtttatcgtaagaacactattactccaccccgccattttcgggttacatcatattggtatgcaaatgcggatcgccatgttctcgctcatatacaaaaagactcttaagctgtcctcccgggtgctggataagatatccataggacaactggtgagcctgctatctaacaatctgaataaatttgacgaaggtctggcgctggcccatttcgtgtggattgcacccctccaagtggccctgttgatggggttgatctgggagttgcttcaggcctctgccttttgtgggctggggttcttaatcgttctggccctgttccaagcggggttgggtcgtatgatgatgaagtaccgggaccagcgggccgggaagatctcagaaaggctggtgattactagcgagatgattgagaatattcaaagtgtcaaagcatattgctgggaagaagccatggaaaaaatgattgagaatctgcgccagaccgaactgaaactcacaaggaaggcagcttatgtccgctatttcaattcaagcgccttcttcttcagcggattcttcgtggtgttcttgtcagtcctgccatacgccctcataaagggaatcattctgcgcaaaatcttcacaaccatatcgttttgcatagtgttacgaatggcggtgacacgtcaattcccttgggcagtgcagacttggtacgattctctgggcgccattaataaaatacaggacttcctacaaaagcaggaatacaagaccttggaatacaatctcactactaccgaggtcgtaatggaaaacgtgaccgctttttgggaagaagggtttggcgagctgttcgagaaggccaagcagaacaacaacaaccggaagaccagtaacggggacgattcattattcttttcaaacttctccctgctgggaaccccagtgctgaaggatatcaattttaaaattgagagggggcaattgctcgcggtcgcgggttcaacaggggctggcaaaacctcattactgatggttataatgggcgaactcgaacctagtgaaggtaaaattaagcactccggcagaattagcttttgtagtcagttcagctggatcatgcctggaacaattaaggaaaacattatcttcggagtcagctatgacgaatatcggtacagaagcgtcattaaggcctgccagctggaagaggacatctccaaatttgctgaaaaagataacatcgtgctcggcgaaggggggattacactttctggcggccagagagcacgtatttcactagcccgggctgtgtataaggatgcagacttgtacctgctggactcccctttcggctatctcgacgtgcttactgagaaggagatctttgaatcgtgtgtgtgtaaactgatggctaacaaaacaaggattctggtgacgagcaaaatggagcacctgaagaaagcagacaagattctcatcttacatgaaggaagcagctacttttacggaaccttctcagagctgcagaacctgcagcccgactttagcagcaaactaatgggctgtgatagtttcgatcagttctcagccgagcgccgaaattcaatcctgactgagactctccaccgtttctcgcttgaaggggacgctcctgtcagttggactgagacgaaaaagcagagctttaaacaaactggtgaattcggggaaaaaaggaaaaattctattcttaatcccatcaactctattaggaaattttcaattgttcagaagacgccactgcaaatgaatggaatcgaagaagattccgatgagccactggagcgccgtctgtcgctcgtgccagattcagaacaaggggaggctatcttgcctaggatcagcgtgatctccactgggcccactctgcaggcaaggaggcgccaatccgtcctcaatctgatgacacatagcgtgaaccaaggacagaatatccatcgcaagactaccgcgagcacaaggaaggtgagccttgccccacaggcgaatctgactgagctggacatttatagcaggagattgtcccaggaaactggattggaaatttcagaggagatcaacgaagaggacctgaaggagtgtttctttgacgatatggagagtattccggccgtaacaacatggaatacataccttagatacatcacagtacacaagtctctaatttttgtattaatttggtgcttggtgatcttccttgcggaggtagcagcctcactcgtcgtgctttggcttttaggcaatacaccactccaagataagggaaattccacccactcaaggaacaacagctatgccgtgattattacaagcacgtccagctattatgtgttctacatatatgtgggtgtggccgatacgcttctggcaatggggttctttagaggcttgcccttggtgcacaccttaatcacagtttccaaaatcctgcaccataaaatgctgcatagcgtgctccaggcaccaatgagtaccctcaacacactgaaggccggcggaatccttaatcggttcagcaaagacatagctatcctggatgatctgctgccactcaccattttcgactttattcaactgcttctaatcgtcatcggcgctattgctgtggtggccgttctgcaaccgtatatttttgttgccactgttccagtgattgttgcctttatcatgcttagagcttactttctgcaaactagtcagcagctgaagcagctcgagtccgaagggcggagtcccatatttacgcacctggtgacctccttgaaggggctgtggactttgcgcgctttcggacgccagccctacttcgagaccctgttccataaggcattaaacctgcatacagccaattggttcctctatttgagcaccctgaggtggtttcagatgaggatagaaatgatctttgtgatttttttcatcgccgtgaccttcatttcgattttaacaactggtgagggcgagggacgtgttgggatcatccttacccttgccatgaatataatgtccacgctgcagtgggccgtcaatagttcgattgatgttgacagtctcatgagatccgtgtcgagagtgtttaaatttatcgatatgccaacagagggaaagccaaccaagtctactaagccctataaaaatggccagctgagtaaggtgatgatcatcgagaactcccacgtgaagaaggatgacatctggccaagcggcggccagatgacagtcaaagacctgaccgctaaatacaccgagggtggcaacgcgatcctggagaacatttcattcagtatttcccctggccaacgtgtcgggttactgggccgaacaggaagtggaaagtcgaccctcctcagtgcctttctcagattactgaataccgagggcgaaatccagatcgatggtgtctcctgggactctattacattacagcagtggaggaaagcctttggcgtgatccctcaaaaagtttttatcttttccggaacattccggaagaacttagatccgtatgaacagtggtccgatcaagagatttggaaagtggccgatgaagtgggtctacgttcagtaatagaacagttccccgggaagttggattttgtgcttgtggacggtggatgcgtgctctcccatgggcacaagcagttgatgtgcttggctcgctccgtcctgtcgaaagccaaaatcttgctgctggacgaaccctcagcccacttggaccccgtgacatatcagataataaggcggaccctcaaacaagcttttgctgattgcacggtgattctatgtgaacatcgaatcgaggccatgctggaatgccagcagttcctggtcattgaggagaataaggttcgccagtacgatagcattcagaaactattgaacgagcgcagcctgtttaggcaggctataagtccttctgatcgggttaagctattccctcacagaaacagctcaaaatgcaagtccaagccacagatcgctgctctgaaggaagagactgaggaggaggtgcaggacaccaggttatag

SEQ ID NO: 3698 - DNA, 4317 bp, synthetic construct
  misc_feature 1..4317: note = source = /note="Description of Artificial Sequence: Synthetic coding sequence"
  source 1..4317: mol_type = other DNA
atgcagcggagccccctggagaaggccagcgtggtgagcaagctgttcttttcttggaccagacccatactgcgcaagggctaccgacagagactggaactgtcagacatttaccagattcctagtgtagatagcgcggacaacttatctgagaagttagagagagagtgggacagagagctggcctctaaaaagaaccccaagctgattaatgccctaaggcgctgttttttctggagattcatgttctacggcatttttctgtacctcggggaagtaactaaggctgtgcaacccctattgctaggccggatcatcgcatcctatgacccagataacaaagaggaacgttccattgcgatctacctgggaatcgggctatgcctgcttttcattgttcggactctcttactccatcccgcgattttcggtctacatcatatcggcatgcagatgagaatcgcgatgttctccctgatctacaaaaaaggcctcgctctcgcccacttcgtgtggatcgcacctctgcaggtagccctgctgatgggtctgatctgggagctgcttcaggccagcgcattctgcggccttggcttcctcattgtgttagccctttttcaagctgggcttggacggatgatgatgaagtatcgcgaccagcgcgctggaaagattagtgagagacttgtgataacatcagagatgattgagaacattcagagtgtgaaggcctattgctgggaggaagcgatggagaaaatgatcgagaatctacgccaaaccgagctgaagctcacacgcaaagctgcatacgtgcgctactttaatagctcagcttttttctttagtggattcttcgtggtgttcctttcagtgctcccttatgccctgatcaaaggaataatcctccgaaagatctttacaaccatctcgttttgcatcgtcttgaggatggccgtcacgcgtcagtttccatgggctgtccaaacctggtacgacagcctcggagctataaataagatccaggacttccttcagaaacaggagtacaagacgctggaatacaatctgacgactactgaggtcgtaatggagaatgtgactgcattttgggaagaaggcttcggtgagttgtttgaaaaggctaagcaaaataataataaccgcaagaccagtaacggcgacgactccctattcttttccaacttttccctgctcggtacccccgttctcaaggacataaacttcaagatcgagcggggacaactactcgcagtggcagggagtacaggcgcggggaaaacgtccctcctcatggtgattatgggcgaacttgagccctctgaaggtaagattaagcattctggccgaataagtttctgctcacagttcagctggataatgcctggcacaataaaagagaatatcatcttcggagtatcttacgacgagtatcgatataggagcgttataaaagcatgtcagctggaagaggatatctcaaaattcgcagaaaaggacaatatcgtcctgggagagggcggtatcacactgtccggcggacagagagcacggatatccctagcccgcgctgtttataaggacgcagatctgtatctgttggacagccctttcgggtacctggacgtgctcacagagaaagagatcttcgagtcatgcgtctgtaaattaatggctaacaagacacgaatccttgtcacatcaaaaatggagcacctgaaaaaggctgataagatcctcattctgcatgaggggtcctcgtacttttacggtactttcagtgagctccagaacttacaacccgacttctcatcaaaactcatggggtgtgactccttcgaccagttttccgccgagagaagaaactccatccttaccgagaccctgcaccgtttcagcttggaaggtgatgctccagtttcatggactgagaccaagaaacagagcttcaagcagacaggggagttcggtgaaaagcgcaaaaattctattttaaatccgattaacagcatcagaaagttttctatcgtccagaagactcctctccagatgaacggcattgaagaggattcagatgagcccctggaaaggcggttgagcctggtaccggatagtgaacaaggcgaggccattcttcctcgcatcagtgtgatctctaccggccccactctccaagccagaagacggcagtccgtgctgaatctgatgacacactcagtcaatcaggggcaaaatattcatcgaaaaacaaccgcaagcacgcgtaaagtatccttggccccccaggctaacctgactgagctggatatctacagtcgaaggctttctcaggaaacgggactggaaatatctgaggagataaacgaagaggaccttaaggaatgctttttcgatgacatggagtccattcccgcagttacaacgtggaatacatacctgcgctatataacggtgcacaagagtctgatcttcgtgctgatctggtgtctggtcatctttctcgccgaggttgcagcaagtcttgtggttttatggctgctcggcaataccccactacaagataaagggaattcaacgcacagcaggaataacagttatgcagtaatcattactagcacaagctcatactacgtgttttatatctatgtcggcgtggcggacacccttctagccatgggtttcttcaggggactgccactggtgcatacactgatcaccgtgagtaaaatactccatcataaaatgttgcacagcgtgctgcaggcacctatgagcactctcaatactcttaaagctggcggtatcctgaatcgcttctccaaagatattgccattctggacgacctgctgccactgactatctttgactttattcaactgcttctcattgtgattggagccatagcagttgtggccgttcttcagccgtatatattcgtggccaccgtcccagtaatcgtggccttcataatgctgcgtgcttacttcttgcagactagccagcagctgaagcagctggagtctgagggacgctctccaatctttacgcacctcgtgaccagtctcaagggactgtggacactgcgggcattcggtaggcaaccatattttgagaccctcttccacaaggcactaaacctacacaccgcaaactggtttttgtatctgtctactctcaggtggtttcagatgcggatcgagatgatcttcgttattttcttcatcgcggtcaccttcatcagcatcctgacaactggcgaaggagagggacgggtcggaattatcctgacactagccatgaacattatgtccacacttcaatgggccgtaaactctagcattgatgtggattccctgatgaggtcagttagcagggtgttcaagttcatagatatgcccactgaggggaaaccgacaaagagcacgaagccctacaagaatggccagttgtccaaggtcatgattatcgaaaatagtcacgtgaaaaaggatgatatatggccttcaggaggccagatgacagtgaaggacctcaccgccaagtacactgaggggggtaatgccatacttgaaaatatttcattttccatctctcctggacagagggtcggtctcctggggcgtacgggttcaggcaagagcaccttactgagcgcctttctccgactgctgaatactgagggcgaaatccaaattgacggcgtctcatgggactcaatcacactgcaacagtggcgtaaggcatttggcgtgatcccccagaaggtctttatatttagcgggacctttcgtaagaacctggacccctatgagcagtggtctgatcaggaaatctggaaagtggctgatgaggtggggcttcggtcagtgattgagcaattccctggcaaacttgactttgtgctggtggacggtggatgcgtactaagccacgggcacaagcagctgatgtgcctggcacgttccgtgctgtccaaggccaaaatactactgctggacgagccgagcgcccacctggaccccgttacataccagattatccggagaactctgaaacaggctttcgccgattgcactgtcattctctgcgagcacaggatcgaagccatgctggagtgccagcagttcctagttatagaagagaataaagtaagacagtacgactcaatacagaaactcctcaacgagcgctccctcttccgtcaggccattagcccatctgaccgagtcaaactgttcccgcatcgtaacagtagcaaatgcaagagtaaaccccagatcgccgccctcaaatag

SEQ ID NO: 3699 - DNA, 4260 bp, synthetic construct
  misc_feature 1..4260: note = source = /note="Description of Artificial Sequence: Synthetic coding sequence"
  source 1..4260: mol_type = other DNA
atgcagcggagccccctggagaaggccagcgtggtgagcaagctgttcttcagctggacgaggccaatactacggaaaggctaccgtcagcggctcgagctgtcggatatttaccaaatcccaagcgtggactctgctgataatttatcagaaaaactggagcgggagtgggacagagaactggcgtcaaagaaaaatccaaagctgattaacgcactcaggcgctgtttcttttggaggtttatgttttatggcatttttctctaccttggggaggtgacaaaagcagtgcagcctctcctgctgggccgtataatcgcgtcctatgacccagacaacaaggaggagcgctccatcgccatatacctgggtatcgggctctgcttactgtttatagtgcgcaccctgttgttacaccccgccatcttcggacttcaccacattggaatgcagatgcgcatcgccatgttttctttgatctacaaaaaaaccttaaagctttccagccgagtgctcgacaaaatatcgatcggtcaactggtttctctgctctccaacaaccttaataagtttgacgagggactggccttagcccactttgtttggatcgcacctctgcaagtggccctgctaatggggcttatttgggaactgctgcaggcctccgccttctgtggcctcgggtttctcatcgtgttagcactgttccaggccgggctcggaagaatgatgatgaagtacagggaccagcgggctggtaaaatttctgaaaggctcgttattacgagcgagatgatcgagaacatacagtccgtgaaggcgtactgctgggaggaagccatggagaagatgatcgaaaacctgcgccagaccgagctcaaactgacccgtaaggctgcgtacgtgaggtacttcaactccagtgcatttttcttttcaggctttttcgtcgtgtttctgagcgttcttccctacgcactgatcaagggaatcattctgcgaaaaattttcactaccatctcgttctgcattgtcctcaggatggctgtgacaaggcagttcccttgggctgtccaaacctggtatgatagtcttggggccattaacaagattcaggactttcttcagaagcaggaatacaaaacactggaatataatttgactactacagaggtggttatggagaatgttaccgcattctgggaagaaacttcactgctcatggttatcatgggagagctagaaccttccgaaggcaagataaaacattctggcagaattagcttttgctcgcagttttcttggatcatgcctggtactataaaggaaaatatcatcttcggagtgtcatacgacgagtaccgatacaggagtgttattaaggcatgccagctggaggaagatatctctaagttcgccgaaaaagacaatattgtgctgggcgagggggggatcaccctgtccggcggtcagagggctagaatctcgctcgccagggccgtgtacaaggatgctgacttatatttgttggacagcccattcgggtatctggacgtactcaccgaaaaggagatcttcgagagctgtgtctgcaaactgatggccaataagaccagaatactagtgactagtaagatggagcacctaaaaaaagcagataagatacttattctccacgagggttctagttacttttacggcacattctccgagctccaaaacctgcagccagacttctcttctaagctaatgggatgcgatagtttcgaccagtttagcgcagaaaggaggaattctattctgaccgaaaccctccaccgatttagtctggaaggtgatgcaccagtaagctggacagagacaaaaaagcaatctttcaagcaaacaggcgagttcggcgaaaaacgcaaaaatagtatcctgaatccaataaacagcattagaaagttcagtatcgtacaaaagacaccgttacagatgaatggaatagaagaggactcagacgagcccctcgagcggagactttcactggttcctgactccgaacagggagaagctatattgccacgcatctctgtgatctctactggacccaccctgcaggcccgccgacgacagagtgttctgaacctaatgacacattcagtgaaccaggggcaaaacatccaccgtaaaaccaccgcttctacccgcaaagtctcactagctcctcaggctaatcttacagaactcgatatctacagcagacgcttaagccaggaaacaggtctggagatctccgaagaaatcaacgaggaagatctgaaagaatgcttctttgacgatatggagtcgataccggccgtgactacatggaatacttatctacggtatatcacagttcacaaatccctgatcttcgtgctgatatggtgccttgttatttttctcgctgaagtagccgcgtccctcgtcgttctttggttgcttggaaacaccccactacaggacaaaggtaactccacccactcccgcaacaatagctacgctgtgattattacatccacctcaagctattacgtgttttatatctatgtgggagtggcagatacgttgctcgccatgggcttttttcgcggcctgcccctcgtgcacaccctcataactgtcagcaagatcctgcaccataagatgctccacagcgtactgcaggctccaatgagtactttaaataccctgaaagccggcggcattttaaacagatttagcaaagacattgccatccttgatgatttgcttcccttgactatattcgactttatacagctcttgctgatcgtcattggagccattgcagtggtagcagtgctccagccctatattttcgtggccacagtacctgtgatcgtggcattcataatgctacgcgcatatttccttcaaacctcccagcagctaaagcagctggagtcagagggtaggtcaccaatttttacacacctcgtgacttctctgaagggtctgtggaccctgcgcgcctttggtcgccaaccttatttcgagaccctgttccacaaggccctgaacctgcacaccgctaactggtttctatatctgagcaccctgcgctggtttcagatgagaatagaaatgatctttgttatcttctttatcgccgtaactttcataagcattctcactactggcgagggggagggacgcgttggaattatcctcaccttggcgatgaacataatgtccaccttgcagtgggccgtgaactctagtatagacgtggattccctgatgaggtcagtttcccgcgtattcaaattcatcgacatgccaacagaaggtaagcctacaaaaagtaccaagccctacaagaacggccagctgtctaaagtaatgattatagaaaacagccatgtgaagaaggacgatatctggccgtctggtgggcagatgactgttaaagatctgacggcgaaatacactgagggcgggaacgcaatcttggagaatatcagtttcagcattagccctggccaacgggtcggcctgttaggacgtactggctctggaaagtcaaccctccttagcgcattcctgcgactgctcaatactgaaggcgagatccagatcgatggagtgtcttgggatagtatcaccttacagcagtggagaaaagcctttggagtcatcccccagaaggttttcatctttagtggaacgttcaggaaaaacctggatccctatgagcaatggagtgatcaagagatttggaaggtggccgatgaagtgggcctgaggtccgtcatcgaacagtttcctggcaagctcgacttcgtacttgtcgacggaggatgcgtgctgtcacacggacacaaacagctgatgtgccttgcacggagtgttttgagtaaggccaagatactgttgctggatgaaccttccgcccatctggatcccgtcacttaccagattatccgaaggactctgaaacaggctttcgccgattgcacagtgattctttgtgagcacaggattgaggctatgctggagtgccagcaattcctagtgatagaagaaaataaagtccggcagtacgacagtattcagaaactgttgaacgagagatcactgtttagacaggctatttcccccagcgatcgagtcaaattattcccacaccgtaactcttccaagtgtaagtcaaaaccccagattgctgcgctcaaagaggagactgaggaggaagtccaggacactcgactgtag

SEQ ID NO: 3700 - DNA, 573 bp, synthetic construct
  misc_feature 1..573: note = source = /note="Description of Artificial Sequence: Synthetic coding sequence"
  source 1..573: mol_type = other DNA
tgaaagggcctgtggaccctgcgggccttcggccggcagccctactttgagaccttgttccacaaagccttaaatttacatactgcaaactggttcctgtacctgagcacactgcgttggttccaaatgcgaatagagatgatttttgttatcttctttatcgctgtgactttcatctccatcctgacaaccggtgagggagagggcagggtaggaatcattctgacactcgctatgaatattatgagcactctgcagtgggcagtgaattctagtatcgatgttgatagcctgatgcgttcggtgtcaagagtcttcaagttcatcgatatgcctactgagggaaaacctaccaagagcacaaagccttacaagaacggacagctttccaaggtgatgatcatagagaactctcatgtgaagaaagatgacatctggccatcgggagggcagatgaccgtgaaggacctgaccgcaaaatatacagaaggcggtaacgcaattttggagaatattagcttcagtatatcgcctggtcagcgcgttagattcgagcactgcctactgtgttag

SEQ ID NO: 3701 - DNA, 1203 bp, synthetic construct
  misc_feature 1..1203: note = source = /note="Description of Artificial Sequence: Synthetic coding sequence"
  source 1..1203: mol_type = other DNA
atgatccggaactggctgaccatcttcatcctgttccccctgaagcttgtggaaaaatgtgaatcatctgtatccctcacagttccgcctgtcgtcaagctcgaaaatggctccagtactaacgttagtctgacactgcggcccccgctcaacgctacccttgtgatcaccttcgaaatcactttcaggagtaaaaacattactattcttgaactcccggacgaagtcgtggttccccctggagttaccaactcttccttccaggtcacaagtcaaaacgtggggcagctgaccgtgtacctccatggcaatcatagtaatcagacagggcctaggatccgatttttagttattaggtcaagtgccatttccattattaatcaggtgatcggttggatatactttgtcgcctggtctatctccttctatccccaggtaataatgaactggagacggaagagcgtgattggcctgtcttttgacttcgttgctttgaatttgaccggctttgtagcatacagtgtttttaatatcggcctgctgtgggtgccctacatcaaagagcagttcctgctcaagtaccccaacggagtgaatcctgtgaattccaatgatgtcttcttcagcctgcatgcggtggttttgactcttatcatcatcgtgcagtgttgtctgtatgagcggggcggacaacgagtttcctggccagctattggtttcctagtgctggcctggctcttcgcattcgttactatgattgttgcagccgtcggcgtgaccacgtggctgcagttcctgttctgcttctcctacattaaactcgccgtaacgttagtgaaatatttcccacaggcatatatgaatttttattacaagagcacagagggctggtcaatcgggaacgtgctgcttgactttacaggcggcagcttcagtctactgcagatgttcctccagtcctataacaacgaccagtggacactcatattcggagatcctactaagttcggactcggcgtctttagcatcgtttttgacgtggtatttttcatccagcatttttgtctctatcgtaagcgcccaggcctgcaagcagcgcgaaccggttcgggtagccgactcaggcaggactgggccccctcccttcagcccaaggctctgccccagaccacatcggtgtctgcctcttccctcaaggggtag

SEQ ID NO: 3702 - DNA, 1104 bp, synthetic construct
  misc_feature 1..1104: note = source = /note="Description of Artificial Sequence: Synthetic coding sequence"
  source 1..1104: mol_type = other DNA
atgatccggaactggctgaccatcttcatcctgttccccctgaagctggtagaaaaatgcgagagctcagtctccctgacagtcccgcccgttgtgaagttggaaaacgggagcagcactaatgtcagccttaccttaaggccccccctgaacgccacactggtcatcacattcgagattacattccgaagcaaaaacataactatccttgaattgccagacgaagtcgtggtgcctccaggggtcacgaattcttcatttcaggttacctctcagaatgttgggcagctgactgtttatttacacggaaatcactctaaccagacagggccacggatcaggttcctggtaatcagaagctctgcaatatccatcattaaccaggtgatcggatggatttattttgtcgcctggtctatctcattttatcctcaggtaattatgaactggaggcgtaagagtgtgatcggactgtcattcgattttgtggcgttaaacctcacgggattcgtcgcatacagcgtgtttaatataggtctgctgtgggttccatatattaaggagcagtttctgctcaagtatcccaatggagtcaaccccgtgaacagcaatgacgtttttttcagtctgcacgcagtggttctcaccctgataatcattgtacagtgctgtctgtacgagcgtgggggacagagagtttcctggcccgccatagggtttctcgtgctggcctggttgttcgccttcgtgaccatgatcgtggctgctgttggagtgacgacgtggctgcaatttttgttctgcttttcctacattaaactggccgtaacgttggtaaaatacttccctcaagcatacatgaacttttactataagtccaccgaaggctggtctataggtaacgttttattagactttacaggaggatcattcagcctccttcagatgtttctgcagtcatacaataacgaccagtggaccctgatttttggagatcctaccaaattcggactgggggtgttcagtatcgtctttgacgtggtgttttttatccaacacttctgcctgtacagaaagagacctggttacgatcagctgaactag

SEQ ID NO: 3703 - DNA, 663 bp, synthetic construct
  misc_feature 1..663: note = source = /note="Description of Artificial Sequence: Synthetic coding sequence"
  source 1..663: mol_type = other DNA
atgaactggcggcggaagagcgtgatcggcctgagcttcgacttcgttgccttgaaccttacgggcttcgtcgcctactctgtgtttaatattggcctactctgggtgccctatattaaggagcagttcctgctgaaataccctaatggcgtgaacccagtcaactccaacgacgtgttcttttctctccacgccgtcgtgctgactctcatcatcattgtccagtgttgtctttatgagaggggaggtcaacgtgtaagctggccggctatcggattcctcgttctggcttggctttttgcctttgtgaccatgattgtggctgccgtcggggtgacaacatggctgcagttcctgttctgctttagttatattaagctggcagttacattagtgaaatattttccccaggcatatatgaacttctactataaaagtactgagggatggagtatcggcaacgtgctactcgacttcactggtgggtcattttcacttttacagatgtttttgcaatcctataacaatgaccagtggactctcattttcggagatcctaccaagttcggtctaggagtgttcagtattgtgttcgatgttgtgttcttcattcagcatttctgtctgtacagaaaacggccaggttatgaccagctgaactag

SEQ ID NO: 3704 - DNA, 879 bp, synthetic construct
  misc_feature 1..879: note = source = /note="Description of Artificial Sequence: Synthetic coding sequence"
  source 1..879: mol_type = other DNA
atgtgcccccggatccggttcctggtgatccggagcagcgccatctccataatcaaccaggtcattggctggatttacttcgttgcctggtcaatttcattctatccccaggtgatcatgaattggcgccggaagtccgtcatcggcttgagtttcgacttcgttgccctcaatcttaccgggttcgtggcgtattcagttttcaacattggtctgctttgggtcccatatataaaagaacagttccttctgaagtacccaaatggcgtgaacccggtcaactccaacgacgtgttcttcagcctacatgccgtcgtccttacccttataataatcgtccagtgctgcctgtatgaacggggtggacaacgggtatcctggccagccataggtttcttggttctcgcctggctttttgccttcgtaaccatgatagtggctgccgttggggtgacaacctggctgcagttcctgttctgtttttcttacattaaactggcagttacattagtgaagtacttcccccaggcctacatgaatttttattacaaaagcaccgagggctggtctatagggaacgtccttctagatttcacaggcggttcattttctctgttgcagatgtttctccagagttataataatgaccagtggacgttgatttttggcgaccctactaagtttggactgggggtgttcagcatcgtatttgacgtggtattctttatccagcacttttgcctttatcgcaaaagaccgggattgcaagccgcaaggaccggctcagggagccgcctgcgccaggattgggccccgtcactccagcccaaagccctcccacagaccacatcagtttctgcatcctcactcaagggctag

SEQ ID NO: 3705 - DNA, 228 bp, synthetic construct
  misc_feature 1..228: note = source = /note="Description of Artificial Sequence: Synthetic coding sequence"
  source 1..228: mol_type = other DNA
atgatccggaactggctgaccatcttcatcctgttccccctgaagcttgttgagaagtgcgagtcatccgttagcctaacagtgcctcctgtggtcaagctcgagaatggcagttccacgaacgtgtcgctgactctcaggccccctttaaacgctacccttgtgattacgtttgagataacatttcggtccaagaatattacaatcctcgaactacccgacgagtag

SEQ ID NO: 3706 - DNA, 204 bp, synthetic construct
  misc_feature 1..204: note = source = /note="Description of Artificial Sequence: Synthetic coding sequence"
  source 1..204: mol_type = other DNA
atgcggatccactacctgctgttcgccctgctgttcctgttcctggtccctgttccagggcacgggggcatcattaacacccttcagaaatattactgccgggtgcgaggtggccgatgcgccgtgcttagctgcctgcccaaagaggaacagattgggaagtgctcaactagggggcggaaatgctgccggcggaagaagtag

SEQ ID NO: 3707 - DNA, 204 bp, synthetic construct
  misc_feature 1..204: note = source = /note="Description of Artificial Sequence: Synthetic coding sequence"
  source 1..204: mol_type = other DNA
atgcggatccactacctgctgttcgccctgctgttcctgttcctggtaccagtacctggacacggcggtattattaatactttgcaaaagtattattgcagggtgcgggggggacgctgcgcggtcctatcgtgcctgcctaaagaggagcagatcgggaaatgcagtacccgggggcgcaagtgctgccgacgtaagaaatag

SEQ ID NO: 3708 - DNA, 195 bp, synthetic construct
  misc_feature 1..195: note = source = /note="Description of Artificial Sequence: Synthetic coding sequence"
  source 1..195: mol_type = other DNA
atgcgggtgctgtacctgctgttcagcttcctgttcatcttcctgatgcccctgcccggagtttttggaggaataggagatcctgtgacttgtttgaaatccggagcaatttgccatcccgtcttctgccccaggaggtacaagcagatcggtacgtgtggactcccgggaaccaaatgctgcaagaagccatag

SEQ ID NO: 3709 - DNA, 195 bp, synthetic construct
  misc_feature 1..195: note = source = /note="Description of Artificial Sequence: Synthetic coding sequence"
  source 1..195: mol_type = other DNA
atgcgggtgctgtacctgctgttcagcttcctgttcatcttcctgatgcccttaccaggggtgtttggaggcattggggacccagtcacttgccttaaatccggcgctatctgccatccagttttctgccctagacgttataagcagattggaacctgtggccttccaggcacaaaatgttgtaagaagccatag

SEQ ID NO: 3710 - DNA, 849 bp, synthetic construct
  misc_feature 1..849: note = source = /note="Description of Artificial Sequence: Synthetic coding sequence"
  source 1..849: mol_type = other DNA
atgcggggcatgaagctgctgggcgccctgctggccctggccgccctgctacagggggctgtcagcctcaagattgcggcgtttaatatacaaacattcggtgaaactaagatgtcaaacgcaacactggtgtcctacattgtgcagattctgtcaagatatgatatagcgctagtgcaggaggttagagactctcacctcacagccgtggggaaactcctagataacctcaatcaggatgctcccgacacttaccactacgtggtgtctgagccccttgggagaaattcttataaagaacgttacctatttgtttaccggccggaccaggtgtccgccgtagacagctactactacgacgacggatgtgaaccatgcggtaacgacacttttaatcgcgagccagccatcgttaggttttttagccgcttcacagaggtaagggagttcgcgattgtcccgctgcacgctgccccgggagacgcagtggcagagattgacgctctttatgatgtgtatcttgatgtccaggaaaaatggggcctggaggacgtaatgctcatgggggactttaatgccggatgcagctatgtcagaccttcacaatggagcagcattaggctgtggacttcaccgactttccagtggctcatccccgacagcgcagacactaccgcaactccaacacattgcgcatacgatcggattgttgtggcaggcatgctgttacgaggggcagtagtgcccgattccgcgctgcccttcaactttcaggccgcatatggcctgagtgatcagctggctcaggcaatttccgatcactacccagtagaggtaatgctgaaatag

SEQ ID NO: 3711 - DNA, 849 bp, synthetic construct
  misc_feature 1..849: note = source = /note="Description of Artificial Sequence: Synthetic coding sequence"
  source 1..849: mol_type = other DNA
atgcggggcatgaagctgctgggcgccctgctggccctggccgccttgcttcagggcgccgtgtccctcaagatagctgctttcaatattcaaacctttggcgaaacaaaaatgagtaatgctaccctggtgtcgtacatcgtccagattctctcccggtacgatatagcattagttcaggaggtacgggactcccacttaaccgccgttggaaagctcctagataatctgaatcaggacgctccagatacatatcattacgtcgtgtcggaaccactaggcaggaattcatataaagaaagatatctatttgtgtatcggccagaccaggtctcggcagtggactcatactattacgacgacggatgcgagccctgcggaaatgacaccttcaatagagaacctgccatcgtacgtttcttttcccgttttaccgaagtacgcgagttcgccatcgtgcctctgcatgcggccccaggagacgccgtcgctgagatcgacgcgctgtacgatgtgtacctggacgtgcaggagaagtgggggcttgaggatgtcatgttaatgggagacttcaatgcagggtgcagctacgtccgccccagtcagtggtcgtccattcgtctgtggacatctcctaccttccagtggctgatacctgattccgccgacactacggcaacccccacacattgtgcatatgatcggatcgttgtagcagggatgcttttgcgcggggctgtggtgccggactctgcacttcctttcaatttccaggccgcatacggtctgtccgaccaactggcacaggcaataagtgatcactaccctgtggaggttatgctgaagtag

SEQ ID NO: 3712 - DNA, 564 bp, synthetic construct
  misc_feature 1..564: note = source = /note="Description of Artificial Sequence: Synthetic coding sequence"
  source 1..564: mol_type = other DNA
atgcaccagacccccatcaccacctggagcgtgagccactgggacggtacagcaattaggagcgccacatgctcatgcacaggactgacacgttgcttgagatggaccgctacaactaccatgatggctgcctctcccgccggtactaccccttcaactgaaagtcagccccttagtggaagctccccagggagccaggatgtcatgctaatgggcgacttcaacgccgggtgcagctacgttcgacccagtcaatggtccagtattcgcttgtggacaagccccaccttccagtggctcattcccgactccgcggacacaaccgccacccctacacattgcgcgtacgacaggatagtggtcgcaggcatgttgctgcgcggcgctgtggttccagattcagccttaccatttaacttccaagccgcctacggcctgagtgaccagttatttagcgttcacacatgttccggcgccggactgggcgagaggcacggtttacccgcatcggctgccctgccatctaacacttgtcgggccggtacacaccgcgtcagcacatag

SEQ ID NO: 3713 - DNA, 6243 bp, synthetic construct
  misc_feature 1..6243: note = source = /note="Description of Artificial Sequence: Synthetic coding sequence"
  source 1..6243: mol_type = other DNA
atgctgcgggtgttcatcctgtacgccgagaacgtgcacacccccgatacagacatttctgatgcctattgtagcgccgtgtttgccggagtgaagaagaggacaaaggttatcaaaaactccgtgaatccggtctggaatgagggcttcgagtgggatctgaaaggtatccccttggatcagggcagcgagttacacgttgtcgtcaaggatcacgaaactatggggcgcaaccggttcctcggcgaggcaaaagtgccactgcgcgaggtgctggccactccttctttgtctgcaagcttcaacgcacctcttctggatacaaagaaacagcccaccggggcaagtctggtactccaggtgtcctacaccccactgcccggggctgtgcccctgtttccccctccaactcctttggaacccagccccacattgcccgacctggatgttgtggctgacactggcggagaggaagatactgaggaccagggcctaaccggcgatgaggctgaaccctttctcgaccagtctggcggccctggtgcccccacaacgccccgtaagttgccgtcccgacctcccccgcattatcccggaataaagcggaaaaggtccgctccgacctcaaggaaactcttgtctgataagccccaagacttccagatccgcgtacaggtgatcgagggaagacagcttccaggtgttaacatcaaacctgtggtgaaggtaaccgccgcgggacaaacgaagcggacacgaatccacaagggcaactcccctctgtttaatgagacacttttcttcaatctgttcgatagtcccggcgagcttttcgatgagcctatttttataaccgtcgttgatagtcggtctctccgcaccgacgcacttcttggagaattcagaatggacgtgggaacaatctatcgggaacctagacacgcttatttaagaaagtggctgctactgagcgatcctgacgacttcagtgctggcgcaagagggtatctaaagacttccctctgcgtgcttgggccaggagatgaggcacctctggagaggaaggatccaagcgaggacaaggaagacattgagtcgaatctgctacggccgaccggtgtggctttgcggggcgctcacttctgtctgaaggtgttcagagccgaagacctccctcagatggacgacgccgttatggacaacgttaaacagattttcggttttgagagtaacaagaaaaatttggttgaccccttcgtggaagtgtcatttgcaggtaagatgctgtgtagcaagatcctcgagaaaaccgcaaacccccagtggaaccagaacataacactgcccgctatgttccccagcatgtgcgagaaaatgcggattcgtattatcgattgggatcgcctcactcacaatgacatcgtcgcaaccacgtacctgtcaatgtcaaaaatctccgccccaggcggagagattgaggaggaacccgccggagccgtgaagccttcgaaggccagcgatttggacgattatttgggcttcctccccacgtttgggccctgttacatcaatctctacggaagcccaagggagttcaccggatttcctgatccctacaccgagctaaatacaggtaaaggagaaggggtagcctaccgtggccgacttctcttgtccctggagaccaagttagtagaacacagtgagcaaaaggtagaggatttgcccgctgacgacattctgcgggtggaaaaatatctccgcagaagaaagtattccttattcgccgccttttactccgcgaccatgcttcaggatgtggatgatgcgatccagttcgaagttagcattggtaattatggcaacaagttcgatatgacatgtctgcccctggcttcaacaacacagtattccagggccgtctttgacgggtgccattactactacctgccttggggcaatgtgaagccagtggtggtgctgtcaagctactgggaggacatctctcaccgcattgaaacacaaaatcagctgctgggaatagcagatcggcttgaggccggactagagcaggttcacttggccttgaaggcccagtgcagtacggaggacgtagattcactggtggctcagctgaccgatgagctgatagctggatgttcccagccccttggagacatccatgaaaccccatctgctacacatctggatcagtacttgtatcaacttcggactcatcacctgagccagatcactgaggctgcactggccctcaaactggggcacagcgagctacccgcggccctggaacaggctgaggactggctactgaggctgcgggcactggctgaggagccgcagaactcactgcctgacatcgtaatctggatgttgcagggggataaaagggtggcctaccaacgggttccagcccatcaagttctgttctccagacgcggcgctaattattgcggcaagaactgtggtaagctgcagacaatattcctgaaatatccaatggagaaggtacccggggcaaggatgcccgtacagattagagtgaagctctggttcggtctctccgtagatgagaaagaatttaaccagttcgcagagggaaaactatccgtcttcgccgaaacatatgaaaacgagacaaagcttgcgctcgtcggtaactggggcacaacagggttaacataccctaaatttagcgatgtgactgggaaaatcaaattacccaaggactccttccgcccgtctgccggttggacctgggctggcgactggttcgtgtgccccgaaaaaaccctgctgcacgatatggacgccgggcacctatcattcgtcgaggaagtctttgagaatcaaactagactccctggcggccaatggatctacatgagcgataattataccgacgttaatggcgaaaaagtcctccctaaggacgatatcgagtgccctcttgggtggaaatgggaggatgaagagtggtccactgacctaaacagagccgtcgatgagcagggctgggaatacagcatcactatccctcctgagaggaaacctaagcactgggtgcccgccgaaaagatgtactatacccacagacgcagaagatgggtgcgcctgagaaggcgcgacctcagccagatggaagccttgaagcgccaccgccaggcggaagccgaaggagaggggtgggaatacgcttcgttatttgggtggaagttccacctggaatatcggaagacagacgcgttcaggcggcgacgctggcgtcgacggatggagccactcgagaaaacagggcctgccgccgtcttcgccctggaaggagccttaggaggtgtaatggatgataagtccgaggatagtatgagcgtatctacccttagcttcggcgtgaatcgaccaacaattagctgcatcttcgactacggcaaccggtaccatctccgctgttatatgtaccaggcaagagacttggccgccatggacaaggattcttttagtgacccttacgccattgtctctttcctacaccagtcccagaaaacagtcgtagttaaaaacaccctgaatccgacttgggatcagaccttgatcttttacgagatagagatttttggcgaacccgccacagtggccgagcagccgcccagcatagtagtcgaattatacgaccacgacacctacggtgcagatgaatttatggggaggtgtatctgccagcccagtttggagaggatgcctaggctggcctggttccccctgacacggggatcccagccttccggagaattgctggcttcattcgaactcatccagagagagaagccggcaatccatcatattccaggattcgaagttcaggagacaagccgcattctggacgagagtgaggacacagacctgccttatccccccccccagagagaggctaacatctatatggtgcctcagaacatcaaaccagctttgcagcgcacagcgatcgagatactggcatggggtctccgaaacatgaaatcctaccagctggccaatataagttctcctagcctggtggtggagtgcgggggccagacggtgcagtcctgcgtgataagaaacttacgcaaaaatcccaacttcgatatatgtacactgtttatggaagtcatgttgccacgggaagagctttattgcccccctatcacagttaaggtaatcgataacaggcagtttggaaggcgccctgtagttggacagtgcacaatccggtcactggaatccttcctgtgtgacccatatagcgctgaaagtccaagcccccagggtgggcctgacgacgtaagcttactcagccctggtgaagatgtgctgattgatatcgatgacaaggagccccttattcctatccaagaggaagaatttatcgactggtggagtaaattttttgcgtcaataggagagagggagaagtgtgggagctatctggagaaggactttgacacactgaaggtctacgatacccagctggagaatgtcgaggctttcgaaggactgagcgatttctgcaacacattcaagctgtatagaggaaaaactcaggaagagacagaggaccccagcgtcattggtgaattcaagggactgtttaaaatatacccccttccagaggaccccgcgatacctatgccaccccggcaatttcaccagctggctgcccagggtccccaggaatgcctcgtgcggatctacatcgtgcgggcatttgggttacaacctaaagatccaaacggcaagtgtgatccgtatattaaaatctccatcgggaagaaaagcgtctcagatcaagacaactacatcccttgtacgttggagccagtctttggcaaaatgttcgagcttacatgcactcttcccctggaaaaggaccttaagattaccctgtacgattacgatctcctgtcgaaagacgagaaaattggagagaccgttgttgaccttgaaaaccgacttctgagcaagttcggcgcccgctgcggcctgccacagacatattgtgtctctggtcccaaccaatggcgtgaccagcttaggcccagtcagctcctgcacttgttttgtcagcaacaccgggtgaaagctcccgtatatcggacggaccgcgtgatgttccaagataaagaatacagtattgaggaaatcgaagccggacgaattcctaatccacatctcggacccgttgaggagaggctggctctccacgttctgcagcagcaaggactagtacctgagcacgtggagtcccgacccctgtactcaccgctgcagcctgatattgaacaaggaaaactacagatgtgggttgatctcttccctaaagcactgggccgacccggtccaccgtttaacataactccacgcagagcacgcaggttcttcttgcgctgcatcatctggaacactagggacgtgattcttgatgatctctctctcactggtgagaaaatgagcgacatctacgtgaagggctggatgattggatttgaggaacacaaacagaaaactgatgtccactacagatccctgggcggtgaggggaattttaactggagatttatattccccttcgattacctccccgccgaacaggtatgcactattgccaaaaaagatgcattttggcggctggacaagactgagtccaagattccagctcgtgtcgtctttcagatttgggacaatgataaattctcgttcgacgatttcctggggtctctgcaattggatctgaaccggatgcccaaaccagccaagacagctaaaaagtgctcattggaccaactggatgatgcattccatcccgagtggttcgtcagtttgtttgaacagaaaacagttaagggatggtggccgtgtgtggccgaagaaggggaaaagaaaatcttggccggcaagctggagatgaccctcgaaattgtggccgagtcagaacacgaggagcggccagcaggacaaggccgggacgagcctaatatgaaccctaaacttgaggatcccagacgccccgacactagcttcctgtggtttactagcccctataaaacgatgaagttcattctatggaggcggtttcgctgggccatcatcctattcatcattctgttcatcctgctgttgttcctcgccattttcatttacgccttccccaattatgccgctatgaaactggtcaagccgttcagctag

SEQ ID NO: 3714 - DNA, 6246 bp, synthetic construct
  misc_feature 1..6246: note = source = /note="Description of Artificial Sequence: Synthetic coding sequence"
  source 1..6246: mol_type = other DNA
atgctgtgctgcctgctggtgcgggccagcaacctgcccagcgccaaaaaggacagaagatctgaccctgtcgcatctcttacctttcggggggtgaaaaagcgcactaaggtgatcaaaaattcggttaatcccgtttggaacgaaggattcgaatgggaccttaagggtatcccactcgaccagggcagcgaactgcacgtcgtagtaaaagaccacgagacaatgggacgaaataggttcttaggagaggctaaggtgcctctgagagaggtactggccaccccatctctttctgcatcatttaacgcacctcttttagacaccaaaaagcaacccacaggtgcctctctcgtcctccaggtatcctataccccactgcctggagccgtgcctctgttccctcccccgacacccttggagccatcccccaccctgcctgacctggatgtggttgctgacaccggcggcgaagaagacactgaggaccaaggactgaccggggatgaagccgagccgttccttgatcagtctggagggccgggcgcccccaccaccccccggaagcttcccagcaggccgcctcctcactatcccgggatcaaaaggaagcggtcggcccccaccagccgcaaactcctcagtgataagccacaggactttcaaatccgagtccaagtcatagaaggcagacagctccccggagttaacatcaaacccgtagtcaaagttaccgccgccggacaaacaaagcgaactcgtatacacaaaggcaattctcctctttttaacgaaactctcttcttcaacctattcgattcacctggtgagttattcgatgagccaatctttatcaccgttgtcgacagtcggtctctgaggacagacgcactcctcggtgagttcaggatggatgtaggcaccatctatagagaacccaggcacgcttatttgcgcaaatggctgctattgagcgatccagacgacttcagcgctggcgccaggggctacttgaagacaagcctgtgtgtgctgggccctggcgatgaagctccacttgagcggaaggatcccagtgaagacaaagaggacattgaatccaatttgctccggccgacaggtgtagcgttgcggggggctcatttctgtttgaaggtgtttagagccgaagatctcccacagatggatgatgccgtaatggacaacgtgaaacaaatcttcgggttcgagagtaacaagaagaacttggttgacccttttgtggaggtgtcattcgcaggcaagatgttatgttccaaaattctggaaaagacggccaatcctcaatggaatcagaacataacactcccagccatgtttccctcgatgtgcgaaaagatgagaatccggatcattgattgggacagacttactcacaacgacattgtggcgaccacttatctcagcatgtcgaaaatcagcgcccccgggggtgaaatcgaggaagaacccgcaggagctgtgaagccaagcaaggcctctgacctggatgattatctggggttcttacccaccttcggcccctgctatatcaacctgtacggcagcccacgcgaattcactggtttcccagatccttataccgaactgaatactgggaaaggggagggagtcgcgtaccggggtcggctgctactgtcattggagaccaaactggtcgagcattctgagcaaaaggtagaagacctgccagctgatgacatcctgcgggtcgagaaatatctgcgtaggcgcaagtatagcctgtttgccgcattctattcagctacaatgctgcaagacgtagacgacgcgatccagtttgaggtaagcattggcaattacggaaacaagtttgatatgacgtgcctgccgctggcatctacaacccaatattcacgggctgtgttcgacggctgtcactactactatctgccctgggggaacgttaaacctgtcgtggtactgtcctcatactgggaggacatctctcaccgcatcgagactcagaaccagttgttaggtattgccgataggctggaggcaggtttggaacaggtccacctggccctgaaggcccaatgcagtactgaggacgtggatagtctggtggctcagctgactgacgagcttatcgccggatgcagccagccattgggggacatccatgaaaccccaagcgcaacgcacctcgaccagtacctgtatcagttgcgtacccaccacctctctcagatcacggaggctgcactggcgctaaagctcggtcactctgaactgcccgctgcgttggaacaggcagaggactggctcctccgactgcgcgcactcgctgaagaaccacagaactccctcccagacattgtgatttggatgctgcagggtgataaacgagtggcttatcagagagtgcccgcacatcaggtcctgttcagcaggagaggcgcaaattattgcggtaaaaactgcgggaagctgcagactatttttctgaaatatcctatggagaaggtgcccggcgctaggatgcctgtccagatccgggtcaaactgtggtttggtctgtccgtagacgagaaagagtttaaccaattcgcagagggtaaactctctgtcttcgcggagacctacgaaaacgagaccaagctggcgctggtggggaactgggggactacaggattaacttacccgaagttcagtgatgtaacaggcaagattaagttgccaaaagactcttttagacctagcgctggctggacatgggcaggggattggttcgtttgtcccgagaagaccctcctgcatgacatggacgcgggccacctatcatttgtggaggaggtgttcgagaatcagacccgacttcccggaggccagtggatctacatgtcagataactataccgacgtcaatggggagaaagttctgcccaaggacgacatcgaatgccctctggggtggaagtgggaggatgaagaatggagtacagacttgaacagggccgtagatgaacaaggctgggagtactctattactatccctcctgagcgcaaacctaaacattgggtgcctgcagaaaaaatgtactatacccataggaggagaagatgggtaaggttacgtagaagggatcttagccagatggaggccctcaagcggcacagacaggctgaggcagagggggaggggtgggagtatgctagcctgttcgggtggaaatttcatctcgagtatcggaaaaccgatgccttcagacgaaggagatggcggcgaaggatggagcctttggagaaaacaggtcctgccgcggtgtttgcactggagggggcactgggtggcgtgatggatgacaagagcgaggattcgatgagcgtgtcaacgctaagctttggcgtgaacagacctacgattagctgtatttttgactatgggaacaggtatcatcttagatgctacatgtatcaggccagagacctggccgctatggacaaggactctttttcagatccctatgctatcgtgtctttcttacatcagtctcagaaaacagtagtcgtcaagaacactctcaatccgacatgggatcagacactgatattttacgaaatagagatttttggcgagcctgctacggtcgctgagcagcccccctccattgtggtggagctgtacgatcatgatacatatggagctgacgaatttatgggcagatgtatttgtcagccttctctcgagcgcatgccaagactggcatggtttcctctcaccaggggaagccaaccttcaggggagctgctggcctctttcgaacttatccagagggagaagccagcgatccatcatattcccgggttcgaagtccaggagactagtagaatacttgacgagagcgaggataccgacctgccatacccaccccctcaaagggaggcgaacatatatatggtgccgcaaaacatcaagcctgctttgcagagaacggctatcgagatcttggcttggggactgcggaatatgaaatcatatcagttagctaacatatcatccccctctcttgtggtggagtgcggaggacaaacggttcagagttgcgtgatccgcaacctaagaaagaatccaaattttgacatatgcaccttgttcatggaggttatgctgccaagagaagagctgtattgtcctcctattacggtgaaggttattgataacaggcagtttggccgacgacccgtggtaggccagtgcacaattcgatccctggaatcttttctgtgcgacccctacagcgctgaatcgccatcaccccagggtggcccagacgatgtgtctctgctgtctcctggtgaagacgttctgatcgacatagatgataaggaacctctcatacccattcaagaagaagagtttatagattggtggtccaagttttttgccagcatcggcgaacgcgaaaaatgtggaagttatctcgaaaaggattttgatactcttaaagtttacgatacccagttggaaaacgtggaagcttttgaaggattgtctgatttctgtaataccttcaaactgtaccggggtaagactcaggaagaaaccgaagatcccagcgtcattggtgaattcaaggggctctttaaaatataccccttgccagaggatcccgcaataccaatgccacctcgccagtttcaccagttagccgcacagggccctcaggaatgtctggtgcgcatctatatagtaagagcctttggcctgcagcctaaagaccctaacggtaagtgtgatccgtacattaaaatcagtattggcaagaaaagcgtgtccgaccaggacaactacatcccttgcactctggagcccgtctttggcaagatgtttgaactgacttgtactttgccactcgaaaaggacctgaaaataaccctttatgattacgatctgctttccaaggatgaaaagatcggtgaaactgtagtcgatttagagaacaggctgttgtctaagttcggtgcccgatgcggcctccctcagacatattgtgtaagtggtcccaatcagtggcgggaccaactccgaccgtcacaactgctccatctcttttgtcaacagcatagagtcaaggcgccagtgtaccggactgaccgtgtcatgtttcaggacaaagaatattccatcgaagaaattgaggctggccggatccccaatcctcatctcgggccggtggaggagaggctagctctccacgtgctgcagcagcaggggttagtgcccgaacatgtggagtctcgaccgctatacagtccgctccaacctgacattgaacaggggaaactccagatgtgggtggacttatttcccaaggccctggggagacccgggcccccattcaacatcacacccaggcgcgcgagaagattcttcctccgctgtataatttggaacactcgagacgtaatcctggatgatttgagcctgactggggaaaagatgtctgacatttacgttaaaggatggatgatagggttcgaggagcacaaacagaaaacagatgttcattaccgcagcctgggcggagagggcaacttcaactggagattcatattcccgttcgactaccttccagccgaacaggtgtgcaccatcgcaaagaaggatgccttctggcgactggataaaacagaatcaaagataccggctcgggttgtcttccaaatatgggataatgataagttctcctttgatgatttcttaggcagtttacaattggatctgaacaggatgccaaaaccagctaaaactgcgaagaaatgttcactcgaccaactagacgatgcctttcatcccgaatggtttgtatcgctgtttgagcagaagacagtgaaaggctggtggccatgtgtggccgaagaaggggaaaagaagatcctggctggcaagctggaaatgacccttgagatcgtggccgaatccgaacatgaggagcgcccggcgggacagggaagggatgagcccaacatgaaccctaaactggaagatcctcgacgtccagatactagtttcctctggttcacctcaccttacaagactatgaaatttatactgtggcgacgcttcaggtgggccatcattttattcatcattctgtttattctgctattgtttctggccatcttcatctatgcattcccaaactacgctgcgatgaaactcgttaaaccttttagttag

SEQ ID NO: 3715 - DNA, 6309 bp, synthetic construct
  misc_feature 1..6309: note = source = /note="Description of Artificial Sequence: Synthetic coding sequence"
  source 1..6309: mol_type = other DNA
atgctgtgctgcctgctggtgcgggccagcaacctgcccagcgccaagaaagatcgcaggtccgacccagtcgcctccttgaccttccgcggtgtgaaaaaacgcacaaaggtcatcaagaattctgtgaaccccgtgtggaacgaaggctttgagtgggacctgaagggaattcccctggatcaaggatccgaactgcacgttgtggtcaaagatcacgagacaatgggccggaataggttcctcggagaagcaaaagtcccactgcgtgaagtccttgccaccccgagcctgtccgccagttttaatgctcccctgctcgacactaagaagcagcctacaggggcttctcttgtgcttcaggtgagctatacgcccctgcccggggcagttcccctgttcccgcccccaacccccctggagccatcaccaaccctgcccgacttagacgttgtggccgacacagggggagaggaggacactgaagaccagggcctgacaggtgatgaagctgagcccttcctcgaccagtccgggggcccgggtgcacccaccacaccccgcaagttgccctccaggccacccccgcattaccccggtatcaagcggaagaggagtgctcctaccagcagaaagctcttgtcggacaagcctcaggatttccagattcgggttcaggtcatagagggccgtcagcttcccggcgtgaatataaagccggtggtaaaggttaccgccgccgggcaaacaaaaagaacgcggatccacaagggcaattcacctttgttcaatgaaactctcttctttaatctgttcgacagccccggcgaactcttcgatgagccaatcttcatcacagtggttgactcacgatcactgcgaacagatgctctactcggtgaattccgcatggacgtcgggacgatatatagggagcccaggcacgcctacctgcgaaagtggcttctcttgtcagaccctgatgacttcagtgccggtgcccggggctacctgaaaacttctctgtgtgtgctgggccccggggatgaagctcctctcgaaagaaaggacccctctgaggacaaggaagacatcgaatctaatttgcttagacccactggagtggcccttaggggcgcccacttctgtctgaaagtgtttagagcggaggatcttccccagatggacgacgcggtgatggataacgttaagcagatcttcgggttcgagagtaacaaaaagaacctggtggacccctttgtggaagtttcctttgcaggaaagatgctgtgcagtaagatcctcgagaagactgccaaccctcagtggaaccaaaatattaccttaccggccatgtttccctctatgtgtgagaagatgcggattcgtatcattgactgggataggctgactcacaatgacattgtcgccacaacatacctgtccatgtccaagataagtgcgcctgggggcgaaattgaagaagagcctgccggggccgtcaaacctagtaaagcaagtgacttagacgactacctgggttttttgcctacattcggaccttgctatataaacctgtacggttcccctcgcgagttcacaggattccctgacccgtatacggaactgaataccggcaagggagagggggtggcttacagggggcggttgctgctgtcactggagacaaagctcgtggagcactctgagcagaaggtggaggacctgcctgcagacgatatactgcgggtggagaagtatctgcgccgccgcaagtactctcttttcgctgccttctattctgctactatgctgcaggatgtcgatgacgcaatccagttcgaggtctccatcgggaattatggcaataaatttgacatgacctgtctgcctttggccagcacaacccagtacagccgagctgtattcgatggctgccactactattatctgccatgggggaacgtgaagcccgtggtcgtactctcctcttactgggaagatatctcacacaggatcgagactcaaaatcagttattaggtattgcagatcgactagaggcaggcctggaacaggtacatctggctctgaaagcacagtgcagtactgaggacgttgacagcctggtcgcccagttgacggacgaattaattgcaggctgctcccagcctctgggcgacattcacgagactcccagtgctacgcatctcgatcagtacctctatcagctgaggacacatcacctgagtcagataactgaagctgcgcttgccttaaagctggggcacagtgaactgccagcggccctcgaacaggcagaagattggttgctccgcttaagagcgttagccgaagagccccagaatagtttgcctgatatcgtgatttggatgcttcagggggacaaacgggtcgcttatcagagagtgccagctcaccaggtcttgttttctcgacgaggtgccaattattgtggtaaaaactgcgggaaattgcagactatattcctgaaatatccaatggagaaagtgcccggggctaggatgcctgtgcagatcagggtcaagctgtggttcggactgagcgtcgacgagaaggagttcaaccagttcgccgaaggtaagctgagcgtttttgcagaaacctatgaaaacgaaacaaaactggccctggttggtaactgggggacaacaggactgacataccccaagttttctgatgtgaccgggaagatcaaactgcctaaggatagttttaggccaagcgcaggatggacttgggccggagactggttcgtctgcccggaaaagacacttctgcacgatatggacgccggacatttgtcttttgtggaagaggtttttgaaaatcagacaagactgcctggcgggcagtggatttacatgagtgacaactataccgatgtaaatggcgagaaagtgctgccgaaagacgacatcgaatgcccacttgggtggaaatgggaagatgaggaatggagcactgacctgaatcgggctgtggatgagcaaggatgggagtattcgatcaccattccacctgaaaggaagcccaaacactgggttccagcagagaaaatgtattacacccacagacggcgacgctgggtacggctaagaagaagggatctctctcaaatggaggccttgaaacgccataggcaggccgaggcagagggggaaggctgggagtatgcgtccctgttcggctggaagttccacttagaatatcgtaaaaccgacgctttccggagacggaggtggagacgacggatggagccgttggaaaagaccggacctgcagcggtgtttgccctagagggtgctctgggcggtgtgatggatgataagagcgaagattctatgagcgtctccacattatcattcggcgtgaatcgtcccacaattagttgtatattcgactacggaaacaggtatcacctccgatgctatatgtatcaagcccgggacctagccgccatggacaaggatagtttcagcgacccctatgcgatcgttagctttctgcaccagagccaaaaaactgtggttgtgaaaaataccctcaatcccacctgggaccagacactgatattttatgaaattgagatcttcggcgaacctgccaccgttgctgaacagccaccgagcatcgtggtggagctgtacgaccacgacacttacggtgcagacgagttcatgggtcgctgtatctgtcaaccctcactggaacgtatgcccagattggcgtggttcccacttacacgggggtcccagccttctggagagctcctggcctctttcgaactaatccagcgcgagaaacccgcaattcatcacatccccgggtttgaggtccaggaaacatcacgtatcttggacgagagcgaggacactgacttaccttacccccctcctcaacgcgaggccaatatttatatggtgccccagaatatcaagccggcacttcaacgaaccgctatcgaaatcttagcatggggactccgcaatatgaagtcatatcaattggccaacataagctcccccagccttgtggtcgaatgtggtggccaaacggtccaaagttgcgttatccggaacctgaggaagaacccaaatttcgacatctgtacactttttatggaggtgatgctcccacgcgaagaactgtattgcccaccaatcactgtaaaagtaattgacaacagacagtttggacggagacctgttgtcggccagtgcaccatccggtccctggaatccttcttgtgtgacccctactccgccgagtctccatcacctcagggtgggccggatgatgtgagccttctgagccccggcgaagacgtcctgatagacattgatgataaggagccacttataccgatccagttggccgacggactgtccagcttggctcccaccaacaccgcatcccccccgtcaagccctcacgaggaggaattcatagactggtggtcaaagttctttgcgagtatcggggagcgggagaaatgcgggtcttacttggagaaggactttgacacgctgaaggtgtatgacacacagctggagaacgtagaggctttcgagggcctttctgatttctgtaacaccttcaagctctatcgcggcaagacccaggaggagacagaggacccctctgtgatcggcgagttcaaagggctgtttaagatctacccacttccggaggatcctgccattccgatgcccccgagacagtttcatcagctggctgcacagggcccccaggaatgcctcgtgcgcatatatatcgtgagggcatttggtcttcaacctaaggatcccaatgggaaatgcgacccttatatcaaaatctcaatcggaaagaagagcgtaagtgaccaggacaattatatcccatgcactctagaacccgtgtttggaaagatgttcgaacttacatgtacgctaccgctggagaaagacctaaagatcacactgtatgattatgatctgctgtccaaagatgaaaagatcggagagacagttgtggatctggagaaccgccttctgtccaaattcggagcccggtgtggactcccacagacatactgtgtctctggtcccaaccagtggcgcgaccagctccggccatcccagctgctgcacctgttctgccagcaacaccgagtcaaagctccggtctatcggactgaccgggttatgttccaggataaggagtatagcatcgaagagatcgaggctggtcgcattcccaaccctcaccttggcccggttgaggagcgccttgcgctacatgtcttgcaacagcagggcctggtgccggagcacgttgagagtcggcctctctattcccctcttcaaccagatatagagcaaggaaaacttcagatgtgggtcgacctctttcccaaagcactcgggcgtccaggcccaccttttaacattaccccaaggcgggcccggcgcttctttttaaggtgtataatctggaacacacgcgatgtgattctggatgacctgtctttgaccggcgagaaaatgtctgatatctacgtaaaggggtggatgataggttttgaggaacataagcaaaagaccgacgtccactatcgaagtctggggggcgaaggtaattttaactggcgcttcatcttccccttcgactacctccccgcggagcaggtgtgtactattgccaagaaggatgcattctggcgcctggacaaaactgagagcaaaattccagcacgtgtggtctttcaaatctgggacaacgacaaattttccttcgacgactttctgggatcactacagctggacctgaaccgcatgcccaagccagccaagacagccaagaagtgctcgctcgaccagctagacgacgcctttcatcctgagtggttcgttagtctgttcgaacagaagaccgtcaaaggctggtggccctgtgtggctgaggagggcgagaaaaagatcctggcagggaaactggagatgaccctcgaaatcgtcgccgagtccgaacacgaggagagaccagccggacagggacgggatgagccaaatatgaaccccaagcttgaggacccaagacggccagacactagtttcctttggttcactagtccatacaagaccatgaaattcatcctgtggaggcgttttcgttgggccattatcctctttatcattctttttatcctgctgctgtttcttgctatcttcatctatgcatttcctaattatgctgccatgaagctcgtgaagccgttctcctag

SEQ ID NO: 3716 - DNA, 6357 bp, synthetic construct
  misc_feature 1..6357: note = source = /note="Description of Artificial Sequence: Synthetic coding sequence"
  source 1..6357: mol_type = other DNA
atgctgcgggtgttcatcctgtacgccgagaacgtgcacacccccgataccgacatatctgacgcgtattgcagcgcggtgttcgccggggtgaaaaagcgtacaaaggtgatcaagaatagtgtgaatccagtctggaacgaaggcttcgagtgggaccttaaaggcatccccttggaccagggctccgagttgcatgtggttgtaaaagaccacgagactatgggccggaacagatttctgggcgaagcaaaagttccacttcgggaggtgttggcaaccccaagtctgagcgccagcttcaatgctcctctgttggacaccaagaaacagcctacaggggccagcctggttctgcaggtgagctatacgccattacctggtgccgtgccactcttccctcctccaacccctttggaaccctccccgactcttcctgaccttgacgttgtggccggcggaggccagagccgggccgagacatggagtttactaagcgacagtacaatggacacccgctatagcggcaagaagtggcccgctcccacagatacagggggcgaagaagatactgaggatcaagggctgacaggagatgaggcagagcctttcctcgaccagagcgggggacctggagctcctaccacgcctaggaaattacctagccggccacctccccattaccctggcattaagagaaagcggtcggcacccacctcacggaaactgttgagcgacaaacctcaggactttcagattcgggtgcaagtcatcgaaggaaggcagctgcctggcgtgaacatcaaacccgtggtgaaggtcacagccgctgggcagacaaaacgcactcgtatccataaaggcaactccccgctctttaatgagacgctctttttcaatttgtttgacagtccgggtgagctcttcgatgagccaattttcatcaccgtcgtagattccagatctttgcgaacagacgctcttctcggcgagttcaggatggacgtgggcaccatctatcgagaaccacgacacgcctacttaaggaaatggttgcttctcagcgaccccgacgacttcagtgcaggcgcccggggatacctgaaaaccagtctgtgcgtgttaggcccgggggatgaagcaccgctggaaaggaaggatccttctgaagacaaggaagacattgaaagcaatttgctgcgccccacaggagtggctctccgaggcgcccacttttgtttaaaggttttcagggctgaggatttgcctcagatggatgacgcagtcatggacaatgtgaaacagattttcggatttgagtccaacaagaagaacctggtcgatcccttcgtagaagttagttttgctggtaagatgctatgcagtaaaattctagagaagacagccaacccccagtggaatcagaacatcacgctgccagccatgtttccttctatgtgtgaaaaaatgagaatacgcatcattgactgggacagactgactcataatgacattgtggctacaacttacctcagcatgtcgaagatctcagctcccggcggcgaaattgaggtagacgattatctcggattcttacccacatttgggccttgctacattaatctttacggcagcccgagagaattcaccggtttccccgacccctacacggaactgaatactggaaagggggagggagtagcttatcgagggcggcttctacttagcttggagaccaaactggtcgaacacagcgagcagaaagtggaggacctaccagctgacgacatcctgagagtagaaaaatatctgcgcagaaggaagtacagcctgtttgccgctttctacagtgctaccatgctgcaggacgttgatgatgccatacagtttgaggtgagtatcggtaattatgggaacaagttcgacatgacttgtctgcccttggcaagcactactcagtacagcagggctgtcttcgacggttgtcactattattacctcccttggggtaacgtgaaaccagtggtagtgctaagttcttactgggaagacatatcacacagaattgagacccagaatcaacttctcggcattgctgacaggctcgaagccggactggagcaagtgcatcttgcgctcaaggcgcagtgttctacagaggacgtcgattccttggtcgcacagctgacagacgagctcatcgccggctgctctcagcccctgggagacatacacgaaaccccatccgctacacacctggatcaatatctctaccagctgaggacccaccacttaagccaaatcacagaggccgctctcgcattgaaactgggccactctgagctacccgcagcgttagaacaggccgaagactggttgctccggctgagagctctagctgaggagccacaaaactctctacctgacatcgtcatttggatgctgcagggtgacaaacgcgtcgcgtaccagcgggtccccgcccatcaagtgctctttagccgtcgcggcgcgaattattgcgggaaaaactgcgggaaactccaaactatcttcctaaagtatccaatggagaaggttccaggcgctaggatgcccgtgcagatccgggtgaaactgtggtttggcttgtcagtggacgagaaggagttcaaccaatttgctgaagggaagctcagcgtattcgccgaaacatatgagaacgagactaagctggccttagttggcaactgggggacaaccggcctaacgtaccccaagttctccgatgtcaccggcaagatcaaactgcctaaagattcatttcggccaagcgccggatggacctgggcgggcgattggtttgtgtgtcctgagaaaacattactgcacgacatggacgccggccacctcagctttgtcgaggaggtcttcgagaaccagactcgacttccaggagggcagtggatctatatgtctgataattatacagacgtgaacggagaaaaagtgctgcctaaggacgacatagaatgccccttaggttggaaatgggaggacgaagaatggagcaccgatctaaacagagccgttgatgagcagggatgggagtatagcataactattccccccgaaaggaaacctaaacattgggtccctgctgagaagatgtactatacccacagaagacgtcggtgggttcgcctgcgccgccgtgatttgagtcagatggaagctctgaaaagacacagacaagcagaggcggaaggagaaggctgggaatatgcctcacttttcggctggaagttccaccttgagtaccggaaaaccgatgcattccgccggcgtaggtggagacgccggatggagcctttggaaaaaactgggccagccgcagtatttgccctcgaaggtgcactgggcggcgtgatggacgataaatctgaagactccatgagcgtgtccaccctgtcattcggggtcaatcgccccaccatcagttgcatcttcgattatggaaacaggtaccacctccggtgttatatgtatcaggcaagagacctcgctgcaatggataaggattcctttagcgacccttacgccatcgtatctttccttcatcagagtcagaagactgtagtggtgaaaaataccctaaacccaacttgggaccagacgctgattttttatgaaattgagatctttggagaaccggccaccgtggctgagcagcctccctccatcgtagtggagctgtacgatcacgacacctacggcgctgacgagttcatgggaaggtgcatctgccagccgtctctcgaacgaatgccacggcttgcctggtttccactgactcggggaagccagccctcaggggaacttctggcctcttttgagttaatacagagagaaaagcctgctatccaccatatcccaggctttgaggtacaggaaacctctagaatcctggacgagagcgaagacactgatttaccttatccccccccccagcgggaagccaacatttacatggtcccccagaatataaaaccggcactgcagcggacggctattgaaatcttggcctggggtttaagaaacatgaagagctatcagttagccaacatctcttccccatcactggtggttgagtgtggagggcagacagtacagagctgcgttattaggaacctgagaaagaatcccaacttcgatatctgtactctgtttatggaagtgatgctgccaagggaagaattgtactgtccccctataaccgtgaaagttatcgataatcgacagttcggacggcgacctgtggtcgggcagtgcaccatacggtcattagaatcattcttatgcgacccctactcggccgagtctccctcaccgcagggaggacctgatgacgtctccctactgagtcctggcgaggatgtgctgatagatatcgatgacaaagaacccttgataccgatccagctggctgacgggctgagttcgctcgcgccgacaaatacggcgagcccgccatcctctccacacgaggaagaatttatagactggtggagcaaatttttcgcttcaatcggcgaaagagagaaatgcgggagctatttggagaaagactttgatacattaaaagtatatgacacccagctggagaacgtagaagccttcgagggtctgtctgatttctgtaataccttcaagctttatagaggaaagacacaggaggaaaccgaggatccgagtgtaataggggaattcaaaggtctgttcaagatttatcctctcccagaggaccctgccattcctatgccccctagacagtttcaccagctcgcggcccagggtccccaggagtgcctcgtgagaatttacatcgtgcgggcatttggcctacagcctaaagaccccaatggcaagtgtgacccgtatattaagattagcatcggtaagaagtctgtgtctgatcaagacaattacataccgtgcacgctggaacctgtgtttggaaaaatgtttgagctcacatgcacgctcccattggaaaaggatcttaagatcaccctctatgactatgatctccttagtaaggacgagaaaatcggcgagacggtagtggacctagaaaatagacttttgagtaagtttggcgctagatgtggtctgccacagacttactgtgtttcaggaccaaaccagtggcgcgaccagctgcgcccttctcagcttctccacttgttttgtcagcagcacagggtgaaagctcccgtttaccgcactgatcgggtgatgtttcaggacaaggaatactccattgaggagatagaagcaggccggatcccgaatccacatttaggccccgtggaggaaaggcttgccctgcatgtgcttcagcaacaaggacttgtgcccgaacacgtcgagtctagacctctgtattcacccctgcagcctgacatagagcaggggaagctgcaaatgtgggtcgatctgtttcctaaagctttgggacggcctgggcctccattcaatattactccacgaagagctcgccggttcttcttgcgctgtatcatatggaacacgcgggatgtgatcctcgatgacttgagcctgaccggcgagaagatgtccgacatctatgtaaagggatggatgattggcttcgaagagcacaagcagaaaacagatgtgcactatagaagcttaggtggcgagggcaatttcaattggcgtttcatcttccccttcgactatctgcccgcagaacaggtatgcaccattgccaagaaggacgctttctggaggctcgacaagactgagtcaaaaatcccggccagggtcgtgtttcagatttgggataatgataaatttagctttgatgatttcctcgggagtcttcagttggatctgaacagaatgccaaaacctgctaagacggccaaaaagtgctcactcgaccagcttgacgatgcattccatcccgagtggttcgtgagtctctttgaacagaagacggttaaaggatggtggccatgtgtcgccgaggagggtgagaagaagatcctcgcaggaaagctggaaatgacattggagattgtggcggaatccgagcatgaagaaaggcctgccggacagggcagagacgagcccaacatgaatcccaaattggaagatcccagaaggccagacacctcttttctctggttcacaagcccatataagacaatgaaattcatcctgtggcggcgatttaggtgggctattatcctctttattatcctcttcattctccttttgttcttggcaatcttcatctatgcctttcccaattacgcagcaatgaagctggtgaaacccttctcatag

SEQ ID NO: 3717 - DNA, 6339 bp, synthetic construct
  misc_feature 1..6339: note = source = /note="Description of Artificial Sequence: Synthetic coding sequence"
  source 1..6339: mol_type = other DNA
atgctgtgctgcctgctggtgcgggccagcaacctgcccagcgccaagaaagatcggcgcagcgacccagtcgcctcacttacatttcggggggtcaagaaacgcaccaaggtgatcaaaaatagcgtgaaccctgtctggaacgaaggatttgaatgggatctgaaagggatcccgctcgaccaggggtctgaacttcatgttgtcgtcaaagaccacgagaccatgggcaggaacagatttctaggggaagccaaggtccctctccgggaagtgttggccaccccaagcctgtccgcatccttcaacgcacctcttctagataccaagaagcagcctaccggtgccagcctagtgctccaagtgagttatactcccctgccgggggcagtgcccctgtttcctccccctacaccactggaacccagcccaaccctgcctgatttggatgttgtcgccggcggcggacagtcccgcgcagaaacttggagtctgttgtcagattcaacaatggacaccagatactctgggaagaagtggcctgcacccacagataccgggggcgaggaagacacggaagaccaaggtctgactggggacgaggccgagcccttccttgaccagtcagggggcccaggtgcgccgactactcctaggaagctccccagtcggccccctccgcactacccaggtattaagaggaaaagatccgcccctaccagtagaaaactgttaagtgacaaaccgcaggacttccagattagggttcaagtcatcgagggccgccaactccccggggtaaacattaagcccgtggtgaaagtcaccgctgctggtcaaactaaaaggacgcgcattcacaagggcaactcgcctctcttcaacgagactttgttttttaatttatttgatagcccgggcgagctgttcgacgagcctatcttcatcacagtggtagacagccgctcactaagaaccgacgcgcttctcggagaattccggatggacgtgggtacaatctatagggaaccacggcacgcctatttacggaagtggttgcttctgtccgacccagacgatttttcagctggagctagggggtatttgaaaacaagcctatgtgttctggggccaggtgatgaggctcccttggaacggaaagatccctctgaagacaaagaggatattgaaagcaacctgctgaggccgacaggggtggcccttaggggagcccacttttgcctgaaagtgtttcgcgccgaggatctacctcaaatggacgatgctgtgatggataacgtgaagcagatctttggcttcgagagcaacaaaaagaatctcgtggacccattcgtggaagtatcgttcgctgggaagatgctctgctccaaaatcctggaaaagaccgctaacccacagtggaaccaaaacataaccctgcccgctatgttcccgtccatgtgcgaaaaaatgaggatccgtataatcgactgggaccgcctcacccacaacgatatcgttgcgacgacctatctgtcaatgagcaagatatcagccccagggggcgagatcgaggaagaaccggccggagccgtcaaaccatccaaggcttcggatctggatgattatctcgggttcctgccaacttttggcccatgttacattaacctctatggcagcccgcgcgagttcaccggatttcctgatccgtataccgagctgaacaccggaaaaggagagggcgtcgcttacagagggaggctcctgttgtccctggaaacgaaactggtggaacatagcgaacagaaggtggaagatctccccgctgatgacatcttacgggttgaaaagtacctgcgccggaggaaatacagcctttttgccgctttttacagcgcgaccatgctgcaagatgtggacgacgcgatacagtttgaggtgtctatcggaaactatggaaacaaatttgacatgacatgtctgcccctcgctagtaccacccaatacagtagagccgtatttgacggctgtcactactattatctcccttggggaaacgttaagccggtcgtcgttctgtcaagctattgggaggatatttcacaccgcatcgagacccagaaccagctgctagggattgccgaccgactggaagccgggttagaacaggtccatttggccctcaaagcacaatgcagtaccgaggatgtggacagtctcgtggcgcagcttacagatgagctgatcgccggttgttcccaaccgctgggggatattcatgaaacaccatccgccacccatctggaccagtacctctaccaactgcgcacacatcatttgagccaaattaccgaagccgcactggccctcaagttgggccattcagaactgccagctgcactggagcaggctgaggactggctgttgcggctaagggcattagccgaggagccgcagaactccttacccgatatcgtcatttggatgctgcagggggacaagcgggtagcctatcaaagggtgccagctcatcaggtgctgttcagccgcaggggagccaactactgcggcaaaaactgtgggaagctccaaaccatctttctgaagtatccgatggaaaaagtacccggtgctcgcatgccagtgcagatccgcgtcaaactgtggtttggcttgtctgtagacgaaaaagagttcaatcaattcgccgagggcaaactctcagtattcgcggaaacctacgagaacgaaacaaaattagctcttgtcggcaattggggtacaaccggcctgacgtatccaaaattcagcgacgtaactgggaaaataaagctccccaaagactctttcaggccttcagccggttggacttgggctggcgactggtttgtgtgtcctgaaaagaccctgctccacgatatggacgcgggccacctctctttcgtggaggaagtgttcgagaatcagactcgtctgccaggcggacagtggatctacatgtcagacaactacaccgacgttaatggtgagaaagtgctgcccaaggatgatatcgagtgcccccttggctggaagtgggaggatgaggaatggtccacagacttaaatcgcgcagtggacgaacagggatgggaatacagcattactatacctccagaacggaaacctaagcactgggttccagctgaaaaaatgtattacacgcatcgccgcaggcggtgggtccgcctgcgtaggagagaccttagccagatggaagcactgaagcgccaccgacaagcagaggccgagggggaagggtgggagtacgcaagcctcttcggctggaaattccacctcgaatatcggaaaactgacgcttttaggagacgaagatggcggcgacggatggagcctcttgaaaagactggacccgcagcagtgttcgccttggagggggccctggggggggtaatggacgataagtctgaggattctatgagcgtctccaccttatcgtttggcgtaaacagaccaacaatttcttgtatctttgactatgggaacagatatcatctacgctgttatatgtaccaagctagagatctagccgccatggataaagatagcttctcagacccttatgccattgtttcctttctgcatcagtctcagaaaacggtcgtggtgaagaacacacttaacccaacctgggaccaaaccctcatattctacgagattgagatcttcggggaacctgccactgtagcagagcagccacccagtatagttgtcgagttgtatgatcacgatacctacggcgcggacgaatttatggggcgctgcatctgccagccttcacttgagagaatgccccggcttgcctggtttccactcacgaggggtagccagccctccggcgagcttctcgctagcttcgagctgattcagagggagaagccagcaatacatcatatccccggtttcgaggtgcaagagacgagccgcattcttgacgaatcagaagacaccgacttaccctatccacccccccagcgcgaggccaatatttatatggtaccccagaatattaaacccgctctgcaaagaaccgcaatagagatcctggcctggggactgcgcaatatgaaatcataccagctggccaatattagcagtccctccctggtggtggagtgtggcgggcagaccgtgcagtcttgtgtgattaggaatctcagaaaaaaccctaactttgatatttgtacgctgttcatggaagttatgctccctagagaagagctgtattgtccaccaatcactgtcaaggttatcgacaaccgccagtttgggcgtagacccgtcgtagggcagtgtacaatccggtccctggagagcttcctctgcgatccatatagtgcagagagtccatccccccagggcggcccagatgacgtttccctcctgtcaccaggcgaggacgtgctgatcgatattgatgacaaagaacccctcattccgatccaggaggaggagttcatcgattggtggtccaaatttttcgctagcattggtgagagagagaagtgtgggtcttatctggagaaggattttgatacactgaaagtctacgatacccaactggaaaatgttgaggcatttgagggcttgtctgatttctgtaatacattcaagctttacaggggcaaaacacaggaggagacagaggatccaagcgttatcggggagttcaagggccttttcaaaatctaccctctaccagaagatcccgcgatcccaatgccaccccgacagtttcaccagcttgcagctcagggcccccaagagtgcctggtgcgcatttatatcgtccgtgccttcgggctccagcccaaagatccgaacgggaaatgtgatccatacattaagattagcattggcaaaaaatcggtctccgaccaggataattacatcccttgcacattggagccggtgtttggtaagatgtttgaattgacctgcacactgcctctggagaaggacctgaaaattaccttgtacgactacgacctgctgtctaaggacgagaaaattggtgagacagtcgttgatctcgagaatcggctgcttagcaagtttggtgcacgctgcggtctgccccaaacatactgcgtttctggacccaaccaatggagagaccagcttaggcctagtcagctgctgcacttattttgtcagcaacatagggtaaaagctcccgtctatcgtactgaccgggtcatgtttcaagataaagaatacagcatagaagagatcgaagccgggaggatccctaacccgcacctcggccccgtagaggagcggctcgcactgcacgttttacagcagcagggcctggtgccggagcacgtggaaagccgtccattatattcgcctcttcagcccgatatcgaacaagggaagttgcagatgtgggttgaccttttcccaaaagccctagggaggcctggacccccattcaacataacacccagaagggcgaggaggtttttcctgcggtgtatcatttggaacacccgagatgtgattctagacgacctgagtctgactggcgagaagatgagcgacatctacgttaaggggtggatgatcggattcgaggagcacaaacagaaaactgacgtccactacaggtctctgggcggagaagggaatttcaattggcgattcatctttcctttcgattacctcccagccgaacaagtctgcaccattgcgaaaaaagatgccttttggcggctcgataaaactgagtcaaagatcccagcacgggtagttttccagatctgggacaatgacaagttttcattcgacgatttcttgggatccctgcagctggaccttaataggatgcctaaaccggccaagacggcaaagaagtgcagcctcgatcagcttgacgacgcgtttcacccagagtggtttgtgtcactgtttgaacagaagacggtgaaggggtggtggccttgcgtagcggaagaaggagagaagaaaattctggccgggaaactcgagatgactctggagattgtggccgagagcgagcacgaagaaagaccggcgggacagggaagggacgaacccaatatgaacccgaaactcgaagacccaagacgccccgatacttctttcctgtggttcaccagcccctacaaaactatgaaatttatcctctggcgacgctttcgatgggcaatcattctgttcataatcctttttatcctgctgttgttcctggccatctttatctacgccttccctaactatgctgcgatgaaactggtgaagccgttctcatag

SEQ ID NO: 3718 - DNA, 6267 bp, synthetic construct
  misc_feature 1..6267: note = source = /note="Description of Artificial Sequence: Synthetic coding sequence"
  source 1..6267: mol_type = other DNA
atgctgtgctgcctgctggtgcgggccagcaacctgcccagcgccaagaaggaccgccgcagcgatcccgtggcctccctgacctttcgcggggttaagaagagaaccaaagtcattaaaaattcagtcaatcccgtgtggaacgagggatttgagtgggatctgaaaggaattccactggaccagggatcagagctgcacgtagtggtcaaggaccacgaaaccatggggcgcaatagattcctaggcgaggccaaagtccccctccgggaggtgctggctacaccaagcctgtctgcctcttttaatgcacctctgctggacacaaagaagcagccgacaggcgcctctctcgtgttgcaagttagctacacaccattgccgggggctgtgcctttgttcccgcccccgacccccttggagccatcaccaaccctcccagacctcgatgtggtggccgacaccggcggcgaagaggacactgaagaccagggcctcacaggcgatgaagctgaaccattcctggatcagagcggaggccctggggcgcctactacgcccaggaagttgccttccagacctcctccacattaccctggaattaaaaggaagcggagtgcccccacatctaggaaactgttatcagacaagccacaggattttcaaatcagggtacaggtgatcgagggccggcaactgcccggtgtcaacatcaaacctgttgtgaaagtcacagcagccgggcagacgaaaagaacgagaatccataaggggaattcccccctgttcaacgagactctattcttcaacctgtttgatagccctggcgagctgttcgacgagcccatctttataacagtggtggactctagaagcctgcgcactgacgcattgctcggagagttcaggatggacgtaggcacaatctacagggaaccaagacacgcttatctgaggaaatggctgttactcagcgaccccgacgattttagtgccggggcccgcggctatctcaagacttccctgtgcgttttgggcccaggcgacgaagcccctctagaaaggaaagacccatctgaggacaaggaagacatcgaatccaacctcttgagaccaacaggagtcgcgctccggggggctcacttttgtctgaaagtgttcagagctgaagatctgccacaaatggatgacgccgtgatggataatgttaaacagatctttggctttgagagcaacaagaagaatctcgtcgacccttttgtggaggtgtcttttgcggggaaaatgttgtgttccaagatactggagaagacggccaatccccaatggaaccaaaatataacactgccggccatgttcccaagcatgtgcgaaaagatgcggatcagaatcattgactgggaccgactgacccacaacgatatcgtcgctacaacgtatctgagtatgtccaaaatttccgccccaggcggcgagatcgaggtggacgattatctgggttttttaccgacattcggcccctgctacatcaacctttatggatccccaagggagtttacagggttccctgacccatacacagaactcaataccggtaaaggagaaggcgtcgcttatcgggggcgcctgctgctttccctggaaaccaagcttgtggaacattcagaacagaaggtggaggacctgcccgctgatgacattctgagagtcgaaaaatatctgagaaggcggaaatactctctgttcgccgccttctatagcgccacaatgctccaagatgtcgacgacgctattcagttcgaggtgtcaattggcaattacggtaataaatttgatatgacctgcctgcctttggcgtccacgacgcagtattcacgcgccgtcttcgatggttgtcactactactacctcccctggggcaacgtgaagcctgtggtggtgctgagttcttattgggaggatatatcccaccggatcgagacccagaatcagctgttaggcattgctgaccgtctggaagccggactcgaacaggtccacttggccctgaaggcccagtgtagcaccgaagatgtggactccctggtcgcgcagctgaccgatgaacttattgccgggtgtagtcaaccattgggtgacatacatgagactccctcggccactcacctggatcagtacttgtaccaactgcgcacccaccatctcagccagatcactgaagccgcactcgcactcaaacttggacactccgaattgcctgccgcactcgagcaggcagaggactggttgctgaggctgagagcacttgccgaagagccgcagaacagcctccctgacatagtaatctggatgttgcaaggggataaaagggtcgcttatcagagagtccctgcccatcaggtcctattcagtcgccggggcgccaattactgtggtaagaactgtggaaaactccagaccatttttctgaagtatcccatggaaaaggtgcctggcgcacgtatgccagtgcagattagggtgaagctgtggttcggcctctccgtggatgaaaaagaatttaatcagtttgcggaagggaaactgtctgtattcgccgagacatacgagaacgagactaagctggccctcgttggtaactggggcaccactggtctgacataccctaagttttcagatgtgacgggaaagattaagctacctaaggacagctttaggccaagcgccggttggacttgggcaggagattggtttgtgtgtccagagaagacactgctgcatgatatggacgccgggcacctgtcattcgttgaagaggtcttcgagaaccagactagattgcctggcgggcagtggatttacatgagcgataattacacagacgtcaacggagaaaaggtactcccgaaagatgacatcgagtgtcctctgggatggaagtgggaagacgaagaatggtctactgacttgaaccgagccgtggatgagcagggatgggaatattccattaccatcccccccgaaagaaaacctaagcactgggtgcctgccgaaaagatgtattacacacaccggcggcgccggtgggtgaggctgcggcgacgggatttgtcacagatggaagccctcaagcgacatcgccaggccgaagccgaaggtgaagggtgggagtacgcaagcctttttggttggaaatttcacctggaatatagaaagaccgatgccttcagacggcgcaggtggagacgtcgtatggagcctctggagaagacaggtccagccgcagttttcgcccttgagggtgccctgggtggcgtgatggatgataaatctgaggatagtatgtctgtgtctaccctatctttcggcgtgaataggccaacaatctcatgcattttcgactacggtaaccgctatcacttaaggtgttacatgtatcaagcccgcgatctagctgctatggataaggactcgtttagcgacccgtatgccatcgtctcctttctgcaccaatcacagaagacggtcgtagttaagaacaccttgaacccaacatgggaccaaacactgatattctatgaaattgaaatttttggcgagcctgccaccgtggcagagcagccaccctctatcgtggttgagctgtacgaccacgacacatatggcgcagatgaattcatgggccggtgcatctgccagccttccctggagcgcatgcccagattggcctggttcccactgaccaggggatcacagccgagcggagaactgctggccagcttcgaactgatccagagagagaagccagcaatccatcatatccctggctttgaagtgcaggagaccagcaggatcctggatgagtctgaggatacagatctcccttacccacctccccagcgagaagctaacatctatatggtgccccagaacattaagcccgccttgcagagaacggctattgagatcttagcttggggactgcgcaatatgaaatcatatcagctggccaatatcagttcgccgtcattagtcgttgagtgcggaggccagaccgtgcagagttgcgttataaggaatctccgcaagaatccgaactttgatatctgcacgctatttatggaggtcatgttgcctcgagaggaactatattgcccccccataaccgtgaaggtgattgacaacagacaattcggacggaggcccgtcgtcggacagtgtacaatccgctctctggagtctttcctctgcgatccctattctgccgaatctccgtcgccacagggaggccccgacgatgttagcttgctgagcccaggagaggacgtgctgatcgacatagacgataaggagcccctgatcccgatccaattggcagacggccttagcagtctcgctcccactaacacagcctccccaccttcttcaccgcacgaggaagaatttatcgattggtggtcaaagtttttcgcgtccattggcgaacgcgagaaatgtggcagttatttggagaaagactttgacacgcttaaagtgtatgacacgcagttggagaatgtcgaggctttcgagggcctgtctgatttttgtaacactttcaaactctatagaggcaaaacacaggaagagaccgaagacccttccgttattggcgagttcaaggggctgttcaaaatctacccactgcccgaggatcctgccattcccatgccacctagacagttccaccagctcgccgcccagggtccacaggaatgccttgtccgaatctatattgttcgagcattcggcttgcagccaaaggatcccaatgggaagtgcgacccctacattaagatcagtataggcaaaaaatcagtctcagaccaagataactacatcccctgcacactggaaccggtctttggtaagatgtttgaactgacttgcacattgcctctcgaaaaggacctgaagatcacgttatatgattatgatcttctatccaaggacgagaagattggcgaaaccgtcgtcgatttagagaatcgcttactgtcaaagttcggggcccggtgtggactgcctcagacttactgtgttagtggccccaatcagtggagggaccaactgcgtccgagccaactcctccacctgttttgtcagcaacacagagtgaaggcccccgtgtatcggacagaccgcgtcatgttccaggataaagagtatagtatcgaggagatcgaggctggtagaatacctaatccacacctgggtccagtggaggaacgtctggccctgcatgttctccagcaacaagggcttgtccccgagcatgtcgagtcacgacctctgtactcgcctctgcaacctgatattgagcagggcaagctgcaaatgtgggtcgatctctttccaaaggctctcggtcggccgggcccaccgtttaacatcactcctcgacgtgccaggagattcttcttgcgatgcatcatctggaataccagagatgtaattctggacgatttgtccctgacaggagagaagatgagcgacatctacgtgaaaggttggatgataggatttgaggagcacaagcagaaaacagacgtgcactaccggtccctgggcggcgagggcaactttaattggcggtttatcttcccattcgactacctgcccgcagaacaggtctgcaccatcgctaagaaggacgctttctggcgcctcgacaagacagagtctaaaatcccagcaagggtggtcttccagatctgggacaatgataaatttagcttcgatgatttcttggggagtctccagctggaccttaatcgaatgccaaagccggctaaaactgctaagaagtgttccttggatcaattggatgacgccttccaccccgaatggtttgtgtccctatttgaacagaaaacagtgaaaggttggtggccttgtgttgcagaagaaggagaaaagaagattctggccggaaagctggagatgacgttggagatcgtggctgaatctgaacatgaggaacggccagcgggccaggggcgtgatgaacccaatatgaatcctaaattagaggacccgcggcgcccggatacctccttcctttggtttaccagcccctacaagactatgaaattcatcctatggcgtcggtttcgctgggctattattctttttataatccttttcatcctgctgctatttttggcaatcttcatctatgcgtttccgaactacgccgcgatgaagcttgtgaaacccttttcatag

SEQ ID NO: 3719 - DNA, 6294 bp, synthetic construct
  misc_feature 1..6294: note = source = /note="Description of Artificial Sequence: Synthetic coding sequence"
  source 1..6294: mol_type = other DNA
atgctgcgggtgttcatcctgtacgccgagaacgtgcacacccccgacacggacatctccgacgcctattgtagcgccgtctttgccggtgtgaagaagcggactaaggtaattaagaactcagtcaatccagtgtggaacgaagggtttgagtgggacctgaagggaattcccttggaccaggggtctgagctgcacgtggtcgtcaaggatcatgagaccatgggtagaaatcgatttttgggcgaagccaaggtgccactccgggaggtgctggcaactcccagcctgtcagctagcttcaacgcacccctattagacaccaagaagcagcctaccggcgccagtctcgtgcttcaggtctcttatacacccttgcccggggcggtgcctctgtttccccctcctacacctctggaaccatctccaaccctgccagatcttgatgtcgttgccggcggcggccaatctagggcggaaacgtggtcgctcctctccgacagcacaatggatacgcggtattccggcaaaaagtggcctgcccccacagataccggaggggaggaggataccgaagaccaaggattaacaggggacgaggctgaaccatttttggatcagtcaggcggccccggggcccccaccactcctcgaaagctgcccagccggccccctccccactaccccgggatcaaacgcaagcgcagcgcaccgacctcaagaaagttgctgtcggataagccacaggacttccagataagagtgcaggtaatcgaagggaggcagctgcctggcgttaacatcaagccggtggtaaaggtcacagctgctgggcaaactaagcgcacgagaatccacaaaggaaacagccctctgttcaacgaaacccttttctttaaccttttcgacagtcccggcgaactgtttgacgagccaatcttcattacggttgtggactccagatccttgcgcaccgacgcattgcttggcgagttccgcatggatgtggggactatataccgagagccaaggcatgcctatctccgtaagtggctcctgttatccgaccctgacgattttagcgccggcgccagaggttaccttaaaacttcactgtgtgtactgggacctggtgacgaagctccgctggaaagaaaggatccctccgaggataaagaagacattgagtccaatctcttacgtccaacaggcgttgctctgcggggagcacacttctgtctaaaggttttcagagctgaggatctgcctcagatggatgacgccgtgatggataatgttaagcagatcttcggttttgagagcaacaaaaagaaccttgtagaccctttcgtggaagtgagcttcgcgggcaaaatgctctgcagcaaaattctcgaaaagacggccaacccccaatggaaccagaatattacactaccagccatgttcccgtcaatgtgtgagaaaatgcggattcgaatcattgactgggaccgactcactcataatgacattgtggccactacctacttgagtatgtctaagatctctgcccctggaggcgagatagaggttgatgattacttgggcttcctgccaacgtttggcccttgttatattaacctgtacgggtcacccagggagtttaccggcttcccagatccctacacggagttgaacaccgggaaaggggagggtgttgcatatagaggaaggcttctgctatctttggagaccaaactggtagaacatagcgaacaaaaagtcgaggacctccccgctgatgacatcctgagggtcgaaaagtatctgaggaggcgaaagtattccctcttcgcagctttttattctgccaccatgctccaggatgttgatgacgcgatccagtttgaagtctcaattggcaattacggaaacaagtttgatatgacttgcttgccccttgcttcgacgacgcagtattcgagggccgtgttcgatggctgtcattattactacctgccatgggggaacgtgaagcctgtcgtggtattatcctcttactgggaagatatctcccataggatcgagactcagaatcagctacttgggattgccgaccggcttgaggccggactggagcaggtgcacctagccctgaaagcccagtgcagcacagaggacgtggattccttggtagcccaactaacagacgagttaatcgcgggctgctctcagcctctcggggacattcacgagactcctagtgcgacccatctggaccaatacctgtatcaactgcgtacccaccacctttcgcagattaccgaggcagcgctggccctcaagctgggccactcggagctaccagcagccctggagcaagcggaagactggcttctgcgccttagggccctggccgaggaaccgcagaattcactgcccgatattgtgatttggatgctccagggcgataaacgggttgcgtaccagcgggtgccagctcatcaagtgctgttcagtcgccggggagctaactattgtggtaagaactgcgggaagctccagactatttttctcaaatatcctatggaaaaagtcccgggagcaaggatgccggtgcagatcagagtgaagctttggttcgggctgtcggtggacgagaaagaatttaaccagtttgcagaaggaaagctgagcgtcttcgctgaaacatacgaaaacgaaacgaaactggccctggtcgggaattggggaaccacaggactcacgtaccctaaattttccgatgtgaccgggaaaattaagctgcccaaggactccttccgcccttctgctggctggacttgggcaggagattggttcgtctgccctgaaaaaacactcttgcacgacatggatgcaggtcacttatcattcgtggaggaagtgttcgagaaccagacaagactcccgggaggacaatggatatacatgtcagacaactacaccgacgtgaatggcgagaaagtccttcccaaagatgacattgagtgccctctcggatggaaatgggaggatgaggagtggtcaactgacttgaaccgcgcagtagacgaacagggctgggaatactccattacaattccacctgagagaaagccgaaacactgggtgcctgccgagaaaatgtactatacccaccgaaggagacgctgggttaggctgaggcggcgcgatctgagtcagatggaggccctcaaacgccacaggcaggccgaagctgagggggaaggttgggagtatgctagtctgttcggatggaaatttcatttggagtacaggaaaaccgatgcatttcggagacgccggtggcgccgccgaatggagcctctggagaagaccgggcccgctgctgtatttgccctggaaggcgctctcggtggagttatggacgacaagtccgaagactcaatgtcagtgtcgacactgagttttggcgttaacagacctacaattagctgcatttttgactacggtaatagatatcatctcagatgttacatgtaccaggccagagatcttgcagcaatggataaagattccttttcagatccttatgctattgtgagtttcctccaccaatctcagaaaactgtcgtcgtcaaaaataccctaaacccaacttgggaccagacactgatcttctatgagatcgaaatttttggggaaccagcgaccgttgctgaacaaccaccatcaatcgtggtagagctgtatgatcacgacacatatggtgctgacgaattcatggggcggtgtatatgtcaacccagcctagagcgaatgcctaggctggcgtggttccccttaactcgggggtcgcagccttctggggagctgctggccagtttcgaactgatccagcgggaaaagcctgcaattcatcatatccccgggttcgaggtgcaggaaacgtctcgaattctggacgaatcggaggacacggatctcccataccctccgcctcaaagagaagcaaacatctatatggtaccccagaacatcaagcccgccctccagcgaacggcaattgagatcctggcctgggggctgagaaacatgaaatcttatcagctggcaaacattagcagtcctagcctcgtggtggagtgtgggggacagaccgttcagagttgcgtgatccgcaacctgagaaaaaacccgaattttgacatatgcactctgtttatggaggtgatgctgccaagagaggagctctactgtccgcctatcaccgtgaaagtgattgacaatcggcagttcggacgcagacccgtggtaggccagtgcacaatcaggtcactggaatccttcctctgtgatccatacagcgccgaatccccttctccccagggaggtcccgacgatgtttctttacttagtccaggagaagatgtgcttattgatatcgatgacaaggaacccctgatcccaatacaggaagaggagtttatagattggtggtccaaattcttcgcctctatcggcgagcgcgagaagtgcggatcatacttagaaaaggacttcgatacattgaaagtttacgacactcagttagagaacgttgaagcctttgaggggctctcagatttttgtaatactttcaaactataccggggcaaaactcaggaagaaactgaggatccctctgtgattggtgaatttaaaggtctcttcaaaatttacccgctgcctgaagatcccgccatcccaatgccccccagacagtttcaccagcttgccgcacagggcccccaggagtgtctggtccgcatctatattgtgagagcatttgggttacaacccaaagatccgaatggaaaatgtgacccctacatcaagattagcatcggaaaaaaaagcgttagtgatcaagacaactacattccctgcactctcgagcccgtgtttgggaagatgttcgaacttacctgcaccctgccactcgaaaaagacttaaagatcacactttatgactacgacctactcagtaaggatgagaaaatcggggaaaccgtggtggatttggagaaccgcctccttagtaaattcggagcgcgctgcgggcttccacagacatactgcgtttcaggccccaaccagtggcgagatcagcttaggccgtcccaacttctgcacctcttttgccagcagcaccgggtgaaagctcccgtgtatcgtacagaccgcgttatgttccaggataaagagtacagtatagaagaaattgaggcaggtaggatccctaacccacacctgggacccgtggaagagcggttggccttgcacgttttgcagcagcagggactggtccccgagcacgtcgagtccagaccactatactccccactacagcctgatatagaacaaggcaagctgcagatgtgggtcgacctgttcccaaaagctctgggccgccctggcccaccatttaacataactccaagacgtgcaagacggttcttcttacgctgtattatatggaacaccagagacgtcatactcgacgatttgagcctcaccggggaaaagatgagcgacatttatgttaagggatggatgatcggattcgaggaacacaaacagaaaaccgatgtgcactaccgctccttggggggggaggggaattttaactggcggtttatcttcccatttgactatctacctgcagaacaggtgtgcacaatcgcgaaaaaagacgctttttggcggctcgataaaacagaaagtaagattcccgcgagggtggtcttccagatttgggacaatgacaaattcagctttgatgatttcctggggtcccttcagctggaccttaataggatgccaaagccagctaagaccgcaaaaaagtgttcactggaccagcttgatgacgccttccatcccgaatggtttgtgagcctgttcgaacagaaaacggtgaagggatggtggccctgcgtggcagaggaaggcgagaagaaaatcctagcaggtaaacttgagatgactctcgagatcgtcgcagagagtgagcacgaggagagacccgccggtcagggtagggacgagcccaatatgaatccaaagctggaggatccccgcagacctgacacttcctttctatggtttaccagtccttataagactatgaaattcattctgtggaggcgcttcagatgggctattatcttgtttataatactgtttatactgctgctgtttctggcaattttcatttacgccttcccaaactatgccgccatgaagcttgtaaaacccttcagctag

SEQ ID NO: 3720 - DNA, 6360 bp, synthetic construct
  misc_feature 1..6360: note = source = /note="Description of Artificial Sequence: Synthetic coding sequence"
  source 1..6360: mol_type = other DNA
atgctgtgctgcctgctggtgcgggccagcaacctgcccagcgccaaaaaggaccggcggtctgacccagttgcctcgctaacctttaggggggtgaaaaaacgaacaaaggtgataaagaattccgtgaaccccgtgtggaacgagggatttgagtgggatctgaaaggaatacctttggaccaaggttcggaactacacgttgtagtgaaggatcacgaaactatgggaaggaacagatttttgggcgaagctaaagttcctctgagggaggttctggccactccatcattgtccgcttccttcaacgcgccccttttggatacaaagaagcaacccaccggcgcgtctctagttcttcaggtctcttatacaccactacctggcgccgtcccactcttcccaccccctacaccactcgaacctagccctactctgccggatctcgacgttgtcgccggtggtggacaaagtagagccgagacatggtcgcttctgtccgactcgacaatggacaccagatattctggaaagaagtggcccgccccaaccgataccggcggcgaagaagataccgaagatcaggggctgacaggcgacgaggcagagccttttctcgatcagagtggaggacccggcgctcccaccacccccagaaagctgccatctcgccctccacctcattacccgggtattaagcggaaaaggtcagcaccaacttcgcgaaagcttctgtctgacaagccacaagacttccagatccgggtccaagtgattgaaggtcgccagttaccgggagtaaatataaagccagtcgtaaaggtgacagcagccgggcaaacaaagagaacccgaatccacaaaggaaactccccactgttcaacgagactctattcttcaacctgtttgactctccaggggaattatttgatgaacccatatttatcactgtggtagactctagatcactaaggactgatgctctgctgggggaattcaggatggatgtagggaccatatatcgcgagccccggcacgcttatctacggaagtggttactgctgtctgatcctgatgacttttccgccggggcgcgcggctacctgaaaacctcactatgcgttctgggtcccggggacgaggctcctttggaaagaaaggacccgagcgaggataaagaagatattgagtcaaacctgctccgacctacaggtgttgccctacggggagcccatttctgcctgaaggtgtttcgagccgaggacttaccccagatggatgacgccgtgatggacaacgtgaagcagattttcggcttcgagagtaataagaagaaccttgtggatccatttgtagaggtctcctttgctgggaaaatgctctgctcaaagatactggagaaaaccgccaacccccaatggaatcagaatattacccttcccgcgatgtttccatccatgtgtgaaaaaatgaggattcgaattattgattgggaccggctgactcataatgatatagtggccaccacctacttgtccatgtctaagatcagcgctccaggcggggaaattgaggtcgatgattatcttggtttcctacctacttttggtccctgttatattaatctgtacgggtcgccgcgcgagtttactggatttccggatccctacactgagctaaacactggcaagggagagggggtggcctatcggggacggttgctcctgtctctcgagaccaagctcgtggaacatagcgagcagaaggtggaagacctgccagccgatgatatcctgagggtggaaaagtatttacggcgtcggaaatactcactgttcgccgccttctacagcgccacaatgctgcaggatgtagacgatgccatccagtttgaggtcagcattggcaactatgggaataagttcgacatgacttgtctgcctttagcctctactacccaatattcacgagctgttttcgatggttgccactattattatttgccttggggcaatgttaaacccgtggtcgtgctgagcagctactgggaagacataagtcatcgtatagaaacccagaatcagttactcggcattgccgaccgcctggaggccggcctagaacaagttcatcttgcgctgaaggctcagtgtagtactgaagatgttgattctctggtggcccagttaacagacgagcttattgcaggttgcagccagcctctgggggacatccacgagaccccttcagcaacccatttagaccagtacctgtaccagctgaggacacaccatctgagccagatcacagaagcagctcttgcattgaagctcggacactccgaactacctgctgccctagagcaggctgaggattggctgttgagactgcgtgccctcgctgaagagccccagaacagtctgcctgatatcgttatatggatgctgcaaggggataagagagtagcctatcagagggtgcccgctcaccaagtcctgttctctcgccggggcgccaattactgcggcaagaactgtgggaagcttcagacaattttcctcaaatatccaatggaaaaggtacctggggcacgtatgccagtgcagattcgggttaaactctggtttggtctgtccgttgatgagaaggaatttaatcagttcgctgaggggaagctgtctgtgttcgcagaaacctatgaaaacgagaccaagctcgcgctggtagggaactgggggacaacaggcctgacttatcctaaattcagtgatgtcacagggaagataaagctgcccaaagactcgttcagacccagcgctggctggacctgggctggagactggttcgtttgccctgagaagacgttgctccatgatatggatgccggacacctgagcttcgtcgaagaggtcttcgagaatcagacacgactgcctggcggccagtggatatatatgtctgacaactacacggacgtgaatggagagaaagtactgcccaaggatgatatcgaatgtccactgggatggaagtgggaagatgaagagtggtctaccgacctgaatagggcagtggatgaacaggggtgggaatacagcatcaccattccccccgagcgaaagcccaagcattgggtaccagcagagaaaatgtactacactcatcgcagaaggcgctgggtcaggttacggcgcagagatctgtcgcagatggaggccctaaaaagacacaggcaggctgaagctgaaggggaaggatgggaatacgcttccctgtttgggtggaagttccatctcgagtacaggaaaacagacgcgttcagacgccgcaggtggcggcgccggatggagccattagaaaaaactggacccgcagccgtctttgctctggagggtgcactggggggagtgatggatgacaagtccgaagactcaatgtccgtgtctacccttagcttcggagtcaatcggcccaccatctcttgcatattcgactacggcaatagatatcatctaagatgctacatgtaccaggcaagggatctggcggccatggacaaagatagtttctcagatccctacgcaatcgtcagcttcctgcaccagtctcagaaaaccgtggtagttaaaaacaccttaaaccctacttgggaccaaaccctgatattttacgaaatagagatctttggggaaccagcaaccgtggcagaacaaccaccatctattgtggtcgagctgtatgaccacgacacctacggtgccgacgagttcatgggtcgctgtatctgccagccatcactggaacgcatgcctcgactggcttggtttcctttgactcgaggaagtcaaccatcgggagaactcctggccagcttcgagctgattcaaagggagaagcctgcaattcatcatatacctgggtttgaggtacaggagactagccgcattctcgatgaatctgaagacaccgatttgccgtatccccctccccaaagagaagccaatatctacatggtgccacagaatatcaagcctgctctacaacgtactgccatcgagattttggcatggggtctgcggaacatgaaaagttaccaactagcgaatatctcctccccgtcgctcgtagtggagtgtgggggccagaccgtacagtcatgtgtcatccgcaatttaagaaagaacccaaatttcgatatctgcacgctttttatggaggttatgctgcctcgagaagagctgtattgcccccctatcaccgttaaagtgattgataatagacagttcggccggcgcccagtggtgggccagtgcactatccgttctctggagtctttcctgtgcgacccatattctgctgaaagcccctcacctcagggcggcccagacgatgtgtcactgctgtcccctggcgaagacgtgttgattgatatcgacgacaaagaaccgctgattcctatccagctcgctgatggactgagctctctcgcccccactaatacagcatccccacccagttctccccacgaggaggagtttatcgactggtggtctaagttcttcgccagcataggtgagagggagaagtgcgggtcgtacctggagaaggatttcgatacacttaaggtgtatgacactcagctcgaaaacgtggaggcattcgagggtctgtccgacttttgcaatacctttaagctatatcgggggaagactcaggaggagacagaagatccttccgtgatcggggaatttaaagggcttttcaaaatctatccactccccgaagaccctgctattcctatgccgcctaggcagtttcatcagctggccgcacaggggccccaggaatgtttggtgagaatatacattgtgcgcgcctttggcctgcagcccaaggatccaaatggaaagtgcgacccctacattaagatctctatcggaaaaaaatctgtatcggaccaggacaactacattccttgcacactggagcctgtctttggaaagatgtttgagctcacatgtactctgccacttgaaaaggacctaaagattacgctgtacgattatgacctgctctcaaaggatgagaaaattggagagacagtggtagacttggaaaatagattgctctccaagttcggggctcgatgcggactgccacagacgtattgtgttagcggtcctaatcaatggagggaccagctccgcccttcccagctgttgcacctgttttgccagcagcacagggtgaaggcgccagtgtaccgaaccgacagggtgatgttccaagataaggaatattcaatcgaggagattgaggccggccgcattcctaatccccaccttggccctgtggaagagcggcttgctcttcatgttctgcagcagcagggtctagtgccagaacacgtcgagtctcggccactttatagtcccttgcagcccgatattgagcagggtaaactccagatgtgggtggacctgttcccgaaagctctcggccggccggggccacccttcaatattactccccgcagggcaaggcgattctttctgcgatgcatcatttggaatacccgggacgtcattctcgacgacctgtccctcactggggaaaagatgagcgacatatacgtgaagggctggatgattgggtttgaggagcacaagcagaagaccgacgtgcactaccgctccttgggcggagagggtaatttcaactggagattcatttttccatttgattaccttccagcagagcaggtgtgcaccattgctaagaaagatgcattctggcgcttagataaaaccgagtctaagattccagctagagtggtgtttcagatttgggacaatgacaaattctcatttgacgatttcctgggctcactgcaactggacctcaatagaatgcctaagcctgcaaagaccgctaaaaagtgctccctggaccagctcgacgacgcattccaccccgaatggtttgtgagcctgttcgagcagaagaccgtgaaaggctggtggccatgtgtggccgaagaaggagaaaagaaaattctggccgggaaactagaaatgaccctggagatcgtcgccgagtctgagcacgaggagcgcccagccggacagggtagagacgaaccaaacatgaatccaaagcttgaggatccccgtcggccagacacgagtttcctctggtttacatcaccctataaaaccatgaaattcatcctttggcggagattcagatgggcgatcattttgttcataattctattcatactgttactgttccttgcaattttcatctacgctttccccaattatgccgctatgaaactagtgaagccctttagctag

SEQ ID NO: 3721 - DNA, 6297 bp, synthetic construct
  misc_feature 1..6297: note = source = /note="Description of Artificial Sequence: Synthetic coding sequence"
  source 1..6297: mol_type = other DNA
atgctgtgctgcctgctggtgcgggccagcaacctgcccagcgccaagaaggatcggcgatcagatccagtagcctccctgacttttagaggcgtaaagaaaagaactaaggtcattaagaacagcgttaacccagtttggaatgagggattcgaatgggacttgaaagggattcctctcgatcaggggagcgaactgcatgtggtcgtcaaagaccatgaaaccatgggtagaaatcgattcctgggagaagctaaagtcccactacgtgaggtgttagcaacaccctccctgtcagccagcttcaatgccccactcctcgacacaaagaagcagccaacaggcgcctcattagtcctgcaggtaagctatacgcccctgccaggcgccgtccctctgtttcctcctccgacacccctcgagccatcaccgacactgcctgacctcgacgtcgtcgctgggggcggccaaagccgcgccgagacctggagcctgctatcagacagcaccatggacactcgttatagtgggaaaaagtggcccgcccccactgataccggcggagaagaagatacagaggaccagggactcaccggcgatgaagcggagccctttctggatcagagcggcgggccaggggcccctactacacctcggaaactcccatcacggcctccaccacactacccagggattaagagaaagcgaagcgccccaacctcgagaaaactcctgtccgacaaaccccaagactttcagattagagtccaagtgattgagggcagacaattgcctggcgtcaatatcaagccagttgtgaaggtaaccgccgcagggcagacgaaaaggacccgaatccataagggcaattctccactattcaacgagactttgttttttaacctgtttgacagccccggtgaactgttcgacgaacctatctttattactgtagtggacagcagaagtttgcgtaccgacgccctactgggtgagttcagaatggacgtgggtacaatctatagagaaccccgacatgcttacctcaggaagtggcttttactttccgatcccgacgatttctccgctggagctcgaggttacttaaagacgtcactctgcgtactgggccccggtgacgaggctcccctagaacgcaaagatccttctgaggataaagaggatatcgaatccaatctgctgaggccaaccggagtcgctttgcggggcgcgcacttctgcctgaaggtcttccgggcagaagacctccctcagatggatgatgctgtcatggacaatgtgaagcaaatctttggcttcgagtctaacaagaagaacctcgtcgacccgtttgttgaagtgtcgttcgccgggaagatgctctgtagtaagatcctggagaaaaccgccaatccccagtggaatcagaacatcaccctgccggccatgtttcctagcatgtgtgagaaaatgcggattagaatcattgactgggatcgtctgactcataacgacatcgtggccactacttacctgagtatgagtaaaatctccgccccgggtggggaaattgaggtggatgattatctgggctttctaccaacgtttggtccctgttacattaacctatatggctcccccagagagttcaccggctttccggacccatacaccgagctcaatacgggcaaaggagaaggcgtcgcatacaggggcagactgttgctgtccttagagaccaagttagtcgagcactccgaacaaaaggttgaggacctcccagcagatgacattttgcgggttgaaaaatatctcagacggagaaaatattctctcttcgctgccttttactcggcaaccatgctccaggacgtggatgatgctatacaatttgaggtcagcattggaaattatggtaacaagttcgatatgacctgtctgccgctggccagcacaacccagtactcccgggccgtctttgacggctgtcactactattatctcccctggggtaacgtgaaacccgtcgtcgtgttgagttcttactgggaagatatctcccaccgcattgaaacccaaaaccagctgctcggcatcgcagacaggttggaggcgggtcttgagcaagtccacctcgcacttaaggctcagtgtagcaccgaggatgttgactctcttgtcgcccagctaaccgacgaactgatcgccggatgctcccagcctctgggggacattcacgaaacgccatcagcgacccacttggaccagtacctttatcagctacggacgcaccatctgtcacagatcactgaagcggcccttgctttgaaattaggccacagtgaactccccgcagcactcgagcaagcagaagattggctcctacggttgcgcgctttggccgaagagccccaaaatagcctacctgatattgtgatctggatgcttcagggcgacaaacgcgtcgcataccagcgcgtgcctgcgcatcaggtgttattttccaggaggggggctaactattgcggcaaaaactgcggaaagctacagaccatctttctgaagtaccccatggaaaaggtgcccggtgctcgcatgcctgttcagatccgtgttaaactctggttcggactgtctgtagatgagaaggagttcaaccagtttgctgaggggaaacttagcgtcttcgcagagacatacgagaacgagacaaagttggccctagttggcaattgggggaccacaggcctgacctatccaaagttcagtgacgtcaccggtaagatcaaactgccaaaggattcctttcgtccttctgccgggtggacctgggcaggcgattggttcgtgtgtcctgagaaaacactcctacacgacatggacgccgggcacctgtcttttgtcgaagaggttttcgagaaccagaccaggttaccgggaggacagtggatctacatgagtgacaattacactgatgtaaacggagagaaggtcctgccaaaggacgacattgagtgcccactcggatggaaatgggaagacgaagaatggtcaaccgacctgaacagggcagtggacgagcagggttgggaatacagcatcaccatcccccctgagcggaaacccaagcactgggtacccgccgaaaagatgtactacacacatcgtcggcgccgatgggttcgtttgcgcagacgcgatctgtcgcagatggaggccctgaaacggcatagacaggcggaggctgagggcgaaggctgggagtacgcaagcttatttgggtggaagtttcacctggaatatcggaaaaccgatgcctttcgacgcaggagatggcgccgtcggatggaacccctggaaaaaactggcccggccgcagtctttgccctcgaaggcgctttggggggggtgatggatgacaagtcagaagactccatgagcgtctccacactctctttcggagtgaatagacccaccattagctgcattttcgactatgggaacagataccaccttcggtgttatatgtaccaagccagagatctcgccgcaatggataaggactccttctcagacccctatgctatagtgtccttcctccaccagagccagaaaactgtggtggttaagaataccctgaaccctacttgggatcaaactctgattttttatgagattgagatatttggggaacctgcaactgtggccgaacagccccccagtatcgtggtggaactgtacgaccacgatacatacggagccgatgagttcatggggagatgcatttgccagccttccttggagaggatgcccagattggcttggtttcccttaacccggggcagtcagccatccggtgagctgctggctagtttcgagctcatacagagagaaaagcccgcaattcatcatattccagggtttgaagtgcaggaaacctccagaattttagacgaaagcgaggatactgatctcccttacccaccaccccaaagggaggccaatatatacatggtaccccagaatatcaaacctgctttgcaaagaactgccattgaaatcctggcttggggactgcggaacatgaagtcataccagctggcaaatatttcttctcccagtctggtggtcgagtgcggcgggcagaccgttcagagctgcgtcatcagaaacctcaggaagaaccctaacttcgacatatgcaccctcttcatggaagtaatgctgcctcgggaggagctgtactgcccacccatcactgtcaaggttattgataatagacagttcggcagacggcccgtagtaggacaatgtaccatcaggagcctcgagagcttcctgtgtgacccttactctgcagagagtccaagcccacaggggggacctgacgacgtcagcctgctcagcccgggcgaagatgttttgatagatatcgacgacaaggagcccctgattcccattcaggaggaagagttcatagactggtggagcaaattcttcgcatcaatcggggagcgagagaagtgcgggtcatacctcgaaaaagatttcgacactcttaaagtatatgatacacagctagaaaacgtggaagctttcgagggacttagcgacttttgtaacacattcaagctgtataggggaaaaacgcaggaagagaccgaggatccatctgtgatcggggaatttaaaggtctgttcaaaatatatcccttgccagaagatcccgctatccctatgccaccccgccaatttcaccagctcgccgctcaaggaccccaggaatgccttgttcgcatctatattgtcagggcctttgggcttcagcctaaggacccaaacggaaaatgtgacccctatattaagatctccataggtaagaaaagcgttagcgatcaggacaattacatcccgtgtaccctggagccagtctttggtaagatgtttgaactaacctgcaccctgcccctggagaaagacctgaagattaccctctacgattatgatctcttgtctaaggacgaaaaaataggcgaaactgtggtcgacctcgaaaacagactcctgtctaagtttggtgccagatgtgggttgcctcagacatattgcgtgagcgggccaaatcaatggcgtgaccagctcaggcctagtcagttgctgcacttattttgtcagcagcaccgggttaaagcccccgtgtatcgcaccgatcgggtcatgttccaagacaaggaatactcgattgaagagattgaggctggacggatccccaacccccatctcggtccggtcgaagagagactggcattgcatgttcttcagcagcaaggcctggtgcctgaacacgtcgagtctcgcccattgtacagcccacttcagcccgatatagagcaggggaagctccagatgtgggtcgacttgtttcccaaggccctggggaggcccgggcccccatttaatattacgccaaggcgtgcccgcagatttttcttaaggtgtattatatggaacacaagagacgttattctggatgacctcagtctcacaggcgagaagatgtctgacatctacgtaaagggatggatgattgggttcgaagagcacaagcagaagactgacgtgcactataggtctctcggcggcgaggggaactttaattggcggtttatctttccatttgactacttacccgctgagcaagtgtgcactatcgcgaagaaagacgccttttggcggctagataagacggaatcaaaaattcctgctcgcgtggtatttcagatatgggataacgataaattcagctttgatgatttcctgggcagcctgcagttggacctgaataggatgccgaagccagcgaagacagccaagaagtgttcactcgaccaactcgacgatgctttccacccagagtggttcgtgtcattgtttgagcaaaaaacggtgaaaggttggtggccttgtgtggccgaagagggcgagaagaagatactggcagggaaattggaaatgacactcgaaattgtggctgagagcgaacatgaggagcggccagccggccaaggtcgcgacgagcctaacatgaatccaaaattggaagacccacgcaggccggacacttcctttctgtggttcacttctccctacaaaacgatgaaattcatcctctggcgtaggtttaggtgggccataatcttgttcatcattttatttatcctgctgttattccttgccatctttatctacgcctttcccaattacgctgcaatgaagcttgtaaagcctttctcttag

SEQ ID NO: 3722 - DNA, 6336 bp, synthetic construct
  misc_feature 1..6336: note = source = /note="Description of Artificial Sequence: Synthetic coding sequence"
  source 1..6336: mol_type = other DNA
atgctgcgggtgttcatcctgtacgccgagaacgtgcacacccccgatacagacatctccgatgcctattgttcggcagtgtttgccggcgtaaaaaagcgaaccaaggtcattaagaattcagttaatcccgtctggaacgagggcttcgagtgggacttaaaaggaatcccactcgaccagggcagcgagctgcatgtcgtggtcaaagatcacgaaacaatgggccgaaatcgattcttgggggaggccaaggtcccattgagggaggtcctcgccacaccctcactgagcgcttcatttaacgccccgttgctggacactaaaaagcagcccactggggcatccttggtgcttcaggtatcctataccccgttaccaggcgcagtgccactgttccctcctccaacccctttagagccgagccctactttacctgatctggatgtagttgcaggtggcggtcaatccagagccgagacttggagcctcttaagtgactctacaatggatacacgttactccgggaagaaatggcccgcccctactgacacgggtggtgaagaggatacagaagaccaaggcctgacaggcgacgaagccgagccttttctggaccagagcggggggcctggggcgccaactaccccgaggaagttgcctagccggcccccaccccactatccaggtattaagcggaagaggagtgcacctactagcagaaagctcctttcagataaaccccaggattttcagataagggttcaagtcattgaaggtcggcagcttcccggcgtgaatataaaaccagtggtgaaagtgacggcagcaggacagaccaagcgtactcgtatacacaaagggaattccccactgttcaacgaaacactattttttaatctttttgatagtcctggcgaactgtttgatgagccgatctttattacagtggtggatagtagaagtctcagaactgatgcactgttgggcgaatttcgcatggatgtgggcactatttaccgagagcctcgccacgcttatctgcggaagtggctcttactgtcagatccggatgatttctctgccggagctcggggctatctcaaaacgagtctctgtgtcttaggccccggggacgaagcgcctttagagagaaaagacccatccgaggataaggaggacatagagtctaacctgttgcggccaaccggagtggcactccgtggagcccacttttgtctaaaagtgtttcgcgctgaggacctcccacagatggacgacgcagtgatggacaatgtcaagcagatcttcggtttcgagtcaaataaaaaaaacctcgtggacccattcgtggaggtctcattcgctggtaaaatgctgtgttctaaaatcttggagaaaacggccaatccacaatggaaccagaatatcacactccccgctatgttccccagtatgtgcgagaaaatgaggatccggatcatagactgggaccgtctgacccacaacgacatcgtggcaacaacttatctctccatgtcaaagatttcggcgccaggaggcgagatcgaggaggagccggccggagcagtgaaaccttctaaggcaagcgaccttgacgattacctgggatttttgcctacgttcggtccttgctacattaatctatatgggagtccccgggagtttacaggattccccgacccgtatacagagttgaatacagggaagggagagggcgtggcttacagaggacggttgctgctctctttggagactaaactggtggaacactccgagcagaaagtagaagacttgccagccgatgacatcctaagggtcgagaaatacctacgccggcgtaaatatagcctcttcgccgccttctactctgcgacaatgttgcaggacgtggatgacgccattcaattcgaagtcagcattggcaattacggtaataaattcgacatgacttgcctgcccttggcctctactacccagtacagcagagcagtgtttgatggctgtcactattactacttgccctggggcaacgtgaagcccgtcgtggtgctcagttcctattgggaagacatctctcatagaatcgaaacccagaatcaactcctgggaatcgccgaccggcttgaggcaggcctcgaacaggtccatcttgccttgaaagcccaatgttcaacagaggatgtcgacagcctcgtagcacaactgactgacgagctaatcgccggatgttctcagcctctcggagatatccacgagacgcccagtgccacccatcttgaccagtacctgtatcagctgaggacacatcacctttcccaaatcaccgaagccgcactcgcacttaaactaggacacagcgagcttccagctgcactggagcaggcagaggattggctgctccggctacgggctcttgctgaggaaccccagaactccctgccagacattgtgatctggatgctgcagggggacaagagggtcgcttaccaacgagtgcccgcacatcaggtcctcttttcccgaaggggtgcaaactactgcggcaagaactgcggtaaactacaaactatctttcttaagtacccaatggaaaaggtccctggagccagaatgcctgtgcagatccgggttaaactctggttcggactgagcgttgacgagaaggagttcaaccagtttgctgaaggcaaactctcggtatttgctgaaacctatgagaatgaaactaagctggccctcgtgggcaactggggtacaactggactgacctaccctaaattctcggatgtaacgggcaagatcaaactaccaaaagactcgttcagacctagtgctggatggacctgggctggagactggtttgtgtgcccagaaaagaccttgttgcacgacatggacgcagggcacctgtcctttgtcgaagaagtgtttgagaaccagacacgattgccaggggggcaatggatctacatgagcgacaactacaccgatgttaatggcgagaaagtattgccaaaggacgatattgagtgccccttgggctggaaatgggaggatgaggaatggtccaccgacctgaaccgcgccgtagatgaacagggatgggaatactcaataactatcccccccgagcgcaagccgaaacactgggtgcccgccgaaaagatgtattacacacatcggagacggcggtgggtgcggcttcggcgtcgtgacctcagccagatggaagcactcaaacgccaccggcaggctgaggctgagggcgaggggtgggaatacgcttctctctttggatggaaattccatttggagtatagaaagactgacgctttcaggagacggaggtggcggaggcggatggagcccttagaaaaaacaggaccggccgctgttttcgctctagaaggtgctctgggcggcgttatggatgacaagtctgaggactctatgtcagtgagtaccctcagctttggggtgaatagaccgaccatcagttgtatcttcgattatggcaacaggtatcatttacgctgctacatgtatcaggcgcgtgacttggccgcaatggacaaggacagcttctcagacccttacgcaattgtatcttttttgcaccagtcacagaaaactgtggttgtcaagaacaccctcaatccaacctgggaccagacccttatattttacgaaattgaaatttttggtgaacccgctacagtggctgagcagccaccaagcatagtggtcgagctctatgatcacgacacttacggagctgacgaatttatggggagatgcatatgtcagccttcactcgaacgtatgccccggctggcttggttccccctcacccgcggctcccagccttctggtgagcttctggcaagctttgagctgatccagcgagaaaagcctgccatacaccatatcccaggcttcgaggtgcaagagacctctagaatattagatgagtcggaagataccgatttgccctaccccccacctcagagagaggccaacatttacatggtcccgcagaacattaagcctgctttgcaaagaaccgccatcgagattttagcgtggggattgagaaatatgaaaagttaccagctcgctaatattagttcaccaagtctggtagtggaatgcggggggcagaccgtgcagtcttgtgtgatacggaacctgcggaagaatcctaattttgatatatgtacgctcttcatggaggtcatgctgccacgggaggagctttactgtccgcctatcaccgtaaaggttatcgacaaccggcagtttggccggaggcccgtggtgggccagtgtacgataaggtccctggaatctttcttatgcgatccctattccgcagaatctccaagccctcagggggggccggacgatgtgtcactgctgtctcccggcgaagacgtcctcatcgacattgatgataaagaaccactgatccctatccaagaggaggagttcattgactggtggagcaagtttttcgcctctattggcgaaagggagaaatgcggctcttacctcgaaaaagattttgacacgctgaaagtatacgatacacagctggagaacgttgaggccttcgagggactgagcgacttctgtaacacatttaagctgtatcgcggaaagacacaggaagagactgaggacccaagtgtcattggcgagttcaagggcctcttcaagatttatccattgcccgaggatccagctatccccatgcctccacgccaattccaccagctggctgcacagggtcctcaagaatgtctagtcagaatatacatcgtgagggcctttggattacagcctaaagatccgaatggtaagtgtgatccctatataaagatcagcatcggaaagaaatcagttagcgaccaggacaactatattccctgcaccctggagccagtcttcggtaagatgttcgagctgacctgcactctgccacttgagaaggatctcaagattactctttacgattacgatctgctctccaaagacgaaaagataggggaaaccgtagtcgatctcgagaaccggttgctttccaagttcggcgctagatgtggcctgccacaaacttattgcgtctccggtcccaatcagtggagagaccagctgcggccttctcaactgctccatcttttttgccaacagcatcgcgtcaaagcaccagtatatcggaccgatagagtgatgtttcaagataaagagtattcaatcgaagagattgaagcaggtcggatccccaacccacatttgggcccagtcgaggagaggcttgccctccacgttcttcaacagcagggactggtgcctgaacacgtagaaagccgccctctctattcacccctgcagcctgacattgaacaaggaaagttgcagatgtgggtggacttatttcctaaagcgcttggccggcctggcccaccttttaacatcacgcctcggcgtgctcggaggttttttctgcgctgcattatctggaacacgcgggacgtgatcttggacgacctcagcctcaccggggagaaaatgtccgatatatatgtcaaaggatggatgatcggtttcgaggagcacaagcagaagaccgacgtgcactaccggtccttggggggggagggcaacttcaattggcgttttatttttccctttgactacctcccagctgagcaggtgtgcaccatagcgaaaaaggatgccttttggagactggataagacggagagcaaaattccggcccgagtggtgttccagatctgggacaatgataagttttccttcgacgatttcctggggagcctgcagctcgatctgaatagaatgccgaaacccgccaagacagctaagaaatgttcattggatcagctggatgatgcatttcatcctgagtggttcgttagtttattcgagcagaagacagtgaaagggtggtggccgtgcgtggcagaggaaggcgagaaaaagattttggccgggaagctcgagatgaccctagagatcgtggcagaatcagagcacgaagagcggcccgccggtcaggggcgggatgaacccaatatgaatcctaagctggaagatcccagaagacccgatacttcctttctttggttcaccagtccttacaagactatgaagttcatcctctggcggaggttccgttgggctataattctgttcattatcctgtttattctgcttctctttttggctattttcatttatgcctttccgaactacgcggccatgaagttggtaaagcccttctcttag

SEQ ID NO: 3723 - DNA, 6306 bp, synthetic construct
  misc_feature 1..6306: note = source = /note="Description of Artificial Sequence: Synthetic coding sequence"
  source 1..6306: mol_type = other DNA
atgctgcgggtgttcatcctgtacgccgagaacgtgcacacccccgataccgatatctccgatgcttattgcagtgcggtctttgccggggtgaagaagagaactaaagtcatcaagaatagtgtgaatcccgtgtggaatgaaggctttgagtgggacctgaaggggatccccctggatcaaggatctgagctgcacgtcgtggtgaaggatcatgaaaccatgggccgcaataggtttctaggggaggcaaaggtgccactgcgcgaagtcctggcaactcctagcctgagtgccagttttaatgcccctctgctagacacaaaaaagcagcctactggtgcgtctctcgtgctgcaggtaagttacacacctctgccaggggccgtgccactctttccaccaccaacgcccctggagcccagtcctactctgccagatcttgacgtcgtcgctgataccggtggcgaggaagatacagaagatcaggggctcaccggcgatgaggcagagcccttcttggaccagtccggtgggcccggggcgcctaccacccctagaaaactgccatcccgcccgcccccacactacccaggtataaaacgcaagcgctcagcacccacatccagaaaacttctgtccgataagccccaggacttccagatccgcgtgcaggtgatcgaaggtagacagcttcccggcgtgaacattaagccggttgtgaaagtgactgccgctggtcagaccaagcggactcgcatccacaagggtaactccccactgtttaatgaaaccctgttctttaacctgttcgattcaccgggcgaactttttgatgagcccatctttatcaccgtggtcgatagcagatcactacgcaccgatgccctgctcggcgagtttcgtatggacgtaggcactatttatagagagccccggcacgcctatctgaggaagtggctcctactctcagatcctgacgatttctccgccggtgcacgcgggtatctgaagacctcattatgcgtgctaggaccaggtgatgaggcaccgttggagcgaaaagatcctagcgaggacaaagaagatatcgagtctaatctgttacggcccacaggggtggccctgagaggggcccatttctgcttaaaggtgtttcgggccgaagacctgcctcagatggacgatgctgtcatggacaatgtgaaacagattttcggttttgaatcaaacaagaaaaacctggtggatccttttgtcgaagtatccttcgccggcaagatgctgtgctccaaaattctcgaaaagaccgcgaacccccagtggaaccagaacatcaccctgccggctatgttcccctctatgtgcgagaaaatgcgaatccggattatcgattgggaccgcctgacccacaatgatatagtcgcaaccacttacctcagtatgtccaagatttctgcacccggaggcgagattgaggaggagccagctggagctgtcaaaccatccaaggcatctgacctcgatgactatctaggtttcctcccaacatttgggccttgctatattaatctgtacggttctcccagagagttcacaggattcccagatccatataccgagttaaataccggcaagggcgaaggcgtggcatacaggggcagacttctactttctcttgaaaccaagcttgtcgaacattcggaacagaaggtggaggatttaccagccgatgatatcctgagggtggagaagtatctgcggcgccgcaagtacagcctgttcgccgccttttattcagctaccatgttgcaggacgtggatgacgccatccagttcgaggttagcatcgggaactacggcaacaagttcgatatgacatgtctgcctctcgcttcaacaactcagtacagccgggccgtgtttgacggatgtcactactactacctcccctgggggaatgtaaagcccgtagtcgtcctttcctcttattgggaagatatcagtcaccgaatcgagacccagaatcagctgctggggatcgccgaccgcctcgaagccgggctggagcaggtgcatctggcactgaaggcacagtgctcaaccgaggatgtcgactctctggtggcccagctcaccgatgagctgattgccggatgttctcagcctctcggagacattcatgagactcctagcgccacgcacctggatcaatacttgtaccagcttagaacacaccacttgtcccaaattacagaggccgccttagctttgaagcttggccacagcgagttgccagcagccctggagcaggcggaggactggttgctcaggctcagagccctcgctgaggagcctcagaactccctccctgacattgtcatctggatgctgcagggtgacaagcgggtcgcttaccaaagggtccctgcacatcaggtgttgttctcgcgacgaggcgctaattactgcgggaaaaattgcggaaaactacagactattttccttaagtaccccatggaaaaggtgcctggggcacgcatgcccgtccagattcgcgtcaaattgtggtttggcctgtctgtcgacgaaaaggaattcaatcaattcgctgaaggaaagctcagtgtgtttgcagaaacctacgaaaacgaaaccaaactggcactggtagggaactggggaactacaggcctgacctatcccaagttcagtgatgttacgggtaagatcaaactccctaaagactcttttaggccaagcgctggatggacctgggctggcgattggtttgtttgcccggagaaaactcttctgcatgacatggatgcgggccacctgtcttttgttgaagaagtgttcgagaaccaaacccgtctacccggcggccagtggatatatatgagtgataactacactgatgtgaacggtgaaaaagtactgcccaaggatgatatcgaatgtcccctgggatggaagtgggaggatgaagagtggtcgacagacttgaatagggccgtcgacgaacaaggctgggaatactcaataaccattcccccagagcgcaagcctaagcactgggtccccgccgaaaagatgtattacacacaccggcgccgtaggtgggtccgtttaagacgtagagatctgagtcagatggaagccctcaagaggcaccgtcaggccgaagctgagggtgaaggatgggagtatgcttcattgtttggttggaagtttcatctcgaataccgtaaaaccgatgccttcaggagacggagatggaggcgacggatggagcctctcgagaagactggaccagctgctgtgtttgcgctggagggggcgcttggtggggttatggacgataagtccgaggattctatgagcgtatcaacgctctctttcggtgtgaatcggcctaccatcagttgcatctttgactatgggaaccggtaccacctccggtgttatatgtaccaagcccgcgatctcgcagctatggataaagactctttttccgatccctatgcaatcgtgtctttcctgcatcagagtcagaagaccgtcgtagtgaaaaacaccctgaacccaacctgggaccaaactctcatcttttacgagatagaaatcttcggcgaacccgctacagtagccgaacagcctccaagcatagtggtcgaactgtacgatcacgatacatacggcgcagacgagtttatgggtcggtgtatctgccagccatcactcgaaagaatgccgcgattagcttggtttcccttgacccgcggcagccagccctccggagaactgctcgcaagtttcgaacttattcagcgggagaaaccagccattcatcacatacccggattcgaggtacaagagacgtcgagaatacttgacgaaagtgaagacactgacctcccctatcccccaccccagcgggaagctaatatctacatggtccctcagaacattaagccagcgcttcagagaacagcaatcgaaatcctggcgtggggacttaggaatatgaagagctaccagctagctaatattagttcgccctctctcgtcgtagagtgtggaggtcagaccgtgcaaagttgcgtgatcaggaacctccgtaagaatcctaactttgacatctgcaccctgttcatggaggtcatgctgcccagggaagagctgtactgtcctcctataacagtgaaagtgattgacaaccgccagttcggcaggcggcctgtagtggggcagtgcactatccggtctctggagtcctttctgtgtgacccttactcagcagagtctccctcgcctcaggggggtcccgatgatgtgtcactcctgtctccaggagaagacgtgttgatagacattgatgacaaggagcccctgattcccattcagctggcagacggactgagctcactggcacctacaaacactgcgtctcctccaagtagccctcacgaggaggagttcatcgattggtggtctaaattttttgcctctatcggggaaagagaaaaatgcggaagctacctggaaaaggatttcgacactctgaaggtgtatgacacccagctcgaaaatgtagaagcttttgagggattgtcggacttttgcaatacatttaagctctacagaggaaaaacacaggaggaaactgaagacccctctgtcataggcgaattcaaaggtctcttcaagatttaccccctccccgaggacccagcgatacctatgccgccacggcagttccatcaactggctgcgcagggccctcaggagtgcctggtgcgtatatacattgtcagggccttcggtttgcagccaaaggatcccaatggtaagtgtgatccatacatcaagatctcaattggaaagaaatccgttagcgatcaggataactacatcccttgtaccttggaacccgtattcggaaagatgtttgagcttacttgcactcttcccttggaaaaagacctaaaaatcaccttgtatgactacgacttgctgtccaaggatgagaagatcggggaaacagtggtggatctggagaacagactgctcagcaagtttggagcacgctgtggtctacctcaaacctattgcgtgagcggccctaatcaatggcgagatcagttaagaccttctcagctgctgcatctcttttgtcagcaacatagggtgaaagcgcctgtgtacagaaccgaccgggtcatgttccaggacaaggaatattccattgaggagattgaagcaggtagaattccaaatccacacctgggacctgtagaagagcgattggccttacatgttctgcaacagcaagggcttgtcccggagcacgtagaatcaagacccctctactctcctctgcagccggacattgagcaaggcaagcttcagatgtgggtcgacctcttccccaaagcactgggtaggcctgggcccccctttaacattactccgaggcgcgccagaaggtttttccttagatgcattatctggaacacccgtgacgtaattctcgacgatctctctctaacaggcgagaaaatgagcgacatctatgtcaagggatggatgataggattcgaggagcacaagcaaaaaacagacgtccactatcggtcactgggaggcgaaggcaacttcaattggcgatttatattccccttcgattatttaccagcagagcaggtgtgtaccatcgctaaaaaggatgccttttggcgactggataagacagaaagcaagattcctgcgcgagtggtctttcagatttgggacaacgacaaattcagctttgacgatttcctcggttcccttcagctggatcttaacaggatgcctaagcctgcgaagacagctaaaaagtgttccctggaccagctggacgacgcctttcatccagagtggttcgtatcactgttcgagcagaagacagtcaagggttggtggccttgcgtggccgaagaaggagagaagaagatcctggcgggcaagttagagatgaccctagaaatcgttgccgaatcagagcatgaagaacgaccagcagggcaaggacgtgatgagccaaatatgaatcccaagctggaagaccccagacgacctgacacctcgttcctgtggtttacatccccatacaaaaccatgaagttcatcctgtggcggcgattcaggtgggccattatcctgtttattattctgtttatccttctgctattccttgcaatatttatttatgcgttcccaaactacgcagcaatgaaattggttaagcctttctcatag

SEQ ID NO: 3724 - DNA, 447 bp, synthetic construct
  misc_feature 1..447: note = source = /note="Description of Artificial Sequence: Synthetic coding sequence"
  source 1..447: mol_type = other DNA
atgggctaccccgaggtggagcggcgggagctgctgcccgccgccgctcccagggagagggggtcccaggggtgcggttgcggcggggcccccgcgagagccggggaaggtaattcgtgcctcctcttcttgggattttttggcctttcccttgcactgcacctgttgactctgtgctgctaccttgaactgcgttctgagttgcgccgcgagagaggcgccgaatctcgacttggcggctctgggacccccggtactagtggcaccctctcaagcctgggcgggctcgaccccgatagtccaattacatctcacctggggcagcccagccctaaacagcaacccttagagcccggtgaagccgcgctgcattctgactcccaggatggccatcaagactttgactacatcatttcctttagctacggtctgcaggggttttgctag

SEQ ID NO: 3725 - DNA, 1176 bp, synthetic construct
  misc_feature 1..1176: note = source = /note="Description of Artificial Sequence: Synthetic coding sequence"
  source 1..1176: mol_type = other DNA
atgggctaccccgaggtggagcggcgggagctgctgcccgccgccgctccccgggagcgggggtcccagggctgcggctgtggcggggcacccgctagagctggtgaaggaaattcctgcttgctgttccttggattctttgggctatccctggcattgcaccttttgaccctatgctgttatcttgagctccgaagcgagttgcggagagaacgaggcgcagaaagcagactaggtggcagcggtacaccaggaacatcaggaaccctttcctccctcggaggtttggatcctgattcgccgatcacatcccacctggggcaaccttcacccaaacaacaaccgttagagcctggggaggcagctctgcactccgattcccaggacggccatcagatggcacttctgaactttttcttccccgacgaaaagccatacagcgaggaagagtcccggcgcgtgcgtcggaataagcgctctaagtccaacgagggagccgatggccccgtgaagaacaagaaaaaaggcaaaaaggcagggccgcccggccccaacggcccgcctgggccacctggtcccccagggccgcagggaccaccaggcattcccggcattcccggaattcccggaacgacagtcatgggcccacccggacccccagggccacccgggccccagggcccgccaggactccaggggcccagtggggcggcagataaagcgggcacgcgggaaaatcaacccgcagtggtccatctccaagggcaagggtcagcaatccaggtaaagaacgacctatcagggggggtcctgaatgattggtcaagaataacaatgaatccgaaggtgttcaagctgcatcctcgcagcggggaactggaagtgctcgtggacggcacttatttcatctattcccaggtggaagtatactacatcaattttactgacttcgcaagctatgaggtcgttgtcgacgagaaaccatttctccagtgtactagaagcatagagactgggaaaaccaattacaacacctgttatacagccggagtctgtctgctgaaggcacgacagaaaattgctgtcaagatggtgcacgctgatatcagtattaatatgagcaagcacaccacattcttcggagctatcaggctgggagaggcccccgccagctag

SEQ ID NO: 3726 - DNA, 1170 bp, synthetic construct
  misc_feature 1..1170: note = source = /note="Description of Artificial Sequence: Synthetic coding sequence"
  source 1..1170: mol_type = other DNA
atgggctaccccgaggtggagcggcgggagctgctgcccgccgccgcgccacgcgaaagaggtagccagggatgtgggtgtggcggcgctcctgcccgggctggggaggggaacagttgcctgctttttctcgggttctttgggctctctttggctctgcacttgctgaccctttgctgctatctggagctgcgtagcgaattgcgacgtgaacgaggtgccgagtcccgtcttggcggaagcggaactcccgggacaagcgggacactgtctagcctgggtgggcttgacccagactctccaatcacaagtcacctagggcaaccatctcccaaacaacagccactggagcccggtgaagcagcactccatagtgacagccaggacggccaccaaatggcgcttctaaacttcttcttccccgacgaaaaaccctattccgaagaagaatcaaggagggtgagacgtaacaaaaggtctaaatcaaatgaaggggctgacggccccgtaaagaataaaaagaagggtaagaaagccggccctcctggtccaaatggcccgccgggcccgccaggcccccctggcccccaaggacccccaggtatccccgggatcccaggaatccctgggaccaccgtgatgggaccccctgggcctcctggacctcccggtccacaaggtcctcctgggctgcaggggcctagcggtgcagcggacaaagctggcaccagggaaaaccaacccgcggtcgtacacctgcagggacaagggagtgcaattcaggtgaagaacgatctctcaggaggcgtgctgaacgactggagccgcattacaatgaatccaaaggtcttcaaactccaccctcggtctggagaattggaggtgctcgtggatgggacctacttcatctactcacaggtctactacataaacttcaccgatttcgcctcctatgaggtcgtcgtggatgagaaaccatttcttcaatgtacccgaagcatcgagacaggcaagactaactataacacatgttacactgccggggtatgtttgcttaaagcccgtcagaaaatcgcagtgaaaatggtgcacgcagacatttccatcaacatgagtaagcatacaacgttcttcggcgccatccggctcggagaggcaccagcgtcatag

SEQ ID NO: 3727 - DNA, 408 bp, synthetic construct
  misc_feature 1..408: note = source = /note="Description of Artificial Sequence: Synthetic coding sequence"
  source 1..408: mol_type = other DNA
atgggctaccccgaggtggagcggcgggagctgctgcccgccgccgccccacgagaaaggggctcacaaggctgcggttgcggtggtgcccctgccagagccggtgaaggcaattcatgcttgttattcctgggcttcttcggattaagtctggcgctgcacttgctgaccttgtgttgctatttggaactgagatcggaattacggcgcgagcgaggagcagagtcccggcttggagggtctggtacacccgggacctctggaaccctttcttccctaggggggctggatccagatagccccattacttctcacttggggcagccaagccctaagcagcagcccctggagccaggcgaagcggctctgcacagcgactctcaagacgggcatcagggtcaccaatag

SEQ ID NO: 3728 - DNA, 1161 bp, synthetic construct
  misc_feature 1..1161: note = source = /note="Description of Artificial Sequence: Synthetic coding sequence"
  source 1..1161: mol_type = other DNA
atgggctaccccgaggtggagcggcgggagctgctgcccgccgccgcaccacgtgaacggggaagtcaggggtgcgggtgtggaggtgctcctgcccgggcgggcgagggcaatagctgtttacttttccttggcttctttgggctgtctttggccctccatctgctgactctctgctgctatctggaactaagatccgagttgcgcagggagcggggagctgagtccagactcggcggatccggaactcccggcacctccgggactctcagctccctgggcggcttggatccggatagcccaatcacgtctcatctggggcagcctagcccaaaacagcagcctctcgaacctggggaggcagcattgcattccgatagccaagatgggcatcagatggcgttacttaatttttttttccccgacgagaagccatattccgaggaagagtctcggcgagtgcgtcgaaacaaacgctcaaagagcaacgagggtgctgatgggcctgttaaaaacaaaaaaaaagggaaaaaagctggacccccaggccccaatggccctcccgggccccccgggccgcccggtccacagggaccacccggaattcccggtattcctgggatacccggaacaacagtgatgggtcctcccgggccacccggcccgccagggccacagggccccccaggactccaggggccttccggagccgctgataaggccggaacccgggaaaatcaaccagcggtggtgcacctgcagggccaggggagtgcaatacaggttaaaaatggtggggtgttaaatgactggtcgaggatcaccatgaaccctaaggtgtttaagcttcacccacgcagcggagagctagaggtgctggttgatggcacttactttatttattcacaggtgtactacatcaacttcacagacttcgcgagctatgaagtggtggtagacgaaaagccattcttgcagtgtactcggagtatcgagactggtaagacaaactataacacatgttacaccgcgggagtgtgcctgctaaaggcccggcagaagatcgctgtcaagatggtacatgctgatatcagcatcaatatgtctaaacataccaccttctttggagccatcaggttgggggaggcgccggcaagctag

SEQ ID NO: 3729 - DNA, 447 bp, synthetic construct
  misc_feature 1..447: note = source = /note="Description of Artificial Sequence: Synthetic coding sequence"
  source 1..447: mol_type = other DNA
atgggctaccccgaggtggagcggcgggagctgctgcccgccgccgctccaagggagagaggatcacagggatgcggttgcgggggtgctcccgccagggccggcgaggggaatagctgtcttttgttcctggggtttttcggcctctcgctggcgctccatctgttaaccctgtgctgctacctggagttaagaagcgaattgaggcgggagcgcggtgcggagagtagactcgggggatccggcacccctggtacatcaggcacactgtcaagtcttgggggccttgaccccgacagtccaataacatcccacctcgggcagccttcacccaaacaacaaccgctggaacccggcgaagccgcactgcactctgatagccaggatgggcaccaagattttgactatataatttctttttcatacggccttcagggtttctgctag

SEQ ID NO: 3730 - DNA, 3429 bp, synthetic construct
  misc_feature 1..3429: note = source = /note="Description of Artificial Sequence: Synthetic coding sequence"
  source 1..3429: mol_type = other DNA
atgctggtgctgcggtgccggctgggcaccagcttccccaagctggataaccttgtgccaaaggggaagatgaagattctgctggtctttttgggactgttggggaacagcgttgccatgccgatgcacatgcctaggatgcccggtttctcctccaaaagtgaggagatgatgcggtataatcaatttaactttatgaatggaccccacatggcccacctcggccctttctttggaaatggcctcccccagcagttcccacaataccaaatgcctatgtggcctcagcctcccccaaatacgtggcatccccggaaatcttctgccccgaagcgccacaataaaactgatcagacgcaggagactcaaaaaccgaatcagacacagtctaagaaacccccccagaaacgtcccctcaagcaaccctcccacaaccaaccccaacccgaggaggaagctcagccacctcaggctttcccaccctttgggaacggcctctttccctatcagcagcccccatggcaaatcccgcagcgactcccgccgcccggatatggaagaccgcctatctctaatgaggaaggcgggaacccttacttcgggtatttcggttatcacggctttggcgggaggcccccctattacagtgaggagatgtttgaacaggatttcgagaaacctaaagaggaagaccccccaaaggccgagagtccaggtaccgaacctaccgccaactccactgtaaccgaaacgaattctacgcagccaaaccctaagggatcacagggcggtaatgatacttcaccaacgggcaactctaccccgggactgaatactggcaacaacccacctgcgcaaaatggaataggacctcttcccgctgttaacgcttccgggcagggggggcccggctcccagatcccatggcgaccaagccaacccaacattagggagaatcatccctacccaaacattagaaacttcccttcaggtagacagtggtactttacggggactgtgatgggacatcgccagaatcggccattctatagaaatcagcaagtccaacggggtcccaggtggaatttcttcgcttgggagcggaaacaagtggcccggcccgggaaccctgtgtatcacaaagcatatccacctacatcccggggaaattaccctaactacgccggtaacccagctaacctgcggcgaaagcctcaggggccaaacaaacacccagtaggcacaactgtggctcctcttggacccaaacccggcccggtggtacgcaatgaaaaaattcagaatcccaaggagaaaccactggggccgaaagaacagattatcgtccccactaagaatccaacttccccgtggcgaaacagccagcagtatgaagttaacaaaagcaattacaagcttcctcactcagaaggctacatgccagtacccaacttcaattcggtggaccagcacgaaaactcgtactacccaaggggcgattcaagaaaagtgccgaattcagacggccagacccagagtcagaaccttccaaagggtattgtcctggggtctaggcgtatgccatatgagagtgagactaatcagtccgaactcaagcacagtagttatcagcccgccgtgtatcccgaggaaatcccgtcccccgccaaggagcacttcccagcgggcagaaacacttgggatcaccaggaaatcagtccccctttcaaagaagatccagggcgtcaggaagaacacttgccccaccctagtcatggctcccgaggctcagtcttttaccctgaatacaatccatacgatccccgcgagaatagtccctacctcagaggcaacacatgggatgaaagagatgactcccccaacactatgggacagaaggagagtccgctgtatccaattaacactccagaccaaaaggagatcgtcccctacaatgaagaagatcctgtggatccaaccggtgacgaggtttttccaggccagaatagatggggtgaggaattaagttttaaaggaggccccaccgtgcgtcattatgagggagagcagtatacatctaatcagccaaaagagtatctgccttattctttagacaacccttcaaagcctcgggaggacttctattattccgagttttatccctggagcccggacgaaaattttccatcatataacactgcatcaacaatgcccccacccatcgaatccagaggctattatgtcaacaacgccgctggaccagaggagagtaccctgttcccgagccgcaatagttgggatcacaggatccaggcacaaggacaaagagaacgcagaccctactttaatcggaatatctgggatcaagccacccatctccagaaggcccccgccaggcctcctgatcagaagggcaatcagccctactacagtaatacaccagcaggtctccaaaagaatccgatttggcacgagggagagaatttaaactacggaatgcaaatcaccaggatgaactcgcccgagagggagcacagcagcttcccaaattttattcccccgtcctaccctagcggccaaaaggaagctcacctgtttcatctcagccagcgcgggtcatgctgcgctggctcctcgacaggccccaaggataaccccctggctctgcaggattacactccatcctacggcctggcccccggcgagaatcaagatacctcccctttgtataccgacggctcacacaccaaacaaactcgagatatcatttcgccaactagtatcttgcctggccagaggaattcctcagaaaagcgcgagagccagaacccgtttcgggacgatgtttccactctcagacgcaacactccgtgttcaattaagaaccaactggggcaaaaagagattatgccattccccgaagcatcctccttacaaagcaaaaacaccccctgtttgaaaaacgatctgggtggagacggaaataacatccttgagcaagtcttcgaggacaaccagctgaacgagaggacggtagatctcacccccgaacaactggtcataggcacaccagacgaagggagtaatcctgagggtatccagtctcaggtgcaggagaatgagtcagaacgccagcagcagaggccctccaatatattgcatttgccatgttttggatccaagctggctaagcaccattcctcgacaactgggacaccttcgagcgacgggaggcagagccccttcgacggtgatagcattacaccaacagaaaaccccaacaccctagtggagcttgccaccgaggagcagttcaagtcaatcaacgtggatccacttgacgcggacgagcactctcccttcgaattccttcagcgcggcactaatgtgcaggatcaggtccaagactgtctgctgttacaggcatag

SEQ ID NO: 3731 - DNA, 582 bp, synthetic construct
  misc_feature 1..582: note = source = /note="Description of Artificial Sequence: Synthetic coding sequence"
  source 1..582: mol_type = other DNA
atgggcgtgcacgagtgccccgcctggctgtggctgctgctgagcctgctgtcactccctctgggtctcccggtgctgggggcacctcctcggcttatttgcgacagtagggtgctagagcgatacctgctggaggcgaaagaggcggagaacatcactactgggtgtgctgaacattgtagtctgaacgaaaatatcaccgtgcccgataccaaggtgaatttctacgcctggaaacggatggaggttggtcagcaggccgtagaagtatggcagggcctggccctcttgtcagaggccgtacttagggggcaggcgcttctggtgaattctagccagccttgggaaccattacaactccacgtggataaggccgtgagcgggctgcgctcactcactacactgttaagagcccttggcgcccaaaaggaggccataagcccacccgacgctgctagcgcagcccccctaagaactattactgccgacactttccgaaagttattcagggtctattcaaatttcttgcggggaaagctgaagctgtataccggggaagcctgccgcaccggggatcggtag

SEQ ID NO: 3732 - DNA, 192 bp, synthetic construct
  misc_feature 1..192: note = source = /note="Description of Artificial Sequence: Synthetic coding sequence"
  source 1..192: mol_type = other DNA
atgcccagcagcgtgagctggggcatcctgctgctggccggcctgtgttgtctggtgccagtgtccctagctcatggggaaggaacttttacgagcgacttatccaagcagatggaagaggaagcagttcgattattcatcgagtggctgaaaaacggagggcctagttccggcgctccccctcccagctag

SEQ ID NO: 3733 - DNA, 1050 bp, synthetic construct
  misc_feature 1..1050: note = source = /note="Description of Artificial Sequence: Synthetic coding sequence"
  source 1..1050: mol_type = other DNA
atggaggccgtgaaggccgaggcctgggagggcgccgccgtggcccaggaccttttggctctgggttacgggggcgtgccaggtgcagcttcccgaggagcaagttgccccgatttcaggggtctgtgtgtacgcttggccgccgaactcgcaaccctcggggccctggagcagcagagagaagccggcgccgaagtccttagcgccggcgatggaccaggcgcagaggaggacttcttgagacaattgggctcgttgcttagagagttacactgtccggaccgtgctctctgtggtggcgatggcgccgccgctctgcgggagccgggcgcaggactgaggttgctaagattcctctgttctgaactgcaagcgacaaggttgctgtgtctgcggtcgctgctcgatcctagccctcgccctcccttgggggaaggcgttgtggagggagccggcatggtccaagagctggacctaactcttcaggccctgggcttgccacggcccgctcctggaaccccagcatctcaattgttacaggaactgcatgcgaagatttccgagctgcagccctcattgcctcccggcagtctgcagcctttacttagctgctcccttgacgccccaaggtgggaggccctggagtcattgagtcaatcactgagagaccagtaccgctgtcggagatgcctgctcctcaagaggctagacctgaccacctcagctttccattggtctgatagagctgaggcacagggagaagccatgagggcggtgctgatccccattagggaagtgctgacacctgagagtgatatctctatcgcacacgttctggcagcccgggctgatttaagctgcctggtgccggccacttccgtcgcagttcgacgaggcacctgctgcgctatcaacaaggtactgatgggcaacgttcctgaccgcggcggccgaccaaacgagcttgagccccccatgccgacctggcgcagcaggcgagaggacggaggccctcagtgttggggccggaagaaaaagaagaaaaaatag

SEQ ID NO: 3734 - DNA, 804 bp, synthetic construct
  misc_feature 1..804: note = source = /note="Description of Artificial Sequence: Synthetic coding sequence"
  source 1..804: mol_type = other DNA
atggaggccgtgaaggccgaggcctgggagggcgccgccgtggcccaggatctgttagcacttggctacggaggcgtgcccggggccgcatcacgcggagcctcgtgtcctgactttagagggctctgtgtgaggcttgccgctgagttggccacattgggggccctcgagcagcagcgggaggccggggccgaggtgctgagcgcaggagatggcccaggtgcagaagaagactttttgagacagctcggttcccttttgcgcgaactccactgtcccgaccgggccctctgtggcggcgatggagccgctgccctgcgcgagcctggcgctggcttgaggctcctgcggtttctgtgttccgaattgcaggcaacacgcctgctatgtttgcggtcactgctggatccgagccctcgtccccctttgggagaaggcgtggtggagggagcagggatggtacaagaactagaccttactcttcaggcacttggtctgcctcggcccgcacccgggacccctgcatcccagctgctacaagagctgcatgcgaaggaggcccttgagtccctgtcccagtctctcagggaccagtaccgctgtagaagatgcctcttattgaagcgactggacctgaccacatccgccttccactggtctgacagagcagaagtgctgatgggaaacgtgcctgatcgtggaggcagacctaatgagcttgaacctcctatgccaacttggcggtcgcgccgagaggatggtggcccgcagtgctggggccgtaaaaagaagaaaaagaagtag

SEQ ID NO: 3735 - DNA, 2601 bp, synthetic construct
  misc_feature 1..2601: note = source = /note="Description of Artificial Sequence: Synthetic coding sequence"
  source 1..2601: mol_type = other DNA
atgttcagcatgcggatcgtgtgcctggtgctgagcgtggtgggcactgcgtggactgccgactcaggcgaaggagactttctggcagagggaggcggagtgcgaggccctcgcgtcgtggaaagacaccagtctgcctgtaaagactctgattggccattctgctctgatgaagattggaactacaaatgtccaagtgggtgcaggatgaaaggactgatcgacgaagtgaaccaggacttcacgaacagaataaacaaactgaaaaactctcttttcgagtaccagaagaataacaaggactcacattcattaactacaaacatcatggagattctgaggggcgacttctccagcgccaacaatcgggacaatacttacaaccgggtgtccgaggatttaaggagcagaatagaggtgctgaagcggaaggttatcgagaaggtgcagcacatacaattgctccaaaaaaacgtcagggcgcagctggttgacatgaaacggcttgaggttgacatcgatataaaaattcgtagctgtcgcggatcttgctcacgggccctggctagggaggtagatctgaaagattacgaagaccagcaaaaacagttggagcaggtgatcgcaaaggacttgcttcctagcagagataggcagcacctgccattaattaaaatgaagcctgtaccagatttggtgcccggcaacttcaaaagccagctgcaaaaggtaccacccgagtggaaggcactgaccgatatgcctcagatgagaatggaattggagcgccctggtggcaatgagatcaccaggggcggctcaaccagctacggaaccgggtctgagaccgaaagcccccggaatcctagctctgccgggtcctggaactctggctcctccggcccggggtccaccgggaatcgcaaccccgggtccagcgggactggggggactgctacctggaagccaggttcttcgggccctgggtccaccggcagctggaacagtggctcctctggcacgggcagtacgggaaatcagaatcccggctctccgcgacccgggtcaaccgggacatggaaccccggctcaagtgaacgcggatcggccggtcactggacatccgagagcagcgtctcaggaagcacaggacagtggcactccgagtcgggatcctttaggccagacagccccggttcaggcaacgcccggcccaataatccggattggggaaccttcgaagaagtatcaggcaacgtctcccctggtacccggcgcgagtaccatactgagaagttggtgacgagcaagggagataaagaactgcggactggcaaggaaaaagtgaccagcggaagcacaaccactactcggagaagctgtagcaagaccgtgaccaagactgtcattggccccgacggccacaaagaagtaactaaggaggttgtgacttcagaagacggatccgactgccccgaggccatggatctcggtactctgtctggaatcggcactctagatggctttcgccatcggcacccagatgaggctgcattcttcgacaccgcatctaccggcaagacgtttccaggcttttttagtcctatgctcggtgagttcgtttccgagaccgaatcacggggatcagaaagtggtattttcaccaatactaaagagtccagcagccaccaccctggcatcgcagagtttcccagccgtgggaagtcctcatcttattcaaaacagtttactagctccacaagctataaccggggcgactcaacattcgaatctaagtcttacaaaatggctgatgaagccggttccgaggccgatcacgaaggcactcactcgacaaagagagggcacgcaaagtcgaggcccgtcagggattgtgatgacgtgttgcagactcatccatcgggcacccagagcggcattttcaatatcaaactcccagggagctctaagatatttagcgtctactgcgatcaagaaactagtctcggtggatggcttctcatccagcagaggatggatgggagcctgaatttcaatcggacatggcaggactataagaggggttttggcagcctcaatgatgaaggcgagggcgaattttggctgggaaatgattacctccatcttctcacccaacgaggctctgtgctgagagtggagctagaggactgggctggtaatgaagcttacgctgagtatcactttcgggtgggaagcgaagcggaggggtacgcactccaggtgtctagctatgaaggcacggccggggacgctctgatcgaggggagtgtcgaagaaggcgccgagtacactagtcacaacaacatgcaattttctacattcgacagggatgcagatcagtgggaggaaaattgcgctgaggtgtatggaggtggatggtggtacaacaactgccaggcagccaacctgaatggtatttattacccagggggttcctatgatccacgcaataactcaccctatgaaattgaaaacggagtggtgtgggtgagcttccgtggagccgactattcacttcgggccgtgaggatgaagatcagacctttagttactcagtag

SEQ ID NO: 3736 - DNA, 1935 bp, synthetic construct
  misc_feature 1..1935: note = source = /note="Description of Artificial Sequence: Synthetic coding sequence"
  source 1..1935: mol_type = other DNA
atgttcagcatgcggatcgtgtgcctggtgctgagcgtggtgggcaccgcatggactgccgactctggtgagggcgatttcctggccgaaggtgggggagtgcgcggaccgagggtcgttgagcggcatcaatctgcctgcaaggactcagattggccattttgttcggacgaggattggaattataagtgtccatctggctgcagaatgaaaggcctgattgacgaagtgaaccaggatttcacaaacagaatcaacaagctcaagaatagtctgtttgaatatcaaaaaaataacaaagactcacacagcctgaccaccaacatcatggagatactacgcggcgattttagctctgctaacaaccgcgataatacctacaacagggtctccgaagacttgagatcacggatagaagtgctcaagcgcaaggtgatcgagaaggtccaacatattcagctcctgcagaaaaacgtgagagctcagttggtcgacatgaagcggcttgaagtggatatcgatatcaagatcaggtcctgtcgcgggtcttgcagccgggcacttgctagagaagtcgacctgaaggactacgaggatcagcagaaacagctggagcaggtgatagcgaaagacttgctgccctctagggacagacagcatctgcctctcatcaaaatgaaacctgtgcctgacctcgtcccaggtaacttcaagtcccagctccagaaggtccccccggagtggaaggccctaaccgacatgccacaaatgcgcatggaacttgaacggcctgggggaaatgagatcacacgtggtggctccacttcatacggtacaggctctgagaccgaaagtcctaggaaccctagctccgcgggcagctggaatagcggctcctctggccctggaagcaccgggaatcggaaccccgggtcatccggaactggcggaactgctacttggaaacccggatcaagtggcccgggcagcacaggctcatggaactcaggctctagcggaacaggctctacgggcaaccagaatcccggctccccccggccaggaagcaccggaacctggaacccgggatctagtgagagaggcagcgctggccattggacaagtgaatcatctgtttccggaagtaccggtcaatggcactctgaatcaggtagctttagacctgactctccagggagcggaaacgcacggccgaacaaccccgactgggggaccttcgaggaagtgtcagggaacgtttctccagggactaggagggaatatcacaccgagaagctggtcaccagcaaaggagataaggagttaaggactggaaaggagaaagttaccagtggctccaccactaccacaaggcgatcttgctccaagacggtgacgaaaacagtgattggcccagacggacacaaggaggtaacaaaagaagtggtgacctcagaggacggctcggattgccccgaggctatggacctcggaacactcagtgggattggcaccttggatggatttaggcaccggcaccccgatgaggcagcgtttttcgacactgcttctacgggcaaaacattccctgggttcttttctcccatgttgggtgaatttgtgtccgagacggaaagcaggggcagtgaaagcgggattttcactaatacaaaggaatctagttcacaccacccaggtattgctgagtttccgtcacgcgggaagtcctcatcttacagtaagcagttcacctctagcacatcttacaaccgtggagattcaactttcgaaagcaagtcatacaaaatggctgatgaggcagggagcgaagccgaccatgaagggacacacagcacaaaaagaggacatgccaagagtagacccgtccgggggattcacacttcaccattgggcaaaccgtcactgagcccatag

SEQ ID NO: 3737 - DNA, 870 bp, synthetic construct
  misc_feature 1..870: note = source = /note="Description of Artificial Sequence: Synthetic coding sequence"
  source 1..870: mol_type = other DNA
atgttcagcatgcggatcgtgtgcctggtgctgagcgtggtgggcaccgcatggaccgcagactccggggagggtgacttccttgctgaaggcggaggtgttcgaggcccacgggtggtcgagagacatcagtctgcctgcaaagatagcgattggcctttttgttccgatgaggattggaattacaagtgtccgtctggctgcagaatgaagggcctaatcgatgaagtcaaccaggactttacaaatagaattaacaagctgaagaactccctgttcgaatatcagaagaataataaagattcacattcccttactacaaacataatggaaatcctgcgcggcgacttcagttctgcgaacaacagagacaatacctataatagagtaagtgaggatctgcgcagcagaatcgaggtcctgaaaagaaaggtgatcgagaaggtccaacacattcagcttctccagaagaatgtgcgcgcccagctggtggatatgaagcgactagaagtggatatcgacatcaagataaggtcttgtagggggtcatgcagtagagccctagctcgcgaggtggatttgaaggattacgaggaccagcagaaacagctggaacaagtcattgccaaagacctgttacccgtcgtcaatctccaggtgacagctaataatctcttggtggcccgggtaacgaccgaagagactccacaccttaaagctagagccatcaaatggcagatgagacccgaggttaaacccatcatgaaggagcacattgcacctagagaagccatgctgaacctggccctgtcagaagttagcaccctcctcttatggggctctctgccgtgtcctcctaggcttagctag

SEQ ID NO: 3738 - DNA, 1476 bp, synthetic construct
  misc_feature 1..1476: note = source = /note="Description of Artificial Sequence: Synthetic coding sequence"
  source 1..1476: mol_type = other DNA
atgaagcggatggtgagctggagcttccacaagctgaagaccatgaagcaccttctgctgctccttctctgtgtcttcctggtgaagtctcagggggtcaacgacaatgaggaaggcttcttcagcgcccgcgggcacaggcctctggataagaaaagggaagaagccccttctttgcgaccagcccccccacccatctcaggtggaggttatcgcgctagacctgctaaagccgccgccacacagaaaaaagtcgagcgtaaggctcccgacgctggaggttgcctgcatgctgaccccgatctgggggtcctgtgtccaacaggctgtcaacttcaggaggccctcttgcagcaggagcgcccgatccgcaattctgttgacgaactgaacaacaacgtggaagctgtatcgcagacatcttcatcatcttttcagtatatgtacctattgaaggatctctggcagaagcgacaaaagcaggtcaaggacaacgaaaatgtagtgaatgagtacagtagtgagctagagaagcaccagctatacattgatgagactgtcaacagtaatatacccacaaacctgcgcgtgctaagatctattcttgaaaacctgcgctcaaagatccaaaagctcgagtcggatgtctcagcacaaatggagtattgtagaactccgtgtactgtttcatgtaatattccagtcgtctctggaaaagagtgcgaagaaataatccgaaagggaggcgaaacaagtgaaatgtaccttatacagcctgactcatccgtgaagccctatcgcgtgtactgtgacatgaataccgagaatgggggttggacagtgattcagaataggcaggatggcagcgtcgatttcggacggaaatgggacccgtataagcagggatttgggaacgttgccactaatacagatgggaaaaattattgtggcctgcctggagagtactggctcggtaatgataaaatctcccaattaactcgaatgggccccactgaactccttatagagatggaagattggaagggcgacaaggtcaaggcccattacggcggatttacagtacagaacgaggcaaacaagtatcagatcagtgtcaataagtacaggggtacggccgggaatgctttaatggacggcgcctcacagttgatgggagagaatcggacaatgacaatacacaacggaatgttcttctcaacatacgacagggataacgatggctggctgaccagcgacccacggaagcagtgtagcaaggaggatgggggcgggtggtggtacaaccggtgccacgcggctaacccgaacggacgctattattggggggggcagtatacctgggatatggcaaaacacggcaccgatgacggagtggtttggatgaactggaaaggcagttggtatagcatgagaaagatgtcgatgaagattcgcccattttttccccagcagtag

SEQ ID NO: 3739 - DNA, 1425 bp, synthetic construct
  misc_feature 1..1425: note = source = /note="Description of Artificial Sequence: Synthetic coding sequence"
  source 1..1425: mol_type = other DNA
atgaagcggatggtgagctggagcttccacaagctgaagaccatgaagcacctgctactactgctgctgtgcgtgttcttggtgaaaagccagggcgtgaacgataatgaagaagggtttttctctgcccgtggtcaccggccattggataagaaacgtgaggaagcccgccctgcaaaggctgccgcgacgcagaaaaaagtggagcggaaggcccctgatgcgggcgggtgcctacacgccgatcccgatctgggggtgctctgccccacgggatgccagctccaagaggctttgctacagcaggagagacccatccggaattctgtggatgaactcaacaacaacgtggaagcagtgtcccagactagttcctcttctttccagtatatgtacctcctaaaggatctctggcaaaagcggcagaagcaggttaaagataacgagaacgtcgttaacgaatacagtagtgagctggaaaaacaccagttatatatcgacgagactgtgaatagtaatatccccaccaatctcagagtgctaagatccattctcgagaacctgcgatccaaaattcagaagctggagagcgacgtgtccgctcaaatggagtactgccgcaccccctgtacagtctcctgtaatatccccgtcgtttcggggaaagaatgcgaagaaattatccggaaaggcggtgagacgtctgagatgtatctgattcagcccgattcctcagtgaagccttaccgagtgtactgcgatatgaacacagagaacggcggatggacagtgatccagaataggcaggatgggagcgtggattttggacggaaatgggacccctacaagcagggatttggcaatgtggccaccaatacagatggaaagaactattgcgggctacccggagaatactggctggggaacgataaaatttctcagctaactcgcatgggccctacggagctgctgatcgagatggaggattggaaaggcgataaagtgaaggctcattacgggggtttcaccgtgcagaacgaggcaaacaaataccagatcagtgtcaacaaatatcgggggacggccggaaatgcccttatggacggagcctcccagcttatgggcgaaaacaggaccatgaccatccacaacggcatgttctttagcacgtacgatagggataacgatggttggctgaccagtgacccaaggaaacaatgtagtaaagaggatgggggcggatggtggtacaaccggtgccacgccgcaaatcctaacgggcgatattactgggggggtcaatatacctgggacatggccaagcatggtaccgatgatggagtggtgtggatgaattggaaaggaagctggtattccatgaggaagatgagcatgaagataaggcctttcttcccacagcagtag

SEQ ID NO: 3740 - DNA, 1362 bp, synthetic construct
  misc_feature 1..1362: note = source = /note="Description of Artificial Sequence: Synthetic coding sequence"
  source 1..1362: mol_type = other DNA
atgagctggagcctgcacccccggaacctgatcctgtacttctacgcgctcttattccttagtagtacctgtgtagcgtacgtcgccactcgcgacaattgttgtatcctagacgagcggttcggctcctactgtcctactacctgtgggattgccgattttctgtccacttaccagactaaggtagacaaggatctgcagagcctggaagatatcctccatcaggtggagaataagacttcggaggtcaagcagctgatcaaagcaattcagctaacgtacaatcccgatgagtcctctaaacccaatatgatcgacgccgctacgcttaaatctagaaagatgctcgaagaaatcatgaaatacgaggcatccatcctcacacacgactcaagcatccgttacttgcaggagatttacaatagcaataatcagaaaatagttaatctgaaagaaaaagtggctcagttggaggctcaatgccaagagccctgtaaagacacagttcagattcacgacataaccggaaaagattgtcaagatatcgccaacaagggagctaagcagagcgggctgtatttcatcaaacccttaaaggcaaaccagcagttcctcgtgtattgcgagattgatggctcagggaacggatggacagtgtttcagaaaaggttggatggctcagtggactttaagaaaaactggatccaatataaagagggtttcggacacctgagccccaccggtaccacagaattttggttgggaaatgagaaaattcacctaatctcgacccaatctgctatcccgtacgctttgcgcgtggaacttgaagactggaatggacggacctctacagctgactacgccatgtttaaagttgggcctgaggccgacaagtaccgccttacgtacgcctatttcgccggcggggatgccggggacgccttcgatggatttgatttcggcgacgatccctcagacaagttcttcacatcacataatggcatgcaattttccacttgggacaatgacaatgataagtttgagggaaactgcgccgagcaagatggaagtggttggtggatgaataagtgccatgccggtcaccttaatggcgtttactatcaaggcggcacgtatagcaaggctagcacaccaaacggctacgataacggcataatctgggccacttggaagacccggtggtatagcatgaagaagactactatgaagattattcccttcaaccgactgaccatcggagagggacagcagcaccatctcggcggggctaagcaggtgagaccagagcatcccgccgagaccgaatatgactccttataccctgaagacgacttgtag

SEQ ID NO: 3741 - DNA, 1314 bp, synthetic construct
  misc_feature 1..1314: note = source = /note="Description of Artificial Sequence: Synthetic coding sequence"
  source 1..1314: mol_type = other DNA
atgagctggagcctgcacccccggaacctgatcctgtacttctacgccctgctcttcctgagctcaacttgcgtggcgtacgtggccactcgtgataactgctgcatcttagatgagagattcggcagttattgtccaaccacctgtgggatcgccgattttctttctacataccagactaaagtggacaaggacctccagtcactcgaggacatcctgcaccaggttgaaaacaaaacttctgaggtgaaacagctgattaaggcgatccagttgacttacaatccagacgaatcttctaagcccaacatgatcgacgccgcaactcttaagtcccggaaaatgctggaggagatcatgaaatatgaggccagcattctgactcatgattctagcataaggtatctgcaagaaatctacaacagcaataatcagaaaatcgtgaacctcaaggagaaagttgcccagcttgaggcccaatgccaagaaccttgtaaagacaccgttcaaattcacgacattaccgggaaagactgtcaggatatcgcaaacaagggggctaaacaatccgggctgtactttatcaagcctttgaaggccaatcaacagttcctagtttattgtgaaatcgacggctccggcaatgggtggaccgtcttccagaagcggctagatgggtctgtggacttcaagaagaactggattcaatataaggaagggttcggccatctaagtcccacggggacaaccgaattctggctcggaaacgagaagattcacttgatttcaacccagtctgctataccctacgctctgcgtgtcgagttggaggactggaatggaagaaccagtaccgccgactacgctatgttcaaggtgggtcccgaagcggataaataccggttaacctacgcttacttcgccggcggcgacgccggtgacgccttcgacggcttcgattttggagatgaccccagcgacaaattcttcacaagtcataacggcatgcagtttagcacttgggataacgataacgataaattcgagggcaattgtgctgaacaagacggctctggctggtggatgaacaaatgccacgctggccacctgaatggtgtgtactaccagggaggaacatattctaaagcctctacacctaatggctacgacaatgggatcatttgggctacttggaagactaggtggtacagtatgaagaagaccaccatgaagataatccctttcaacagactcacaatcggtgagggccaacaacaccacctaggtggcgcgaagcaggcaggcgatgtttag

SEQ ID NO: 3742 - DNA, 2892 bp, synthetic construct
  misc_feature 1..2892: note = source = /note="Description of Artificial Sequence: Synthetic coding sequence"
  source 1..2892: mol_type = other DNA
atgctgagcggcgagcggaaggagggcggcagcccccggttcggcaaacttcatctgccggtggggctatggatcaattctccgaggaagcagttagccaaactgggaagacgttggcccagcgccgcatctgtgaagagttcgagctccgacaccggctcccgcagcagcgagcccctgcctccgccgcccccacatgtagagctccggcgggtgggtgcagtaaaggcagctggaggagccagcggcagccgcgcgaaacgcatatctcagctgttccgaggatctggtactgggaccactggaagctccggcgctggcggcccgggaacacccggaggcgcccagaggtgggcctcggaaaaaaaactccctgagcttgcagcaggagtggccccggagcctcccctcgcaacccgggcgacagcaccaccgggcgtgctgaaaatattcggggccggcctggcctctggcgccaactacaagtcagtcctggctactgctcgctcaacagcgcgggaactggtggctgaggcattagaaaggtatggactggccggcagcccaggcggggggcccggcgagtccagctgtgtggatgcattcgctttatgcgatgctctgggacgacccgcggctgctggagtgggatccggtgagtggagagccgagcacctcagagtgttaggtgatagcgaaaggccactgctagtgcaagaattatggcgggcacgacctggctgggctagaagattcgaactgcgcgggagggaagaagcacggaggttggaacaggaagccttcggcgctgccgactcggagggaaccggtgcgccaagctggagacctcagaaaaatcggagtagggccgcttctggaggggcggccctggcttctcctggccctgggacaggctcgggggcgccagcaggatccggcggaaaggagcgatctgaaaacttgagtctgcggcggtccgtctcagagcttagtctgcaagggaggcgcaggcgccagcaggaaaggcggcaacaggctctttcgatggccccaggtgcagccgatgctcagataggtaccgcagaccctggagactttgatcagcttacccagtgtctgattcaagcaccgtcaaacaggccatactttttactgttgcaggggtatcaggatgctcaggacttcgttgtgtacgtcatgacgcgcgaacagcacgtgtttggacgcggcgggaactccagcgggcgaggcggttcccccgccccgtatgtagatacctttttgaacgctcccgacatactgccacgacattgcacagtgagagctggcccagagcatcccgcgatggtgaggccaagccgaggagcccctgtgacccacaacgggtgcctgttgctgagggaggcggagctgcatccaggagacctgttgggtctgggcgaacacttcctctttatgtacaaagacccgcgcactggcggctctgggcccgcacgacctccctggttgcctgcacgccctggcgcaaccccacccggtcctggatgggcattcagttgcagactttgcgggcggggtctccaggaacgtggggaagcactggccgcatatctcgatggaagggaacccgtcctccgttttagaccgcgagaggaagaagcactcctaggggaaatagttcgtgccgctgctgctggtagcggcgatctgcctcctctgggccccgccacccttctggctttgtgcgttcagcactcagctcgcgaattagagctggggcacctccccaggttactgggcaggctggcccgactgataaaagaagccgtctgggagaagatcaaagagatcggggaccgccagcctgagaaccatcctgaaggggttcctgaagtgcctctaactccagaggcggtcagcgttgagctaagacctctgatgctgtggatggctaatactactgagctcctgagtttcgttcaagagaaagttttggaaatggaaaaggaggccgatcaggaggacccccagctttgtaatgacctggagctgtgcgatgaggcaatggctctgctcgacgaggtaatcatgtgcacatttcagcagtcagtgtactatttaacaaagaccttgtacagcaccttgcctgcactgttggactcaaacccatttacggcaggagcggagctcccaggaccaggggccgagctgggcgctatgccccctggactcagacccaccctgggcgtgtttcaggcagctctggaactcacatcccagtgtgagttacatcccgatctggtgagccagacgttcggttatttattcttcttcagcaatgcctccttgcttaactcactcatggagaggggccagggtcggccattttatcagtggtctagggctgtacagatccgaacaaacctggatctcgtacttgactggttgcaaggagctggccttggggacattgcaacggagttttttcgcaagctatccatggcggtaaacttactgtgtgtgccaaggacttcgctcttgaaggcctcttggtcaagcctgcggactgatcaccccactttgactcccgctcagttgcaccacttgctcagccattatcagttggggccagggagaggtcctccagcagcctgggaccctccccccgctgagcgcgaggctgttgacacaggagatattttcgagtcattctcttctcatccgccactcatcttacctctcggcagttcaagacttaggcttaccgggcccgtgaccgacgatgctctacatcgagaactccgccggctgagacgtctgctatgggatctggaacagcaggaactgcctgccaattacaggcatgggccgccagttgcgactagcccttag

SEQ ID NO: 3743 - DNA, 630 bp, synthetic construct
  misc_feature 1..630: note = source = /note="Description of Artificial Sequence: Synthetic coding sequence"
  source 1..630: mol_type = other DNA
atggacagcgacgagaccggcttcgagcacagcggcctgtgggtgtccgtactagccgggctgcttctgggagcatgtcaggcccaccccattcctgattcgtccccactcctgcaattcggtggacaagtccgacagcgttatctgtatacagacgatgcacaacagactgaggcccatctggagatccgcgaagatggtacggtgggaggggcagccgaccagagcccagaatcactgctgcagctgaaggccctgaaacctggcgttatccagattctgggcgtgaagacctctagatttctgtgtcaacgaccagatggtgctttgtacggttccctgcatttcgatcccgaggcttgtagcttccgggaacttctgctagaggacggatataatgtgtatcagagcgaagctcacggcctgccacttcacctcccaggcaacaaatcaccccaccgggatccagctccccgaggaccagccagattcctcccactacctgggctcccgccagcactgcccgaacctcccggaatcctggcccctcaacctcccgatgtgggatctagcgacccactgtcaatggtcggcccatcccagggtcgcagcccgtcctatgctagctag

SEQ ID NO: 3744 - DNA, 321 bp, synthetic construct
  misc_feature 1..321: note = source = /note="Description of Artificial Sequence: Synthetic coding sequence"
  source 1..321: mol_type = other DNA
atgctgcggttcatccaggaggtgaacaccaccacccggagctgcgctctctgggacctcgaggaggatactgaatacattgtgcacgtccaggcgatctccatccaaggacagtctcccgcttctgagcccgtgctgtttaagactccccgagaggcagagaagatggcatctaagaataaggatgaggtgactatgaaggaaatgggtaggaatcagcaactaagaaccggggaagtgctgataatcgttgtcgtactgttcatgtgggctggtgtgattgcactattctgccggcaatacgatattattgaggcctag

SEQ ID NO: 3745 - DNA, 414 bp, synthetic construct
  misc_feature 1..414: note = source = /note="Description of Artificial Sequence: Synthetic coding sequence"
  source 1..414: mol_type = other DNA
atgctgcggttcatccaggaggtgaacaccaccacccggagctgcgcgctgtgggacctcgaagaggacaccgagtacattgtccatgtccaagccatctctattcaagggcaatctcccgctagcgagccggtcttatttaaaactcctcgtgaagcggagaaaatggcctctaagaataaagatgaagttacgatgaaagagatgggcaggaaccagcagctacgtactggcgaggtgctgattatcgttgttgtcttgtttatgtgggctggtgtgattgctttattctgtcgccagtatgatattattaaggacaacgaacctaacaacaataaggagaaaacgaagtccgccagtgagacctccactcccgaacaccaggggggtgggctgctccggtccaaaatctag

SEQ ID NO: 3746 - DNA, 390 bp, synthetic construct
  misc_feature 1..390: note = source = /note="Description of Artificial Sequence: Synthetic coding sequence"
  source 1..390: mol_type = other DNA
atgaagaccctgcagttcttcttcctgttctgctgctggaaggccatttgctgtaactcgtgcgagctgacgaacatcacgatagctattgaaaaggaagagtgtcggttctgcatcagtatcaatacgacctggtgcgccggctattgttacacaagggatcttgtgtataaggacccagctcgccctaaaattcagaaaacctgtacctttaaggagttggtgtacgagacggtgcgcgttcctggctgtgcacaccatgcggacagcctgtatacataccccgtcgcaacccagtgccattgcgggaagtgcgattcagatagcacagattgtactgtgaggggactgggaccctcatactgttcctttggtgaaatgaaagaatag

SEQ ID NO: 3747 - DNA, 390 bp, synthetic construct
  misc_feature 1..390: note = source = /note="Description of Artificial Sequence: Synthetic coding sequence"
  source 1..390: mol_type = other DNA
atgaagaccctgcagttcttcttcctgttctgctgctggaaggccatctgctgtaacagctgcgagttgaccaatatcactatcgcaattgagaaagaggaatgtaggttttgtatctcaatcaacactacttggtgcgccggatattgttatacaagggatctggtgtataaggatcccgcaaggccaaagattcagaaaacctgtaccttcaaagagctggtgtacgaaaccgtacgcgttcctggttgcgcccaccacgccgactccctgtatacatatcccgtggcgactcagtgccattgtggaaagtgcgactcagactctacggattgcaccgtgcggggactcgggccaagctactgcagcttcggcgagatgaaagaatag

SEQ ID NO: 3748 - DNA, 390 bp, synthetic construct
  misc_feature 1..390: note = source = /note="Description of Artificial Sequence: Synthetic coding sequence"
  source 1..390: mol_type = other DNA
atgaagaccctgcagttcttcttcctgttctgctgctggaaggccatatgctgcaattcttgcgagctgactaacattacaattgccatcgaaaaagaagagtgccgcttctgcatctcgataaacactacatggtgcgctgggtattgttacacccgggatctggtgtataaggaccctgcccggcctaagatccagaaaacctgcactttcaaggagctggtgtatgagacagtcagagtaccagggtgtgctcaccatgcggattccctatatacctacccagttgcgacccaatgccactgcgggaaatgtgacagcgacagcactgattgtaccgtgcgtgggctgggaccgagctattgcagtttcggagagatgaaggaatag

SEQ ID NO: 3749 - DNA, 1260 bp, synthetic construct
  misc_feature 1..1260: note = source = /note="Description of Artificial Sequence: Synthetic coding sequence"
  source 1..1260: mol_type = other DNA
atgagcttcatccccgtggccgaggacagcgacttccccatccacaacctgccctacggcgtgttctcaacacgcggggatccacgacccagaattggagtggctattggtgaccaaatactagatttgtctatcattaaacatctgtttacagggcccgtgctgagcaaacatcaggatgtctttaaccaaccaactctcaatagcttcatggggctgggacaagctgcatggaaggaagccagagtatttttgcaaaacttactgtctgtgtcacaagctcgactcagagacgacaccgagctgcggaaatgcgcttttatttcacaagcctctgccaccatgcatttgcccgccacgatcggcgactacactgatttctactcctcgcggcagcatgccactaatgtcggaattatgttcagagacaaggaaaacgcgctcatgccaaattggttgcaccttccagttggatatcatggccgcgccagctccgtcgtggtctcaggcacaccgatcagaagacccatgggccagatgaaacccgacgacagtaaacccccggtctatggcgcctgtaaacttctggatatggagctggaaatggccttttttgtggggcctggcaaccggcttggggaaccgatcccaatctcaaaggcccacgaacacatttttggcatggtactcatgaatgactggagtgcaagagacatccagaagtgggagtatgtccccctgggtcctttcctaggtaagtcatttggaactactgtgagcccctgggtagtgcctatggatgcccttatgccattcgccgtgcctaatcccaaacaggatcctcggccacttccctatctgtgccacgatgaaccttatacttttgatatcaatctctctgtcaacctcaaaggagaggggatgtcccaggcagcaaccatttgtaaaagcaattttaaatacatgtactggactatgctgcagcaactaacacatcactcagttaatggctgcaacctgcggccgggcgatctgcttgcatcagggacgatctccgggcctgagccagagaacttcggcagtatgcttgagctgagctggaagggcactaaaccaatcgaccttgggaacggtcagacgcgtaagttcctgctggacggcgacgaagttataatcaccggctactgccagggcgacggatacaggatcggttttggccagtgcgctgggaaagtgttacccgccctcctgccaagttag

SEQ ID NO: 3750 - DNA, 1260 bp, synthetic construct
  misc_feature 1..1260: note = source = /note="Description of Artificial Sequence: Synthetic coding sequence"
  source 1..1260: mol_type = other DNA
atgagcttcatccccgtggccgaggacagcgacttccccatccacaatctgccatacggcgtcttcagcacccggggggatccaaggccaaggatcggcgttgccatcggcgatcagatcttggatctgtctattatcaagcatctgttcactgggcctgttctatccaagcaccaggacgtatttaatcaacctactctgaacagctttatgggactgggccaggccgcctggaaggaggccagggtgtttctgcagaacctcttgagtgttagtcaggcgcgcctccgggatgatacagaattacggaagtgtgctttcatcagccaggcctctgctaccatgcatttaccagctactatcggagattatactgatttctactcttcccgccaacatgccacaaacgtgggcataatgtttagggacaaagagaacgccctcatgccaaattggctccacttgccggtgggatatcacggcagagcatcttctgtggtggtgagtggtaccccaatacggaggcccatgggccagatgaagcctgacgacagtaaacccccagtgtacggcgcctgcaagctgctggacatggaactagagatggcttttttcgtgggacctggcaatcgcctaggggagcctatacctatttctaaggcccacgagcacatttttggcatggtgttaatgaacgactggtcggcaagagatattcaaaaatgggaatacgtgccactcggaccctttctgggaaagtcctttggaacaactgtgtctccttgggttgtgccaatggacgcccttatgccctttgccgtaccaaatcccaagcaggatccacgccctctcccttacctgtgccacgatgagccctatacttttgatatcaacctttccgtcaatctaaagggggagggcatgtcacaggccgcgaccatctgcaagagcaactttaagtatatgtactggaccatgttgcagcagttgactcatcatagcgttaatgggtgcaatctgcgcccaggggacctactggcctccggcacaatcagtggtccagaacccgagaattttggatccatgttggagttgtcttggaaaggcacaaagccaatcgacttgggaaacggacaaactcggaagttcctcctggacggggatgaggttatcattactggctattgccaaggggatggataccgtattggcttcggtcagtgtgcaggcaaagttctgccagcattgttacccagctag

SEQ ID NO: 3751 - DNA, 1260 bp, synthetic construct
  misc_feature 1..1260: note = source = /note="Description of Artificial Sequence: Synthetic coding sequence"
  source 1..1260: mol_type = other DNA
atgagcttcatccccgtggccgaggacagcgacttccccatccacaatctcccctatggggttttttccacaagaggcgaccctagaccacggataggcgtcgctatcggagatcagatcctcgatctttcaattatcaagcacctcttcacgggtcccgtgttgtctaagcaccaggatgtgttcaaccagccgacactgaattcgtttatgggcctaggccaggccgcctggaaagaagctcgagtgttcctccaaaacctgctctccgtgagccaggcccgcctgagggacgacactgaacttcgaaagtgcgcctttatctctcaggccagcgctaccatgcatctgcccgcaaccattggtgattatacagacttttattcctctcgtcagcacgctacaaatgtgggcattatgtttcgcgataaggaaaacgccctcatgcctaactggctgcatctgccagtggggtaccacgggcgtgcttcgtccgtcgtggtgagtggcactcctatcaggcggcctatgggacagatgaagcctgacgactcgaaaccgcctgtgtacggggcctgtaagttattagatatggagttggaaatggccttcttcgtaggccccggcaataggttaggggagccgatacccatttccaaagcccatgagcacatctttggcatggttcttatgaatgattggagtgctcgggacatacagaaatgggaatatgtgcccttggggcctttcttgggaaaatcattcggtacaaccgtgtcaccatgggtggtgcctatggacgcccttatgccattcgcagttccgaatccaaagcaggatcctcgacctctgccgtacctttgtcacgacgagccttatacgttcgacatcaatcttagtgttaatctaaaaggagaaggcatgtcacaggccgcaaccatctgcaaatccaatttcaaatacatgtactggaccatgctgcagcagctcacccaccattccgtgaacggatgtaatttgcggcccggagacctgctggcgtccggtaccatcagcggcccagaaccggagaactttggaagcatgttagagctctcttggaagggcactaagcccatcgatctaggaaatggccaaacccgaaaatttttgctagacggcgacgaggtgatcattacagggtattgtcagggggacggctacaggatcggcttcggacagtgcgccggcaaggtgctcccggcgcttctacccagctag

SEQ ID NO: 3752 - DNA, 759 bp, synthetic construct
  misc_feature 1..759: note = source = /note="Description of Artificial Sequence: Synthetic coding sequence"
  source 1..759: mol_type = other DNA
atggaggccatgtggctgctgtgcgtggccctggccgtgctggcctggggctttctctgggtgtgggactctagtgagagaatgaagagccgagagcagggtggccgattgggcgcagagagcaggacacttctggtcatcgctcaccccgatgatgaagccatgttttttgcccctacagtcctgggattggcacggcttcgccactgggtgtacctgctatgtttttccgccggaaactactacaaccagggtgagacaaggaagaaagagttgctacagtcttgcgacgttcttggtattcctctgagctcagtgatgatcatagacaatagagactttcctgatgaccccggtatgcagtgggacactgaacacgtggcgcgtgtgctcctccaacacatagaggtgaatggcatcaacctagtggtgaccttcgacgctgggggcgttagcggacacagtaaccacatcgctttatatgcagcagtgcgcgctcttcattcggagggcaagctcccgaaggggtgttctgttttgaccttgcagagcgtgaacgtgctgcgcaaatatataagccttctcgatctacctctctcgctgctgcatacccaggatgtgcttttcgtccttaatagcaaagaggtcgctcaggctaagaaggccatgagttgtcaccggagccagttgctttggttcagacgcttgtacatcatcttttcaagatatatgagaattaattccctttcctttctctag

SEQ ID NO: 3753 - DNA, 1203 bp, synthetic construct
  misc_feature 1..1203: note = source = /note="Description of Artificial Sequence: Synthetic coding sequence"
  source 1..1203: mol_type = other DNA
atggccgccctgcggcagccccaggtggccgagctgctggccgaggccagaagggctttccgcgaagaatttggggcagagcctgaactggccgttagtgctcccggccgggtgaatttaataggggagcataccgactacaatcaaggtctggtcctgccgatgcgggatcgactgttccctacacttgagggaagaaagcgaggctccggccgggaaagggtgcggggacgacttctggcacaagcgcggcctctgggagctggagctccgcgactgcaacctggaagcatgtttcctctcaattgtgaggccctctgcgctacccagaagggaacactgagggcctctggccataggggcgcgccgaccgctgacctcggtgagcgttcattgttggcccagccagtgcagtttacagaggaagagacggggggcgcctttcggcccatctgctcactgggatccgcccaggcaagcagcccaccctgcccgaccgcccagggacgtgtgcaggatggcctagtaagcctgctcactacatctgaaggggcagatgaaccccagcgcctccagttcccgttgccaaccgctcagagatcattggagccaggcacccctcgctgggctaactatgtgaagggcgtaattcaatattaccccgccgctcctcttcccgggttttctgcagttgtggtgtcatcagtccccctgggtggcgggctgagttcctcagccagccttgaagtcgccacatacacattcctgcagcagctttgtccagattccggcactattgctgccagagcccaggtttgtcagcaggccgagcatagcttcgccggtatgccttgtggcataatggatcagttcatcagtctcatgggccagaagggacatgccctgttaattgactgccggtctttggaaacatcactggtgccgctcagcgatccaaagctggcagtactgattacaaactctaatgttcgccattccctggcatcaagcgaatatcccgtgaggcgccgtcaatgtgaggaggtcgccagggcacttggaaaggagagcttaagagaggtgcaattagaggaattggaagccgcaagggatctggtgtccaaggaaggtttccgcagggctcggcatgtggtcggggagatccgccggaccgccgatggggctaaggtgctgtgcttatag

SEQ ID NO: 3754 - DNA, 1269 bp, synthetic construct
  misc_feature 1..1269: note = source = /note="Description of Artificial Sequence: Synthetic coding sequence"
  source 1..1269: mol_type = other DNA
atgtgcgcccccccccggggcgccccccccgagcaccccgcccccacgggcctatgtagaagctcgtgtgccgagttacaggctcgggtcatggctgcactgaggcagccgcaggtggcggagcttctcgctgaggcacggagggcatttcgagaagagttcggagccgagcctgaactggccgtttctgcgccaggaagagtaaaccttatcggcgagcacactgactataaccagggactcgttctgcctatggccctagaattgatgacggtccttgttggatccccgaggaaggatggcctggtctctctcctgacaacaagtgaaggagctgatgagccgcagcgcctacaattccctctccctaccgcacagcgtagcctggagccaggaacgccccggtgggccaactacgtgaagggagtgatccaatattacccggccgcacctctgcccggcttcagcgctgttgtggtgtcatcagttcctctggggggtggcctcagctcaagcgccagcctcgaggttgccacttacactttccttcagcagctctgccctgactcagggacgatcgccgctcgtgcgcaggtctgccagcaggcagaacactcatttgcgggcatgccctgcgggataatggaccagttcatttctttaatgggtcagaaaggccacgctcttctgattgattgtaggagcctcgaaacatccctggttcctctgtcggacccaaaactggcagttctaatcactaattcgaatgtacgacactccctggccagctcggaataccctgttagaagaaggcagtgcgaagaggtcgctcgtgcacttggcaaagaatcgttaagggaagtgcagttggaagagttggaggcagcccgggatctggtgtccaaagagggattccgcagggccaggcatgtcgtcggagagatccggaggactgcccaggcagcagccgcccttcgccgtggtgattaccgggcctttgggagactgatggtcgaaagccaccgctcactccgggatgattacgaggttagttgtccggagctagaccaactggttgaggctgctctcgcagtaccaggagtctacggaagcaggatgacaggaggcggttttggcgggtgcacggtgaccttgcttgaggcatcggctgccccacacgccatgaggcacatccaagagcattatggcggcacagcaacattctacctaagccaagcagcagatggggccaaagtgctatgcctgtag

SEQ ID NO: 3755 - DNA, 1179 bp, synthetic construct
  misc_feature 1..1179: note = source = /note="Description of Artificial Sequence: Synthetic coding sequence"
  source 1..1179: mol_type = other DNA
atggccgccctgcggcagccccaggtggccgagctgctggccgaggctcggagggcttttagggaagaatttggagctgaacccgagttagcagtgtcagcaccaggcagggttaatttgatcggggagcataccgattacaatcagggcctcgtactgcctatggccttggagttaatgacggttttggttggctctccgaggaaagatgggctggtgagcttgctgaccacatctgaaggggctgacgaaccgcagcggttacagttcccactgccgaccgctcagcgcagtcttgaaccgggtacgcctaggtgggccaactatgttaagggggtgattcagtattatccagccgccccattgcccggtttttctgccgtcgtggtgtcatctgtccccctgggcggaggactgtcctcatccgcgtccctagaggtggcaacctatacctttcttcagcagttgtgccctgattctggcacaatcgctgctcgagctcaggtgtgccagcaggctgagcactcatttgctggaatgccttgcggcataatggatcagtttatttctctcatggggcagaaagggcacgcactgctcatcgattgccgttccctggaaacaagccttgtgcccttaagcgatccgaagctcgccgtccttattaccaatagtaacgttcgccattcccttgcgtcctccgagtatccagttaggaggcggcagtgcgaggaggtcgctcgcgctttgggcaaagaatccctgcgggaggtccagctggaggagcttgaagccgccagagacttagtctcaaaggagggctttcgacgcgcccggcatgtcgtcggcgaaatacggcgcaccgctcaggcagctgctgcactgcgaaggggcgattaccgggcgtttggacggctgatggtggaatcacaccggagcctgcgtgacgactatgaggtgtcctgtccagaattggatcagctggtcgaggccgccttggcggtcccgggagtgtacgggagcaggatgaccggcggaggctttggaggctgtacggttaccttattggaggccagcgcagcgccccacgcgatgagacacattcaagagcattacggaggcacagctactttctacctctcccaggccgcggacggagccaaagtcctctgtttatag

SEQ ID NO: 3756 - DNA, 1569 bp, synthetic construct
  misc_feature 1..1569: note = source = /note="Description of Artificial Sequence: Synthetic coding sequence"
  source 1..1569: mol_type = other DNA
atggccgccgtggtggccgccacccggtggtggcagctgctgctggtgctctctgcagccggaatgggtgccagtggggctcctcagccacctaatatactcctgctgctgatggatgacatgggctggggcgacttgggggtgtatggagagccctctcgggaaacccctaatctggaccggatggctgcggagggcctcctatttcccaacttctacagcgctaaccctctttgcagccctagccgagctgccttactgaccggcaggctgccgataaggaatggcttctacaccaccaatgcccacgcccgaaacgcctacacgccccaggagattgtaggcggaattcccgattccgagcagctgcttccggagctattgaagaaggctggctatgtttctaagatcgtaggcaagtggcacttgggacaccggcctcagttccatccattgaagcacggattcgatgagtggttcggctcgccaaattgtcatttcggaccctacgataataaggcccgcccaaatattcccgtgtaccgcgactgggaaatggtgggcagatattacgaggaattccctataaatctgaagacaggtgaagcaaaccttactcagatctacctgcaagaagcattggattttatcaagaggcaagcgcgccaccaccccttttttctgtactgggccgtggatgccacccatgcccccgtgtatgcttccaagcctttcttgggaacttcccagcggggcaggtacggagatgcagtgagagaaatagacgattcgatcgggaagatcctggagctactacaggatctccacgtggccgataatactttcgtattcttcacttccgataatggcgcagcactgatctccgcgccggagcaggggggcagcaatggcccctttctgtgtggtaaacaaactactttcgagggcggaatgagagaaccagccctggcttggtggcctgggcatgtgaccgccggccaagtgagccaccagctcggctcaattatggacctgttcacaaccagcctagccctagcgggcctgacccctccttccgatagagctattgacggtctgaatctcctcccaaccctgttgcagggcaggttgatggaccggccaatattctactataggggtgacacattgatggcagccacgttgggacagcataaggcccacttctggacctggaccaactcctgggaaaatttccgccaggggatagacttctgtcccggacagaacgtgagcggcgtcacgacacacaatctggaagaccacaccaagctcccactcatctttcatcttgggcgtgatcccggtgagcgtttcccactcagtttcgccagcgccgaataccaagaagccttgtctcgcatcaccagtgtcgttcagcaacatcaggaggcactggtgcccgcgcagcctcagctgaatgtgtgcaactgggctgtcatgaactgggccccgccaggctgcgaaaaattaggcaaatgcctgactccccctgagtcaataccaaagaaatgcctctggagccattag

SEQ ID NO: 3757 - DNA, 261 bp, synthetic construct
  misc_feature 1..261: note = source = /note="Description of Artificial Sequence: Synthetic coding sequence"
  source 1..261: mol_type = other DNA
atggccgccgtggtggccgccacccggtggtggcagctgctgctggtgctctctgctgccggcatgggcgcatccggggccccccagccccctaatatccttttgctcctaatggacgaccgcggaaggcactgctcccaggatggatatccctcagccatggcttctacccctccaactccgatgcctgagacgcccacacatagacgtaggctgtgggcggcaagtcagacaagatctagttcgtgtcggagcttctag

SEQ ID NO: 3758 - DNA, 1344 bp, synthetic construct
  misc_feature 1..1344: note = source = /note="Description of Artificial Sequence: Synthetic coding sequence"
  source 1..1344: mol_type = other DNA
atggccgccgtggtggccgccacccggtggtggcagctgctgctggttcttagcgccgctggaatgggagcaagcggggcccctggccaacgcgcttacactccacaggagatagtcggagggatcccagacagcgaacagttgctgcctgaactgctgaagaaggcaggttatgtgagcaaaattgtcggaaaatggcacctaggccaccgcccccagttccacccgctgaaacatggcttcgacgagtggttcgggagccccaattgtcacttcggtccctatgacaacaaggccagacctaatatccccgtctatagggactgggagatggttggcagatattacgaggaattccctatcaacctcaaaaccggagaagccaatttaacacagatttacctccaagaggcacttgactttattaaacggcaggcccggcaccacccgtttttcttgtactgggcagtcgatgctacacacgcccctgtgtacgcttccaagccttttctgggaaccagtcagcgtggccgttacggcgatgctgtaagggagatcgacgattccatcggtaaaattttagaactgctccaggacctccacgtcgctgataatactttcgttttttttacttctgacaatggcgcggctctcatctctgctccagagcagggaggctccaacggtccattcctgtgcggcaaacagacaacattcgagggtgggatgcgggaacccgcactggcttggtggcccgggcatgtgacagctgggcaggtgagccaccagcttgggtcaattatggatctgtttacgacatccctggcgctagcaggactgaccccacccagcgatagggcgatagacggccttaacttactccctacccttttgcagggcagactcatggatagacccatcttttattatagaggcgatacattgatggcagccaccctgggacagcacaaagcccatttctggacttggaccaactcgtgggaaaatttcagacagggcattgacttttgcccaggacagaacgtgtcaggagtcaccacccataacttggaggatcataccaagctgccactgattttccacctgggtagagacccaggcgaacgcttcccactcagcttcgcatccgctgaatatcaggaagccctgagccggattacatctgtggtccaacaacatcaggaggctctggtgccggcacagcctcagctcaatgtttgtaattgggctgttatgaactgggctcctcccggctgcgaaaaactgggcaagtgcctgacccccccagagtccattccaaaaaagtgtctgtggtcccattag

SEQ ID NO: 3759 - DNA, 1140 bp, synthetic construct
  misc_feature 1..1140: note = source = /note="Description of Artificial Sequence: Synthetic coding sequence"
  source 1..1140: mol_type = other DNA
atgagccggagcggcaccgacccccagcagcggcagcaggccagcgaagccgatgcagccgccgctacattcagagccaatgaccaccagcacattcgctacaaccctttgcaagacgagtgggtcctcgtgagcgctcacaggatgaaaaggccttggcaaggccaagtagagccccaactgctgaagacggtgcccaggcacgatccactgaaccccttgtgcccgggcgcaatcagggcgaatggcgaggtcaatccacagtacgactctacattcctattcgataacgattttcccgcgctgcagcccgacgccccgtccccagggccctcagatcatccactgtttcaggccaaatccgcccggggcgtctgcaaggttatgtgtttccatccttggtccgatgttactctccccctcatgagcgtcccagagattagagcggtggtggacgcttgggcgagtgtgaccgaagagttaggcgcccagtacccttgggtccaaattttcgagaacaaaggagccatgatggggtgcagcaatccccacccacattgccaggtttgggcttcctcatttctccctgatatcgctcagagggaggaaagatcccagcaggcttacaaatctcagcacggcgagcccctgctgatggaatacagcaggcaggaactgctgcggaaggagcgcctggttctcacttctgagcactggctggtactcgttcctttctgggcaacttggccctaccagactcttcttctgcctcgcaggcacgtacgacggttgcccgaattaacccccgccgagagagacgatttggcttccataatgaaaaaactactcacgaagtacgacaacctctttgagacaagcttcccctatagtatgggttggcacggggcccctacaggctctgaagctggagcgaactggaaccactggcaactccacgctcattattatccgcccctgctgcgaagtgctacggtgcggaaattcatggttggctacgaaatgctggctcaggcccagcgtgatctcactcccgaacaggcagccgagagattacgtgccctgccagaggttcattaccacctcgggcagaaggaccgggagacagcaactatcgcttag

SEQ ID NO: 3760 - DNA, 813 bp, synthetic construct
  misc_feature 1..813: note = source = /note="Description of Artificial Sequence: Synthetic coding sequence"
  source 1..813: mol_type = other DNA
atgaccctgagcaccctgtgcgtgctgggccccagcgagcccaccgaaagcaaagttatgtgcttccacccttggagtgacgtcaccctgccgctaatgtccgtgcctgaaatcagggctgttgtagatgcatgggcctctgtcacggaagaattgggggcgcagtatccttgggttcagatatttgagaataaaggggccatgatgggctgctctaacccacaccctcactgccaggtgtgggctagctccttcttgcccgacatcgcccaacgtgaagaaaggagtcaacaggcttacaagtcacaacacggggaacccctcttaatggaatactccaggcaggagctgctgcggaaggagcgtctcgtcctgaccagcgaacactggctggtgctggtgccattttgggctacctggccctaccagactctgctactaccgcggagacacgtcaggagactcccagaacttacccccgccgaaagagacgatttggctagcataatgaagaagctgttgacgaagtacgataacctttttgagaccagttttccttatagtatgggctggcacggtgcaccaacagggtcggaggctggggccaactggaatcactggcagctgcacgctcattactatcctcccttactgcggagcgccacggtgcgtaagtttatggttggatacgagatgctggcccaggcccagcgcgacttgactcctgaacaggccgccgaaaggttgagggctttacccgaggtgcactaccacttgggccagaaagatcgcgaaaccgccaccatcgcgtag

SEQ ID NO: 3761 - DNA, 255 bp, synthetic construct
  misc_feature 1..255: note = source = /note="Description of Artificial Sequence: Synthetic coding sequence"
  source 1..255: mol_type = other DNA
atgagccggagcggcaccgacccccagcagcggcagcaggccagcgaggctgatgccgccgccgccaccttccgcgccaacgatcatcagcacataaggtataatcctctgcaggatgaatgggttctggtaagcgcccacaggatgaagcgtccctggcaggggcaggtggagccgcagctacttaaaactgttcccaggcacgatcctctgaaccccctgtgtcctggggctattagagctaatggcgagtag

SEQ ID NO: 3762 - DNA, 2229 bp, synthetic construct
  misc_feature 1..2229: note = source = /note="Description of Artificial Sequence: Synthetic coding sequence"
  source 1..2229: mol_type = other DNA
atgagcccccagaagcgggtgaagaacgtgcaggcccagaaccggacatctcagggttcgagctcattccagactaccctgagcgcctggaaggtcaaacaggatccgtcaaattcaaaaaacatttctaagcacggacagaataacccagtgggagattacgagcacgctgacgatcaggccgaagaagatgctctgcagatggccgtgggctattttgagaaggggcccattaaagcatctcagaataaggacaagacacttgagaagcaccttaagacagtcgaaaatgtagcatggaaaaacggactggcaagtgaagagatcgatatcctcttgaatatcgcactgagcgggaagtttgggaacgccgtaaacacaagaattttgaagtgtatgattccagccactgtgattagcgaggatagcgtagtaaaagccgtgtcttggctgtgcgtcggtaagtgttcaggatctacaaaagtcttgttctataggtggctcgtagcgatgttcgactttatcgatcgtaaagagcaaattaatctgctgtatggtttttttttcgccagcctgcaagatgatgcactttgcccatatgtttgccacctattgtaccttttaaccaaaaaagaaaacgtgaaacctttccgggtgagaaaactccttgacctgcaggccaaaatggggatgcagccacaccttcaagcactcctgtcactctacaagttcttcgctccggccctcatcagcgtgtctttaccggtgcgaaagaagatttactttaagaatagcgagaacctctggaagaccgctctgctggctgtaaaacaacgtaaccgcggtcctagccccgaaccgctgaaactgatgctgggccctgccaatgtgcgccctctgaagcgcaagtggaacagtctgagcgtcattcctgtgcttaactcatcttcgtataccaaggaatgtgggaagaaagagatgtccctgtccgactgtctgaatcgttccggaagcttccctttggaacagctgcagtcctttccccagctgctgcagaatatccattgcctggagcttccgagccagatggggtcagttctgaacaactctctgctactacattacataaactgtgtccgggacgaaccggttctgctgagattttattactggctgtctcagacgctgcaggaggagtgcatctggtacaaagtcaacaattacgagcacggaaaggagtttaccaactttctggatacaatcatcagagccgaatgtttcctgcaggagggattttactcttgtgaagccttcctgtacaagtcactcccattgtgggatggcctgtgctgtcgcagccagttcctgcagctcgtgagctggatcccattttcgtcgttcagcgaggtcaaacccctgctgtttgaccacctggcccagctgttcttcacctctacaatctactttaaatgttcagtgttgcagtcccttaaagagttactacagaactggctcctgtggctctctatggacatccatatgaagcctgtgaccaattctccgctggaaactacgctaggcggttcaatgaactccgtcagcaaactaattcactacgttgggtggctgagcaccaccgccatgaggctggagtcaaacaacactttccttctgcactttatcttggatttttatgaaaaagtctgtgacatatacattaactacaaccttccactggttgtgctatttcctccaggaatcttttatagcgcgcttctgagcctggatacaagcatcctaaaccaactgtgctttatcatgcaccgataccgaaaaaatctgaccgcagcaaaaaaaaacgagttagtgcagaagacaaaatccgaatttaacttttctagcaaaacataccaagagtttaatcactacctcacatcaatggtgggttgtctgtggacctctaagcctttcggcaaggggatatacatcgacccagagattctggagaaaacaggggtagctgagtataagaattccctgaatgtggtgcatcacccttcttttttatcttatgctgtttcatttctccttcagggaaagaagtggtcatggtacctggactacctgtttagtcagggcttgcagggactgaagctgttcattaggagcagcgtccaccacagttctattcctcgtgctgagggtatcaactgcaacaaccagtactag

SEQ ID NO: 3763 - DNA, 636 bp, synthetic construct
  misc_feature 1..636: note = source = /note="Description of Artificial Sequence: Synthetic coding sequence"
  source 1..636: mol_type = other DNA
atgaagctgtgggacgtggtggccgtgtgcctggtgctgctgcacaccgccagtgccttccctctcccagcaggtaaacgacccccagaggcaccggcagaagatcgcagcctgggtagacgtcgagcccctttcgctctttcctccgactcaaatatgcctgaggattatcccgaccagtttgatgatgtcatggatttcattcaagctaccatcaaacgtctgaaacgctctccagacaagcaaatggccgtgctccctcgccgggagcgaaatcggcaggctgcagcagcaaacccagagaacagcagaggcaagggtaggagaggacagcggggcaagaaccggggctgcgtgctgacagccatacacctcaacgtgacagacttgggcctgggctacgagactaaagaagagctcatattccgctactgttccggttcctgcgacgcagctgagaccacttacgataaaatcctaaaaaatttgtcccgcaaccgccgactggtatccgataaggtcgggcaagcttgctgtcggcccatcgcatttgatgatgacctctcttttcttgacgataacttggtgtaccacatcctgagaaagcacagcgccaaacgctgcggctgcatttag

SEQ ID NO: 3764 - DNA, 558 bp, synthetic construct
  misc_feature 1..558: note = source = /note="Description of Artificial Sequence: Synthetic coding sequence"
  source 1..558: mol_type = other DNA
atgaagctgtgggacgtggtggccgtgtgcctggtgctgctgcacaccgcctcggcattccctctgcctgccgctaatatgccagaagactaccccgaccagtttgacgacgttatggacttcatccaggccacgatcaagcggctgaagcgctcccctgataaacaaatggctgtccttcctagacgagaaaggaatagacaggccgccgctgccaatccggaaaactcacgaggtaaaggcaggaggggtcagcgtggaaagaatagaggatgcgtgttgacagctattcatctgaatgtgactgacctgggtctgggctatgaaacgaaagaggaactgatatttcgctactgttccggttcctgcgacgctgcagagaccacttacgataagatcctgaaaaacttatccagaaaccggaggttagtgtccgataaagtcggtcaggcctgttgtcgcccaattgctttcgacgacgacctctccttcctagacgataacctggtgtaccatatcctcaggaaacacagtgctaaacgttgtggttgtatctag

SEQ ID NO: 3765 - DNA, 687 bp, synthetic construct
  misc_feature 1..687: note = source = /note="Description of Artificial Sequence: Synthetic coding sequence"
  source 1..687: mol_type = other DNA
atgcagagcctgcccaacagcaacggcgccgccgccggccgggacttcaaaatgaagctgtgggacgttgtggcggtatgtttagtcctgctgcacacagcctccgcttttcctcttcctgctggaaaacgaccacctgaggcgcccgcagaggatcggagcctggggcgccgacgggcaccctttgcactttctagtgattctaacatgccggaggactaccctgaccagtttgacgatgtgatggatttcatccaagcgacaataaagaggttgaagagatcaccagacaagcagatggcagtgctacccaggagggagcgcaatcggcaggccgctgctgcgaatccagagaacagtcgcggaaaaggaagacgggggcagaggggaaagaacagagggtgtgttctgacagctattcatttgaacgtaacagatctggggcttggttacgagaccaaagaagagcttatattcaggtattgctcgggctcttgtgacgctgctgaaactacctacgataaaattctgaaaaatttatctagaaataggcggttagtgtccgacaaagtgggacaggcgtgttgccgaccaattgcattcgatgatgacctgagtttcctggacgacaacctagtgtaccatattctcaggaagcattcagcaaagcggtgcggttgtatatag

SEQ ID NO: 3766 - DNA, 186 bp, synthetic construct
  misc_feature 1..186: note = source = /note="Description of Artificial Sequence: Synthetic coding sequence"
  source 1..186: mol_type = other DNA
atgaagctgtgggacgtggtggccgtgtgcctggtgctgctgcacaccgcttcagcatttccacttcccgctgcaaatatgccagaggactatcctgaccaatttgacgacgttatggatttcatccaggcaacaattaagcgactgaagcgaagccctgataagcagatggctgtgctcccctag

SEQ ID NO: 3767 - DNA, 186 bp, synthetic construct
  misc_feature 1..186: note = source = /note="Description of Artificial Sequence: Synthetic coding sequence"
  source 1..186: mol_type = other DNA
atgaagctgtgggacgtggtggccgtgtgcctggtgctgctgcacaccgcatctgctttcccactgccggcggctaacatgcccgaggattaccccgatcaattcgacgatgttatggacttcatccaggccacaattaagagattgaagagatctcctgataagcaaatggccgtgctgccctag

SEQ ID NO: 3768 - DNA, 558 bp, synthetic construct
  misc_feature 1..558: note = source = /note="Description of Artificial Sequence: Synthetic coding sequence"
  source 1..558: mol_type = other DNA
atgaagctgtgggacgtggtggccgtgtgcctggtgctgctgcacacagcttccgcatttcctctgcccgcggctaatatgcctgaggattatcccgatcagttcgatgacgttatggacttcatccaggccacaataaaacgtttgaaacggtcaccagacaagcaaatggccgtcctgcctcgtagggagagaaatagacaagcagccgccgctaatcctgagaattcccgcggaaaggggcgcaggggacagcgcggaaagaaccgtggctgcgttctcacagcaatacaccttaatgtcactgacctcggactcgggtacgagacaaaagaagagctcatttttcgatattgcagtggaagctgtgacgcagcagagacaacctacgacaagattctaaagaacttgtccaggaaccggagattagtctctgataaagtcggacaggcttgctgtcgccccattgcctttgatgacgacctgagtttcctcgatgacaacttagtttatcatattctgaggaagcactccgcaaaacgatgtggttgtatttag

SEQ ID NO: 3769 - DNA, 609 bp, synthetic construct
  misc_feature 1..609: note = source = /note="Description of Artificial Sequence: Synthetic coding sequence"
  source 1..609: mol_type = other DNA
atgcagagcctgcccaacagcaacggcgccgccgccggccgggactttaagatgaagttgtgggacgtggtagccgtgtgtctggtgttactgcatacagcaagcgcattcccacttccagctgccaacatgcccgaggactatcccgatcagtttgacgacgtgatggatttcatccaagcaacgatcaagcggctgaagcgctcccccgataaacagatggcagtgctgccaaggcgggaaagaaaccgccaggccgccgctgcaaacccagaaaactccaggggaaaaggtaggagagggcagagggggaagaatcgagggtgtgtgctgaccgctattcacctgaatgtgactgatttgggcctcggttacgaaacaaaagaagaactaatttttcgttactgctcaggctcctgtgacgctgccgaaacaacttacgataaaatccttaaaaatctctcaaggaatcgtcggctggtctccgataaagtcggccaggcctgctgccgcccgattgcatttgatgacgatctatcttttctcgacgataacctagtgtaccatatcttgcgtaaacactcagccaagagatgtggatgtatctag

SEQ ID NO: 3770 - DNA, 543 bp, synthetic construct
  misc_feature 1..543: note = source = /note="Description of Artificial Sequence: Synthetic coding sequence"
  source 1..543: mol_type = other DNA
atgaagagcatctacttcgtggccggcctgttcgtgatgctggtgcagggtagctggcagcgcagtctgcaagacactgaagaaaagagtcggagtttctcagcctctcaggccgaccccctatctgatccagaccagatgaacgaggataagcgccacagccagggcacattcacttctgattactccaagtacctagactctcgaagggcccaagattttgtccaatggctcatgaacacaaagagaaatcggaataatatagcaaaacgacacgacgaatttgagcgacacgcagaggggacgtttactagcgacgtgagctcctacctggagggccaggccgcaaaagagttcatcgcctggctggtgaagggaagaggtcgcagggatttccccgaggaggtcgcaatagtcgaggaacttggccgacgtcatgccgatgggtcgttctctgatgagatgaacacaatcctggataatcttgcggctcgggattttataaactggctgatccaaacaaaaatcaccgatcgaaagtag

SEQ ID NO: 3771 - DNA, 543 bp, synthetic construct
  misc_feature 1..543: note = source = /note="Description of Artificial Sequence: Synthetic coding sequence"
  source 1..543: mol_type = other DNA
atgaagagcatctacttcgtggccggcctgttcgtgatgctggtgcaagggtcatggcaaaggtccctgcaggataccgaggagaagtccagaagcttcagcgctagtcaggcggatcccctcagcgatccagatcagatgaacgaagacaagcgacattctcagggaacctttacatcagactactccaagtatttggactcaaggagggctcaagactttgttcagtggctgatgaacaccaagcgcaaccgaaataatatcgccaaacggcacgatgagttcgagagacacgctgaaggcacgttcacctcagatgtgagttcatatctcgaaggtcaggccgcaaaggagtttattgcttggctcgtgaagggacgcggccgccgggactttccagaggaggtagcaatcgtggaggaactcggccgtcgccatgccgacggctccttttctgatgaaatgaacacaatactggacaacttagccgcccgggacttcattaattggctcattcagacgaagattactgatcggaagtag

SEQ ID NO: 3772 - DNA, 2262 bp, synthetic construct
  misc_feature 1..2262: note = source = /note="Description of Artificial Sequence: Synthetic coding sequence"
  source 1..2262: mol_type = other DNA
cgggcccccgaccggcggggcagcccccggctggccagcacccggctgggcgccctgagactcagacccagccgccgggtgcctgcccgagctccagctcctgcgcaggcccccctcccattgggcccccgcttgttagggctgcgaaggaatatggctgcccctatgacgcccgctgctaggcctgaagattatgaagcggcattgaatgccgcgttagccgatgtgccagagctcgcccggttactggagatcgatccttacttgaagccatatgccgtggactttcagcgaaggtataagcaatttagccaaatccttaaaaatatcggcgagaatgagggaggtattgataaattttccaggggatacgaaagttttggcgtgcaccgttgtgccgacgggggcctctactgtaaggaatgggctcctggcgcagagggggtttttctgactggggatttcaacggatggaaccctttttcgtacccctataaaaagttagactatgggaagtgggagctgtatataccgccaaaacagaacaaaagcgtacttgtgccacatggcagcaaactcaaagttgtgatcacaagcaagtccggggagatcttgtaccggatctcgccatgggccaagtatgttgtgcgggaaggggataacgttaattatgactggattcattgggaccccgaacacagttatgagtttaagcactcacgtcctaagaagccgagatccctccgaatttacgagagccacgtcggcatctcctctcatgagggcaaagtcgcctcctacaagcactttacctgcaacgtcctcccccgtattaaagggctgggttataactgcatccaacttatggccattatggagcatgcatactatgctagtttcggataccagattacgagcttcttcgccgcctcttcccggtacggcacacctgaggagcttcaggaattggtggacaccgcgcacagcatggggattattgtacttctggatgtggtgcactctcatgcttcaaagaacagcgctgacgggctgaatatgttcgatggaacagattcatgctactttcattcaggtcctcgaggcactcacgatctgtgggacagcagactttttgcatattcatcttgggagattttaaggttcctgttatctaatattcggtggtggcttgaagaatacagatttgatggatttcgtttcgatggcgtgacgtctatgctttatcatcaccatggcgtgggtcaaggcttcagtggcgattacagcgagtatttcggcctgcaggtcgacgaggacgcccttacttacttgatgcttgccaatcacttggtgcacactttatgtccagactcgattactattgcggaggacgtgagtggcatgcccgcactgtgtagcccgatctcacaaggcggaggagggttcgactatcggctagccatggctatccctgataaatggattcagctgctgaaagagttcaaagatgaggattggaatatgggagacattgtgtatacactgaccaatcggcggtacctggaaaagtgtattgcctatgcggagtctcatgatcaagctctcgttggagacaaaagcctggcgttctggcttatggatgccgaaatgtatactaacatgagtgttctcacaccctttacaccagttatcgaccgcggaattcaacttcacaagatgatcagactgattactcacggactaggaggggagggatatcttaacttcatgggcaatgaattcggacatccagagtggctggacttccctcggaaaggaaacaatgagtcctatcattacgccagacgacaattccacttaactgatgacgatctgcttcgatacaagtttttaaacaatttcgatcgcgacatgaatcggctggaagagaggtatggttggctagcagcccctcaggcctacgtctctgaaaaacacgagggaaataaaattatagcatttgaaagggccggattattgtttatcttcaacttccatccttctaagagttataccgattatcgggtgggtactgcactgccgggcaaattcaaaatcgtccttgactccgatgcggccgagtacggcgggcaccaacggctggaccattctaccgacttttttagcgaggcattcgagcataacggccggccatactcgcttctggtctacatccctagcagggttgcacttatcttgcagaacgtcgatctcccgaactag

SEQ ID NO: 3773 - DNA, 2109 bp, synthetic construct
  misc_feature 1..2109: note = source = /note="Description of Artificial Sequence: Synthetic coding sequence"
  source 1..2109: mol_type = other DNA
atggccgcccccatgacccccgccgcccggcccgaggactacgaggccgcattgaatgctgctttggcagacgtgcctgagcttgctagattgctcgagatcgatccctacctgaaaccttacgctgtggatttccagcgtcggtacaagcagttcagtcagattctcaagaatataggcgagaacgagggcggcattgataagttcagtcgtgggtacgagtcattcggagttcatcggtgcgccgacggcgggctctattgcaaagaatgggcccctggagcagagggagtcttcctaactggggatttcaacggatggaacccttttagctatccatataaaaaactggactacgggaagtgggaactgtatatcccgcccaaacagaataagagtgtgctcgtgcctcacggatcaaaattgaaagtggtgattacaagcaagtccggtgagattctttaccgcatttctccatgggcaaagtatgttgtccgcgagggagataacgtgaattatgattggatccactgggatccggagcactcatatgagttcaagcattctaggccgaaaaagcctcgatccctgagaatatatgagtctcacgttggcatatcatctcacgaggggaaggtggccagctacaaacatttcacttgcaacgtgttgccccgcattaaggggctgggctataactgtatccaattgatggctatcatggaacacgcttactacgcatcatttggctatcaaattacttctttctttgcagcttcgtctaggtacggaactcccgaggaactccaagagctggtcgacacagcccactcaatgggaattattgtcctgctcgacgtggtacactctcacgcctctaagaactccgctgacgggcttaatatgttcgacggtacagactcttgttactttcattctggtccaagaggcacacacgatctctgggacagcaggctgtttgcttattcttcatgggaaatcctgcgatttttactatcgaacattagatggtggctggaggagtatagatttgacgggttccgcttcgatggcgttacatccatgctgtatcaccatcacggggtgggacaggggttctcaggggactacagtgagtattttggcctgcaggttgatgaggacgcactaacatacctgatgctggcaaatcatttggtgcacacactgtgtcccgatagcattacaattgccgaggacgtatcaggaatgcctgcactctgttcaccaatttcacagggtggggggggctttgattacaggctcgcgatggcgattcccgataagtggatccaactcctcaaagagttcaaggacgaggactggaacatgggagatatagtatacacattaactaaccgcagatacctggagaaatgtatcgcctatgcagagtctcatgaccaggctctggtaggggataaaagcctggcattttggttaatggatgccgagatgtatacaaatatgagtgtcttgacccctttcaccccagtgattgatcgcggcatccagctacacaagatgattagactgataacccacggactcgggggagaaggctacctgaattttatgggcaatgaattcggccaccccgaatggcttgattttccgcggaagggcaacaatgaaagctaccactatgctaggcgtcagtttcaccttacggatgacgatcttttgcgctacaaatttttgaataactttgatcgagatatgaacagactggaggaaaggtacggctggttggctgctccacaagcttatgtgtcagagaaacacgaagggaacaagataatcgcatttgaacgtgccggactgctgtttatcttcaatttccatcctagtaaaagctacacagactacagagttggaactgccctccccgggaaatttaagattgtcctagatagtgatgccgccgagtacggtggacatcagcggctggatcatagcactgatttcttttccgaagcatttgaacataatggaaggccttattctttgctcgtttatatcccttcaagggtggccctcattctccagaatgtggacctacccaattag

SEQ ID NO: 3774 - DNA, 1398 bp, synthetic construct
  misc_feature 1..1398: note = source = /note="Description of Artificial Sequence: Synthetic coding sequence"
  source 1..1398: mol_type = other DNA
atggccatcatggagcacgcctactacgccagcttcggctaccagattacctcattttttgcagcatccagcagatacggtacacccgaggaactccaggaactagtggacacggcccatagcatgggaataattgtgttattggatgtggttcattcacacgccagtaagaactccgccgatggacttaacatgttcgacggcacagactcctgttacttccatagcggtccaagagggacccacgatctgtgggattcaaggttattcgcttacagctcctgggaaatcctgagattcttgctcagtaacatcaggtggtggctggaggaatacaggttcgacggatttcgttttgacggcgtgactagtatgctgtaccaccaccatggagtggggcaagggttctcaggcgactacagtgagtacttcggactgcaagttgatgaggatgcgctcacctaccttatgttagcaaatcaccttgtgcataccctgtgcccagacagtatcactatcgccgaggatgtgtccgggatgccagcgctatgctcccctatctcacaaggaggtggcggatttgactacagacttgcaatggccatccctgacaaatggattcagttattgaaggaattcaaggatgaggactggaacatgggcgacattgtctacaccttgaccaataggcggtaccttgagaaatgtatcgcgtatgcagaaagccacgaccaggcactggtcggcgacaaaagcttagcgttctggctgatggacgcggagatgtacaccaatatgtctgtgctgacgcccttcacacccgtcatcgataggggcattcaactgcataagatgataaggttgattacacacgggctgggcggagaggggtatctgaactttatggggaatgaattcggtcaccccgaatggctggattttccccgcaaaggcaacaatgaatcttatcactacgccagacgccagttccacctgaccgacgacgatcttctgagatacaagttcctgaataacttcgacagagacatgaacagattggaggagagatatggatggctggccgcccctcaggcgtacgttagcgaaaagcatgaaggcaataaaataatcgccttcgaacgagctggcctgctgttcattttcaatttccacccttccaaaagctatactgactacagggtcgggaccgcgttgcccgggaagttcaaaattgtcctcgactctgatgcagctgaatatgggggacatcagcgactcgaccatagcaccgacttctttagcgaagcctttgaacacaacggccgtccctactcattgctggtttatattccaagcagggtggccctgattctccagaacgtggatctgccaaattag

SEQ ID NO: 3775 - DNA, 1074 bp, synthetic construct
  misc_feature 1..1074: note = source = /note="Description of Artificial Sequence: Synthetic coding sequence"
  source 1..1074: mol_type = other DNA
atggaggagggcatgaacgtgctgcacgacttcggcatccagagcacgcattatctgcaggtgaattaccaggactcacaggattggtttatcttggtttcagtaatcgccgatctgaggaacgccttctatgtgctgttccccatatggttccatctccaagaggcggttgggatcaagctgctctgggtggccgtaatcggagattggcttaatctcgtcttcaaatggatcctgttcggccagcgcccttactggtgggtcctcgatacagactactacagtaatactagtgtccctttaatcaagcaattccccgtaacttgtgagaccggaccaggcagccccagcggacatgctatgggcacagccggcgtatactatgtgatggtaacaagcacactttccattttccaagggaaaattaagcccacctacaggtttcgctgtttaaacgttatcctctggcttggtttttgggcagtgcaactaaacgtttgcctctccaggatctaccttgccgcccattttccccatcaggtcgtagctggtgtactgtccgggattgcagtcgccgaaacctttagtcatatacactcaatatacaatgcctccctgaaaaagtatttcctgatcacctttttcttattcagtttcgccattggattttatcttctcctcaaaggtctcggggtggacctcctctggacactcgagaaggcccagcgctggtgtgaacagccagaatgggtgcatatagacacaacacccttcgccagtttactgaagaatttaggaacgctgtttggcttgggcctggccctcaatagctcgatgtaccgggaatcatgtaaggggaagctgtccaagtggttacctttccgcctgagtagtattgtggcaagcctggtgttactgcacgtgttcgatagtctcaaaccccccagccaggtggaactggtgttctacgtgctttcgttctgtaagtctgccgtggtgccgctggcctctgtatcggtgataccctattgccttgcgcaggtactcggacagcctcacaagaagagtctgtag

SEQ ID NO: 3776 - DNA, 2859 bp, synthetic construct
  misc_feature 1..2859: note = source = /note="Description of Artificial Sequence: Synthetic coding sequence"
  source 1..2859: mol_type = other DNA
atgggcgtgcggcaccccccctgcagccaccggctgctggccgtgtgcgccctggttagcttagccactgccgcgctcctcggtcatattctgctgcacgatttcctgcttgtgccccgcgaactttctggctcaagtccagtactagaggaaactcatccagcccatcagcagggggcctcacggcctggccctagagatgcacaagctcaccccgggagaccccgcgcagtccctacacagtgtgacgtgccaccgaactctcgattcgactgcgcaccagataaggcaatcacccaggagcagtgcgaggcgagggggtgctgttacattccagcgaagcagggtcttcagggcgcacaaatggggcagccctggtgtttctttccccctagctacccctcctacaagcttgagaacctgtccagctccgagatggggtatacagccaccttaacccggactacccctaccttctttccaaaagacattctgactttgcgcctggacgtgatgatggagaccgagaaccggctgcacttcaccatcaaggacccagcaaaccggcgctacgaagttcctttggaaaccccccatgtgcacagcagggctccctcaccactgtactccgtcgagtttagtgaggagccctttggtgtcatcgtacgacgccagctggatggtcgtgtgctgctcaacaccacagtggcaccgctgttttttgctgatcagttcctgcaactgagtacctcgttgcctagccagtacattactgggctcgccgaacatcttagtccactgatgctgtcaacctcctggactaggatcaccttgtggaatagggacctggctcctactcctggcgcaaacttgtacggtagccatccgttctacttggcactagaggacggaggttcagctcatggtgtctttttactcaacagtaacgccatggatgtggtcttgcagccctcacccgccctgtcctggcgtagtactggcggcattctggatgtctatatctttctggggcccgaacccaagtccgtagtgcagcagtacttggatgtcgtgggctatcccttcatgcctccttactggggtctcgggtttcacctttgccggtgggggtattctagcactgcgattacccgacaggtcgtcgagaacatgaccagggctcactttcccctggacgtccagtggaatgacctggactacatggattcgaggagggatttcacctttaataaggatggctttagggactttccggctatggtgcaggaactgcaccaggggggcagacggtacatgatgatcgtggatcctgccatatcctctagtggtccagcgggctcctaccgaccctacgacgaaggattgcgccggggcgtctttattacaaatgagacaggacaacctctcataggcaaagtctggcccggttcgacagcatttcccgacttcaccaatcctaccgccctcgcatggtgggaagacatggtcgctgagtttcacgatcaggtgcctttcgatggtatgtggattgatatgaacgagcctagtaattttatccgcgggagtgaagacggttgcccgaataacgagctggagaatcctccatacgtgccaggagtcgttggggggaccctccaggccgccacaatttgcgctagctcccaccagtttctgtcaacacattacaacctgcacaacctgtatggcctcacagaggcgattgcatcccaccgcgccctggtcaaggctcgggggactcgcccttttgtgattagccgcagcacatttgccgggcacggtcggtatgccgggcactggacaggtgacgtatggagctcgtgggaacagctggcctcttcagttccggaaatactgcagttcaatctgctgggggtgcctttggtgggcgctgacgtctgcggatttctaggcaatacctccgaggagctttgtgtaagatggacacaactgggagccttctatccattcatgcgtaaccataatagtctcctgtcgttgcctcaagaaccctactccttcagtgagccagcacagcaggccatgcgaaaggccctgacactgagatacgctctcctcccccatctctacaccctttttcaccaagctcatgtcgctggtgaaaccgtcgcacgacccctctttcttgagttcccaaaagacagcagcacctggacggtggatcatcagctgctgtggggcgaagccctgctgatcactcctgtgcttcaggccgggaaagccgaggtgacagggtattttcccttaggcacctggtatgacttgcagaccgtgcctgtggaggcactgggaagtctgcctccgccacctgcagctcctcgggagccggccatccactctgagggacaatgggtcactctgcccgcccctttggatacgattaatgtacatctgcgcgcaggctatattattcccctgcaggggcctgggctgactacaacagagtcacgccagcagccaatggcattggctgtcgccttgacaaagggaggtgaagcgaggggggaactgttttgggacgacggcgagtctttagaagtcctggaaaggggtgcctacacacaggttatctttctcgcacggaacaatacaattgtgaatgagttggttcgcgttacatcagaaggggccggtcttcaattacagaaggttaccgtactgggagttgccaccgccccacagcaggtgctcagcaatggcgtcccagtatctaacttcacctattcgccagacaccaaggttctggatatttgcgtttctctcctaatgggagaacagttcctggtgtcatggtgctag

SEQ ID NO: 3777 - DNA, 2859 bp, synthetic construct
  misc_feature 1..2859: note = source = /note="Description of Artificial Sequence: Synthetic coding sequence"
  source 1..2859: mol_type = other DNA
atgggcgtgcggcaccccccctgcagccaccggctgctggccgtgtgtgccttggttagcctggccacagctgctctgttaggccacatactcctgcatgactttcttctcgtacctcgcgaactgtccggctctagcccagtgctcgaggagacacatcctgctcaccagcagggcgcgtcgcgtccaggccctcgagatgcccaggcccaccctgggaggcctagagcggttcccacccagtgtgacgtccccccaaattctcgatttgactgcgctcccgacaaggccattacacaggagcagtgcgaagctcgcgggtgttgttacatccctgccaaacagggactacaaggtgcccaaatggggcaaccctggtgcttttttcctccaagctacccgtcttataaattggaaaacctatcatcatcggagatggggtacacagctaccctgactaggaccacccccacattcttccccaaggatatcctgacactccgtctagacgtaatgatggagactgagaatcggctgcacttcaccatcaaggacccagcaaataggagatacgaagtgcccctcgaaactccccacgtgcacagtagggcacctagccccctgtactccgtcgagttctcagaagagccctttggtgtcatcgtccgccggcaactcgatggacgcgttctcctgaacaccactgtggctcctctcttcttcgcagaccagttcctgcagctgtccacttctctgccttcacaatatattactggcctcgccgaacacctgagcccactcatgcttagcacatcatggaccagaataaccctctggaaccgcgatctggctcctaccccgggggccaacctttacggatcccaccccttctatttggcacttgaggacggtggatccgcgcatggagtgttcttgctcaacagcaatgcaatggatgtggtcctgcaacctagtcctgccctctcttggaggtctacagggggcattcttgacgtgtatatttttttggggcccgaaccaaagtcagtcgtccagcaatacctggatgttgtaggctacccattcatgcctccgtactggggactcggtttccatctctgccgatggggttattcaagcacagccatcacccggcaggtggtggagaacatgactcgagctcacttcccgctggatgttcagtggaatgacttagattacatggacagtcgcagagatttcaccttcaacaaagacggtttccgtgactttccagctatggtccaagagctccaccaaggaggacgcaggtatatgatgatcgtggatccagccatctcctcctccggaccagcggggagctatcggccgtatgatgaaggactacgaaggggcgtattcataaccaacgagaccggccagccgttaattgggaaagtatggccaggctccaccgcttttccagatttcactaaccctaccgccctggcctggtgggaggacatggttgcggaatttcacgaccaggtgccattcgatggaatgtggattgatatgaacgagccaagcaattttatcagagggtctgaagacgggtgccctaacaacgagttggagaatcctccgtacgtcccaggtgttgtcgggggaacattacaagccgccactatctgtgccagtagccaccagttcctttccactcactacaacttgcacaacctctacgggctcaccgaggcaatcgcgagccatcgggcccttgtcaaggcaaggggcacaagacctttcgtgattagcagaagtacattcgccggccatggccgttacgctggccattggaccggggacgtttggagtagttgggagcagttagcatcatctgtccctgaaattctgcaatttaacttacttggggtgcctctagttggcgcagacgtttgcggctttctaggcaacacctctgaggagctatgcgtaagatggacgcagttgggtgccttctaccccttcatgagaaatcacaacagtctgctgtctttgccccaagagccatactctttctcggagccagcccaacaagccatgaggaaggctctcacgctccgctatgcactcctgccccacctgtatactctatttcatcaggcccacgtggccggggaaacagtggctcggcctctctttcttgagttccctaaagactcttccacatggactgtcgaccaccaactgctgtggggtgaagcactgttaatcacgccagtgctacaggccgggaaagctgaagtgaccggctacttccccctcgggacctggtatgatctgcaaacggtcccagttgaagctttgggatccctcccacccccgcctgcggcaccacgagagccagccatacattccgaaggtcagtgggtcacactaccggcacctcttgacactatcaatgtgcaccttagggccggctatatcattcccctacaaggccctggcctgaccaccacagaatctcggcagcagcccatggccttggccgtggcgctaacaaagggaggcgaagccagaggcgagttattttgggacgacggggagagcctggaggtgcttgagcggggtgcttatacacaggtgatttttctcgctcgcaacaacactattgttaatgaactcgtgcgagttacttcagagggtgcaggattacagctgcagaaggttactgtgttgggagtggcgaccgcgccccagcaggtgctttctaatggcgtgcccgtcagcaacttcacctactcccctgacaccaaggtccttgatatctgtgtgtcactgctcatgggcgagcagttcctggtgtcctggtgttag

SEQ ID NO: 3778 - DNA, 1611 bp, synthetic construct
  misc_feature 1..1611: note = source = /note="Description of Artificial Sequence: Synthetic coding sequence"
  source 1..1611: mol_type = other DNA
atggagttcagcagccccagccgggaggagtgccccaagcccctgtctcgcgtgagcatcatggcaggcagtctcacgggactgctgctgctgcaagctgtcagctgggctagcggggctagaccatgtatccccaagagttttggctactctagcgtagtgtgtgtatgcaatgcaacttattgcgactcttttgatcctcctacatttcccgcattaggtaccttctcgagatatgaaagcaccagatcgggccggagaatggaactgtcgatggggcctattcaagcgaaccacaccgggactggactgttgcttactctacagcccgaacaaaaattccaaaaggttaagggattcggaggagccatgactgatgctgccgcccttaacattttagccctatctccccctgcgcagaatctgttactgaaatcttacttttccgaggaagggatcggctataacatcatccgcgtgcctatggccagttgtgatttctccattaggacatacacatatgccgatacgcccgatgacttccagctgcataacttttcacttcctgaggaagataccaagctgaagatccctctgattcatcgggccctccagttggcccaaaggcctgtatcactgctggcaagcccctggacctcccctacatggctcaaaacaaacggcgcggtgaatgggaaagggtccctcaagggtcagcctggcgatatctatcaccaaacgtgggcaagatacttcgttaagtttctggacgcttatgccgaacacaaactgcagttctgggctgtgaccgcagagaatgaacccagtgccggtctgctctccggttacccatttcagtgcctgggttttacgcccgagcaccagagagacttcattgccagggatctcggccccactttggcaaactcaactcaccacaacgttaggttactgatgcttgatgatcagcgcttgctcctgccacactgggctaaggtagtcctgacagatcctgaggcagccaaatacgtccacggaatagcggtacactggtatttagacttcctggctcctgctaaagctaccctaggcgagacccatcgcctgtttcccaacactatgctgttcgcctcagaggcctgtgtggggagcaaattctgggaacagtccgtgaggctggggagttgggacagaggcatgcagtactcacatagtatcataaccaacctgttataccacgtcgttggttggaccgattggaacctagcactcaacccggaaggcggtccaaattgggtgaggaacttcgtggattctcccataatcgtcgatattacaaaagatactttttacaaacagccaatgttctaccacttggggcacttctcaaagtttatccccgaaggcagtcaaagagtggggctggtcgctagccagaaaaatgacttggacgctgtagctctaatgcacccagacggatccgcagttgtggttgttctgaaccgctcatctaaggacgtcccactgaccattaaggatcccgcagtaggatttctggagacaatcagccctggatatagtatccacacttacctttggcggagacagtag

SEQ ID NO: 3779 - DNA, 1611 bp, synthetic construct
  misc_feature 1..1611: note = source = /note="Description of Artificial Sequence: Synthetic coding sequence"
  source 1..1611: mol_type = other DNA
atggagttcagcagccccagccgggaggagtgccccaagcccctgtcgcgggtgagtatcatggctggcagtctgactggccttctgctgctgcaagcagtgtcctgggctagtggagcgaggccatgtatccccaagtctttcggctattcctccgtcgtctgcgtatgtaacgccacctattgcgactcatttgaccctccaacttttcccgcccttggtactttcagccgctacgagagtacacgctcgggtagacgcatggagctcagcatgggtccaatccaagctaaccacacaggaaccggcttgttactcactctacagcccgagcagaagttccagaaggtaaagggcttcggaggtgccatgacagacgcagcggcgttgaatatcctggccctgagtccacctgcacagaatttgttactcaaatcttacttttctgaagagggaattggatataatataatacgtgtgccaatggcgtcttgtgatttctccatcagaacctacacttatgccgatacaccagatgactttcagctgcataacttctccctacctgaggaagatacgaaactcaagattccgttgattcatagagcgttacagcttgcccagcgccctgtgtcgctcttggctagcccatggacaagtcctacctggctcaagaccaatggcgccgtgaatggaaagggtagcctaaagggccagcccggggatatttaccaccagacctgggcacgttatttcgtaaaatttcttgacgcctatgctgagcataaactgcagttctgggccgttaccgctgaaaatgagccatcagccgggctcctctccggctaccctttccagtgcttgggcttcacccccgaacaccagcgagacttcattgcaagggacctgggccctactctcgctaatagcacacatcacaacgtcagactattgatgttagatgatcagcgactgcttctgcctcactgggccaaggtagttttgaccgacccagaggctgcgaaatatgtccatggcattgctgtgcactggtacctggacttcctggcaccagctaaagctaccctgggagagacccaccggctgtttcctaacacgatgttgtttgcttccgaggcatgtgtgggttccaagttctgggagcagtccgttcggctggggtcgtgggaccgaggtatgcagtattcccattctatcatcacgaacttgctgtaccatgtggtcggctggaccgactggaatctggcgttgaacccggaaggtgggcctaactgggtccgtaacttcgtagactcaccgattatcgtcgacatcaccaaagatactttctacaaacagccgatgttttaccatctgggccacttctccaagttcattcccgaggggtcccaacgcgtaggcctggtggcctcacagaagaacgacctggatgccgtcgctctaatgcatcctgatggttcagcagttgttgtggtgttgaaccgcagttctaaagacgtgccactcaccatcaaggacccagccgtgggttttctcgagactatatcccccggttattccatccacacttatctatggcgccgtcagtag

SEQ ID NO: 3780 - DNA, 1566 bp, synthetic construct
  misc_feature 1..1566: note = source = /note="Description of Artificial Sequence: Synthetic coding sequence"
  source 1..1566: mol_type = other DNA
atggagttcagcagccccagccgggaggagtgccccaagcccctgagccgggtgtccatcatggctggatcactcactggcctcctgttgctgcaggcagtgtcttgggcaagtggggcccgcccctgcattcccaagagctttggctattccagcgtcgtttgcgtctgcaacgctacatattgcgactcctttgatccgccaacattcccagcattagggaccttcagccggtacgagagcactaggagcggacgtagaatggagctgtccatgggtcctatccaggctaaccatactggcactggcctcctcctgactcttcagcccgacgccgctgctcttaatattctggcactttccccacccgctcagaacctcctccttaagtcttacttttctgaagagggcatcggctacaacataattcgggtgccgatggccagctgtgacttcagcatccgcacttacacatacgccgacaccccagatgatttccagctgcacaatttctcactacccgaagaagacactaagctaaaaatccccctgatccaccgcgcgctccaacttgcccaaagacccgtgagcctgctggctagtccctggactagccctacttggctgaaaacaaatggcgcagtgaatgggaagggtagtctgaaggggcagcctggggatatctaccatcagacttgggccagatactttgtcaaatttctcgacgcatatgcagagcacaaactacagttctgggctgtgacagctgagaatgaaccctccgccgggcttcttagcgggtaccctttccaatgtcttggattcacaccagagcatcaaagggatttcatcgctagagatcttggcccgacactggccaactccactcaccacaacgtgcggctactgatgctcgatgatcagcgactgctgcttccccattgggccaaagttgtgctcacagaccccgaagctgccaaatatgtgcatggaatagcggtgcactggtacttggactttcttgcccccgcaaaggccactctgggcgaaacccatagattgttcccgaatacaatgctgttcgcgagcgaagcttgcgtggggtccaaattttgggagcagtcagtacgactaggttcttgggataggggaatgcagtatagccatagtataataaccaatctgctatatcatgtggtgggatggacagattggaacctggccctgaacccagagggggggcctaattgggtacgaaacttcgtcgacagtcctatcatcgttgatattaccaaggacacattttacaagcagccaatgttttaccatctcgggcactttagcaaattcataccagagggctctcagagagtcggcctggttgccagtcaaaagaacgacttagacgccgtggctctgatgcatcccgacgggagcgcagtagtggtggttctgaacagatcgtcaaaggacgtccctttgactatcaaagatccagccgtgggattcctcgagaccatcagtccggggtattccattcacacctatctgtggaggcgccagtag

SEQ ID NO: 3781 - DNA, 1464 bp, synthetic construct
  misc_feature 1..1464: note = source = /note="Description of Artificial Sequence: Synthetic coding sequence"
  source 1..1464: mol_type = other DNA
atggagttcagcagccccagccgggaggagtgccccaagcccctgtcgcgggtttctataatggccggatcactgaccgggctcctgctcttgcaggctgtgtcatgggccagcggcgctcgcccttgcattcccaaaagtttcgggtattccagcgtcgtctgcgtgtgcaatgcaacatattgtgactcgttcgaccctcccactttccctgccctggggacctttagcaggtacgaaagcacccgctctggtcggcgtatggagctgtccatgggccctatccaggccaatcacacaggcacaggcatagggtacaacattatccgggtgcccatggcttcctgcgatttttctatcaggacatacacatatgctgatactcctgacgactttcagcttcacaatttttcccttcccgaagaagatacaaagctcaagatcccattaattcatcgcgcgctgcagttggcgcagcgcccagtgtccctgctggctagcccctggacctcccctacgtggctgaaaacaaatggggcagtaaacggcaaaggtagcctgaaggggcagcccggcgatatttaccatcagacatgggcccgctattttgtcaaattcctggacgcttacgccgagcacaagctacagttttgggctgtcactgcagagaacgagccttccgcgggactgctctccggctacccttttcagtgcctgggtttcactccagaacatcagcgggacttcatcgcgcgagatttaggcccaactctggcaaacagcactcatcacaacgtccgtcttctcatgctagacgaccagcggttgctgctgcctcattgggccaaggtcgtacttacagacccggaagcagccaaatacgtgcacggtattgctgtccattggtatctagacttcctggcacccgctaaggccaccttgggagaaacccatcgccttttccctaataccatgttgtttgcctccgaggcttgtgtggggagcaaattttgggagcagtccgtgcggttgggttcttgggatcgaggaatgcagtattcacacagcataatcacgaacttactctatcacgttgtgggatggactgactggaatctggccctcaaccccgagggcggacctaattgggtacggaactttgtggattcacccattatcgttgatataacaaaggataccttttataaacagccaatgttctaccatctggggcactttagtaaattcattccggaaggctcgcagcgcgttggcttggtagcctctcagaaaaatgatctggatgcagtcgccctaatgcacccggacggctcagccgttgttgttgtgttaaatagaagctctaaggacgtgccgctcactatcaaggatcctgctgtcggattcctggaaactatttctcctggttattcaattcacacatacctgtggcgtaggcaatag

SEQ ID NO: 3782 - DNA, 1350 bp, synthetic construct
  misc_feature 1..1350: note = source = /note="Description of Artificial Sequence: Synthetic coding sequence"
  source 1..1350: mol_type = other DNA
atggagctgagcatgggccccatccaggccaaccacaccggcaccggactactgctgacattacagcctgaacagaaattccaaaaggtgaaaggattcgggggcgccatgaccgacgccgcagcgctcaatattcttgcactgtcacctccggcacaaaatctgttactcaaatcctacttttcagaagagggaatcggatataatattattcgcgtgccaatggctagctgcgatttctccatccgcacttatacctacgcagatacgcccgatgacttccagctgcacaacttttctctgcccgaagaagacaccaaactaaaaatacctcttatacaccgtgcactgcagctcgcccaacgccctgttagcctgctggcttctccttggaccagtcccacctggctcaagacaaacggcgctgtgaatggaaaagggagccttaaaggccagcctggtgatatctaccaccaaacgtgggcgcgatactttgtgaagtttctcgatgcatatgcggaacataaactgcagttttgggccgtgaccgcagaaaacgagccaagcgcagggttgcttagcggctacccttttcagtgtctgggctttacccctgaacatcagcgggattttatcgcgcgcgacctgggtcccacattggccaactcaacgcaccataacgtgcgactgctgatgctggatgatcagaggctgctattgccgcattgggcgaaagttgttctgactgatccagaagcggccaagtatgtccatggaatcgcagtacattggtatctcgatttcttagctcctgccaaagctacactgggtgaaactcatagactgtttcctaataccatgctctttgcaagtgaagcctgcgtgggctccaaattctgggagcagtccgttaggttagggagctgggatcgtggtatgcagtacagccattcaattataaccaacctgctttaccatgtcgtgggctggactgactggaacctggcgttgaaccctgagggaggccccaattgggtccgcaactttgttgacagccccataatcgtcgacatcacaaaggataccttttacaagcaaccaatgttttaccacctggggcatttcagcaaattcataccagaaggaagtcaacgcgttgggctggtcgcttcgcagaagaacgatctggatgctgtggcccttatgcatcccgacggctcggccgtcgtcgtggtgctcaaccgtagtagcaaggacgttccattgacgattaaggaccctgctgtggggtttctcgagactatctcccccggatactctattcacacctacctttggagacggcagtag

SEQ ID NO: 3783 - DNA, 1482 bp, synthetic construct
  misc_feature 1..1482: note = source = /note="Description of Artificial Sequence: Synthetic coding sequence"
  source 1..1482: mol_type = other DNA
atgaccctgcggggctggagcttccaggtgctgcccgagagcaacgctacctactgtgacagctttgacccacccacctttccagcactcggcactttttctcgatatgaatccacccggtctggacggcggatggaactttccatgggcccaattcaagctaatcatactggtactggcttgctgctcactcttcagccagagcagaaattccagaaggtgaagggattcggaggcgccatgaccgacgcggccgcacttaacatactggcgctcagtcccccagcccagaacttgctcctaaagtcttatttcagcgaggaaggcatcgggtataatattataagagtccctatggcgagctgcgacttctccatccgaacctatacatacgctgacacaccagacgatttccagcttcataacttctccctgccagaggaagacaccaaactcaaaatacccctgatccaccgggccttgcagctagcacaacgcccggtgagtctgctcgcatcaccatggacctcgccaacttggctcaaaacaaacggggcggtcaacggaaaggggtcattgaaaggccaacccggggatatctaccaccaaacctgggccagatactttgtgaaattccttgatgcttacgctgaacacaagctgcaattttgggctgtcactgcagagaacgagccttccgctggtctcttatctggttaccctttccagtgccttggatttacgcccgagcatcagagggacttcatcgcgagagatctcggcccaacccttgctaacagcacccaccacaatgtgcgtttgctaatgctggatgatcagaggctccttttgcctcattgggccaaagtagtgctgacagatccagaggccgcgaaatacgtccacggcatcgcagtgcactggtaccttgactttctcgccccagctaaggctactctgggggaaacacatagactctttcctaacacaatgctatttgcatccgaggcctgtgtcggaagcaagttctgggagcaatccgtcagacttggcagctgggaccgggggatgcagtatagccacagcatcatcacaaatctgctgtatcacgtggtgggttggaccgattggaacttggcgcttaatccggaaggaggcccgaattgggtgagaaattttgtggattcaccaatcatagtcgacattaccaaagataccttttataagcagccgatgttttatcacctcggtcacttctcaaagtttatacctgagggctcacagagagtgggtcttgtggcctcacagaaaaacgacctggacgcagtggctctgatgcaccctgatgggtctgcggttgtggtcgttttgaacaggagctccaaggacgtacccctgaccatcaaggaccctgccgtgggtttcctggaaacaatcagtccaggatactccatccacacatacctgtggagacgccagtag

SEQ ID NO: 3784 - DNA, 1272 bp, synthetic construct
  misc_feature 1..1272: note = source = /note="Description of Artificial Sequence: Synthetic coding sequence"
  source 1..1272: mol_type = other DNA
atggagttcagcagccccagccgggaggagtgccccaagcccctgagcagagtgtccattatggcgggctccctgactggattactgcttctgcaggccgtcagctgggccagcgggatcggatataatatcattcgggtccccatggcgtcctgtgatttttccatccggacatacacgtacgctgatactcccgatgatttccagttgcacaatttctctctgcccgaagaggacacgaagctgaaaatccctctgatacatcgggcgctgcagctagcgcagagaccggtctcacttctcgctagtccctggacttcccctacatggttgaaaacaaatggggccgtgaatggcaaggggagtctcaagggccagcccggggatatttatcatcagacttgggcaaggtatttcgtgaaatttctggatgcctacgctgagcacaagctgcagttctgggccgtgaccgcagagaatgagccctctgccgggcttctctccgggtatcctttccaatgcctgggtttcacaccagagcaccaaagggacttcatcgccagggacctgggccctaccctggctaattctacccatcataacgtacgactactgatgctggacgaccagcgtctcctgctgccccattgggcaaaagttgtcctgaccgatcccgaagctgctaagtacgtgcatgggatcgcagtccactggtacttagattttctcgcccctgccaaagcgaccctcggggagacccatcgtctttttcccaatacaatgctgttcgccagcgaggcttgcgttggatcaaaattctgggagcagagtgttcgactgggatcatgggacagaggcatgcagtactctcactccattattactaatctgctgtatcacgtggtagggtggaccgactggaacctggcccttaatcctgaaggggggcccaactgggttaggaattttgtggacagccccatcatagtggatatcaccaaggataccttctataagcagcccatgttctatcacctgggccacttctcgaaatttattccggagggcagccaaagagttggactagtggccagccaaaagaatgacctcgacgccgtggcgcttatgcaccccgacggctctgcagttgtcgtagtgctcaacagatcttcaaaggacgtccctcttactataaaggatcctgcggttggatttctggagacaatttcacccggatattctatacacacatacctgtggcgacggcagtag

SEQ ID NO: 3785 - DNA, 2112 bp, synthetic construct
  misc_feature 1..2112: note = source = /note="Description of Artificial Sequence: Synthetic coding sequence"
  source 1..2112: mol_type = other DNA
atgctgcggggccggagcctgagcgtgaccagcctgggcggcctgcctcagtgggaagttgaagagcttcctgttgaagaactgctcctatttgaggtggcttgggaggtcaccaacaaagtgggggggatatatacggtgatacagacaaaagctaagacaactgctgacgagtggggcgagaattattttcttatcggcccgtacttcgagcacaacatgaagactcaggtcgagcagtgcgaacccgtaaatgacgcagttaggcgcgctgtcgatgcaatgaataagcatggatgtcaggtgcacttcgggagatggctgatcgaaggcagcccttacgtggtcttatttgatattggctatagcgcctggaaccttgacagatggaagggcgacctgtgggaggcgtgctcagtggggattccgtaccatgatagggaagccaatgatatgctcatcttcggatccctcacagcttggttcctaaaggaggtaacggaccatgccgacggaaagtatgtcgtcgcccagtttcacgagtggcaggccggcattgggctcatcttatccagggccaggaaacttccgatcgccactatcttcaccacgcacgctacactgttaggccggtatctgtgcgcggcgaatattgacttttacaatcacttggacaaattcaacattgataaggaagcgggcgagagacagatttatcacagatactgcatggagagagcctccgtgcattgcgcgcatgtctttaccaccgtgagtgaaattacagccattgaggctgagcacatgctcaagagaaagccagatgtggtgacgccaaatggattgaatgttaagaagttcagcgcagtgcacgaatttcaaaacttgcacgccatgtataaagcacgcattcaagactttgtgaggggtcatttctatgggcatcttgactttgacctcgagaagaccctgttcctgtttattgcgggaaggtatgagttctcaaacaaaggcgcagatattttcctagagagcctgagtagattaaactttctgttgagaatgcacaagtccgatataaccgtgatggtgttctttattatgcccgccaagacgaataatttcaacgttgaaactctcaaaggccaagccgtccggaagcagctttgggatgtggcccacagtgtgaaggagaagtttgggaaaaagctctacgacgcgcttctacgcggcgagatcccagacctgaacgacatcttagatcgggatgatcttactatcatgaagcgggcaatcttcagtacacaacgccagagcctgccccccgtcaccacgcacaacatgattgatgactctacagaccccatcctcagcacaatccgccggattggcctgtttaataacagaacagaccgggttaaggttattctccacccagagttcttaagttccacaagccccctgttacccatggattatgaggagttcgtgaggggatgccatctcggcgtgttcccttcttactacgagccttgggggtacacgccagctgagtgcactgttatgggaattccctctgttaccaccaacctgtccggctttgggtgctttatgcaggagcacgttgcggatccgacggcttacggcatctatatcgtcgatcgcaggtttcggtcccctgatgatagctgcaaccagctcactaagttcctgtacggcttctgcaagcagtctaggcgtcagcgtattatccaacgcaacaggactgagcggctctcagatctgcttgattggaggtacttgggaaggtattaccagcacgcccggcatttaaccctcagccgagcctttcccgacaagtttcatgttgaactgacatccccccctaccaccgaaggcttcaaatatcccaggccctcaagtgtgcctccatccccctccggctctcaggcatcctcaccgcagtcaagtgatgtggaagacgaggtagaagacgaacgctatgacgaggaggaggaggccgagcgcgatagactgaatatcaagtcccctttttcactgtcacatgttccacatgggaaaaaaaaactgcatggtgagtacaagaactag

SEQ ID NO: 3786 - DNA, 351 bp, synthetic construct
  misc_feature 1..351: note = source = /note="Description of Artificial Sequence: Synthetic coding sequence"
  source 1..351: mol_type = other DNA
atggactactaccggaagtacgccgccatcttcctggtgaccctgagcgtttttctacatgtgctccacagcgcccccgacgtacaggactgtccagaatgcactcttcaggagaacccattctttagccagccaggagccccaattctgcagtgtatgggctgttgtttttccagggcctatcccacccccttaagaagcaaaaagactatgcttgtccagaaaaacgtgactagtgagtccacctgctgcgtcgctaagtcctacaatcgggtgaccgtgatgggcgggtttaaggtggaaaaccacactgcttgccactgctcaacatgctactatcacaagagttag

SEQ ID NO: 3787 - DNA, 654 bp, synthetic construct
  misc_feature 1..654: note = source = /note="Description of Artificial Sequence: Synthetic coding sequence"
  source 1..654: mol_type = other DNA
atggccaccggcagccggaccagcctgctgctggccttcggcctgctctgtctgccgtggctccaggaaggctctgcctttcctactattcccctgagtagactgttcgacaatgccatgctccgggcccaccggctgcaccagcttgcgtttgacacttaccaagagttcgaggaggcctacatccctaaggagcagaagtactcatttctacagaatcctcagacctccctgtgcttcagtgaatcgattcctactccatcaaacagagaggaaacccagcaaaagagtaacctagagttactgcgaattagtctgctcctgatccagagttggcttgaacccgtgcagtttttacgatctgtttttgcaaactcgctggtctatggcgcttcagattccaacgtctacgacctgctaaaagacctcgaagagggcattcagacactcatgggaaggcttgaggacgggagccccaggacggggcaaatcttcaagcagacatattctaaattcgacactaatagtcataatgatgacgcactgctcaaaaactatgggctgttgtattgcttcaggaaggacatggataaggtcgaaacttttctgaggattgtgcaatgccgttctgtggagggcagttgcgggttctag

SEQ ID NO: 3788 - DNA, 369 bp, synthetic construct
  misc_feature 1..369: note = source = /note="Description of Artificial Sequence: Synthetic coding sequence"
  source 1..369: mol_type = other DNA
atggccaccggcagccggaccagcctgctgctggccttcggcctgctttgcctcccttggctgcaggaaggctccgccttccctactattcctctttcgcgcctttttgataacgcaatgctgcgggcacacagactgcaccagctggccttcgatacctaccaggaattccggctggaagacgggtccccccgaaccgggcaaatctttaaacaaacctacagtaagtttgacaccaattcccacaatgatgacgcccttctaaagaattacgggttattgtactgcttccgtaaagacatggacaaagtggagacattcctgaggattgtccagtgcaggtccgtagaggggtcctgcgggttttag

SEQ ID NO: 3789 - DNA, 534 bp, synthetic construct
  misc_feature 1..534: note = source = /note="Description of Artificial Sequence: Synthetic coding sequence"
  source 1..534: mol_type = other DNA
atggccaccggcagccggaccagcctgctgctggccttcggcctgctgtgcctcccctggctccaggagggctccgcgtttcccacaattcctttaagcaggctttttgacaacgcgatgctacgggctcatcggttgcaccagctcgcattcgatacctaccaagagtttaacttggagctactgcgaatcagcctgcttctgatacaatcgtggctcgaaccagtacagttcttgcggtcagtgttcgccaactcactcgtgtacggtgccagcgactccaacgtatatgacctgctgaaagatctcgaggaagggatccagactcttatgggccggttggaggatgggtctcctagaaccgggcagattttcaaacaaacatactcgaagttcgacacaaattcacataatgatgacgctctcctcaaaaactatggactgctctactgcttccggaaagatatggacaaagtcgagacgttccttaggatcgtgcagtgtcggagtgtggaaggttcatgtgggttttag

SEQ ID NO: 3790 - DNA, 609 bp, synthetic construct
  misc_feature 1..609: note = source = /note="Description of Artificial Sequence: Synthetic coding sequence"
  source 1..609: mol_type = other DNA
atggccaccggcagccggaccagcctgctgctggccttcggcctgctgtgcttgccatggctgcaggagggaagcgcattccccaccatcccgctcagtagactgtttgataatgccatgttgcgggcacatcggctacatcaactggctttcgatacctatcaggaattcaaccctcagacatctctatgtttctccgaaagcatcccaacaccatcaaatagggaggagacgcaacagaagagtaacctggaacttctccggatcagcctgctgctgattcagagctggctggaacccgtgcagttcctgcggtctgtttttgccaactcactcgtttatggcgctagtgatagtaacgtgtacgacctgctgaaggatttggaagaggggatccagactcttatggggagactggaagatggctcccccaggacaggccagatatttaagcagacttattctaagttcgacactaattcacacaatgacgacgccttattgaagaactacggcctcttgtactgctttagaaaagatatggacaaagtggaaacatttctacgtatagtacagtgcagatctgtggagggcagttgcggtttctag

SEQ ID NO: 3791 - DNA, 771 bp, synthetic construct
  misc_feature 1..771: note = source = /note="Description of Artificial Sequence: Synthetic coding sequence"
  source 1..771: mol_type = other DNA
atggccgccggcagccggaccagcctgctgctggccttcggcctgctctgcctctcctggctgcaggagggaagtgcgttccccacgatcccactgagtcgccttttcgataatgctatgctcagagccaggagactctaccagctcgcatatgatacctatcaggaattcgaagaagcttatatcctgaaggagcaaaagtactctttcctgcaaaaccctcagaccagcctatgtttctctgagagcatcccaacaccaagtaaccgcgtaaagacacagcaaaagagtaacctagaactcctgaggataagcctgctgctaatccagtcctggctggagcccgtgcaactgctgaggtccgtctttgcgaattcactcgtgtatggggcatctgattcaaatgtgtacagacacctgaaggatctggaggagggaattcagacgttaatgtgggttcgggtggcgccagggattcccaatccaggagccccgctcgcttcccgtgactggggcgagaaacactgctgtcctctgtttagctcacaggctctgactcaggaaaactctccttattcctctttccctttggtcaatccacctggcctctccctgcagcccggaggtgaaggcggcaaatggatgaatgaacgaggtcgggagcaatgcccaagcgcctggcccctgttgctatttctccactttgcggaagctggaaggtggcaaccccccgactgggcggatctccagagcgtccttcagcaagtttag

SEQ ID NO: 3792 - DNA, 654 bp, synthetic construct
  misc_feature 1..654: note = source = /note="Description of Artificial Sequence: Synthetic coding sequence"
  source 1..654: mol_type = other DNA
atggccgccggcagccggaccagcctgctgctggccttcggcctgctctgtctttcctggctccaggagggtagtgccttccccaccatccctctgagtaggttattcgacaacgctatgctgcgagcccgcaggctgtatcaactggcttacgatacctaccaggaattcgaagaagcctacattctgaaggagcagaagtactcttttctgcaaaacccccagacatctctctgctttagcgagagcattccgacaccatcaaacagggttaaaacgcaacagaagtctaatctggaactgctgcggatttcactattactgatccagtcatggcttgagccggtccagctgctccgcagcgtgtttgcgaatagtcttgtgtatggagcaagcgatagcaacgtgtaccgccaccttaaagatctcgaagaaggtatacaaacccttatgtggcgtctggaggacggcagtccccggactgggcagatctttaaccaatcgtactcaaagttcgacacgaagtcacacaatgacgacgcactgcttaagaattatggactgctctactgctttcggaaggatatggataaggtggaaactttcttgaggattgtgcaatgtagatccgtggaaggaagctgcgggttttag

SEQ ID NO: 3793 - DNA, 609 bp, synthetic construct
  misc_feature 1..609: note = source = /note="Description of Artificial Sequence: Synthetic coding sequence"
  source 1..609: mol_type = other DNA
atggccgccggcagccggaccagcctgctgctggccttcggcctgctctgtctatcatggctgcaggaaggaagcgcctttccaacgattcccctctcaagactatttgacaacgcaatgctccgggctcgtagactctatcagctggcctatgacacataccaggaattcaacccgcaaacatcactctgcttctccgagtctatccccaccccgtcaaatagagtcaagactcagcagaaatccaatcttgaactcctacgcatctctctgctgctgattcagtcatggctggagccggttcagcttctgcggagcgtgtttgccaactccctggtttatggcgcaagcgactctaacgtgtatagacacttaaaagatctggaagagggtatacagactctgatgtggaggctagaggatggctcgccccggacaggtcagatattcaatcagtcctattctaagttcgatactaaatcacacaatgacgatgcgctgctgaaaaattacgggctgctttactgcttcaggaaagacatggacaaggtggaaacatttctgagaatcgtgcagtgtagaagcgtagagggcagctgtggattctag

SEQ ID NO: 3794 - DNA, 738 bp, synthetic construct
  misc_feature 1..738: note = source = /note="Description of Artificial Sequence: Synthetic coding sequence"
  source 1..738: mol_type = other DNA
atggccgccggcagccggaccagcctgctgctggccttcggcctgttgtgcctgtcttggttgcaggagggatctgcctttccaaccatacctttgagccgattgttcgacaatgctatgcttcgcgcaaggcggttataccaactggcctacgatacctatcaggagtttgaagaggcgtacatcctgaaggagcagaagtactcctttttgcaaaaccctcagaccagtctttgtttttccgagagcattcccactcctagtaatagggttaaaacccagcagaagtctaaccttgaactcctacgaatatcactgcttttgatccagtcatggctggagccagtgcagcttttgagaagcgtcttcgccaatagtcttgtatatggggccagtgatagcaatgtgtaccggcacctgaaggacctcgaggagggaatccagacgttgattggatggaaaatggccgccccaggtctcggccggagctcgatatctccaactgcttctctgactcaaaacaggactacaatgacccattgtagccgcaccacagggtgttccactgcctcaggcagaacttggaccagaagcagacatagctgcgcctcgtgttctgcggccctttggcgcgcagctgtggccagcagttgtcccggcggcattcccgttacccctccgcagtgtctgtcctggagctggaaggtgttattacagtgccctcctgctctgtcctag

SEQ ID NO: 3795 - DNA, 753 bp, synthetic construct
  misc_feature 1..753: note = source = /note="Description of Artificial Sequence: Synthetic coding sequence"
  source 1..753: mol_type = other DNA
atggagaagggccccgtgcgggcccccgccgagaagccccggggcgccaggtgcagtaacggcttccccgaacgggaccctccacgtccaggtccatcacgccctgcggagaagccccctagacctgaagcgaaatctgctcagccagctgacggatggaagggcgaacggccccggtccgaggaagacaatgagctgaatttgcctaacttagcagccgcatatagttccatcctgtccagcctaggggagaaccctcagcggcagggtctactgaaaacaccgtggcgtgccgcaagcgccatgcaattcttcaccaagggatatcaggagactatctctgatgtgctcaacgatgcaatctttgatgaggaccacgatgaaatggtgatagtgaaggatatcgacatgttcagcatgtgcgagcatcacctggtgccctttgttgggaaagtgcacattgggtacctgcccaataaacaagtcctcggactatccaagctggcccgcattgtcgagatttattcacggcgcctgcaggttcaagagcggctgacaaaacagatcgctgtcgcgattacggaggcactgcggcctgcaggcgtcggagtcgttgtggaggccacgcacatgtgtatggtgatgaggggtgtccagaagatgaatagcaagactgtgacatcgaccatgctaggagtgtttcgagaggatcccaaaacaagagaggagttcctgacactcattagatcttag

SEQ ID NO: 3796 - DNA, 693 bp, synthetic construct
  misc_feature 1..693: note = source = /note="Description of Artificial Sequence: Synthetic coding sequence"
  source 1..693: mol_type = other DNA
atggagaagggccccgtgcgggcccccgccgagaagccccggggcgcccgatgttctaacggctttccggagagagatccccctcggccaggaccgagtaggcctgctgagaaaccaccccgacctgaagccaagtccgcgcaaccagcagatggctggaagggggaaaggccaagatctgaagaggataacgagctgaacttgcccaatctggcggcagcctactctagcatcctgagctcattgggagaaaacccccagagacagggtttgttgaagactccctggcgagctgccagcgctatgcagttcttcactaagggttatcaggagactatctcggacgtgctgaacgatgctatcttcgatgaggatcacgacgagatggtcatcgtaaaagatatcgacatgttctccatgtgtgagcatcatctggtgccattcgtcggcaaagtgcacatcggatatcttcccaataagcaagtgctcggcctctccaagcttgcccgcattgtggaaatctattccaggcggcttcaggttcaagaaagactgacaaagcagatcgcagttgctattactgaagccctccgtccagctggtgtgggagttgttgtggaagccactaaaagtaacaagtacaataaagggctaagttatttcctgctcgctacctttctgtggcagtattag

SEQ ID NO: 3797 - DNA, 753 bp, synthetic construct
  misc_feature 1..753: note = source = /note="Description of Artificial Sequence: Synthetic coding sequence"
  source 1..753: mol_type = other DNA
atggagaagggccccgtgcgggcccccgccgagaagccccggggcgcaaggtgttctaatggatttcctgaacgcgatcctcctcgccctggacctagtcgccccgcagagaagccccctcgacccgaggccaagtccgcccagcccgccgacggttggaagggcgaaaggccgcgaagcgaggaagataacgaattaaatttgccgaacctagcggcggcctactctagtattctttcttccctgggagagaatccccagcgacagggattactgaaaactccttggagggccgcgtctgcgatgcagtttttcacaaagggatatcaggagacaatttctgatgtgctaaatgatgcaattttcgacgaagatcatgacgagatggtgattgtgaaagacatcgatatgttcagcatgtgcgagcaccacctggtcccttttgtggggaaggtgcatatcgggtatttacccaataagcaggttttaggactctcaaaattagcccgaatcgtggaaatatatagtagaagactgcaggtccaggaaagactaacaaagcaaatagcagtcgctatcactgaagctctgcgacccgccggagtaggagtcgtcgtcgaagctacccatatgtgtatggttatgcgaggtgtacaaaagatgaactcaaagactgttacctcgactatgctcggagtgttccgggaggatcccaaaacgcgagaagagttcctgacactgattaggtcgtag

SEQ ID NO: 3798 - DNA, 642 bp, synthetic construct
  misc_feature 1..642: note = source = /note="Description of Artificial Sequence: Synthetic coding sequence"
  source 1..642: mol_type = other DNA
atggagaagggccccgtgcgggcccccgccgagaagccccggggcgcgcgctgttccaatgggttcccggagagagacccccctcgccccggtccctctcggccagccgagaaacctccccggccagaggccaaaagtgcgcagcctgctgatggttggaagggagagcggcccaggagcgaggaggataacgaactgaacttgcctaatctggcagctgcatacagcagcatcttgtcctccttaggggaaaatccccagaggcagggactgctgaaaacgccttggagagccgcctctgcgatgcagtttttcacaaagggatatcaagagactattagcgacgttcttaacgatgcgattttcgatgaggatcatgatgaaatggtaatagtgaaggacatcgacatgttctctatgtgcgagcaccacctggtcccgttcgtcggcaaggtgcacattggctatcttccaaataagcaagtgctcggcctcagcaagttggcacgtatcgtagaaatctacagccgccgtctccaagtgcaggaacggctgaccaaacaaattgccgttgcgatcactgaagcgctcaggcctgcaggggtcggtgtggtcgtggaagccacttcagcggaaccttag

SEQ ID NO: 3799 - DNA, 702 bp, synthetic construct
  misc_feature 1..702: note = source = /note="Description of Artificial Sequence: Synthetic coding sequence"
  source 1..702: mol_type = other DNA
atggagaagggccccgtgcgggcccccgccgagaagccccggggcgccaggtgctccaatggattcccggagagagacccacctcggcctggcccatctaggcctgcagaaaaacccccccgcccagaggctaagtccgctcagccagcggatggatggaaaggagaacgacctcgatccgaagaggacaacgagctaaatctgccaaatctggctgccgcctatagctccattctctccagcctaggggaaaaccctcagcgccaggggttgcttaagactccctggcgagcagccagtgctatgcaattctttaccaagggctatcaagaaactatatccgacgttctgaatgatgccatcttcgacgaagaccatgacgaaatggtcattgtgaaggacatagacatgttttccatgtgcgagcaccatctcgttccctttgtgggcaaggtgcatatcggctacctccctaacaaacaagtgctcggtctctctaaactcgcccggatagttgagatttatagccggagattgcaggtccaggagcgcctaaccaagcagatcgcagtggcgatcaccgaagccctaagacctgccggcgtaggagtagtggtggaggcgaccaagtcaaataaatataacaagggcctttcgcctttgctgtcttcttgccatctgttcgtcgcaatactgaagtag

SEQ ID NO: 3800 - DNA, 1014 bp, synthetic construct
  misc_feature 1..1014: note = source = /note="Description of Artificial Sequence: Synthetic coding sequence"
  source 1..1014: mol_type = other DNA
atgggcccccgggcccggcccgccctgctgctgctgatgctgctgcagacagcagtacttcagggcaggcttttgcgtagccactctcttcactatctgttcatgggtgcatccgaacaggaccttggcctaagcctcttcgaggcattagggtacgtggacgaccaactgtttgtattctacgatcacgagtctcggcgtgtggaaccacggactccatgggtgagttccagaatcagttcccaaatgtggctgcagctatcccagtcactgaaaggctgggatcacatgttcacggtagatttctggaccattatggagaaccataaccactcaaaggaatcacacactctccaggtcatcctgggttgtgagatgcaggaggataatagcaccgaaggctactggaagtatggctacgacggacaggatcatctcgagttttgcccagataccctcgactggcgggctgctgagccacgagcctggcctacaaagttagagtgggagcggcataagattcgagcccgtcagaacagggcatacctggagagggattgtcccgctcagttacagcagctcctcgagctagggcgaggcgttttggaccagcaggtgcctccccttgttaaagtgacgcaccatgtcacctcttcagtgacaacactgcgatgtagagccctcaactattaccctcagaatatcaccatgaaatggctaaaggataagcaacctatggatgctaaggagttcgagcctaaagacgtgctgcccaacggtgacggcacttaccaaggttggatcactctggctgtgccaccaggagaggaacaaagatacacttgtcaagtcgaacaccccggtctggatcagcccttaatcgtcatatgggaaccctctccgagcggtactctggtgattggagtgatctctggcattgccgtcttcgtggtcattctgtttatcggtattctgtttatcatcttacggaagcgccaaggatcctcattctag

SEQ ID NO: 3801 - DNA, 771 bp, synthetic construct
  misc_feature 1..771: note = source = /note="Description of Artificial Sequence: Synthetic coding sequence"
  source 1..771: mol_type = other DNA
atgggcccccgggcccggcccgccctgctgctgctgatgctgctgcagactgccgtgctccagggcagattattacgcagccatagcctgcactatcttttcatgggcgctagcgagcaggatctcgggcttagtctctttgaagcattagggtacgtggacgaccagctcttcgtgttctatgaccacgaaagtaggagagtagagcctcgtactccatgggtcagctctaggatatcttcccagatgtggctacagctttcccaaagtctaaaaggttgggaccacatgttcacggtggacttctggaccattatggaaaaccacaaccactcgaaggtcccccccctggtgaaagttacccaccacgtcacctccagcgttaccaccctccgctgtcgggcactgaattattaccctcaaaatatcacgatgaaatggcttaaggataaacaacctatggacgcgaaggaatttgagcctaaggacgtcctgcccaatggggacggtacttatcaggggtggatcactctggccgtgccacccggagaagaacaaagatatacgtgccaagtggagcaccccggactggaccaaccgcttattgtaatctgggaaccctctcccagcggcactctcgttattggcgtgatttctgggatcgcagttttcgtggtaatcctgtttattgggattttatttattatactgaggaaacgacagggatcaagaggcgctatgggacactatgttttggccgaacgtgagtag

SEQ ID NO: 3802 - DNA, 729 bp, synthetic construct
  misc_feature 1..729: note = source = /note="Description of Artificial Sequence: Synthetic coding sequence"
  source 1..729: mol_type = other DNA
atgggcccccgggcccggcccgccctgctgctgctgatgctgctgcaaaccgcagttctacaggggaggcttctacgctcacacagcctccactatttatttatgggagctagcgagcaagacctgggactgtccttgttcgaagccttgggatatgtggacgaccaactgttcgtgttttatgatcacgaatcgcgtcgcgtcgaaccaagaaccccatgggtgagttctaggattagttcccaaatgtggctgcagttatcacagagcttgaagggttgggatcacatgttcacagtggatttctggacaattatggagaatcataatcacagtaaagtgaccaccttgcggtgcagggcactgaattactaccctcagaacattaccatgaaatggttaaaggacaagcagcctatggacgcaaaggagttcgaacccaaagacgtgttacctaatggcgatggcacttatcagggatggattaccctggccgtgccacctggagaggagcaacgctatacatgccaggtggaacatccagggctcgaccagcctcttattgtgatttgggagcccagccccagtgggaccttggttattggcgttatttcaggcattgccgtgtttgtcgtgattttgttcattgggattctgtttatcatacttcggaagcgacaaggaagccgaggagcaatgggccactacgtgctcgccgaaagagagtag

SEQ ID NO: 3803 - DNA, 783 bp, synthetic construct
  misc_feature 1..783: note = source = /note="Description of Artificial Sequence: Synthetic coding sequence"
  source 1..783: mol_type = other DNA
atgggcccccgggcccggcccgccctgctgctgctgatgctgctgcagactgccgttctccagggcagacttctccagtcacacactttacaggtaattctgggctgtgagatgcaagaggataactccaccgaagggtattggaaatacggctacgatggacaagaccacctcgagttctgccccgatacccttgattggcgtgcagctgagccccgagcctggcctacgaaattggagtgggaaagacacaagatccgtgcgcggcaaaacagagcatacctggaaagggactgccctgcgcagctgcagcagttactagagctaggacgaggagtgctggaccagcaagtgcctccattggtaaaggtgacacaccatgtaactagcagtgtgacaacgctgaggtgccgagccctgaactactatccacagaatattacaatgaaatggcttaaggacaaacagcctatggacgccaaagaatttgaacctaaggacgtgcttcccaatggagatggtacatatcaaggctggattaccctcgcggtgccacccggcgaggaacagcgatacacctgtcaggtagagcatcccgggctagaccagccgctaatcgtcatctgggagccgagcccctccggcactctggtaataggtgtgatctctggcatagctgtgtttgtcgtgattttatttataggaatcctattcatcatactccgtaagcggcaaggatctcggggcgctatgggccattatgttctcgctgagagggagtag

SEQ ID NO: 3804 - DNA, 231 bp, synthetic construct
  misc_feature 1..231: note = source = /note="Description of Artificial Sequence: Synthetic coding sequence"
  source 1..231: mol_type = other DNA
atgggcccccgggcccggcccgccctgctgctgctgatgctgctgcagaccgcagttttgcagggtagactgttgcagccctccccttcgggcacattggtgatcggtgtcatcagtggcatcgccgtgttcgtagtgatattattcatcggaatcctgttcataatactgaggaagcgtcagggctcccgcggggcaatgggtcattacgtattagctgaacgcgaatag

SEQ ID NO: 3805 - DNA, 507 bp, synthetic construct
  misc_feature 1..507: note = source = /note="Description of Artificial Sequence: Synthetic coding sequence"
  source 1..507: mol_type = other DNA
atgggcccccgggcccggcccgccctgctgctgctgatgctgctgcagacggctgtgctccagggccggctgcttctgccacctcttgtaaaagtgacccatcacgtcacctcctcggtcaccaccctccgctgccgagcattgaactattacccacagaacattaccatgaagtggctgaaggataagcagccaatggacgctaaagagttcgaacctaaagatgttctaccaaatggagacggcacctaccagggttggatcacattggccgtgccaccaggagaagaacaaaggtacacctgtcaggtagaacacccagggctggaccagcctctgattgtcatttgggaaccgtctcccagcggcacactcgtcatcggcgtgataagtggtatcgctgtgttcgtggtgattctgttcattggcatcttgtttattatcctgagaaaaaggcagggcagccgcggagccatgggacactacgtgctggctgagagggaatag

SEQ ID NO: 3806 - DNA, 1047 bp, synthetic construct
  misc_feature 1..1047: note = source = /note="Description of Artificial Sequence: Synthetic coding sequence"
  source 1..1047: mol_type = other DNA
atgggcccccgggcccggcccgccctgctgctgctgatgctgctgcagaccgccgtactccaggggaggctgctgcggtcacattctctgcattatttattcatgggagccagtgaacaggaccttggtctgagtctgtttgaggccctggggtacgtggacgatcaactgtttgtattctacgaccacgagagccggcgggtggagccgcgaactccatgggtgtcctcccgcatctctagccagatgtggctgcagttgtcccagagtttaaagggatgggaccacatgtttactgtcgacttttggaccatcatggaaaaccataaccactccaaggaatcccacacgcttcaggttattcttggctgtgagatgcaagaggacaattctactgagggatactggaaatatgggtacgatggccaggaccacctagagttttgtccagacacacttgattggcgggctgcagagccaagggcttggcccacgaaactggagtgggaaaggcataagataagggcaagacaaaacagggcatacctggagagagattgcccagcacagttacaacaactgctggagctcgggagaggagttctcgaccagcaggtcccccctctggtgaaggtgacacaccatgtgactagcagcgtgacaactctcaggtgtagagccttaaattattatccccagaacattactatgaaatggctgaaggacaaacagcctatggatgctaaagagttcgagccaaaggacgtccttcccaatggcgacggaacttatcagggctggattactctcgccgtaccacccggcgaggagcagcgttacacgtgtcaagtggaacacccaggactggaccaacccttaatcgtaatctgggagccatctccaagcggcacactggtgataggcgtgattagtggaatcgctgtatttgttgtgatactctttatcggaattctgttcataatattaaggaaacggcaaggctcacgaggagccatgggacactacgtcttggccgagcgcgaatag

SEQ ID NO: 3807 - DNA, 978 bp, synthetic construct
  misc_feature 1..978: note = source = /note="Description of Artificial Sequence: Synthetic coding sequence"
  source 1..978: mol_type = other DNA
atgggcccccgggcccggcccgccctgctgctgctgatgctgctgcagaccgctgtcctccagggtaggcttctgcccctcggatatgtggacgaccaactgttcgtgttctatgaccacgagtccagacgcgtagagccaaggacaccctgggtgagctctcgtattagcagtcagatgtggctgcaactgtcccaatccctgaagggatgggatcatatgtttacagtggatttttggactatcatggagaatcataaccacagtaaagagagccacaccttgcaggtcatattgggatgtgaaatgcaagaagacaattccacagaggggtactggaagtatggctatgatggccaggatcacctggagttctgtcccgacacactggattggcgggctgcagagcctagagcctggcctactaagctcgaatgggagcgtcataagatcagggcacgccagaaccgcgcctatctggaacgcgattgcccagcacaactccagcagctcctagaactgggacggggtgtcctggaccaacaagttcctccccttgtgaaagtgactcaccacgttacatcctccgtcaccacactccgttgcagggccttgaattactacccccagaacatcaccatgaagtggttgaaggacaagcagcccatggatgcaaaggaattcgagccaaaagatgtgctccctaacggggacggaacttaccaaggatggatcacactcgcagtgccccccggcgaagagcaacgctatacatgccaggttgaacatcccggattggaccagcccctcattgtgatttgggaaccttctccatcagggacactcgtcataggcgttattagtggaattgccgtgttcgtcgtgatcttgtttattgggattttgttcattattctgcggaagcgacaggggtctcggggcgccatggggcattacgtgctggccgaaagagaatag

SEQ ID NO: 3808 - DNA, 1005 bp, synthetic construct
  misc_feature 1..1005: note = source = /note="Description of Artificial Sequence: Synthetic coding sequence"
  source 1..1005: mol_type = other DNA
atgggcccccgggcccggcccgccctgctgctgctgatgctgctgcagacagccgtcctgcaagggaggctgctgcgcagccacagcctgcactacctgttcatgggggctagcgaacaagatctgggtctaagtctcttcgaagcccttggttatgtagacgaccagctgttcgtcttttacgaccacgagagtaggcgcgttgagccacgcaccccgtgggtgtcgtcgcggatttcgagtcagatgtggctgcaactgtcccaatcactcaagggttgggatcatatgttcacggtcgacttctggaccattatggagaaccacaatcattctaaggaaagccatacacttcaggtgatcctggggtgtgaaatgcaggaggacaatagtacagagggctactggaaatacggatacgatggacaggatcatttagaattttgtcctgacactttggattggcgcgctgcggagccccgggcttggccaacaaagctggaatgggagagacataagattcgggctaggcagaatcgggcctatttagagcgggattgtcctgcccagctccagcagctcctcgagttgggccgaggcgtgctcgatcaacaggtaacaactcttcgttgtcgggctctgaactactatccccagaatattacaatgaagtggctgaaggacaagcagcctatggacgccaaggaatttgagccaaaggatgtcctccccaatggagatgggacctatcaaggctggatcactctagctgttccccccggcgaggagcagcggtatacctgtcaggtggaacatccagggttggaccagccacttattgttatctgggaacccagcccgtctgggaccctcgtgatcggcgtgataagtggcatcgcagtctttgttgtcattctgttcatagggatcttgttcatcattctgaggaagcgacaggggtcccgaggagctatggggcattacgtattggcggaacgcgaatag

SEQ ID NO: 3809 - DNA, 1038 bp, synthetic construct
  misc_feature 1..1038: note = source = /note="Description of Artificial Sequence: Synthetic coding sequence"
  source 1..1038: mol_type = other DNA
atgggcccccgggcccggcccgccctgctgctgctgatgctgctgcagaccgcagtactgcaggggcgtctgttaagaagtcattccctccactacctcttcatgggggcatccgaacaggatctgggcttgtcccttttcgaagctctgggctacgtggacgatcaattatttgtcttttacgatcacgaatctaggagagtggagccgaggaccccatgggtttccagccgcattagctctcagatgtggctacaactgtcacaatcgttgaaggggtgggatcacatgttcaccgtggatttttggactattatggagaaccataaccattctaaggagagccataccctgcaggtgatcctgggctgtgagatgcaggaggacaatagtactgaaggctactggaagtatggctatgacggtcaggaccatcttgaattctgccctgacaccttagattggcgggctgcggagccgagagcctggcccacgaagctggagtgggagcgacataaaattagggcaaggcaaaatcgcgcttacttggaacgagattgtcctgctcagttgcagcagctgcttgaacttgggcggggagtccttgaccagcaagaaggaagcgagtccagtagtctgcctggcaaggtgacaaccctcagatgccgggccctgaactattacccccagaatatcacgatgaaatggctcaaggataagcagcctatggatgccaaagagtttgaaccaaaggacgtgctgccaaatggggatggcacgtatcaaggttggatcactctcgcagtgcctcctggggaagagcagcggtacacctgccaggtggagcacccaggtctcgaccagccactgatcgtcatttgggagcccagtcctagtggaacccttgtgattggggtgattagcggaattgctgtgttcgtagtgattctgttcattgggattttatttattattctgcgcaaaagacagggaagtcgaggagccatgggtcactacgtcctcgctgagcgggagtag

SEQ ID NO: 3810 - DNA, 741 bp, synthetic construct
  misc_feature 1..741: note = source = /note="Description of Artificial Sequence: Synthetic coding sequence"
  source 1..741: mol_type = other DNA
atgggcccccgggcccggcccgccctgctgctgctgatgctgctgcagactgcagtacttcagggtaggcttctgcagtcgcacacactgcaggtgatcttgggctgcgagatgcaggaagacaactccacagaggggtactggaaatacgggtacgatggtcaggatcacctggaattctgccccgacaccctggattggcgcgcagccgaaccccgcgcttggcctacaaaactggaatgggagaggcacaagattcgggctcgccaaaacagggcttacctcgaacgggattgtcctgcacagttgcagcagctgctcgaactaggaagaggagtccttgaccagcaggttacaactcttcgctgtcgagcccttaattattacccacagaacatcactatgaagtggcttaaggacaagcagcccatggacgccaaagagtttgagccaaaagacgtgctgcccaacggagatggaacataccagggatggattactctggccgtgccccccggcgaggaacagcggtacacctgccaggtggaacaccccggcctggatcagcccctgatcgttatctgggagcccagtccctccggaacattggttataggtgtaatcagcggcattgccgtgttcgtcgttatccttttcattggcattctattcattattttaagaaagcggcagggatccagaggggctatgggacactacgttcttgctgagagggaatag

SEQ ID NO: 3811 - DNA, 486 bp, synthetic construct
  misc_feature 1..486: note = source = /note="Description of Artificial Sequence: Synthetic coding sequence"
  source 1..486: mol_type = other DNA
atgggcccccgggcccggcccgccctgctgctgctgatgctgctgcagaccgctgtgcttcaggggaggctgctccggtcccatagcttgcactatctttttatgggggcctccgaacaagacttgggtttgtccttgttcgaggctcttggctacgttgatgaccagttattcgtcttttacgaccatgaatccaggcgagtggaacccaggacaccctgggtaagcagccggatatcatcccagatgtggctccaactgtcccagtccttaaaggggtgggatcacatgttcaccgttgacttctggaccattatggagaatcacaaccacagcaaagaatcccacactcttcaagtcattctgggatgtgaaatgcaggaggataattcgacggaggggtattggaagtatggatacgacggccaagtgctgcaagacaccatctactcatccgaggtttcgagtctggggatcaagttctag

SEQ ID NO: 3812 - DNA, 366 bp, synthetic construct
  misc_feature 1..366: note = source = /note="Description of Artificial Sequence: Synthetic coding sequence"
  source 1..366: mol_type = other DNA
atggagaaccacaaccacagcaaggagagccacaccctgcaggtgatactgggttgcgagatgcaggaggacaacagtacagaggggtactggaagtacggatacgacgggcaagatcatttagaattctgccccgatactctggactggcgggccgcagaacctcgcgcttggccaaccaagctggagtgggagaggcacaaaatccgcgcccggcagaaccgtgcgtacctcgaacgagactgcccagctcagctgcagcagctcttggagctcggtaggggcgtgctcgaccagcaggtgcctcccttggttaaggttacgcatcacgtgagccatccagcccagccctcgaaggaaagctag

SEQ ID NO: 3813 - DNA, 1281 bp, synthetic construct
  misc_feature 1..1281: note = source = /note="Description of Artificial Sequence: Synthetic coding sequence"
  source 1..1281: mol_type = other DNA
atgggcgagcccggccagagccccagcccccggagcagccacggctccccgcccactctctctaccctgaccctgcttctgcttctctgtggccatgctcatagccagtgtaaaattctgagatgtaatgccgaatatgtgtcaagcacacttagtctaagaggaggcgggtcctccggcgcactgcgcggcggcgggggcggcggacgggggggaggagtggggtcaggaggtctgtgtcgggcccttagaagctatgccctctgcacacggagaaccgcaaggacgtgcagaggcgacttggccttccacagcgccgtgcacggcattgaggatctgatgatccagcataactgctctcgacagggacccacagccccccctcccccacgcggaccagccctaccgggagccggatccggattgcccgctcccgatccatgcgattatgagggacggttcagccgcttgcatgggcggccacccggatttctccattgcgcctcattcggcgatccgcatgtacggagttttcaccatcatttccacacgtgtagggtgcaaggagcatggccattgctggacaacgactttttgttcgttcaggcaacgtcgagccccatggcgttgggtgccaacgccaccgcgacccggaaattaacgattatcttcaagaacatgcaggagtgcatcgatcagaaggtctaccaggccgaagttgacaatctgcccgtggccttcgaagatggttctatcaatgggggggatcgtcctgggggcagcagcctttccatccaaacagccaaccccggcaatcacgtagaaatccaggctgcatacatcggcacaacaataatcattaggcagacagcgggacaactgagcttttctataaaggtggcggaggatgtggctatggccttttcagcagagcaggatctccagttgtgtgtaggcggctgtccgccttcgcagaggctgtctagaagtgaacggaatcgcagaggcgccatcacgattgacactgcacgtagactgtgcaaagagggtttgccagtagaggatgcatactttcatagctgcgtttttgacgttctgatttcaggcgaccctaactttacggtggcagcgcaagccgccttagaggacgcccgggcctttctgccagatctggaaaagcttcacttgtttccttcagatgctggagttcctctgtcttccgctaccctgctcgcaccactgctgtccggcctcttcgtgctatggctgtgcattcagtag

SEQ ID NO: 3814 - DNA, 942 bp, synthetic construct
  misc_feature 1..942: note = source = /note="Description of Artificial Sequence: Synthetic coding sequence"
  source 1..942: mol_type = other DNA
atgatccagcacaactgcagccggcagggccccaccgcccccccccctccacggggccctgctctccccggcgccggctcaggcctccctgcccccgacccctgcgactacgaggggaggttctcccgcctgcatggaaggccgcctgggtttctccattgtgcaagctttggagaccctcatgtgagaagttttcatcaccacttccacacctgcagggtgcagggagcctggccacttctggataacgatttcctgttcgtacaggccactagctcccctatggctttgggggcaaacgctacagccacacgcaaactcacaatcatcttcaagaatatgcaggagtgcatcgatcagaaagtgtatcaggccgaggtagataatctgccagtggctttcgaggatgggagcattaacggcggagataggcccggcgggtcaagcctttccattcaaacagcaaaccccggcaaccatgtcgagattcaggccgcttacatcggtacaacaataattatacggcagacggccggccagctttcattctccataaaagtggcggaagatgtcgcaatggcatttagcgcggaacaggatttgcaactgtgcgtgggcggatgcccaccaagccagaggctgagcaggagcgagcgcaatcgaagaggagccatcacaatagatacagcaagacgtctttgcaaagagggtctgcccgtggaggatgcttatttccattcctgcgtgtttgatgtcctcatctctggggaccctaattttaccgtggccgcacaggcagccctggaagatgccagggcattcctgccggatctggagaagctgcatctcttcccttctgatgcaggcgtacctttgtcttcggctactctgctggcgccgctgctgtccggcttgtttgtcctgtggctttgtattcagtag

SEQ ID NO: 3815 - DNA, 282 bp, synthetic construct
  misc_feature 1..282: note = source = /note="Description of Artificial Sequence: Synthetic coding sequence"
  source 1..282: mol_type = other DNA
atgggcgagcccggccagagccccagcccccggagcagccacggctcgccaccaaccctgtccactcttaccctgttgcttctgttatgtggtcacgcccacagccagtgtaagattctgcggtgcaacgcggagtacgtatccagcacgctgtcgctgagggggggtggctcatccggggccctcaggggtggtggggggggtgggcggggaggcggcgtggggtctgggggcctgtgcagagctctccgctcctacgccctgtgcaccaggaggacatag

SEQ ID NO: 3816 - DNA, 603 bp, synthetic construct
  misc_feature 1..603: note = source = /note="Description of Artificial Sequence: Synthetic coding sequence"
  source 1..603: mol_type = other DNA
atgcaggagtgcatcgaccagaaggtgtaccaggccgaggtggacaacttgccagtagcctttgaagacgggagcatcaacggcggagacaggccaggcggaagttcgctctccattcagacggcaaatcccggcaaccatgttgagattcaagccgcatacatcggcaccaccatcattattaggcagacggccgggcagctgagcttctctatcaaggtggctgaagacgtggctatggcgttctccgcagaacaagatttgcagctgtgtgtgggcgggtgtccgccgagtcagagactctcgcgctccgagaggaacaggcggggcgccattacaattgacacagctcgcaggttgtgtaaagagggattaccagtagaggatgcgtactttcactcttgtgtgttcgacgtgctcatcagcggggatccaaacttcactgtggccgcgcaggcagcactggaggacgcccgggccttccttccagatctggaaaaactgcatctcttccccagtgatgcgggagtcccattatcttctgcaacactgttggcaccccttctgtcagggctgtttgtgctttggctgtgtatacagtag

SEQ ID NO: 3817 - DNA, 603 bp, synthetic construct
  misc_feature 1..603: note = source = /note="Description of Artificial Sequence: Synthetic coding sequence"
  source 1..603: mol_type = other DNA
atgcaggagtgcatcgaccagaaggtgtaccaggccgaggtggacaacctacctgtggccttcgaggatggatctattaatgggggggaccggcctggtggttcatccctgagtatccagacggctaaccccggtaaccatgtcgaaatacaggctgcttatataggcactacaatcatcatccggcagacagctggtcagctcagtttctctattaaagtcgccgaggatgtggcaatggcatttagcgcagaacaggacctccagctgtgtgttggcggatgtcctcccagtcagaggttatcaagatccgaaaggaatcgcagaggagccattacgattgataccgctagacggctgtgcaaagagggtcttccagtcgaagacgcctatttccatagctgtgtcttcgatgtcctaatcagcggagatcctaatttcaccgtggcggcccaggcagctttggaggatgctcgggccttcctgcctgacttggagaagctgcatttgtttcctagtgacgccggtgtgcccttgtcctcggcgaccctgctggccccccttctctcaggcttattcgtactctggctttgtatccaatag

SEQ ID NO: 3818 - DNA, 603 bp, synthetic construct
  misc_feature 1..603: note = source = /note="Description of Artificial Sequence: Synthetic coding sequence"
  source 1..603: mol_type = other DNA
atgcaggagtgcatcgaccagaaggtgtaccaggccgaggtggacaatttacctgttgcgttcgaggacggttcaatcaacgggggggatcgtccaggcggcagcagtctgagcattcagactgccaaccccggcaatcatgttgagattcaggctgcctacatcggcaccacaatcatcatacgtcagactgccggacagttatccttctctatcaaggtggcagaagacgttgccatggccttttcggctgagcaggacctgcagctctgtgtgggaggctgccctccaagtcaacgcctctctaggtcagagagaaaccgaaggggcgccatcacaattgataccgccagacgtctatgtaaagagggtcttcccgtggaggacgcatacttccacagctgcgttttcgacgttcttatatcaggagacccaaacttcacagtggccgctcaggccgccttggaggacgctcgggcatttctccccgacctcgaaaagctgcacttgtttccttccgatgcaggcgttcctctgtcctcggctactttgctcgcaccattgctgagtggactgttcgtgctatggttatgtatccagtag

SEQ ID NO: 3819 - DNA, 603 bp, synthetic construct
  misc_feature 1..603: note = source = /note="Description of Artificial Sequence: Synthetic coding sequence"
  source 1..603: mol_type = other DNA
atgcaggagtgcatcgaccagaaggtgtaccaggccgaggtggacaacctgccagtcgcgttcgaagatggctcgattaatggaggcgacaggcctggtggcagctcactcagcatccagaccgccaaccctggcaatcatgtggagatccaggccgcatatataggtactactattattatccgccagactgcgggacagttatcattcagtatcaaagtggccgaagacgtggcaatggctttcagtgcggaacaggatttgcagctgtgtgtcggtggatgccctccaagccaacgactgtctcggagcgaaaggaaccgccggggcgctatcacaattgacactgccaggcgcctgtgtaaagagggtctccccgtagaggacgcatatttccattcttgcgtcttcgacgtgctgatttctggcgatcctaacttcaccgtcgcagcccaggcggctctggaagatgcaagagcattcctccctgacctagaaaaactccacctcttccctagcgacgctggggtgcctttgagctccgcgacgctcctggcccctttacttagtgggctttttgtgttatggctgtgtatccaatag

SEQ ID NO: 3820 - DNA, 1905 bp, synthetic construct
  misc_feature 1..1905: note = source = /note="Description of Artificial Sequence: Synthetic coding sequence"
  source 1..1905: mol_type = other DNA
atgcccagcgacctggccaagaagaaggccgccaagaagaaggaggccgctaaggcccgccagagaccgcggaaggggcatgaagaaaatggtgatgtcgttaccgaaccccaagtcgcagaaaagaacgaggccaatgggagagagactaccgaggtggacttgcttacgaaagagctggaggactttgagatgaaaaaagccgccgcaagggcagtgacgggtgttctggcttctcaccccaattcaacagatgtgcacatcatcaatttgtcgttgactttccacggccaggagctgttgtcggacacaaagctggaactgaacagcggaagacggtatggcctgatcgggttgaatgggatcggcaaatccatgcttctctccgcaatcggaaaacgagaagtgcctattcctgagcacattgacatttaccatctgacacgtgaaatgccccctagtgacaagactccattgcattgtgtcatggaagtggatactgaaagagccatgctggaaaaggaagccgaacgccttgcccacgaagacgctgaatgcgaaaagctaatggagctgtacgaaaggctggaggagctggatgccgacaaagctgaaatgagggctagccgaatcctacacggactcggtttcacacccgcaatgcagcggaaaaaacttaaggacttcagcggaggttggagaatgagggtcgccctagcgagagcattgttcatcagacctttcatgctcctgctggacgagcccaccaatcacttggatcttgacgcctgcgtctggcttgaggaggaattaaagacctttaaacgcatcctggtgttagtgtcccacagccaggacttcctgaatggcgtttgcaccaacattatacacatgcataacaaaaaactcaaatattatacaggtaactatgatcagtacgtaaagaccagactcgaactggaagagaaccaaatgaagcggtttcattgggaacaggaccagattgctcatatgaagaattacatcgctcgcttcggccatggctcagcgaagctggctcggcaggctcagtctaaagagaaaacccttcagaagatgatggcaagtggtctgacggagcgtgtggtgagtgataagaccctcagcttttattttcctccatgcggcaaaatacctccgcccgtgatcatggtgcaaaacgtctcatttaagtacaccaaggacggtccgtgcatctataataatttagaatttgggatagatctggacacccgagtagccttagtcggtcctaatggggcggggaaaagtacattactgaagttgctgactggggaactgttgcctacagatggcatgatcaggaaacattcccacgtgaaaatcggtcgctaccaccaacacctgcaagagcagctggatctcgacctgagcccactggaatatatgatgaaatgctacccagagatcaaagagaaggaagaaatgcgcaaaattatcgggcggtatggtctaacgggtaaacagcaggtgtcgcccattcggaacctatccgatggccaaaaatgtagggtctgcctcgcatggctggcatggcaaaacccccatatgttgtttcttgatgagcctactaatcatctcgatatagagaccattgacgccctggccgatgctattaacgagttcgagggaggcatgatgctggtgtcccacgattttaggctcatccaacaggtagctcaagaaatatgggtgtgcgagaaacagacaattacgaaatggcccggcgatattctcgcttacaaggaacacctgaaaagcaaactcgtcgatgaagaaccgcagttgaccaagcggactcataatgtgtgtacactgacattggctagtctacctagaccttag

SEQ ID NO: 3821 - DNA, 555 bp, synthetic construct
  misc_feature 1..555: note = source = /note="Description of Artificial Sequence: Synthetic coding sequence"
  source 1..555: mol_type = other DNA
atgtgggtgaccaagctgctgcccgccctgctgctgcagcacgtgcttttgcacctgctgctcttacccatagccatcccatatgccgagggccagcgcaagagaagaaacacaatacatgagtttaagaagtctgctaagaccacgttgatcaagatagaccccgcgctgaaaattaagactaaaaaggtaaataccgcggaccagtgtgcaaaccggtgcacaagaaacaaggggctgcccttcacatgtaaggcctttgtgtttgacaaggcaagaaaacagtgcctctggttcccttttaactccatgtcttccggcgtcaagaaggaatttgggcatgaatttgatctctatgagaataaggactatatcaggaattgcattattggcaaaggccggtcgtataaaggaactgtgagcatcactaagtctggaattaagtgtcaaccctggtcctctatgatcccccatgagcatagcggaggcgatgattgtttggttgagagcaccttctactccatcccattctgggggcacaactcagcgcggtag

SEQ ID NO: 3822 - DNA, 891 bp, synthetic construct
  misc_feature 1..891: note = source = /note="Description of Artificial Sequence: Synthetic coding sequence"
  source 1..891: mol_type = other DNA
atgtgggtgaccaagctgctgcccgccctgctgctgcagcacgtgcttctccatttgctgttgctgccaatcgcaattccttacgccgagggtcaacgaaagcgtagaaatacaatacatgaattcaagaagtcggctaagactactctgattaagattgatcccgccctgaagataaagaccaagaaggtcaatacagccgaccagtgtgccaacagatgtacccggaataagggcctgccattcacatgtaaggccttcgtgttcgacaaagcccgcaagcagtgtctctggttcccctttaatagtatgtcttcaggcgtaaagaaggaattcggccacgagttcgacctgtacgagaacaaagactatatccgcaactgtatcattggaaagggaagaagctataagggaaccgtatccattaccaagagcggcatcaagtgtcagccctggtcctccatgatacctcatgaacattcatttctgccatcatcctaccgcgggaaggacttacaagagaactattgtcgcaaccccagaggggaggagggcggtccctggtgttttacatccaacccagaagtgcgatatgaggtttgcgatatccctcagtgctcggaggtggaatgcatgacatgcaacggggagagctatcggggactgatggaccacactgagtcaggcaagatttgtcagagatgggaccaccagaccccccatcgccacaaattcctccctgagcgttatcctgacaagggctttgatgataattactgcaggaatcccgacggacaaccacgtccgtggtgttatacgctggatccgcatacccgctgggaatattgtgcaattaaaacctgcggggacattacctgggccctgaactag

SEQ ID NO: 3823 - DNA, 426 bp, synthetic construct
  misc_feature 1..426: note = source = /note="Description of Artificial Sequence: Synthetic coding sequence"
  source 1..426: mol_type = other DNA
atgtgggtgaccaagctgctgcccgccctgctgctgcagcacgtgctcctgcatctcctcctgctgcccatcgccattccctacgcggagggtcaacggaaaaggcggaacacaatccacgagttcaaaaaatccgcgaagactactctaattaagatagacccagcactgaagatcaagaccaaaaaggttaatacggccgaccagtgtgccaacaggtgcacaagaaacaaaggcctgccctttacttgcaaggctttcgtctttgataaggccaggaagcaatgtctgtggttcccctttaactctatgtccagcggagtgaagaaagagttcggccacgagttcgatctgtacgagaacaaagattacattcggaattgtattattggcaagggaagaagctacaaaggcaccgtcagctag

SEQ ID NO: 3824 - DNA, 357 bp, synthetic construct
  misc_feature 1..357: note = source = /note="Description of Artificial Sequence: Synthetic coding sequence"
  source 1..357: mol_type = other DNA
atgtgggtgaccaagctgctgcccgccctgctgctgcagcacgtgttgctacacctgctgctccttcctatcgccattccgtacgccgagggccagcggaagcgacgaaacacgatccacgaatttaaaaagtctgcaaagacaactttgattaaaatagaccctgccctgaagattaaaactaagaaagttaacacggcggatcagtgcgcaaaccgttgtactcggaataagggcctgccttttacttgtaaagcatttgtctttgacaaagctagaaagcagtgcttgtggtttccatttaatagcatgagctcaggggtcaagaaggaatttggtcatgagtttgacctctag

SEQ ID NO: 3825 - DNA, 633 bp, synthetic construct
  misc_feature 1..633: note = source = /note="Description of Artificial Sequence: Synthetic coding sequence"
  source 1..633: mol_type = other DNA
atgtgggtgaccaagctgctgcccgccctgctgctgcagcacgtgctgctccacctccttctgctccccatcgcaattccatatgcggaagggcagcgtaaacgtaggaatactattcatgagtttaagaaatctgcaaaaactacgctgatcaagattgaccccgctctcaaaatcaagactaaaaaagttaataccgcggatcagtgcgctaacagatgtactaggaataaagggctcccattcacttgtaaggcattcgtattcgataaggcccggaagcaatgtctatggtttcccttcaacagtatgtctagtggcgtgaagaaagaatttgggcacgagtttgacctatatgagaataaagactatatcagaaactgtattattgggaagggaagatcctacaagggcactgtcagtataactaagagcgggattaaatgtcagccttggagtagcatgattccacacgaacatagctttctcccttccagctatcgtggaaaggacctccaggaaaactattgtaggaacccccggggcgaagaaggaggcccctggtgcttcactagtaaccccgaggtacggtatgaagtttgcgacatcccacaatgtagcgaaggcaagtag

SEQ ID NO: 3826 - DNA, 873 bp, synthetic construct
  misc_feature 1..873: note = source = /note="Description of Artificial Sequence: Synthetic coding sequence"
  source 1..873: mol_type = other DNA
atgtgggtgaccaagctgctgcccgccctgctgctgcagcacgtgctgctgcacctgttgctccttccaattgcaattccttacgccgaggggcaacggaaacgtagaaataccattcacgagtttaaaaagtccgctaagaccaccttgataaagatcgatcctgcactgaaaataaagaccaagaaggtgaacacagccgaccagtgtgctaacaggtgcacaagaaacaaagggctaccgttcacctgcaaggcctttgtgttcgacaaagcaaggaaacaatgtctttggtttccattcaactcgatgtcttctggggtgaagaaggagttcggccatgaattcgacctgtatgagaataaagactacattaggaactgcattattgggaaagggcgtagttacaaagggaccgtgagtattactaagtctgggattaaatgccaaccatggtcgtccatgataccccacgagcacagcttcctgcctagtagttatcgcggaaaggacctgcaggagaactactgccgcaatcctaggggagaggagggcggcccctggtgcttcacgagcaatccagaagttcgctatgaggtgtgtgatattcctcagtgctcagaggtggaatgcatgacctgcaatggggaatcctatcgaggactgatggatcacaccgaatctggtaagatctgtcagcgctgggaccaccagacaccccacagacacaaattcctccctgaacgctatccggacaagggctttgacgataactactgtcggaatccggatggccagcctcgcccgtggtgttatacgctcgacccccacacaaggtgggaatactgtgccatcaaaacctgtgagacatag

SEQ ID NO: 3827 - DNA, 858 bp, synthetic construct
  misc_feature 1..858: note = source = /note="Description of Artificial Sequence: Synthetic coding sequence"
  source 1..858: mol_type = other DNA
atgtgggtgaccaagctgctgcccgccctgctgctgcagcacgtgctgttgcacttgcttctgctccccatcgccatcccctacgctgagggccaaaggaaaagaaggaacaccattcatgagttcaagaaaagtgccaagactaccctcatcaagatcgaccccgccctgaaaattaaaaccaaaaaggtgaacacagctgaccaatgcgccaaccgctgtacaaggaacaagggtttgcctttcacatgcaaagcatttgtgttcgacaaggccaggaagcagtgtttgtggttccctttcaattctatgagcagtggggtcaagaaggaattcggtcacgagtttgatctctatgaaaataaggattacatccgcaattgtataattgggaagggcaggtcgtataaagggaccgttagcattacaaaatctggaattaagtgccagccttggtcttctatgatccctcacgagcatagctaccggggaaaggacctgcaggagaactactgcaggaatcctaggggggaggagggaggaccatggtgcttcacgtcaaatcctgaggttcgttatgaggtatgcgacatacctcagtgtagtgaagttgagtgtatgacatgcaatggagaaagttaccgtggcctcatggatcacactgagagtggcaagatctgtcaaagatgggatcatcaaactccgcaccggcacaaattccttcccgaacggtaccccgacaaaggttttgacgataattattgtcggaatcccgatggccaacctagaccatggtgttacacgttggacccccatactaggtgggagtactgtgcaattaaaacgtgcgagacttag

SEQ ID NO: 3828 - DNA, 2172 bp, synthetic construct
  misc_feature 1..2172: note = source = /note="Description of Artificial Sequence: Synthetic coding sequence"
  source 1..2172: mol_type = other DNA
atgtgggtgaccaagctgctgcccgccctgctgctgcagcacgtgttattgcacttactgcttctgcctatagccatcccatacgccgaggggcagcggaagaggcggaacacaatacacgagtttaagaaatcagcaaagaccacactgattaagatcgatccggccctgaaaatcaaaacaaagaaagtgaacacagctgatcagtgcgccaatagatgcacccgtaataaggggctgccattcacgtgcaaagcgttcgtttttgataaggctcgtaaacagtgtttgtggttcccattcaattccatgtccagtggtgtgaagaaggagttcggacatgagtttgatctgtatgagaataaggattatatccggaactgtattatcggcaaaggcagaagctacaaagggaccgtgagcataaccaaatctggcataaagtgccagccatggtcttctatgattccccacgagcatagttacagagggaaagatctgcaggagaactactgccggaatccacggggtgaggagggtggcccttggtgcttcacctcaaaccctgaggttagatatgaagtttgcgatattccccagtgcagtgaggtggagtgcatgacttgtaatggggaaagttaccggggacttatggatcacactgagtccggtaaaatctgtcagcgatgggatcatcaaacacctcacaggcacaaattcctcccagagcgatatccggataagggattcgacgataattactgtcggaaccctgatggacagccgagaccttggtgctacacattggacccacacacacgttgggagtattgcgccattaaaacatgcgccgataatactatgaatgataccgacgtgcctctagaaacgacagaatgcattcagggacagggggagggatacagagggactgtcaacacaatatggaacgggatcccgtgtcaacggtgggactcacaatatccacacgagcatgacatgacccccgagaattttaagtgtaaagatttgcgcgaaaactactgccgcaaccctgacggtagcgaaagcccttggtgctttactacagacccgaatattagggtcgggtactgctcacagatccctaactgcgatatgtctcacgggcaggactgttaccgcggcaatggaaaaaattatatgggcaatttaagtcaaacgcggtccgggcttacctgcagtatgtgggataagaacatggaagatctccatcggcatattttctgggagcccgatgcctccaaactaaacgagaattattgtcgcaatcctgatgacgacgcgcacggcccatggtgttataccggtaacccactaataccctgggattattgtccgatctctagatgcgagggagatactacccccaccattgttaacctcgatcatcctgtaatttcttgcgccaaaacaaaacagctcagggttgtaaatggaatccccacccggaccaatattgggtggatggtaagtctccggtacagaaacaagcacatctgcggaggatccctgatcaaggagtcttgggtgctgacagcccgccagtgttttccatcacgtgacctgaaagattacgaagcgtggctggggatccacgatgtgcacggccgtggcgacgaaaagtgcaagcaagtgttgaacgtgagccagctggtttatggacctgagggatctgatctggtgttaatgaagttggcacgtccagctgtgctagacgacttcgtgtcaacaatagatcttcctaattacggatgcactatcccagaaaagacttcttgtagtgtttacgggtggggatacaccggactaatcaactacgacggactccttcgcgtagctcatctgtacataatggggaatgagaagtgctcacaacatcataggggtaaagttaccctcaacgagagcgagatttgcgccggggctgagaagatagggagcggcccatgtgagggagattacggcgggcccctcgtttgtgaacaacacaagatgagaatggttcttggcgtgatcgtgccgggcagaggatgcgcaatcccaaatcggcctggcattttcgttcgtgtcgcttactacgccaagtggatccacaaaatcatcctaacatataaggtccctcagtcctag

SEQ ID NO: 3829 - DNA, 363 bp, synthetic construct
  misc_feature 1..363: note = source = /note="Description of Artificial Sequence: Synthetic coding sequence"
  source 1..363: mol_type = other DNA
atgaacggcgaggagaagagctgcagcggctacggcggccccgacgccatggacggtaagctggtgagttctgatgatgacgatttcatcgtcaagcgcgagcatacccgggcaagcggtatccgcaaggcagtgctctctgggccaggacaatcagctgaaaatgaaaccgaccaggtgaatttcagagaaattccaccacgctgttacccgaaacacgccaaagcatgtatttatttcacatataaagtacactactcaaacagctcaaccgagatccctgaatttttgacagccttagaggtactcatggcgagcgattttctggacatctacattttcctttttttcctgttcttctag

SEQ ID NO: 3830 - DNA, 255 bp, synthetic construct
  misc_feature 1..255: note = source = /note="Description of Artificial Sequence: Synthetic coding sequence"
  source 1..255: mol_type = other DNA
atggccctgagcagccagatctgggccgcctgcctgctgctgctgctcttattggcatcgctaacaagcggctctgttttcccacagcagaccgggcagctggctgaacttcagcctcaggaccgcgccggcgcccgagcttcttggatgcccatgttccagcggagaagacgtcgagacactcactttcccatatgtattttttgttgtgggtgctgtcacagatcaaaatgtggaatgtgttgtaagacatag

SEQ ID NO: 3831 - DNA, 1422 bp, synthetic construct
  misc_feature 1..1422: note = source = /note="Description of Artificial Sequence: Synthetic coding sequence"
  source 1..1422: mol_type = other DNA
atggccgtgatggccccccggaccctggtgctgctgctgagcggcgccctcgccctgacccagacctgggccgaggtacagctcgttgagagcggaggaggcctagtgcagcccggtggcagcctgcgcctgagttgtgcagcctcggggtttaatataaaagacacttacatccactgggtgcgtcaggcccccggaaagggtctggaatgggttgccagaatctatccaacaaacggttatacccggtacgccgattctgtcaagggtcggtttacgatatcagcggatacttctaagaacaccgcctatcttcaaatgaattctcttagagcagaggataccgcagtgtactattgcagccggtggggtggcgacggattctacgcaatggactactggggtcagggaactctcgtcacggtttctagcgcctccaccaagggacctagcgtgtttccccttgcacctagctccaaatccaccagcggtgggaccgccgcccttggctgtctggtgaaagattacttccccgagcccgttactgtttcatggaactcaggcgccttaacctccggggtccatacctttcctgcagtgctccaatcaagtgggctgtatagtctgagctccgtagtaaccgtgccgtcttccagcctgggtacccaaacatacatctgcaacgtgaaccataaaccttccaacactaaggtggataaaaaggtcgagcctaagtcctgtgataagacccatacatgtccaccgtgccctgctcccgagctactgggtggcccatctgtgttcttgtttccacccaagccaaaagatacactcatgattagccgcactcctgaggttacctgtgttgttgtggacgtcagccatgaagatccagaagttaaatttaactggtacgtggacggcgtagaggttcacaacgccaaaacgaaacctagggaggagcagtacaatagcacatatcgagtcgtgagcgtactcacggtgttgcaccaggattggttgaatggcaaggaatataagtgcaaagtgagcaataaagctctgcctgctccaatcgagaagacaatctcaaaagccaagggacagccgcgagaaccccaggtgtacaccttgccgccgtcccgggatgaattgacgaagaatcaggtgtcactgacatgcctcgttaaaggattctatccatctgatattgccgtggagtgggagagcaacggccagcccgaaaataattataaaactaccccccctgtgttggattccgacggttccttcttcctgtactcaaagctgactgttgacaaatcacggtggcagcagggtaacgtgttctcttgcagtgtgatgcatgaggctctgcacaaccattacacccagaaatctctcagtctgtcccccggttag

SEQ ID NO: 3832 - DNA, 717 bp, synthetic construct
  misc_feature 1..717: note = source = /note="Description of Artificial Sequence: Synthetic coding sequence"
  source 1..717: mol_type = other DNA
atggccgtgatggccccccggaccctggtgctgctgctgagcggcgcgcttgctctgacccaaacatgggccgacatccagatgacccagagtccaagcagcctgtccgccagcgtcggagatcgggtcaccatcacttgccgggcatctcaggacgtaaatacagcggtcgcatggtatcaacaaaaacctggcaaggccccaaaattgctaatttatagcgcctccttcctttattctggagtgccgtcaagattctcgggcagcagaagtggtaccgacttcaccctgaccattagcagtttacagcctgaggactttgcaacctattattgccagcagcattacaccaccccgccaacttttggccaggggactaaagttgagataaaaagaactgttgccgccccttcagtctttatatttccgccgagcgacgaacagctgaaatctggaacagcctcagttgtgtgtctactgaataacttctatccgagggaggcgaaagtccagtggaaggtcgataacgcactgcagagcggcaacagtcaggagagcgtcacagagcaggacagtaaggatagtacttacagtctgtccagtactctgactctttctaaggctgactatgagaagcataaggtatatgcttgtgaagtgacccatcagggcctcagctcccccgtcactaaatcctttaaccgaggggagtgttag

SEQ ID NO: 3833 - DNA, 657 bp, synthetic construct
  misc_feature 1..657: note = source = /note="Description of Artificial Sequence: Synthetic coding sequence"
  source 1..657: mol_type = other DNA
atggccacccggagccccggcgtggtgatcagcgacgacgagcccggttatgacttggacctgttctgcattcctaatcactacgccgaagacctggagcgggtctttatcccgcatggacttatcatggaccgaacggagaggctggccagggacgtgatgaaggagatgggcgggcaccatattgttgccctttgtgtgctgaagggggggtacaaattcttcgccgatttgttggactatatcaaggcgctcaataggaactccgaccgtagcatcccgatgactgtggatttcatccgcctgaagagctattgcaacgaccagtctaccggcgacattaaagtgatagggggtgacgacctgagcaccttgaccggaaagaacgttctcattgtcgaggacatcatcgataccgggaagacgatgcaaaccctcctcagtctagtgcgtcagtataatccgaagatggtgaaggtggcttcactcctggtgaaacgcactcccagatccgtcggctataagcctgacttcgttggattcgagattccagataaattcgttgttgggtacgccttagattataacgaatacttccgcgacctgaaccacgtgtgcgtcatttcagaaactgggaaggctaagtataaagcatag

SEQ ID NO: 3834 - DNA, 657 bp, synthetic construct
  misc_feature 1..657: note = source = /note="Description of Artificial Sequence: Synthetic coding sequence"
  source 1..657: mol_type = other DNA
atggccacccggagccccggcgtggtgatcagcgacgacgagcccggttacgatctggatttgttctgtatcccgaaccactatgcggaggacttggagcgcgtgtttattccgcatggcctaataatggataggacagagagacttgcaagagatgtgatgaaggaaatgggtgggcatcatatcgtggccctctgcgttctgaaaggcggctataaattctttgcggatctgttggattacattaaagccctaaatcggaacagcgacagatcaattccaatgacagtagactttattcgtttgaagtcatactgtaacgaccagtctacaggcgatatcaaagttattggtggagacgatttaagtaccctgacgggcaaatcaaggttgctggccgaggacatcattgacacaggaaaaaccatgcaaaccctgctgtcactagtccgacagtataaccctaaaatggtaaaagtggcttcactcctggttaagagaaccccccgatctgtgggatataagccagacttcgtgggctttgagatccccgacaaattcgtcgttggttatgctctggattacaacgagtatttcagagatctgaatcacgtgtgcgttataagtgaaacaggcaaggccaaatacaaggcctag

SEQ ID NO: 3835 - DNA, 1653 bp, synthetic construct
  misc_feature 1..1653: note = source = /note="Description of Artificial Sequence: Synthetic coding sequence"
  source 1..1653: mol_type = other DNA
atgccccccccccggaccggccggggcctgctgtggctgggcctggttctcagcagcgtatgtgtagcattgggctccgagacacaagcaaactccaccacagacgccctgaacgtgctgctgataatcgtggacgatcttcgtccttctctgggatgttacggagataagttagtgaggtcacccaatattgatcagttggcgtctcacagtctgctgttccagaatgcgtttgcccaacaggcagtgtgtgccccttcccgagtctcattcctcacaggaaggcgtcctgacactactcggctgtatgattttaacagttattggcgcgtccacgctggtaatttctctaccataccccagtactttaaggaaaatggctatgtcaccatgtcggtgggaaaagtgttccacccaggcatttccagcaatcacacggatgactctccttactcctggtcctttccgccctatcatccatcctccgagaagtatgaaaatacgaagacctgcagaggcccagatggagagctgcacgccaaccttctctgccccgtagacgtgctagatgtgcctgaaggcaccctgcccgacaaacagagcacagagcaggctattcagctcctggagaagatgaagaccagcgccagcccgtttttcctagccgtcgggtatcacaagccccatataccctttagatatcccaaagaattccaaaaactgtatccgctggagaatattacactagctccggaccccgaggtcccagacgggttaccacccgtagcctacaatccctggatggatatcaggcagcgggaggacgtgcaggcactaaatatcagcgtgccttatggccccattcctgtggacttccaaagaaagattaggcaatcttactttgcttcagtgtcgtacctcgatacgcaggtggggcggctactgagcgcccttgacgacctgcaactggcaaacagcacaatcatcgcatttaccagcgatcacggctgggccctgggggaacatggtgagtgggctaagtacagcaacttcgacgtcgccacccatgtgccccttatcttctacgtgcctggacggacggcgagcctcccggaagccggagagaagctgtttccctacctggatcccttcgactcagcctcacagctaatggagcctggcagacagtctatggacctggtcgaactggtgagtcttttcccaaccttggctggactggctgggctacaggtacctccgcggtgccctgtgcctagcttccacgtcgagttgtgcagagagggaaaaaacctcctcaagcattttagatttagagacttagaagaggatccctacctgccgggtaaccctagagaactcattgcttattctcagtacccccggccttccgatattccccaatggaattctgacaagccctctctcaaagatatcaagatcatggggtattctatcaggactattgattaccgatacaccgtttgggtgggattcaatcctgatgagtttttagctaatttctcagacatccacgctggggagctttactttgtggattctgaccccctgcaggaccataacatgtataatgacagccagggcggagatttgttccagctgttaatgccttag

SEQ ID NO: 3836 - DNA, 1032 bp, synthetic construct
  misc_feature 1..1032: note = source = /note="Description of Artificial Sequence: Synthetic coding sequence"
  source 1..1032: mol_type = other DNA
atgccccccccccggaccggccggggcctgctgtggctgggcctggtattgtcgagcgtgtgcgtagccctcggatcagagacccaggccaacagcacaacagatgccctaaacgtcctgctgatcatcgtagatgacctccgccctagcctgggctgctatggcgataagctggttcggagccctaacatagaccagctggcatcccactccttactgtttcagaatgcatttgcccagcaggcagtttgcgccccctcaagggtttcattcttgacaggcagacgcccggataccacccgcttgtatgactttaactcttattggcgggtacacgccggcaattttagtacaatcccccagtactttaaggagaacggatacgtgacaatgtctgtggggaaggtctttcatccagggatatcctcaaatcacactgatgattcaccttactcttggagcttccctccctatcacccttcgtcagagaaatatgaaaacacaaagacttgccgtggacccgacggcgaactgcacgcgaatttattgtgtcccgttgacgtattagacgtcccagagggtaccttgccagacaagcaaagtactgagcaagccatacagttgctagaaaaaatgaaaacatctgcatcacccttttttctggccgtcggatatcacaaacctcacatcccattccgctatcccaaggagtttcagaagctttaccccctggagaatataaccctggcacctgatcccgaggtgccggacggcctccctccagtcgcatataacccctggatggatatccgacagcgtgaagatgtccaggcacttaacatctccgtaccctacggcccaattcctgtggatttccagagaaaaataagacagtcttactttgcctcagtatcttacctggatacgcaagtgggcaggttactgtccgcattggacgatttgcaactagccaattccactataattgccttcacttccgaccacggcttcctaatgcggacaaacacatag

SEQ ID NO: 3837 - DNA, 939 bp, synthetic construct
  misc_feature 1..939: note = source = /note="Description of Artificial Sequence: Synthetic coding sequence"
  source 1..939: mol_type = other DNA
atgccccccccccggaccggccggggcctgctgtggctgggcctggtactgagctctgtgtgtgtggccttaggtagcgagactcaagcaaattccaccacggatgcacttaacgtactcctgattatagtagacgatctccgtccctcgctgggttgctacggggacaaactcgttcgctctcccaacattgaccaactcgctagccatagtttactatttcagaatgctttcgctcagcaggccgtctgtgcaccatctagggttagctttttaactgggaggaggcccgacacgacaagactctatgattttaatagttactggagggttcatgccggcaatttctccaccatccctcagtacttcaaggagaacggatacgtcactatgagcgtgggaaaagtcttccaccctggcatttctagtaaccacacagacgattccccttactcatggtctttccccccctaccatccctcttcagagaagtacgagaacactaaaacatgtcggggccccgacggtgagctccacgccaatttgctgtgcccggttgatgtccttgacgtccccgaaggaactttacccgataaacagtcaactgagcaggccattcagctgctggaaaaaatgaagaccagtgcttcccccttcttcctcgccgtcggataccacaagccacatataccattccgatacccgaaagaattccagaagctctatcctttggagaatattacactcgccccagacccagaggtaccagacgggcttccccccgtagcctataatccctggatggacatcaggcagcgcgaagatgttcaggcactaaacatctcagttccatacggcccaattcccgtcgactttcaggaggaccagtccagtacaggttttagattaaagaccagcagtacacgaaagtacaagtag

SEQ ID NO: 3838 - DNA, 540 bp, synthetic construct
  misc_feature 1..540: note = source = /note="Description of Artificial Sequence: Synthetic coding sequence"
  source 1..540: mol_type = other DNA
atgccccccccccggaccggccggggcctgctgtggctgggcctggtcctgtcatccgtatgcgttgccctcggctcagagacacaggcaaattctaccactgatgccctaaatgtgcttcttatcatagtggacgatttgcgaccttccctcggatgctatggcgataaactcgtccgcagtcctaatattgatcagctggcctcccattcactgctcttccagaatgctttcgcacagcaggccgtatgcgctccttcccgagtgagcttcttgacaggccggcgcccggataccacacgcctttacgatttcaattcatattggcgcgtccacgctggaaatttcagtacgatccctcagtactttaaggagaacggctacgtgactatgagtgtcggaaaagtgtttcaccctggcacagccccctgtcctgaaagcggttttagttggtttgtggtgtctgagtcgagcattcctattttgggcatgggcctttctctccagtctccgcttctcgctgggcgcgtgccacgctag

SEQ ID NO: 3839 - DNA, 261 bp, synthetic construct
  misc_feature 1..261: note = source = /note="Description of Artificial Sequence: Synthetic coding sequence"
  source 1..261: mol_type = other DNA
atgccccccccccggaccggccggggcctgctgtggctgggcctggtactctcatccgtatgtgtggcactagggagcgaaacccaggctaattctacgaccgacgccctcaacgtccttctgatcatcgtggacgacttgagaccaagcctgggctgttatggcgacaagctggttagaagtccaaatattgaccaattggcctcgcactcacttttgttccaaaatgcattcgcccagcaagccgtctgcgccccctag

SEQ ID NO: 3840 - DNA, 462 bp, synthetic construct
  misc_feature 1..462: note = source = /note="Description of Artificial Sequence: Synthetic coding sequence"
  source 1..462: mol_type = other DNA
atggacctggtggagctggtgagcctgttccccaccctggccggcttggcaggcttgcaagtccctcctcgctgtccagttccaagttttcatgtggagctctgtcgtgagggaaagaatttgctaaagcactttcgttttagagatttggaagaggatccctacctgccggggaaccctagggagctgatcgcgtactcccagtacccccgccctagtgacattcctcagtggaactcagacaaaccatcccttaaagatattaagattatgggatacagtatccgcacaattgactaccggtatactgtttgggtgggcttcaatccagacgaatttctcgctaatttctctgacatccacgccggcgagttgtattttgtggactccgatccactgcaggatcataacatgtacaacgacagccagggtggagacctgtttcagttgctcatgccgtag

SEQ ID NO: 3841 - DNA, 1020 bp, synthetic construct
  misc_feature 1..1020: note = source = /note="Description of Artificial Sequence: Synthetic coding sequence"
  source 1..1020: mol_type = other DNA
atgaagaccagcgccagccccttcttcctggccgtgggctaccacaagccccacattcccttccgatatcctaaggaatttcagaagctgtatcccttggaaaatataaccctggccccagatcccgaagttcctgacggactgccacctgtggcatacaacccctggatggacatccggcagagggaagatgtacaggcgcttaatatatcagtaccatatggacccataccggttgacttccagagaaagatccgtcagagttactttgcctcagtgagctacttagacacgcaggttggacgcctgctgagtgccttagatgatctgcaactggccaactctaccatcatcgcgttcacctctgatcacgggtgggctctgggtgagcatggtgaatgggctaagtacagtaactttgacgttgccacccacgtgcccctgatattctacgtgccaggccgtacggccagcctccccgaagctggcgagaagttatttccttatttagacccgttcgacagtgcgagccaactgatggaacccggacgacagtccatggatctggtggaactcgtaagtctgtttccaactctggctggcctggccggcttacaggtgccgcctagatgcccagtccccagcttccatgtcgaactgtgtagggaagggaaaaatctgctaaaacacttccgtttccgggatctcgaagaggatccctatctgcccggcaacccccgcgagctgattgcgtactcacagtatcctcgtccctccgacattccccagtggaactcagataagccctctcttaaagatattaaaatcatggggtactcaatcagaaccattgactatcgatacacggtttgggtgggctttaaccctgatgagtttctggcaaacttctcggatattcacgccggcgagctgtatttcgtagattcagatccattgcaggatcacaatatgtacaacgacagccaggggggcgacctcttccagcttttgatgccatag

SEQ ID NO: 3842 - DNA, 1962 bp, synthetic construct
  misc_feature 1..1962: note = source = /note="Description of Artificial Sequence: Synthetic coding sequence"
  source 1..1962: mol_type = other DNA
atgcggcccctgcggccccgggccgccctgctggccctgctggcctctcttctggctgctccccctgtggctccagccgaagccccacatctggtgcacgtggatgcagcaagagcactctggccactgaggaggttttggaggtcaacagggttctgccccccgctgccacacagtcaggccgatcagtatgtgcttagctgggatcagcagctgaatctggcttacgtcggcgccgttcctcacaggggaattaagcaggtcaggacccattggctgctggagctggtcactacaaggggatccaccggtcgtgggctttcttataacttcactcaccttgacggctatttggatctgctgagagaaaaccagttacttccgggattcgagctcatgggtagcgccagcggtcactttaccgatttcgaggacaaacagcaagtattcgagtggaaagatttagtctcatccctggctaggaggtacatagggcggtacggcctcgcccacgtgtccaagtggaatttcgaaacctggaatgagcccgaccatcatgatttcgacaatgtgagcatgaccatgcagggctttctgaattactatgatgcctgttccgaaggcttacgagccgccagtcctgcgctgaggctcggagggcccggtgattcattccacacccctcccagatctccactgagttggggcctgctacgccattgccacgatggaaccaatttttttaccggagaggcgggggtccgactcgactacatctcattacaccgcaagggagccaggagttccatcagtattcttgagcaggaaaaagtggttgcccagcagatccgccagttattccctaaattcgctgatactcccatttataacgatgaagcggatccactggtaggatggtccctcccccagccttggcgtgctgatgtgacgtatgcagctatggtagtgaaggttattgcacagcatcaaaatctgcttctcgctaatactacatctgcttttccgtacgcattactatccaacgataatgcatttctgtcttaccaccctcatccgttcgcacagcgcacgttgacggcaagatttcaggtaaacaataccagaccaccccacgtgcagctgctgcgcaagccagtgctgaccgctatgggtctcttggccctcctggacgaggaacaactgtgggccgaggtcagtcaagccggtactgtgcttgattccaaccacacagtaggagttctcgccagcgcccaccgacctcagggccctgccgacgcttggcgcgcggccgtgctaatctacgccagcgacgatacccgcgcccaccccaaccggtccgtggctgtaaccctgcgactgcggggtgtgcctcccgggccggggttggtctatgtcaccaggtacctggataacggcctgtgtagcccagatggcgagtggcggagactgggccgccccgtgttccccactgcagaacagtttcgcagaatgagagccgccgaagatcctgttgccgccgcacctcgtcctttacctgcaggagggaggctcaccctccggccagctctgaggttgccaagcctcctactggttcacgtgtgcgctcggcctgagaaaccccccggccaagtcacaagactgagagcgctgcccttgacacaaggccagctggtgctggtctggagcgatgagcatgtcgggagtaagtgtctctggacatacgagatacaattctcccaagacggtaaagcatacacacccgtttctaggaagcctagtactttcaacctgttcgtgttttcccctgacaccggcgcggtcagcggttcctatcgggttcgggctttagactattgggcccgtcccggacccttttccgacccagtgccctacctcgaggttccagtgccaagggggccgccgtccccagggaatccctag

SEQ ID NO: 3843 - DNA, 2028 bp, synthetic construct
  misc_feature 1..2028: note = source = /note="Description of Artificial Sequence: Synthetic coding sequence"
  source 1..2028: mol_type = other DNA
atgcggcccctgcggccccgggccgccctgctggccctgctggccagcctgctcgctgccccccctgttgctccagccgaggctcctcatctagtccatgtcgacgcagcccgcgcactgtggcctctgcgacgtttttggcgcagcaccggattttggggatctacaggtagggggctgtcatacaacttcacacatctcgacggctatttagacctcctccgggaaaatcaactcctgcctgggttcgagcttatgggatccgcctccgggcactttactgactttgaggataaacagcaagtcttcgagtggaaggatctggtctcctcacttgctagacgctacatcggacgttatgggctcgcgcacgtttcaaaatggaacttcgagacatggaacgaaccagaccaccacgattttgacaacgtgagcatgactatgcagggtttccttaactactacgatgcctgcagcgaggggctaagagccgcgtccccagcactccgccttggcggccccggggactcatttcacactcctccccgcagccctttgagttgggggcttctgaggcactgccatgatggtacaaatttctttaccggagaagctggagtccgactagattacatctccctacatagaaaagtgcggccggcgcctccaagcgcccctgttttttgtgctttaagccgctgcgcgcccggccgggccgaccccggaggtgccgaagccgcaccacccgctgggtgtgcacaactgcaccttcatccaggcgccggagaggggagacgcgccgcagaccccgctgcgctcccccaagttagaggccatccacacctacaaagaagaggtggaccagcaggcggcctcgtccccgctaccgcagtagaaggaggtagggatctgagaggccacggtggggaaggcgggcccgcccagagaccagctcgccccccagccacatttctgcctcggagagacagaagagcggttgcagcgcctccaggcccctcatgccctggtcatccccaggtaatcgcgcagcaccagaatttgctgctggcaaataccacatccgcttttccttacgccctactctcaaacgataacgccttcctgagttatcacccgcatccgtttgcccagcgaacattgaccgccaggttccaagtgaacaacactcgcccaccgcacgttcagctgctgcgaaaacctgtgctcacagccatggggctgctggccctgctggatgaagaacagttatgggcagaggtatcgcaggctgggacagttctggacagtaaccacaccgtgggagtacttgccagtgcgcatcggccacagggaccggccgatgcgtggagagcggccgtgttgatttatgcgagtgatgacacgcgcgcccacccaaacagaagcgtggccgtgaccttgagactgcgcggagtcccccctggccctggcttggtctatgtcacaagatacctggacaatggtctgtgttccccagacggagaatggagacgccttggtagacctgtgttccctacagccgagcagtttagacgtatgcgggcagcagaggatccagtcgccgctgcaccccgcccactgccggcaggaggccgtctgactctgagaccggcgcttcgtctgcccagcctccttctagtccacgtgtgcgctaggcccgagaaacctccagggcaggtgactagattgcgggcccttcctctcacacagggacaactcgtcctggtgtggtctgacgagcatgtgggaagcaaatgcttatggacctacgagatccaattctcacaagacgggaaagcctacacccctgtatcccggaagccaagcacctttaatcttttcgtcttttctcccgatacaggagccgtttccgggagctacagggtgcgggccctggactattgggcccgtcccggcccattctcagatcccgtaccatacttggaggttcctgtcccaagaggaccgccctcaccgggaaacccatag

SEQ ID NO: 3844 - DNA, 603 bp, synthetic construct
  misc_feature 1..603: note = source = /note="Description of Artificial Sequence: Synthetic coding sequence"
  source 1..603: mol_type = other DNA
atggccctgtggatgcggctgctgcccctgctggccctgctggccctgtggggacccgaccccgctgcggcatttgtcaaccagcacttatgtggctcacacctcgtggaggcactgtacctggtgtgcggtgaacgaggatttttctacaccccaaagacccgtagggaggcagaggatctgcaagccagcgctctctccctttcgtccagcacttctacatggccagagggcctagatgccactgcgagggcaccgcctgcactcgttgtgactgctaacataggccaagccggcggatcttcgagccgccagtttcgacagagggctctcggcaccagcgattcacccgtgctgtttatccattgtcccggcgcagccggtacagcgcagggactggaatatcgaggccgtagggttacaactgagctggtatgggaggaggtggattcttccccacaaccacagggatctgagtccctaccggctcaacctcctgcccaacctgcgccacagcccgagccacagcaggcacgcgaaccttccccggaagtcagttgctgtgggctgtggccaaggcgcccccagcgaagccagaattag

SEQ ID NO: 3845 - DNA, 333 bp, synthetic construct
  misc_feature 1..333: note = source = /note="Description of Artificial Sequence: Synthetic coding sequence"
  source 1..333: mol_type = other DNA
atggccctgtggatgcggctgctgcccctgctggccctgctggccctttggggtcccgaccctgccgcagcctttgttaaccagcatctgtgcggcagtcacctagttgaagcgctgtacttggtctgtggggagagggggttcttctatactcctaagacccgcagggaagcagaggacctgcaagtgggtcaggtggagctgggggggggacccggggctggaagccttcaacctttagccctggaaggcagcttacagaaacgcgggattgttgagcagtgctgtacttctatttgttccctctatcagttggagaactactgtaactag

SEQ ID NO: 3846 - DNA, 333 bp, synthetic construct
  misc_feature 1..333: note = source = /note="Description of Artificial Sequence: Synthetic coding sequence"
  source 1..333: mol_type = other DNA
atggccctgtggatgcggctgctgcccctgctggccctgctggccctgtggggcccagacccggctgccgctttcgtgaaccagcacctctgcggcagccatctggtagaagccctttacctggtttgtggagaacgagggttcttttatactcctaagacccggcgggaagcagaggatctgcaggtcggacaggtggagctgggcggtgggcccggtgctggaagtcttcagcccctggccctggaaggcagcctgcagaagcgcggcatcgtggagcagtgttgcacctctatctgctcgctataccaactcgaaaactattgtaactag

SEQ ID NO: 3847 - DNA, 333 bp, synthetic construct
  misc_feature 1..333: note = source = /note="Description of Artificial Sequence: Synthetic coding sequence"
  source 1..333: mol_type = other DNA
atggccctgtggatgcggctgctgcccctgctggccctgctggccttatgggggccagatcccgcagctgccttcgtaaatcaacacctttgtgggagccacctggtagaggcactctatctggtatgcggcgaaaggggattcttctacacccccaaaaccagacgcgaagcagaagacctgcaggtagggcaggtggaactgggtggcggccctggtgctggtagccttcagccactggccttagaggggtctctccagaaaagggggatcgtggagcaatgctgtacctctatttgctctctgtatcagctcgaaaactattgcaattag

SEQ ID NO: 3848 - DNA, 297 bp, synthetic construct
  misc_feature 1..297: note = source = /note="Description of Artificial Sequence: Synthetic coding sequence"
  source 1..297: mol_type = other DNA
atggccctgtggatgcggctgctgcccctgctggccctgctggccctctggggacccgaccccgcagcggcattcgtgaatcaacatctgtgcggtagccatttggtggaagcactgtatctagtgtgtggcgagagaggcttcttctacaccccaaagacacggcgggaagccgaagatttacaggggtcactccaaccactggctcttgaaggatccctccagaaacgaggaatcgttgagcaatgttgcacctccatatgctccctgtaccagctggagaactattgtaattag

SEQ ID NO: 3849 - DNA, 333 bp, synthetic construct
  misc_feature 1..333: note = source = /note="Description of Artificial Sequence: Synthetic coding sequence"
  source 1..333: mol_type = other DNA
atggccctgtggatgcggctgctgcccctgctggccctgctggccctgtggggccctgacccagccgccgctttcgtcaatcaacacctttgtggctcacacctggtagaagcactgtacctggtttgtggcgagcgagggttcttttacacagataagactcggcgtgaggctgaggatttacaagtcgggcaagtagaactaggcgggggaccaggagccggatcactccagccactcgcactagagggatcccttcaaaagcggggaatcgtggagcagtgctgcacctctatctgctccttatatcagctcgagaactactgcaattag

SEQ ID NO: 3850 - DNA, 333 bp, synthetic construct
  misc_feature 1..333: note = source = /note="Description of Artificial Sequence: Synthetic coding sequence"
  source 1..333: mol_type = other DNA
atggccctgtggatgcggctgctgcccctgctggccctgctggccctgtggggcccagaccctgcagcagctttcgtcaatcagcatctgtgtggatctcacctagtggaggcgctatacctggtatgtggcgaacgcgggttcttctacaccccgaaaactcgccgggaagcggaggacttgcaggtcggacaagtggaattgggcgggggccccggagctggctctcttcagccccttgccctcgagggatctctgcagaaaagaggaattgtggaacagtgctgcacatcgatctgcagcctgtatcagttagagaactattgcgggtag

SEQ ID NO: 3851 - DNA, 333 bp, synthetic construct
  misc_feature 1..333: note = source = /note="Description of Artificial Sequence: Synthetic coding sequence"
  source 1..333: mol_type = other DNA
atggccctgtggatgcggctgctgcccctgctggccctgctggccctatggggtcctgaccctgcggctgccttcgtgaagcagcacctttgcgggtcccacctcgtggaggcattgtatctggtctgcggggaacgtggattcttctacacaccggagacccgccgggaggccgaagacttgcaggtgggccaggtggagctggggggaggcccaggggccggttccctgcagcctctggcactggagggctcactgcaaaaaaggggcatcgtagagcagtgctgcaccagcatctgcagtctgtaccagctggaaaattactgcaattag

SEQ ID NO: 3852 - DNA, 333 bp, synthetic construct
  misc_feature 1..333: note = source = /note="Description of Artificial Sequence: Synthetic coding sequence"
  source 1..333: mol_type = other DNA
atggccctgtggatgcggctgctgcccctgctggccctgctggccctgtggggccccgaccctgctgctgcatttgtgaaccagcacctctgcggttcccatctggtcgaagccctgtatttggtatgtggagaaagggggttcttttacacaaaacccactcgcagggaggcggaggacctccaggttggccaggtggaactgggagggggcccaggggccggctcactgcagcccctagcactcgagggttcccttcagaaacgcggtattgtcgagcagtgctgcacatcaatttgctccctgtatcagctggagaactattgtaattag

SEQ ID NO: 3853 - DNA, 570 bp, synthetic construct
  misc_feature 1..570: note = source = /note="Description of Artificial Sequence: Synthetic coding sequence"
  source 1..570: mol_type = other DNA
atggccctgagcttcagcctgctgatggccgtgctggtgctgagctataagtcaatctgttcactcgggtgcgacctgccccagacacactccctgggcaaccgcagggctctgattctgctcggccagatgggcaggatttccccattctcttgtttgaaagaccggcatgacttccggattccacaagaggagttcgacggaaaccaattccagaaggcccaggcaatcagcgtgctccacgagatgatccaacaaacttttaacctgtttagcacggaggacagcagtgctgcctgggaacagagcctgctggaaaagttcagcacggaactttaccagcaacttaatgacctcgaggcttgcgtgatacaggaagtaggggttgaagaaacccccctgatgaacgaggacagtatactggccgtgaggaagtattttcagagaataacgctctacctgatagagcggaagtattctccatgcgcctgggaggtagtcagagctgagattatgcggtccctgagctttagtaccaatttgcagaaaagactccgccgcaaagattag

SEQ ID NO: 3854 - DNA, 573 bp, synthetic construct
  misc_feature 1..573: note = source = /note="Description of Artificial Sequence: Synthetic coding sequence"
  source 1..573: mol_type = other DNA
atgatggccagccccttcgccctgctgatggccctggtggtgctgtcttgcaagagttcctgctctcttggatgcgacctgcccgaaactcacagcctggacaaccggagaactctcatgctcctcgcacagatgtcgcgtattagtcccagcagttgcctcatggatagacatgattttggattccctcaggaggaattcgacggcaatcagttccagaaggctccagcaatctcagtgctgcacgagctcattcagcagatcttcaaccttttcactaccaaggactcctccgctgcctgggacgaggaccttctggataaattctgcaccgaattgtatcagcagcttaatgatttggaagcgtgcgtcatgcaggaggagcgggtgggcgaaaccccactcatgaacgctgacagcattctcgccgtgaagaaatacttccgaaggatcactctctatctgactgaaaagaagtactcgccgtgtgcctgggaagttgtaagagcagaaatcatgaggtccctcagcctgtccactaatctgcaggagcgcctgcgccgtaaggagtag

SEQ ID NO: 3855 - DNA, 570 bp, synthetic construct
  misc_feature 1..570: note = source = /note="Description of Artificial Sequence: Synthetic coding sequence"
  source 1..570: mol_type = other DNA
atggccctgcccttcgccctgatgatggccctggtggtgctgagctgcaagtccagttgcagccttggatgtaacctgtcccaaacccactctctaaacaatcgtagaactcttatgttgatggcgcagatgcggagaatcagtccctttagctgcctgaaggaccggcacgatttcgagttcccgcaggaggagttcgacggcaaccagtttcagaaagctcaggccataagtgtgctgcacgagatgatgcaacagacctttaatctgttttctactaaaaactccagcgccgcatgggacgagaccctgctggagaagttttatattgagttgttccagcagatgaatgacctggaagcttgtgtgatacaggaagtgggagtggaagagacccctctcatgaatgaagacagcatccttgccgtaaagaagtatttccaacggatcactttataccttatggagaaaaaatatagtccgtgcgcttgggaagtggtcagagctgaaataatgaggtctctgtcattcagtaccaatctacaaaaaaggctgcggcgcaaggattag

SEQ ID NO: 3856 - DNA, 570 bp, synthetic construct
  misc_feature 1..570: note = source = /note="Description of Artificial Sequence: Synthetic coding sequence"
  source 1..570: mol_type = other DNA
atggccctgagcttcagcctgctgatggccgtgctggtgctgagctacaaaagtatatgtagcctcggctgtgatctgccacagactcactctctgggaaaccggcgcgccctgatcttgctggcacagatgggcagaatctcccacttttcttgtctgaaggaccggtacgatttcggtttcccccaggaggtctttgatggaaatcagtttcagaaggcccaagctataagtgcgtttcacgagatgatccagcagacctttaacctctttagcactaaggacagcagcgcggcctgggacgaaacccttctcgacaagttttatatcgagctctttcagcagcttaatgacctcgaggcctgtgttacccaggaagtgggagtagaggagatcgcactgatgaacgaggacagtatcctcgccgtccggaagtacttccagcgaataacgctgtacttgatgggcaaaaagtactctccatgcgcctgggaggtggtgcgcgcagaaataatgcgtagtttctcattttccaccaatctgcagaaaggtttgcgccgcaaagactag

SEQ ID NO: 3857 - DNA, 570 bp, synthetic construct
  misc_feature 1..570: note = source = /note="Description of Artificial Sequence: Synthetic coding sequence"
  source 1..570: mol_type = other DNA
atggccctgagcttcagcctgctgatggccgtgctggtgctgagctataagtcaatctgctctcttggatgcgacctcccgcagacccactccctggggaatcgacgagcccttatcctcctcgctcagatggggaggatcagccccttttcgtgcctcaaggatcggcacgacttcgggttgccccaggaggaatttgatggaaaccaatttcagaaaacccaggcaattagcgtgctccatgaaatgatccagcagacttttaatctcttctctacggaagactccagcgccgcttgggagcagagtcttttagagaaattttcaactgaactgtatcagcagctcaataacctggaagcgtgtgtgatccaggaagtggggatggaagagacaccactgatgaacgaggatagcattttagccgtccgtaaatactttcagcgcataactttgtatttgaccgagaaaaaatattctccatgcgcatgggaagtggttagagccgagattatgcgctccctaagcttttcgacgaatttacaaaagatccttagaaggaaggactag

SEQ ID NO: 3858 - DNA, 567 bp, synthetic construct
  misc_feature 1..567: note = source = /note="Description of Artificial Sequence: Synthetic coding sequence"
  source 1..567: mol_type = other DNA
atggccctgaccttcgccctgctggtggccctgctggtgctgagctgtaagagctcctgctctgtggggtgtgatttgccgcagacccactcactgggtagccgtcgaaccctgatgttacttgcccagatgcggcgcattagcttgttttcatgtttaaaggacagacacgacttcggcttccctcaggaggaatttggtaatcagtttcagaaggctgaaactatcccagtgctgcatgagatgatccagcagatctttaaccttttttccaccaaagacagttcagctgcctgggatgagactcttctcgataagttttatacagagctgtatcaacagctaaatgatctggaggcatgcgtcatccagggtgttggagtcacagagaccccactgatgaaagaggattcaattctcgctgtgaggaaatactttcagaggatcacgttgtacctgaaggagaaaaaatatagcccctgcgcctgggaggtggtgagagcagagatcatgcgctcctttagcctctccaccaaccttcaggaatctctgaggtcaaaagagtag

SEQ ID NO: 3859 - DNA, 570 bp, synthetic construct
  misc_feature 1..570: note = source = /note="Description of Artificial Sequence: Synthetic coding sequence"
  source 1..570: mol_type = other DNA
atggccctgagcttcagcctgctgatggccgtgctggtgctgagctataaatctatctgctctctgggttgcgacctgccccagacacacagtttggggaacaggagggcccttattctgcttgcccaaatgggccgaatatccccattcagctgccttaaagaccgtcacgattttggatttccccaggaggagttcgacggtaaccagttccagaaagcccaggcaatcagcgtcctgcacgagatgattcagcagacatttaacctgttttcaaccaaggactccagcgcgacctgggagcagtcactcttagagaagttttccaccgaattgaaccagcagttgaatgacctggaagcctgtgtgattcaggaggtgggcgtcgaagagacccccctgatgaatgttgattctatcctagcagtgaaaaaatatttccagagaatcacgctgtatctgaccgaaaagaagtattcaccatgcgcatgggaagtagtccgggccgagattatgcgttctttcagtctctccaaaattttccaagagagattaagaagaaaagaatag

SEQ ID NO: 3860 - DNA, 570 bp, synthetic construct
  misc_feature 1..570: note = source = /note="Description of Artificial Sequence: Synthetic coding sequence"
  source 1..570: mol_type = other DNA
atggccctgagcttcagcctgctgatggccgtgctggtgctgagctataaatctatctgtagtctgggatgtgacctaccccagactcattctcttgggaaccggcgagctcttatcctgttagcccaaatggggcggatcagccacttttcctgcttgaaggacagacatgatttcgggttccccgaagaagaattcgatggccaccagtttcaaaaggcacaggctataagtgtcctgcatgagatgatccaacagacgtttaacttgttttctactgaggatagctcggcggcctgggaacaatcactgctggagaagttcagcactgaactgtatcagcagcttaatgacctagaggcgtgcgtcattcaggaagtcggagtggaggagacacctctaatgaacgaagactccatactggcggttagaaaatactttcaaagaatcaccctgtacttgaccgagaaaaaatacagcccgtgtgcatgggaagtggtccgtgccgagatcatgcgttctctctcctttagcaccaatctgcaaaagcgactgcggcgtaaagactag

SEQ ID NO: 3861 - DNA, 570 bp, synthetic construct
  misc_feature 1..570: note = source = /note="Description of Artificial Sequence: Synthetic coding sequence"
  source 1..570: mol_type = other DNA
atggccctgcccttcgtgctgctgatggccctggtggtgctgaactgcaagagcatttgcagcctgggctgcgacctcccacagactcattcactttctaaccggcgtacattgatgatcatggcccagatgggccgcatctcacctttctcttgcttaaaagacagacacgactttggcttcccccaggaggagttcgatggcaaccagttccagaaggctcaggccatctctgtgttgcatgagatgatccagcaaaccttcaacctattctccaccaaggattcttctgccacatgggatgaaaccctgctggacaagttttatacagagctgtatcaacagttaaacgatctggaggcttgcatgatgcaggaggtcggcgtggaggatacccccctcatgaatgtggacagcattctgacagtgcggaagtattttcagcgtattactctgtacctcacagaaaagaagtactcaccttgcgcgtgggaagtggtaagagctgaaattatgagaagcttttcgttatctgctaacttgcaggagcgattaagacggaaagaatag

SEQ ID NO: 3862 - DNA, 570 bp, synthetic construct
  misc_feature 1..570: note = source = /note="Description of Artificial Sequence: Synthetic coding sequence"
  source 1..570: mol_type = other DNA
atggccctgcccttcgccctgctgatggccctggtggtgctgagctgcaaaagctcctgcagtctggattgtgacctcccccagactcactcactaggtcacagacgtacaatgatgttgttggcacagatgcgtaggatcagcctgttcagctgcctgaaagatcgacatgattttagatttccccaggaggagtttgatggaaaccagtttcaaaaggccgaagctattagcgtcctgcacgaagttatccagcagacctttaatctgttctccaccaaggattcaagcgtggcctgggacgagagactactcgacaagctctacacagaactatatcagcaactgaacgatctggaagcatgcgttatgcaagaagtctgggtagggggtacacctctgatgaatgaggatagcatcctcgctgtgcggaaatatttccagcgcatcaccctttatttaaccgaaaaaaagtattcaccgtgtgcctgggaggttgtgagagctgagatcatgcgttccttttctagctcccggaatctccaggagcgactcaggcgcaaggagtag

SEQ ID NO: 3863 - DNA, 570 bp, synthetic construct
  misc_feature 1..570: note = source = /note="Description of Artificial Sequence: Synthetic coding sequence"
  source 1..570: mol_type = other DNA
atggcccggagcttcagcctgctgatggtggtgctggtgctgagctataagtccatttgtagcctcggatgtgacttgccacagacacattccctgagaaacagacgagccctgatcctcttagctcagatgggtcgaatttcccccttcagctgccttaaggatagacacgaatttcgcttcccagaggaggaattcgacggccaccagtttcagaaaactcaggctatttccgtgttgcatgagatgatccaacagacattcaatttattctccacagaggactcctccgccgcctgggagcagagcctgctcgagaagttctctaccgagctataccagcagctgaacgatctggaggcttgcgtgatccaggaggtcggggttgaagagacaccactcatgaacgaggacttcatacttgccgtcagaaaatattttcagaggataactctatatcttatggagaagaagtacagcccatgcgcttgggaagtggtgagagcagagattatgagatctttctccttcagcacaaacctcaaaaagggtctgagacgaaaggactag

SEQ ID NO: 3864 - DNA, 570 bp, synthetic construct
  misc_feature 1..570: note = source = /note="Description of Artificial Sequence: Synthetic coding sequence"
  source 1..570: mol_type = other DNA
atggccctgaccttctacctgctggtggccctggtggtgctgagctataaatcgttctcctcgcttggctgcgacttacctcagactcattcactcggcaaccgacgcgccctcatcctgctcgcccagatgcggagaatatccccgtttagctgtctgaaggaccggcatgactttgaatttcctcaggaggagttcgatgacaagcagttccagaaggcacaagccatctctgtcctccatgaaatgatccagcagacttttaacttgttttctactaaggactccagtgcggccctggacgagactctcttagatgaattttatatcgaactagaccagcagctaaacgacttagaatcttgcgtgatgcaagaagtgggggtcattgaatctccgctaatgtatgaggactccattctggcggtgcgcaagtacttccaacgcatcactctctacctgacggaaaagaaatacagctcttgcgcctgggaagtcgtaagggccgaaatcatgcggagttttagtcttagcattaatctgcagaagcgtctgaagtccaaagagtag

SEQ ID NO: 3865 - DNA, 564 bp, synthetic construct
  misc_feature 1..564: note = source = /note="Description of Artificial Sequence: Synthetic coding sequence"
  source 1..564: mol_type = other DNA
atgaccaacaagtgcctgctgcagatcgccctgctgctgtgcttcagcacgaccgccctgagtatgagctacaacttgctgggcttcctccagcggagttctaattttcagtgccaaaaattgctatggcaactgaacggccgcctcgagtattgtctcaaggatcgcatgaacttcgatattcctgaggaaatcaagcaacttcagcagtttcagaaggaggacgccgccttgaccatctacgagatgcttcagaatatctttgcaatctttaggcaggacagctccagtaccggatggaacgagactattgttgagaacctgcttgctaatgtctatcaccagatcaatcacttgaaaaccgtcctggaggaaaagctggagaaagaggacttcacacgtggcaagctcatgtcctcacttcatctgaagcggtattatggcagaatcctgcattaccttaaggcaaaagagtattctcactgcgcctggactatcgtccgagttgagatcctccggaacttttatttcattaatagactcaccggctatctgcgcaactag

SEQ ID NO: 3866 - DNA, 537 bp, synthetic construct
  misc_feature 1..537: note = source = /note="Description of Artificial Sequence: Synthetic coding sequence"
  source 1..537: mol_type = other DNA
atgcacagcagcgccctgctgtgctgcctggtgctgctgaccggcgtgcgggccagcccgggtcagggtacccaatcagagaacagttgcacgcactttcccggcaatctgccaaatatgctaagggacctccgggatgcgttcagccgtgtcaagacattcttccagatgaaagaccaactcgataacctcctgctaaaagagagcctgttggaagatttcaagggatatttgggctgccaggccctgtcagagatgatccagttctacctcgaagaagtcatgccacaagcggagaatcaagatccagatataaaagctcacgtgaacagcctaggagagaacttgaaaacactgcgccttcgtctgcgccggtgtcacagattcctgccctgcgagaacaagtccaaagcggtggagcaggtgaagaacgcctttaacaaactgcaggagaaaggcatctacaaagctatgtcggagttcgatattttcatcaactacattgaagcttatatgacaatgaagatacgcaattag

SEQ ID NO: 3867 - DNA, 489 bp, synthetic construct
  misc_feature 1..489: note = source = /note="Description of Artificial Sequence: Synthetic coding sequence"
  source 1..489: mol_type = other DNA
atgcggagcagccccggcaacatggagcggatcgtgatctgcctgatggtcatattcttgggaacactggtccacaaatcctcctcccagggccaggataggcatatgattaggatgaggcagctaattgatatcgttgaccagttaaagaattatgtgaatgatttggtgcccgagtttctgcctgcgccggaagatgtggaaaccaactgtgagtggagcgcgtttagctgctttcagaaagcacagctcaaatctgccaataccggaaacaatgagaggatcatcaacgtgagcatcaaaaagttgaagaggaagcctccttctaccaacgcaggtagaagacagaagcatcgtctcacatgtccatcttgtgatagctacgagaaaaaaccgcccaaagagtttctcgaacggttcaaaagcctgctccaaaagatgatacaccagcacttgtcgtctagaacacacggcagcgaagacagctag

SEQ ID NO: 3868 - DNA, 534 bp, synthetic construct
  misc_feature 1..534: note = source = /note="Description of Artificial Sequence: Synthetic coding sequence"
  source 1..534: mol_type = other DNA
atgttccacgtgagcttccggtacatcttcggcctgccccccctgatacttgttctcctccctgttgccagttcagactgcgacatcgagggcaaagatggtaagcagtacgaaagtgtcctcatggtgtctatcgaccaactgctcgacagcatgaaggagattggttcaaattgtctgaacaacgagttcaacttctttaagcggcacatctgcgacgctaacaaggaaggcatgttcctgttccgggctgcgcggaagcttcggcaatttctgaagatgaactcaacaggggattttgaccttcacttattaaaagtgagcgagggtactaccatactcctcaactgcacaggccaagtgaaaggtcgaaaaccggctgcactcggcgaggcacagcccaccaagagcctggaggaaaacaagtctcttaaggaacagaagaaactgaatgatttgtgcttcctcaagaggttgttgcaggagatcaagacatgctggaataagatactcatgggtacgaaagagcactag

SEQ ID NO: 3869 - DNA, 216 bp, synthetic construct
  misc_feature 1..216: note = source = /note="Description of Artificial Sequence: Synthetic coding sequence"
  source 1..216: mol_type = other DNA
atgttccacgtgagcttccggtacatcttcggcctgccccccctgatccttgtgctcctgcccgtcgcttcgagcgattgcgacattgaaggcaaagacgggaagcaatatgaatcagtgctaatggtttccattgatcagctcctgaaccaaccgtataagaagaaagagaaaaggaccgaaagaaagcaacagtctgctatgtccaataattag

SEQ ID NO: 3870 - DNA, 393 bp, synthetic construct
  misc_feature 1..393: note = source = /note="Description of Artificial Sequence: Synthetic coding sequence"
  source 1..393: mol_type = other DNA
gtgagcttccggtacatcttcggcctgccccccctgatcctggtgttactgcccgtggcatctagtgactgtgatatcgaggggaaagacggaaagcagtacgaaagcgtgctcatggtgtctattgatcagctgctagactcgatgaaggagataggatctaactgcctcaacaacgagtttaatttctttaagcgacacatctgtgatgccaacaaagtgaaaggtcgaaagccggcggcgctcggagaggcacagcctactaaatcactcgaagaaaataaatcattgaaagaacagaaaaagcttaacgacctctgtttcctgaagcggctcctccaagaaataaaaacctgctggaacaagatcctgatggggaccaaggagcactag

SEQ ID NO: 3871 - DNA, 216 bp, synthetic construct
  misc_feature 1..216: note = source = /note="Description of Artificial Sequence: Synthetic coding sequence"
  source 1..216: mol_type = other DNA
atgttccacgtgagcttccggtacatcttcggcctgccccccctgatcttggtgctgctccctgtggcttcctccgattgcgatatcgaaggaaaggatggcaagcaatatgaaagtgtgctgatggtctctattgatcagctgttaaaccaaccatacaagaagaaggagaagcgcacagagagaaagcagcaatccgcaatgtccaacaactag

SEQ ID NO: 3872 - DNA, 114 bp, synthetic construct
  misc_feature 1..114: note = source = /note="Description of Artificial Sequence: Synthetic coding sequence"
  source 1..114: mol_type = other DNA
atgttccacgtgagcttccggtacatcttcggcctgccccccctgatcctggttcttctccccgtggctagcagtgattgtgatatcgaaggacaacacgagcgaaactggtag

SEQ ID NO: 3873 - DNA, 402 bp, synthetic construct
  misc_feature 1..402: note = source = /note="Description of Artificial Sequence: Synthetic coding sequence"
  source 1..402: mol_type = other DNA
atgttccacgtgagcttccggtacatcttcggcctgccccccctgatcctggttcttctgcccgttgccagtagtgattgtgatatcgagggcaaggacggcaagcagtacgagagcgtgttgatggtaagtattgaccagctcctggatagtatgaaggaaattggctcaaactgtcttaacaacgagttcaacttctttaagaggcacatttgtgacgcgaataaggtaaagggacgcaagccagccgccttgggtgaggctcagcctaccaaatcgttggaggaaaataaaagcctgaaggagcagaagaaactgaatgacctgtgttttcttaagcggcttctacaggaaattaagacctgttggaacaaaatcctgatggggacgaaggaacattag

SEQ ID NO: 3874 - DNA, 114 bp, synthetic construct
  misc_feature 1..114: note = source = /note="Description of Artificial Sequence: Synthetic coding sequence"
  source 1..114: mol_type = other DNA
atgttccacgtgagcttccggtacatcttcggcctgccccccctgattttagtactactccctgttgcgagcagcgactgcgacattgagggtcaacacgaacgtaactggtag

SEQ ID NO: 3875 - DNA, 195 bp, synthetic construct
  misc_feature 1..195: note = source = /note="Description of Artificial Sequence: Synthetic coding sequence"
  source 1..195: mol_type = other DNA
atgaaggagatcggcagcaactgcctgaacaacgagttcaacttctttaaaaggcacatttgtgacgctaacaaggaagaaaacaaaagcctcaaagagcagaagaagcttaacgacctgtgtttcctgaaaagactgctgcaagagatcaaaacctgctggaacaagatcctgatgggcacaaaagagcactag

SEQ ID NO: 3876 - DNA, 2643 bp, synthetic construct
  misc_feature 1..2643: note = source = /note="Description of Artificial Sequence: Synthetic coding sequence"
  source 1..2643: mol_type = other DNA
atggccgagctgtaccgggtgctggaggccggcaagatcggcatcttcgaatcaccaacgggcaccgggaaaagcctgagtctgatctgcggcgctctcagttggttaagagattttgaacagaaaaagagagaagaagaagccagactccttgagacaggcactggaccactgcatgacgagaaggacgagagtctatgcctgagttctagctgcgaaggcgccgctggtaccccgagaccggccggcgagccagcctgggtcactcagtttgtgcaaaagaaagaagagagggatctggttgatcggctcaaggcagaacaggcacgcagaaagcagcgggaggagaggttgcagcagcttcagcatcgggtacagctgaaatacgcagccaagagattgagacaggaggaagaggagagggaaaatctcctgcggttaagcagggagatgctcgagacgggcccagaagctgaacggttggagcaactggaatcaggtgaagaggaactggtgctcgctgaatatgagagtgatgaagagaagaaggtcgctagtagagtagatgaggatgaagacgatctggaggaagagcacatcacaaagatctactactgtagccgtacccacagccagttggctcagttcgtacacgaagtaaagaagtctccttttggaaaagatgtgaggctggtgtcactgggctctaggcaaaacctatgtgtgaatgaagatgtgaagtccttgggatctgtgcaactaattaatgatcgctgtgtggatatgcaacgctctagacacgaaaagaagaaaggagctgaggaggaaaaacctaagcgcaggagacaggaaaaacaggccgcatgtcctttttataaccacgagcagatgggtctgctccgcgacgaggctctggccgaggttaaggacatggagcagttgctagccctgggaaaggaggctcgggcatgtccttactacggttcaagactggctattccggccgctcaattagtcgtccttccttatcagatgcttctgcatgccgccacgcgacaggctgctggaattcgcttacaggaccaggtagtcattattgatgaggcccataatctgatcgatacaattactggcatgcacagcgtggaggtctctgggagtcagctgtgccaagctcattcacaacttctgcaatacgtggagagatacggcaaaaggttaaaagctaagaatcttatgtatctaaagcagatcctttatctgctagagaagtttgttgccgtcctgggaggcaacattaaacagaatcccaatacgcagagcctgtctcaaactggaacagagttaaagaccatcaatgatttcctgtttcaatcccaaatcgacaacattaacctgtttaaagtgcagcggtactgcgagaagtccatgatatcacggaaacttttcgggtttactgagcgatacggagccgtgtttagcagccgggagcagccgaagctcgcaggatttcagcagtttctgcagtcgctccagcctcgtacaaccgaagctctcgccgctcccgcggacgaatcccaagctagcacactgcgcccagcctcacccctgatgcacatccaggggttcctggcagcactgacaacagctaaccaagatggccgcgtcattctgtcccgacagggatcattaagccagtctactcttaaattcttgctcctcaacccagcagtgcattttgcccaggtagttaaagagtgccgggccgtagtgatcgctggtggaactatgcagccagtgagcgactttaggcagcagctgctcgcctgtgccggtgtcgaggctgagagagttgtggaattcagctgcggccacgtcatcccccccgacaacatcctccctctggtcatctgctccggcatcagtaaccagcccctcgaatttacttttcagaaaagagaactgccacagatgatggatgaggtcggccggatattatgtaatctgtgcggcgtagtgcccggcggcgtagtgtgtttttttccaagctacgaatatctgcggcaagtccatgctcactgggagaaagggggcttacttggaaggcttgctgcacgcaagaagatctttcaggagcccaagagcgcgcaccaggttgagcaggttctgttggcctactcccgttgtatccaggcctgtggtcaggaaaggggacaggtgactggcgccctgctcctgagtgtcgtaggcggcaagatgtcagaaggcatcaatttctccgacaacttgggacggtgtgtagtcatggttgggatgccctttcccaatatcagaagcgctgaactacaggagaagatggcctatctcgatcaaacgctgcctcgtgcccccggacaggcaccacccggcaaagccctggtggaaaatctgtgtatgaaggccgtcaaccagagtattggacgggccattagacaccagaaggatttcgcgtctgtcgtactccttgaccagcggtatgcacgacctcccgttctggctaagctgcccgcctggatcagggcaagagttgaagtgaaagccacgtttggccccgccattgccgccgtgcaaaagttccaccgggaaaaaagcgcgtctagctag

SEQ ID NO: 3877 - DNA, 738 bp, synthetic construct
  misc_feature 1..738: note = source = /note="Description of Artificial Sequence: Synthetic coding sequence"
  source 1..738: mol_type = other DNA
atgaagaagacccagacctggatcctgacctgcatctacctgcagctgctgctatttaatcctctcgttaagaccgaaggaatctgtcgcaaccgggttacaaacaatgtaaaagacgtcacaaaactagtggcaaatttgcctaaagattatatgatcacccttaagtacgtccctgggatggatgttctgccttctcactgttggatcagcgagatggtagttcagctcagcgacagtcttaccgatctgctggacaagttctctaatatctccgaaggattgtcaaactatagcatcatcgacaaactcgtaaacatagtcgacgaccttgtggagtgcgtgaaagagaattcctcaaaagacctgaagaaaagcttcaaatctccagagccaagactgtttacacccgaggagtttttcagaatctttaatcgctcgatcgatgcttttaaggattttgttgtggcaagcgagacaagcgattgtgtcgtgagttccacactcagccccgagaaggggaaagcaaaaaacccaccaggcgactcctccctgcattgggccgctatggctcttcccgcactgttctctctgatcattggcttcgccttcggcgccctatactggaagaaaagacaaccctctctgacacgagctgtagaaaatattcagatcaacgaggaggataacgagatctcaatgctccaggagaaggagcgggagtttcaggaggtctag

SEQ ID NO: 3878 - DNA, 93 bp, synthetic construct
  misc_feature 1..93: note = source = /note="Description of Artificial Sequence: Synthetic coding sequence"
  source 1..93: mol_type = other DNA
ggcatggacgtgctgggccggcccaagatccccctggagacccccgcctacaccggccagccgtggcattgccaacattgctttctgctgtag

SEQ ID NO: 3879 - DNA, 3039 bp, synthetic construct
  misc_feature 1..3039: note = source = /note="Description of Artificial Sequence: Synthetic coding sequence"
  source 1..3039: mol_type = other DNA
atgcccgccagcgcccccccccggcggccccggccccccccccccagtctctctctgctcctggtgctgctggggctgggaggtcggaggttgagagctgagccaggcgatggggctcagacatgggcacgttttagccgtcccccagcccctgaggctgctgggctattccagggtacttttcctgatggattcctgtgggccgttggcagcgccgcttaccagaccgagggcggctggcaacaacatgggaaaggcgcttccatttgggatacattcacccatcatcccctggccccccccggggattcgcgcaatgcatcgttgcccctgggtgctcctagcccactgcagcctgcaaccggagatgtggcatcagactcatataataacgtgttccgcgacaccgaagcgcttagggagttgggcgtgactcattacaggttttccattagttgggccagggtcctaccgaacggttctgccggcgtgccaaatcgggaggggctacggtactataggagactgctggaaagactacgcgagttgggggtccagcccgttgtcaccctttaccactgggacctcccccagcgcctgcaagacgcctatgggggctgggcaaacagagcactagccgaccactttcgggactacgccgaactttgcttccgacacttcgggggacaggtcaaatattggattacgattgataatccctatgtcgtggcgtggcacggctatgccacagggaggctggcaccgggcatcagaggatcgccgaggttggggtatctagtggcccacaaccttctgctcgcacacgccaaggtctggcacctgtacaacacttccttccgacccacacaggggggccaggtttcaattgctctgagctcccattggattaatcctcgcaggatgactgatcattctattaaagagtgccagaagtccttagacttcgttctgggctggtttgctaaacctgtgtttatcgacggagattacccagaatcgatgaagaacaacttgtctagcattctgcctgacttcacagagagcgagaagaagttcataaaaggaaccgcagattttttcgcactgtgcttcgggcccaccctgtcctttcagcttctcgaccctcatatgaaattccgccagctcgagtctccaaatctgaggcagctgttgagctggatcgaccttgaattcaaccacccacagattttcatcgtcgagaacggctggttcgtgagcgggacgacaaaaagggacgacgctaagtacatgtactacctgaagaaatttatcatggagactttaaaggcgatcaagctagatggcgttgatgtgattggttacacggcctggtcacttatggacggttttgaatggcacagaggctatagcattcgccgcggtctgttttatgtcgattttctgagccaggacaagatgctcctgccgaagagctctgcacttttttatcaaaagctgattgagaagaatgggtttccccctctgcccgaaaaccaaccccttgaaggaactttcccatgtgacttcgcctggggcgtggtggacaactacatccaggtggataccaccctcagccaatttaccgatctcaacgtttatctgtgggacgtgcaccattctaagagattaattaaggtcgacggcgtggtcaccaagaagcggaagagctactgcgtggattttgctgccatccagccccaaatagccttgcttcaagaaatgcacgttactcatttccgattctcgctcgattgggccctgattctgccactgggtaatcagagtcaggtgaatcacaccattttgcagtattaccgctgcatggcatctgagcttgtcagggtgaacatcacgcccgtggtagcactatggcaacccatggcaccaaaccagggcctgcctcgcctgctcgccagacagggggcatgggagaatccttacaccgcgctggcttttgcggaatatgcgaggctgtgtttccaggaattggggcaccatgtcaaattgtggatcactatgaacgagccctacacaagaaatatgacttatagtgccgggcataacctcttaaaggctcacgctctggcttggcacgtttacaatgagaagtttcgtcatgctcagaatggtaaaatcagcatagcgttacaggccgattggatagagcccgcctgcccattctcgcaaaaggataaggaagtcgctgagagggtcctcgagttcgacatcggctggctcgctgagcctatcttcggtagcggggactacccctgggtgatgcgagactggctcaatcagaggaacaatttcctgctaccctattttaccgaggatgagaaaaagttgatacagggcacatttgattttttggcactgtcccattataccacgattctcgtcgactccgagaaagaggatcccattaaatacaacgattatctcgaagtgcaggagatgaccgatatcacctggttaaactccccctcgcaagtggcagtggtaccttggggcctgaggaaagtgctcaactggctgaaattcaagtatggggatctcccaatgtacattatctctaacggcatagatgatggtctccatgccgaagacgatcagcttcgcgtttactatatgcaaaactacataaatgaggccttgaaggctcatattctggacgggatcaatctatgtgggtacttcgcctacagtttcaatgaccgcaccgccccacgcttcgggctgtacaggtacgccgcagatcagtttgagcctaaagccagcatgaaacattaccgcaaaatcattgactctaatggtttccccggacccgagaccctcgaacgcttttgccccgaggaattcaccgtgtgcacagaatgttctttttttcacacacgaaagtcattgctggcctttattgctttcctgttctttgcatccattatttctctctccctgattttttactactcaaaaaaagggcgacgaagctataagtag

SEQ ID NO: 3880 - DNA, 729 bp, synthetic construct
  misc_feature 1..729: note = source = /note="Description of Artificial Sequence: Synthetic coding sequence"
  source 1..729: mol_type = other DNA
atgaccgaccacagcatcaaggagtgccagaagagcctggacttcgtgctcggctggttcgcaaagcccgtctttatagatggtgactacccagaatccatgaagaacaacctgtcctccatcttgcccgactttacggagtccgagaagaagtttataaagggtactgctgattttttcgctctctgcttcgggcctaccctcagcttccagctcctggatcctcacatgaaatttagacagcttgagtctcctaatctgaggcagttgctctcatggatcgatctcgaattcaatcatccacagatttttatcgtggagaacggatggtttgtgtccggcacgaccaaacgagatgacgctaaatacatgtactacctaaagaaatttattatggagacactgaaggcaatcaagctggatggagtggatgtgatcgggtataccgcatggtccctaatggacgggtttgagtggcacagaggatattcaatcaggaggggcctgttttatgtcgactttctgtcccaagacaaaatgctgttgcccaagtccagcgccctcttttaccagaaattaatcgagaaaaatgggtttccccccctacccgagaatcagccacttgagggcacgttcccctgtgatttcgcttggggggtggtcgacaactacattcaagtcagccagcttacaaaacctatctcaagtttaaccaagccttaccactag

SEQ ID NO: 3881 - DNA, 1440 bp, synthetic construct
  misc_feature 1..1440: note = source = /note="Description of Artificial Sequence: Synthetic coding sequence"
  source 1..1440: mol_type = other DNA
atgcggcagccccccggcgagagcgacatggccgtgagcgacgccttgcttcccagtttctctacctttgctagcggtccagccggaagggagaagaccttgcgtcaagcaggagccccaaacaacagatggcgggaggagctttcccacatgaaacggctgcccccggtgctgcctggtcgcccttacgatttagctgccgctacagtggctaccgatctcgagtctggcggtgctggagctgcttgcggtggctccaacctggcaccactcccaaggcgggagacagaagaattcaacgacctgctcgatctggactttatcctctctaactccctgacacacccacctgagtctgtcgccgcaaccgtgtcatcctccgccagcgcctcaagtagcagcagtccttctagctcagggccggcttccgctcccagtacctgctcattcacgtatcccatcagagcgggaaacgacccgggagtggcacccggagggaccggcggaggactcctatacggccgggagagcgcacctccacccacggcgccatttaatcttgccgacatcaatgacgttagtccatccggaggtttcgtggcagaacttctgcgtcccgagttagatcccgtgtatatcccgccgcagcaaccacagcctcctggcgggggcttgatggggaaattcgtccttaaagcttcactctccgcaccaggtagcgaatacggcagccctagcgttatttcagtgagcaagggcagtcctgatggctcacatccagtggtcgtggccccatataatggaggcccgccacgaacttgccccaagatcaaacaggaggccgtgtcatcatgtactcatctgggtgccggccctccactgtcaaacgggcaccgccccgctgctcacgacttccccctgggcagacaactgccttcccgtactacacccaccctcgggctggaagaagtgctaagcagccgtgattgtcaccccgccctccctctaccacctggtttccacccacatcccggtcccaactacccgtcttttctgcctgaccagatgcagccccaggtcccccccctccactaccaagagctgatgcctcccggctcctgcatgcctgaagaaccaaaacctaagcgcggccgcagatcttggcctcgcaagagaactgccacacacacatgtgattacgctggatgcggcaagacatatactaagtcgagccatctgaaggctcacctacgaacccataccggtgaaaaaccctaccactgtgattgggatggctgcggctggaagttcgcaagatctgacgagctgactcggcattatcggaaacatactgggcacagaccttttcagtgccaaaagtgcgacagggcgttttcaagaagcgatcaccttgctcttcatatgaagcgacacttttag

SEQ ID NO: 3882 - DNA, 699 bp, synthetic construct
  misc_feature 1..699: note = source = /note="Description of Artificial Sequence: Synthetic coding sequence"
  source 1..699: mol_type = other DNA
atggccgtgagcgacgccctgctgcccagcttcagcaccttcgcctctggcccggccggacgagaaaagactctgagacaggctggcgcacccaacaatcgctggcgggaagagctgagtcacatgaagcgcctacctcccgtgcttcccggccgtccctacgacttggccgcagccactgtggcgacagatctggagtccggaggtgccggagccgcgtgcggaggtagcaatctcgcacctctaccccgcagggagacagaagagttcaacgaccttttggacttggactttattttgtctaattcccttacccacccccccgagtctgtggccgctactgtgagtagtagcgcttccgcttcctcttctagcagtccgtctagctccggacctgcaagcgccccctcaacatgctccttcacataccccattcgagccggcaacgaccctggcgtggctcctggcggtaccggcgggggcctattatatggcagggagagtgccccacctcctaccgcgcctttcaaccttgccgatattaatgatgtgagcccttctggtggttttgttgcagagttgttaaggccagaattggatccggtgtacattccgcctcagcagccgcagccccccggggggggtctaatggggaagttcgtgctgaaggccagtttatctgcacccggatctgaatag

SEQ ID NO: 3883 - DNA, 69 bp, synthetic construct
  misc_feature 1..69: note = source = /note="Description of Artificial Sequence: Synthetic coding sequence"
  source 1..69: mol_type = other DNA
atgcggcagccccccggcgagagcgacatggccgtgagcgacgccctgctgccatcattttccacatag

SEQ ID NO: 3884 - DNA, 117 bp, synthetic construct
  misc_feature 1..117: note = source = /note="Description of Artificial Sequence: Synthetic coding sequence"
  source 1..117: mol_type = other DNA
atgcggcagccccccggcgagagcgacatggccgtgagcgacgccttactgccttcctttagtaccttcgcttctggacctgccggccgagaaaagacattgcgacaggccggctag

SEQ ID NO: 3885 - DNA, 1323 bp, synthetic construct
  misc_feature 1..1323: note = source = /note="Description of Artificial Sequence: Synthetic coding sequence"
  source 1..1323: mol_type = other DNA
atgggcccccccggcagcccctggcagtgggtgaccctgctgctgggcctactgttgccgcctgcagctcccttctggctgctgaacgtgctgttccccccacacactacccccaaagcagagctctccaaccatacacgacccgttattctggtgccgggatgtctcggcaaccagcttgaagcaaagttggacaaacccgacgtggtaaactggatgtgttaccggaaaactgaggactttttcaccatttggctcgatctaaacatgttccttcctctcggtgtggactgctggatcgataacacacgcgtggtatataaccgaagctcagggctggttagtaacgctccaggggtgcagatccgcgtccccgggttcgggaagacctacagtgtggaatacctggattcaagcaagttggccggatacctgcacacacttgtacaaaacctcgtcaacaacgggtacgtgcgcgatgaaaccgtgagggcagccccgtacgattggcgcctggaacctggtcagcaggaggaatactataggaagctggccggattggtcgaagagatgcacgccgcttatggtaagccagtttttctaataggacattctttgggctgccttcacttgctgtatttccttctcaggcagccgcaggcttggaaggaccggtttatcgatgggttcatctcgctgggagctccttggggagggagcataaagcctatgctcgtcctggcatcaggcgacaatcagggcattccaataatgagctccataaaactgaaagaggagcaacgaatcaccacaaccagcccatggatgttcccatcccggatggcctggcctgaagatcacgtcttcatcagcaccccttcatttaattacactgggcgcgactttcaacgcttttttgccgacctgcacttcgaggaggggtggtatatgtggctgcagtcaagagatctcctggccggactcccagctccaggcgtggaagtttactgcctgtacggcgttggcctccccactcctcggacatatatctatgaccacggcttcccttacacagatcctgtcggggtgctgtacgaagacggtgacgataccgtagcgactagaagtaccgaactctgtggcctgtggcaggggcgtcagccacagcccgtgcatctgctgcctctgcatggtatccagcacttaaacatggtgttctctaatttaaccttggaacacatcaatgccatcctactgggcgcataccgacagggaccccccgcttcccccaccgcctcaccagaacccccacctccggaatag

SEQ ID NO: 3886 - DNA, 753 bp, synthetic construct
  misc_feature 1..753: note = source = /note="Description of Artificial Sequence: Synthetic coding sequence"
  source 1..753: mol_type = other DNA
atggccgacaacttcagcctgcacgacgccctgagcggcagcggcaatcctaacccacaagggtggcccggcgcatgggggaatcagccagcaggcgccggtggctatcctggagcatcatacccgggagcctatccgggccaagctccacctggcgcctaccctggccaggctcctccaggggcatatcctggggctccaggcgcctaccccggagcacccgccccaggcgtatatcctgggccaccatctggacccggtgcatatccaagcagcggtcaaccttccgccacaggggcttatccggccacaggaccatacggcgctcccgctggaccactcatcgttccatataacctccccctgcccggaggggtagtgccacgaatgctcatcacgattctgggcacagtgaaaccaaacgcaaacagaattgcactggacttccagcgggggaatgatgtggcatttcatttcaaccccaggtttaacgagaataataggcgggttatcgtttgtaatactaaacttgataacaactggggtcgtgaagaacgccagtctgttttcccattcgagtctggcaagccatttaagattcaggtgctcgttgagcccgaccatttcaaggtggccgtaaatgacgcccacctgttgcagtacaaccatcgtgtgaaaaagctcaacgaaatatccaaactcggcatctctggcgacattgatttgacgagcgcctcttacactatgatttag

SEQ ID NO: 3887 - DNA, 630 bp, synthetic construct
  misc_feature 1..630: note = source = /note="Description of Artificial Sequence: Synthetic coding sequence"
  source 1..630: mol_type = other DNA
atgggcagcgtgagcaaccagcagttcgccggcggctgcgccaaggcagctgaagaggctcctgaggaggcccccgaggacgccgctcgagcggccgatgagccacagctgctgcacggggcagggatttgcaagtggtttaatgtgagaatgggcttcgggttcctttctatgacggcaagagccggagttgccctggatcctccagtggacgtgttcgtgcaccagagcaagctgcatatggaggggttcagatctctcaaagagggcgaagctgtggaatttactttcaagaagagcgctaagggacttgagtccattagagtgacaggccccggaggggtattttgtatcggctccgagaggcgtccaaagggaaagagtatgcagaagaggagatcaaagggcgatagatgttataattgtggcggactggaccatcatgccaaagaatgtaagctgcctccacagcccaagaaatgtcatttttgtcagagcatatcacatatggtggctagctgtccgctcaaggctcagcaggggccatctgcccaaggcaagcccacttacttccgggaggaagaggaagagattcactcccctaccctgctgcctgaggctcagaattag

SEQ ID NO: 3888 - DNA, 630 bp, synthetic construct
  misc_feature 1..630: note = source = /note="Description of Artificial Sequence: Synthetic coding sequence"
  source 1..630: mol_type = other DNA
atgggcagcgtgagcaaccagcagttcgccggcggctgcgccaaggcagctgaagaggccccagaggaagcacccgaggacgccgccagagcagcagacgagccccagctgctccacggtgctggtatttgcaaatggtttaacgtacggatgggttttggttttctctccatgacggccagggctggggtcgccttggacccacccgtcgacgtgttcgtacaccagtccaagctgcacatggaaggcttcagatctcttaaagaaggggaggcggttgaatttacattcaagaagtccgctaagggactcgagagcattcgggttaccggtccggggggggtattctgtataggcagtgaaagacgtccaaagggcaagagtatgcaaaagcggaggtcaaagggggacaggtgctataactgcggcggcctcgatcaccatgctaaggaatgcaaactgccgccccagccgaaaaagtgtcatttctgtcagagcatctcccacatggtggcatcatgccctctgaaagcacagcaaggtccctctgctcaaggtaagccgacctattttcgggaagaggaagaagagattcattcaccaaccttattgcctgaggcacaaaactag

SEQ ID NO: 3889 - DNA, 660 bp, synthetic construct
  misc_feature 1..660: note = source = /note="Description of Artificial Sequence: Synthetic coding sequence"
  source 1..660: mol_type = other DNA
atgaagatgcggttcctgggcctggtggtgtgcctggtgctgtggactctccatagtgagggttccggcgggaagctgacagctgtcgatccagagactaacatgaatgtgagtgagattatcagctactggggcttcccgagcgaagagtatctcgtggagacagaggatgggtacatcctctgccttaatagaataccccacggaaggaaaaaccatagcgacaaaggacctaaaccggtggttttcctgcaacacggtctgctggctgacagttcaaactgggtgactaatttggccaattctagccttgggtttattctcgccgatgctggattcgacgtttggatggggaacagcagaggcaacacatggtctcgcaaacacaaaacgctctcagtcagtcaagacgaattttgggcgttcagctacgacgagatggctaagtatgatctgcctgccagcatcaatttcatcctcaacaagactggtcaggagcaggtgtattacgtcggacactcccaggggactaccattggctttatcgcgttctctcagatccctgagctggctaaaagaattaagatgttttttgcgctcggcccagtggcatctgtggccttctgcaccagtccaatggccaagctaggccgcctgtag

SEQ ID NO: 3890 - DNA, 1200 bp, synthetic construct
  misc_feature 1..1200: note = source = /note="Description of Artificial Sequence: Synthetic coding sequence"
  source 1..1200: mol_type = other DNA
atgaagatgcggttcctgggcctggtggtgtgcctggtgctgtggactcttcattccgaggggagcggggggaagctgaccgctgtcgaccccgaaactaacatgaatgtgtcagaaatcatttcatactggggatttccaagcgaggaatatctggtagaaaccgaagatgggtatatcctctgtctcaatcgcatccctcacggcagaaaaaatcactccgataagggccctaagccagtggtgtttctgcagcacggtctgctggccgattcctctaattgggtgaccaatctcgcaaacagctccctggggtttatcctcgctgatgccggctttgacgtatggatgggcaatagtcggggtaatacttggtctaggaagcacaaaacacttagtgtgagccaggatgagttctgggccttctcatacgatgaaatggccaaatatgacctcccagcctcaattaattttatcctgaataagacgggtcaagaacaggtatactatgtgggtcatagccaggggaccacaattggctttatcgctttctcccaaattccagaacttgccaaacggatcaagatgttcttcgccttggggcccgtcgccagcgtcgccttttgtactagcccaatggctaagcttggccgactcccagaccatctgatcaaggatctgttcggcgacaaggaatttttaccgcagtctgcattcttgaaatggctgggaactcacgtctgcactcacgtcatcctgaaggaactgtgcgggaacttgtgtttcctcctgtgtggcttcaatgaaagaaacctcaatatgtcccgggttgatgtgtataccacgcattctcccgccgggacatccgttcagaacatgctacattggtcccaggccgtcaaattccagaagtttcaggccttcgattggggctcttctgcaaagaactattttcactataaccagtcatatcctcccacctataatgtgaaagacatgctggtccccactgccgtgtggtccggaggacatgactggctggcagatgtgtatgacgtgaacatcttactgactcagattaccaacctggtcttccatgagtccatccccgaatgggaacatctggattttatatggggtctggacgcgccatggcggctttacaacaagatcatcaacttaatgagaaagtaccagtag

SEQ ID NO: 3891 - DNA, 1074 bp, synthetic construct
  misc_feature 1..1074: note = source = /note="Description of Artificial Sequence: Synthetic coding sequence"
  source 1..1074: mol_type = other DNA
atgaagctgcggaccctggccgtgagcgccaccgtggtgaaggacggcgtttcaggggtttgcagtttcagatgctccgacgtctcaggcgtcttaccatctggccctaagcccgtggtattcttacaacatggtcttctggctgattcaagtaattgggttacaaatttggccaacagttctctgggctttattctagctgatgctgggttcgatgtgtggatgggtaactcgagaggcaatacatggagccggaagcacaagaccctgtccgtgagtcaggacgagttctgggccttctcttacgacgagatggctaagtacgacttgcccgccagtatcaatttcatcctcaacaagacaggccaggagcaagtgtactacgttgggcatagtcagggcaccaccattgggttcatcgcattttcccagattcccgagctcgcgaagcggataaaaatgttcttcgctctcggaccagttgccagcgtggcattttgcacatcccctatggctaaacttggccgcctgcctgaccatctgatcaaggacctgttcggtgacaaggagtttctgcctcagagcgcttttctcaagtggcttggcactcacgtttgcacacatgtgattctgaaggaattatgcggcaatctctgcttcctgctgtgcgggttcaatgaacgtaacctgaacatgagcagggtcgatgtttacacaacccacagcccggccggcacatccgtgcaaaatatgcttcactggtctcaagctgttaaatttcagaagtttcaagccttcgactggggatctagcgctaagaactactttcattacaatcagtcctatccaccgacctataacgtcaaggatatgctggtgcccactgctgtgtggagcggaggccacgactggctcgccgatgtatatgatgtaaacatactgctaacacagatcaccaacctggtcttccacgagagcattcctgagtgggaacacctggatttcatctggggtctggacgccccgtggagactctacaataaaattattaacctgatgaggaaataccagtag

SEQ ID NO: 3892 - DNA, 1200 bp, synthetic construct
  misc_feature 1..1200: note = source = /note="Description of Artificial Sequence: Synthetic coding sequence"
  source 1..1200: mol_type = other DNA
atgaagatgcggttcctgggcctggtggtgtgcctggtgctgtggactctccatagcgagggaagtggcggcaaacttactgccgtggacccggagacgaacatgaacgtgagcgagattattagctattggggcttcccctccgaggaatacctggtcgagaccgaggacggttacatcttatgcctcaacagaatcccacacggcaggaagaaccatagtgacaaggggccgaaacctgtcgtgttccttcagcacggattactggcagatagttctaattgggtcacaaacctcgctaacagctctctgggattcatccttgccgacgccggcttcgatgtctggatgggcaactccagaggaaatacctggtcacgcaagcataaaacattaagtgtgagtcaggacgaattctgggccttcagctatgacgaaatggccaagtacgatttgccagcatccattaatttcatcctcaataaaactggtcaggagcaggtatattacgtgggccatagtcaaggaacgacaatcggcttcatcgctttttctcagataccggagctcgccaaaaggatcaaaatgtttttcgctctaggccctgtggcaagcgtggctttctgtacaagccctatggcgaaacttggtcgccttccggaccacctgattaaggatctgttcggtgacaaagaatttctgccacagagcgcattcttgaagtggctgggaacacacgtgtgtacacatgtgattctcaaggaattgtgtgggaacctctgcttcctcctctgcggcttcaatgagcgaaacctgaacatgtcgcgcgtggatgtttataccactcactctcctgccgggacttccgttcagaatatgctccattggagtcaagctgtcaagttccaaaagtttcaggcttttgattggggtagctcagcaaagaactactttcattataaccagagttaccctcccacttataacgtgaaagatatgctggtgcctaccgctgtgtggagcggaggacatgattggttggccgacgtctacgacgtgaacatcctacttactcagataaccaacctcgttttccatgaatctatccccgagtgggaacacctggattttatctggggtctcgatgccccatggcggttatacaataagattataaatcttatgcggaagtatcagtag

SEQ ID NO: 3893 - DNA, 1032 bp, synthetic construct
  misc_feature 1..1032: note = source = /note="Description of Artificial Sequence: Synthetic coding sequence"
  source 1..1032: mol_type = other DNA
atggcctgcctggagttcgtgcccttcgacgtgcagatgtgcctggaatttctgccatcgggacccaagccagtggtattcctccagcacggtcttctggctgatagctccaattgggtgactaacctggctaacagctcgctcggcttcatcctggccgacgccggttttgatgtttggatgggcaatagtcggggcaatacttggtcccgtaagcacaagaccctttctgttagtcaggacgagttctgggctttttcctacgacgagatggccaagtatgaccttcccgcttccattaactttatccttaacaaaactggccaggaacaggtgtactacgttgggcattcacagggtacaacgattggattcatcgcctttagccagataccagagctcgccaaaaggattaaaatgttttttgcacttggtcccgtcgcatctgtggccttctgcacatcccctatggcaaagctcgggcgacttccagaccacctcattaaggatttgtttggagataaagagttcctgcctcaaagcgccttcctgaagtggttaggcacccatgtttgcacgcacgtgatcctgaaagaactgtgtgggaatttatgcttcctcctgtgtgggtttaatgagcgcaatctgaacatgtcaagggtggacgtgtataccacacactcacctgctggaaccagtgtacaaaatatgcttcactggtctcaggcagtcaagtttcaaaagttccaggctttcgactgggggagctccgcgaaaaactattttcattacaaccaatcttatccaccaacttacaacgtcaaggacatgctcgtgccaacggcagtctggtccggaggacatgattggctggccgacgtttacgatgtcaacatcctattgacccagattacgaatctcgtattccacgaatccataccagagtgggaacacctggacttcatctggggcctggatgcgccctggaggctgtataacaaaataattaatctgatgagaaagtaccaatag

SEQ ID NO: 3894 - DNA, 1206 bp, synthetic construct
  misc_feature 1..1206: note = source = /note="Description of Artificial Sequence: Synthetic coding sequence"
  source 1..1206: mol_type = other DNA
atggcctgcctggagttcgtgcccttcgacgtgcagatgtgcctggagttcctgccaagcggtgaatttgttgtccttttgaccagcggagtgcagctacagaccttcacggtttccgttacagacctgaaaggcggtgcaagcggcgtcgtacgctctagtcgctgggtcagaggcttcacagatttcagatctaaagcagtggatctctgtggccccaaacctgtggtcttcttacagcatgggttactggctgactcctcaaactgggtaaccaatctggccaattctagcctgggtttcattctggccgacgctggcttcgatgtgtggatgggaaattcaagaggaaatacgtggagcaggaagcacaagactctcagcgtatcccaggacgagttttgggcatttcgcgtacccttcctggactattcgtacgatgagatggcaaagtatgatctgcctgcttccatcaactttatactgaataagactggccaagaacaggtttactacgtcgggcactctcagggcactacgataggtttcattgccttctctcagataccggagctcgccaagcgcatcaagatgttctttgccctgggtcctgtagcaagcgttgctttttgtacgtcgcccatggctaaactgggaaggttgccagaccatttgatcaaggacctgttcggcgataaagaatttttgccccagtccgccttcctgaagtggctgggaacacacgtttgtactcacgtcatactgaaagagttatgcggcaatctttgtttcttgttatgtggattcaacgagcgaaacctgaatatgtcccgtgtggacgtatacaccacacactcccccgccggtacctcagtacagaacatgctgcactggtctcaagcagtcaagtttcaaaagtttcaggcctttgactggggttcatccgcaaaaaactattttcactacaatcagagctaccctccaacgtacaacgttaaggatatgttggtgcctactgccgtttggagcggggggcacgattggctcgctgatgtgtatgatgtaaatatcctcctgactcagatcaccaatctcgtattccatgaatccatccctgagtgggagcaccttgactttatttggggcctggatgctccctggcgtctatacaacaaaattattaacctgatgagaaagtaccagtag

SEQ ID NO: 3895 - DNA, 873 bp, synthetic construct
  misc_feature 1..873: note = source = /note="Description of Artificial Sequence: Synthetic coding sequence"
  source 1..873: mol_type = other DNA
atgaagatgcggttcctgggcctggtggtgtgcctggtgctgtggaccctacacagtgaagggagcggagggaagctgactgccgtcgatcccgagaccaacatgaatgtgtccgaaataatctcttactggggcttcccatctgaagaatacttggtggagacagaagatggctacatcctctgcctcaatcgcatccctcatggccggaaaaaccactctgataagggtcccaagccagtggtcttccttcagcatggcttgctcgcagactcctccaactgggttactaaccttgctaacagcagtctagggttcattctcgccgatgcaggctttgacgtttggatggggaatagccgaggtaatacttggtccaggaaacataagaccctttctgtatcacaagatgaattctgggccttttcatacgacgagatggcaaaatatgatctgccggctagtattaatttcatcctgaataagaccggtcaggagcaggtctattacgtggggcactcccagggcaccactatcgggttcatagctttcagccagattcccgagttggcgaagagaatcaagatgttcttcgcattggggccagtggcgtctgtggccttttgcacctcacctatggcaaagctggggcggttaccagatcacctgatcaaagacctgtttggcgacaaggaattcctgccacagtcagcctttcttaaatggctgggtacacacgtctgcacccacgttatccttaaggagctgtgtggaaatctgtgctttctgctttgcggttttaatgagaggaatctgaatatgtcccgcgtggatgtctacacaacccattcgccggccggcactagcgtgtag

SEQ ID NO: 3896 - DNA, 1200 bp, synthetic construct
  misc_feature 1..1200: note = source = /note="Description of Artificial Sequence: Synthetic coding sequence"
  source 1..1200: mol_type = other DNA
atgaagatgcggttcctgggcctggtggtgtgcctggtgctgtggaccctacactcagaggggagcgggggcaaattgaccgccgtagaccccgagaccaatatgaatgtttccgagatcatttcatactggggctttcccagcgaggaatatcttgttgagactgaggacggctatatcctgtgtctcaaccgcatcccacacggacggaagaaccactcagacaaaggccctaagccagtagtattcctgcaacacggattgttggccgactcttctaactgggtcaccaacctcgcaaactcctcactcggcttcatactggccgacgcgggcttcgatgtttggatgggcaattcaaggggaaacacttggtcacgcaagcacaagacattgagtgtttcacaggacgagttctgggcattttcatacgatgagatggctaaatatgacttaccagcttctataaatttcatcttgaacaagactggccaggagcaagtatactacgttgggcacagccaaggaaccactatcggattcatcgcctttagtcagatacccgagctggccaaaagaatcaagatgtttttcgctttggggcccgttgctagcgtcgccttttgcaccagccctatggccaagcttggccggttaccagaccaccttatcaaagatctgtttggcgacaaagagttcttacctcagtctgcatttctgaaatggctgggaacgcacgtgtgtactcacgtgattctgaaagagttgtgtggtaacctgtgctttcttctctgtgggttcaatgaaagaaacttgaacatgtcccgggtggatgtttataccacacatagcccggccggtacatcagtccaaaatatgctgcactggtcacaagctgtgaaattccaaaagttccaggcgtttgattggggtagtagcgctaagaactacttccattacaaccagtcatacccgccgacctacaatgtcaaggacatgttggtgcccacggctgtgtggagtgggggtcacgactggttggcagacgtatatgatgtcaacatcctgctcacccagatcaccaatctggtgtttcacgagtccattccggaatgggagcatttggattttatctggggactggacgccccttggagactgtataacaagatcattaaccttatgaggaaataccagtag

SEQ ID NO: 3897 - DNA, 87 bp, synthetic construct
  misc_feature 1..87: note = source = /note="Description of Artificial Sequence: Synthetic coding sequence"
  source 1..87: mol_type = other DNA
ctgtgcttcctgctgtgcggcttcaacgagcggaacctgaacatggccgtgaaatttcaaaaatttcaggctttcgactggggctag

SEQ ID NO: 3898 - DNA, 1200 bp, synthetic construct
  misc_feature 1..1200: note = source = /note="Description of Artificial Sequence: Synthetic coding sequence"
  source 1..1200: mol_type = other DNA
atgaagatgcggttcctgggcctggtggtgtgcctggtgctgtggaccttacactccgaaggttcaggcggtaagctcaccgccgtggatccagagacaaacatgaacgtgtcggaaattatcagctattggggctttccaagtgaggagtatctcgtggagacggaagatggctacatcctctgcctgaacaggatcccacacggacggaagaaccatagcgataagggcccaaagccagtggtgtttctccagcacggactcctggcagatagctctaattgggtgacaaacctggccaatagttctctggggttcattctggcagacgctggattcgatgtttggatggggaactctcggggaaacacatggtccagaaagcacaaaacgctgtcagtttcgcaggacgaattctgggcctttagctacgatgaaatggcaaaatacgatcttccagcatctattaatttcattcttaataaaacggggcaggagcaagtgtactacgttggccattcacagggaacaaccataggtttcatcgctttttctcaaatacctgagttagctaaacgtatcaaaatgttttttgctttgggccctgttgcctcagtggcattttgcacctcccctatggcaaaattaggtaggttaccagaccatctcataaaggacctgtttggtgacaaggagtttttaccccagagtgcatttctcaagtggctcggcactcacgtttgtacgcatgtcatactgaaggaattatgcggaaatctatgctttctgctgtgtggctttaatgaaaggaaccttaacatgtccagggtggacgtgtacaccacccacagtcctgccggaacatcggtccagaacatgctgcactggtcacaggccgtgaagttccaaaagttccaggcttttgactggggcagttccgctaaaaactactttcactacaatcaatcctatccaccaacttacaatgttaaggatatgctcgtgccgacagccgtctggtccggagggcatgattggctcgctgatgtgtacgacgtcaatatccttctgactcagattacgaatttagtatttcacgaatcgattccggagtgggagcaccttgactttatttgggggctcgacgctccttggcgcttatataataagataatcaacctgatgcgaaagtaccagtag

SEQ ID NO: 3899 - DNA, 411 bp, synthetic construct
  misc_feature 1..411: note = source = /note="Description of Artificial Sequence: Synthetic coding sequence"
  source 1..411: mol_type = other DNA
atgaagatgcggttcctgggcctggtggtgtgcctggtgctgtggacgctgcactccgagggctctggcggcaaactgaccgccgtggacccagaaactaatatgaacgtgagcgaaatcatttcatactggggtttcccttctgaggaatacttggtcgagaccgaagacggatatatcttgtgcttaaaccggataccgcatggacgtaagaatcatagcgataaggggccaaaacctgtggtgtttttacagcacggtcttcttgccgactccagcaactgggtaaccaacttggccaactccagccttggatttattctagctgacgccggatttgacgtgtggatgggcaattcccgcggtaacacctggtcgcggaaacatgtgaccctcgaacccggttgctag

SEQ ID NO: 3900 - DNA, 1428 bp, synthetic construct
  misc_feature 1..1428: note = source = /note="Description of Artificial Sequence: Synthetic coding sequence"
  source 1..1428: mol_type = other DNA
atggagagcaaggccctgctggtgctgaccctggccgtgtggctgcagtcactgactgcttctagaggaggagtggcggcagccgaccagcgccgggacttcattgacattgaatcaaagtttgctctccgcactccagaggacacagcagaagatacctgccatctgattccaggggtcgccgagtcagttgctacatgccatttcaatcatagctccaagacattcatggtgatccacgggtggacagtgacaggcatgtatgaaagctgggttcctaaattggtcgccgcgctatataaacgagagccagatagcaacgtgattgtagtggattggttgtcacgggctcaggaacattaccccgtatctgccggctacaccaagctcgtgggacaagatgtggcaagattcatcaactggatggaggaggaattcaattaccccttggacaatgttcatctgctgggatattcactgggagcgcatgctgccgggatcgctggaagcctgacaaacaagaaagtgaatagaattaccggcctggaccctgcggggccaaactttgaatatgcagaagctcctagcagactgagtccggacgacgcagattttgtagacgtccttcatactttcactaggggctctcccggcagatccattggcatccagaagcccgttggacatgtggatatctatcccaacggagggacatttcagcccggttgtaacatcggggaagccatcagggtaattgccgaacgcggtctcggcgatgtggatcagcttgtgaagtgctctcacgaacgctccatacatctatttatcgatagccttctaaatgaggagaacccttcaaaagcataccgttgcagttccaaggaggcatttgagaagggtctgtgtctgtcttgccgaaagaatcggtgtaataacctcggatacgagattaataaggttcgggccaagaggtcctctaagatgtatttaaagaccagatcacagatgccatacaaagtcttccattatcaggtgaaaattcacttcagtggaaccgaatcagagacacatactaaccaggcctttgaaattagcctttatggtaccgtcgcggagtcagagaacattcctttcacgttacccgaggtgtccaccaacaagacatactcctttctcatctacacagaggtagatatcggagagttgctgatgctgaagctgaaatggaaaagcgattcctatttttcttggtcggattggtggagcagccccgggtttgcaatccagaagattcgggtgaaggctggcgagacccagaagaaggtcattttttgctctcgtgaaaaagtctcgcaccttcaaaaaggcaaggctcccgcagtatttgtgaagtgccatgacaaaagtcttaataaaaaatccggatag

SEQ ID NO: 3901 - DNA, 348 bp, synthetic construct
  misc_feature 1..348: note = source = /note="Description of Artificial Sequence: Synthetic coding sequence"
  source 1..348: mol_type = other DNA
atggtgatccacggctggaccgtgaccggcatgtacgagagctgggtacctaagctggtggctgccctctataaacgcgaacctgatagcaatgtcatcgtggtggattggttgtccagagcacaggaacattacccagtttccgcaggatacaccaagctcgtcggacaggacgtggcccgctttatcaattggatggaagaagagtttaactaccctctcgataacgtgcaccttctgggctacagcctcggcgcccacgctgcaggaatagcaggaagcctgactaataaaaaggtgaaccgcatcactggcctcgacccagcaggccccaattttgagtactag

SEQ ID NO: 3902 - DNA, 321 bp, synthetic construct
  misc_feature 1..321: note = source = /note="Description of Artificial Sequence: Synthetic coding sequence"
  source 1..321: mol_type = other DNA
atggagagcaaggccctgctggtgctgaccctggccgtgtggctgcagtctctgaccgcaagtcgcggtggtgttgccgctgcagaccagcgaagggactttatagatatcgaatctaaattcgctcttcgaacccccgaagataccgcagaggacacttgtcacctcattcccggcgttgccgaatctgtggctacttgtcatttcaatcattcctcaaaaactttcatggtgattcatggttggaccgttacagggatgtatgaaagttgggtcccaaagcttgttgctgccctgtataagagagagcccgactcctag

SEQ ID NO: 3903 - DNA, 393 bp, synthetic construct
  misc_feature 1..393: note = source = /note="Description of Artificial Sequence: Synthetic coding sequence"
  source 1..393: mol_type = other DNA
atggagagcaaggccctgctggtgctgaccctggccgtgtggctgcaatctcttaccgcctctaggggaggcgtggccgcagccgaccaaaggcgcgattttatcgacatagagtcgaagttcgctctgaggacccccgaggacacagctgaggatacatgtcacctcattccgggagtggcggaatccgtcgccacttgccactttaaccattcatccaaaactttcatggtaattcatggatggaccgtcactggaatgtatgaaagctgggtgcctaagctggtcgccgccctttacaagagagaaccagacagcaacgtgattgttgttgattggttgtccagagcccaagaacactacccagtgtccgccgggtataccaagctttag

SEQ ID NO: 3904 - DNA, 1386 bp, synthetic construct
  misc_feature 1..1386: note = source = /note="Description of Artificial Sequence: Synthetic coding sequence"
  source 1..1386: mol_type = other DNA
atggagagcaaggccctgctggtgctgaccctggccgccgccgaccagagaagagactttatagacattgaatcaaaattcgcactccgtaccccagaggataccgcagaggatacttgtcacctgattcctggagttgctgaaagtgtcgcaacctgtcactttaaccactcttccaagactttcatggtgatccatggctggacagtgacaggcatgtacgagtcctgggtgcccaaactagtggccgccctgtataaacgcgagcctgattcgaatgtgatagtggttgattggctcagcagagctcaggagcattacccagtgtccgcagggtataccaagctggtgggccaggatgtggccagatttattaattggatggaggaagaattcaattatcctctggacaatgtccacttacttggttacagcttaggcgcacacgcagctggcatcgcaggctccttgacaaataagaaagtaaatcgtattaccggactggatccggctggcccaaacttcgaatacgcagaggcgccatcaagattgagccctgatgatgctgactttgttgacgttttgcacacctttacgagaggttctccaggaagatctatcgggatccagaaacctgttggacacgtggacatttaccctaatggcggtacctttcagcccgggtgtaatatcggcgaagcaatccgggtaatagcagagcgggggctgggcgatgtagaccagttagtgaaatgctctcacgagcggtctattcacctgtttatcgactccctcctgaatgaggaaaatcccagcaaggcgtaccggtgttcctcgaaggaggcctttgagaaaggcctgtgcctgtcctgccgaaaaaaccggtgcaataatttaggatatgagattaataaagtgcgtgccaaacgcagcagcaaaatgtacctgaagacccgcagtcagatgccatataaagtattccactatcaagtgaaaatccactttagcgggaccgaaagcgagacccacaccaaccaggcttttgaaatctcactgtatggaaccgtagctgaaagtgaaaacatcccctttactctgccagaggtctctactaataagacctactcgttcctcatatataccgaggtggatataggcgagcttctgatgttgaaacttaagtggaagtccgacagttatttctcttggagcgactggtggtctagtccaggcttcgccattcagaaaatccgggtcaaggctggcgagacgcaaaaaaaggtgatcttttgctcgagggagaaggtgtcccacctacaaaagggcaaagcgcccgctgtctttgtgaagtgtcacgacaagagcctaaacaagaaatctggctag

SEQ ID NO: 3905 - DNA, 828 bp, synthetic construct
  misc_feature 1..828: note = source = /note="Description of Artificial Sequence: Synthetic coding sequence"
  source 1..828: mol_type = other DNA
atggtgatccacggctggaccgtgaccggcatgtacgagagctgggttccgaagctagtagctgccctgtacaagagagaacccgactccaacgtgatcgttgtggactggctttctagagcgcaggagcattatccagtctctgcggggtacacaaaactggtgggccaggacgtcgccaggttcattaactggatggaggaggaatttaactacccgctggacaacgtgcatctcctggggtacagcctcggggcccacgctgcgggaattgccggctcgcttactaacaagaaggtgaaccggatcactggcttagaccccgccggtcccaactttgagtacgccgaagcacccagtcggctctccccagatgatgcggactttgtggatgttctgcacacctttactagaggctcccccgggcgctcaatcggcattcagaagcctgtcggccatgtggacatctatccgaatgggggaacttttcagccaggctgcaatataggtgaggccattcgggtgatcgcagaacggggattgggggacgtagatcagttagtgaagtgttcacatgagagatccatccatctgtttatagactccttgctgaacgaagagaacccttcaaaagcttatcgctgtagttctaaggaagccttcgagaaagggttgtgcctctcgtgtcgaaagaaccggtgtaacaacctagggtacgagattaacaaggtgagagccaaacggagctccaagatgtatgaggacagcttcagcgatgcactgcagagcttgccattaccgtctaaggattcttttttctgggattag

SEQ ID NO: 3906 - DNA, 2079 bp, synthetic construct
  misc_feature 1..2079: note = source = /note="Description of Artificial Sequence: Synthetic coding sequence"
  source 1..2079: mol_type = other DNA
atgggcccctggggctggaagctgcggtggaccgtggccctgctgcttgcagctgcgggcactgcagtgggtgatcggtgcgagcggaacgagtttcagtgtcaggatgggaagtgcatctcgtacaaatgggtttgcgacggcagcgccgaatgccaggacggctctgacgagtcccaggaaacatgcctgtcagtaacctgcaagtcaggagatttttcttgcggtgggagggtcaatcgctgcatcccccaattttggcgatgtgacggacaagtggactgcgataacggctctgatgagcagggctgcctcactctttgcgagggcccgaacaaatttaagtgccactcaggcgagtgcatcaccctggacaaagtgtgcaacatggccagggactgtagggactggagtgacgaaccgattaaggagtgcggaaccaatgagtgcctggacaacaacggcggctgttctcacgtgtgtaatgatctgaagattgggtatgaatgcctctgccctgatggtttccagctggtggcccaacggcgatgcgaggacattgatgagtgtcaggatcccgacacgtgttcacagctgtgtgttaatctcgaagggggctataaatgccagtgcgaagagggctttcagctggatcctcataccaaagcttgcaaggctgtggggtctatcgcctacctattcttcacgaaccgccacgaagtcagaaaaatgactctggacaggtccgaatacacttccctgattcctaatctgagaaacgtagtggcgcttgatacagaagtggcgagtaaccgtatctattggagcgacttaagccagaggatgatctgcagcacccagctggacagggcacatggagtgtcatcgtacgatacagtcatttcacgggatatacaggctcccgatggtctcgctgtagactggattcactccaacatatattggacagatagtgtccttggtacagtgtcagtggctgatacaaaaggtgtcaagcggaaaactctgttccgtgaaaacggaagcaagcctagggccattgttgtggacccagtccatggcttcatgtattggaccgattgggggaccccagccaaaataaaaaagggcggcctcaacggagtggacatctacagtttagtgaccgagaacatccaatggcctaatggaattactttggacctcttatccggaaggctatactgggtcgatagcaagttacatagcatctcatcaatcgacgtcaatggcggcaaccgaaagaccattctggaggacgaaaaacgcttggcccatcccttctcactggccgtctttgaggacaaggttttttggactgacataataaacgaagccatcttctccgcaaatcggcttactggatccgacgtcaacttgctggccgaaaatctgctctccccggaggacatggttctcttccacaaccttacacagcctaggggagttaattggtgtgaaagaactaccctgtcgaacggcggatgccagtacctgtgccttccagcccctcaaatcaacccacattcccccaaattcacctgcgcctgtcccgatggcatgctcctcgccagagacatgcggagttgcctgacagaggccgaggccgccgtggctacccaagaaacttcaactgttagactcaaagtgagctctacggccgttcggacccaacataccactaccagaccagttcccgacacatcacgcctgcctggtgctacacccggcctgacaactgtcgagatagtaaccatgagccatcaggctctgggagacgtggcaggaagaggaaatgagaagaagccctcctctgtgcgggcactatcaatcgttctgcctattgtgctgctagttttcctttgtctaggtgtttttctcttatggaagaactggaggctgaaaaacataaacagcatcaattttgataaccccgtctaccagaagaccaccgaagacgaggtgcatatctgccacaaccaggatggctattcttatccttcacgccaaatggtttctcttgaggatgatgtcgcctag

SEQ ID NO: 3907 - DNA, 2460 bp, synthetic construct
  misc_feature 1..2460: note = source = /note="Description of Artificial Sequence: Synthetic coding sequence"
  source 1..2460: mol_type = other DNA
atgggcccctggggctggaagctgcggtggaccgtggccctgctgctggcggcagccgggacggcggtcggagatcgttgtgagaggaacgagttccagtgccaggacggtaaatgtatcagttacaagtgggtctgtgacggaagcgctgaatgtcaggacggatctgacgaatcacaggagacctgctcacccaaaacatgtagccaagacgaatttcggtgtcacgatggcaaatgcatctcccgacagttcgtatgcgacagcgacagagactgcctcgatggctctgatgaggcaagttgcccagtcctgacctgcggcccggcctctttccaatgcaattcttcaacatgcataccacagctctgggcttgcgacaacgatcccgactgtgaggatgggtctgatgaatggcctcagaggtgtagaggattgtatgtgtttcagggcgatagcagtccctgttctgccttcgagtttcattgcctgagtggtgaatgcatccatagtagctggcggtgcgacggcggcccagattgtaaagataagtcagacgaggagaattgtgcagtcgccacctgcagacccgacgagttccagtgctctgacggaaattgcatccatggttcacggcagtgcgaccgagagtatgactgtaaagacatgtctgacgaggtaggttgcgtcaatgtcacactttgcgaggggccaaataaattcaaatgtcactcgggggaatgcatcaccctggacaaggtatgtaacatggccagggactgccgggactggagcgacgagccgataaaggagtgcggtactaacgaatgtctggacaataatggcggctgctcacatgtctgtaacgatctaaaaattgggtatgaatgtttatgccccgacgggttccagctcgtcgctcagcgcagatgcgaagacatcgatgaatgccaggatccagacacctgctcccagttgtgcgtgaatttagagggtggctataaatgtcaatgcgaagaaggattccagctcgatccccacaccaaggcttgcaaggccgtcggatctattgcgtacttgtttttcactaatagacacgaagtcaggaagatgaccctcgataggtcagagtacacatcccttattcctaacctgcgcaacgtcgttgccctcgacacagaggttgccagtaatcggatatattggtcggacctgagccaacggatgatctgttctacccagcttgatcgagcccatggtgtgtcctcttacgatacagttatctctcgggatatccaagcacccgatgggttagctgtcgattggatccacagtaatatttattggacggacagcgtgctgggcaccgtgagtgtcgctgacacaaaaggagtgaagcgaaaaaccctcttcagggagaatggatcgaagccgcgagccattgttgtggatcctgtgcacgggtttatgtactggacggattggggaacccctgctaaaataaagaagggagggctgaatggagtcgatatctattctctcgtcactgagaacatacagtggcccaatggcatcacactggatttgttgtccgggcggttgtactgggttgattccaagctccactcgatatcttcaatcgatgtaaacggaggaaaccggaagacaatcctggaagacgagaaacgcttggcacaccctttcagtctcgccgtgttcgaagacaaggtcttctggaccgacattattaatgaggccatattcagtgctaacagattgactggcagtgatgtgaatctgcttgccgagaatttactctcacccgaagatatggttctttttcacaacttgactcagcctcgtggggtgaattggtgtgaacgaactacactttcaaacggtggctgtcaatacctctgtctgccagcgccccaaatcaaccctcattcccctaagtttacctgtgcatgcccagatggaatgctactggctagagacatgcgaagctgcctgacggaagccgaagcggcagttgctacccaggagacgagcacagtcagactcaaggtgagcagcaccgcagtgagaacacagcacactacaacccggccagttcccgatacaagtagactacccggcgccaccccagggttgaccaccgtcgaaattgtgacgatgtcccatcaggccctgggcgatgttgcaggacggggaaatgagaagaagccctcttccgtgcgggcccttagcatcgttctcccaattgtcctcctggtgttcttatgtctgggagtgttcttattatggaagaattggaggcttaagaatatcaacagtatcaactttgacaaccccgtttaccaaaagaccacagaggacgaggttcacatttgccacaatcaggacggatacagctatccatccaggcagatggtctccctcgaggacgacgtggcctag

SEQ ID NO: 3908 - DNA, 2049 bp, synthetic construct
  misc_feature 1..2049: note = source = /note="Description of Artificial Sequence: Synthetic coding sequence"
  source 1..2049: mol_type = other DNA
atgggcccctggggctggaagctgcggtggaccgtggccctgctgctggccgctgctgggacagctgtgggcgatcggtgcgagagaaacgaatttcaatgccaggacggcaagtgtattagctataagtgggtatgcgacggaagtgcagagtgccaagatggatcagatgagagccaggaaacctgcctcagcgtgacttgtaaatctggggacttctcatgcggcggaagagtgaataggtgtataccgcaattctggcggtgcgatggacaggtggattgcgacaatggctccgatgagcaggggtgcccagttgccacatgccgtcctgatgagttccaatgttctgacggcaactgtatacatggcagcaggcaatgtgatcgtgagtatgattgcaaggatatgagcgacgaagtaggctgtgtcaacgttacactatgcgagggacctaataagttcaagtgccactctggggaatgtatcactctggacaaggtatgtaacatggcacgcgattgccgggactggtctgatgagccaatcaaagagtgtggtactaacgaatgcctggataataatgggggctgttcccacgtgtgcaatgacctaaagattggctacgagtgtttatgtcccgatggcttccagctggtggcccagaggcgatgtgaggacatcgatgaatgccaggatccagacacgtgtagccaattatgcgtgaacttagagggagggtataagtgccaatgtgaggaaggcttccagctggatcctcacaccaaagcgtgtaaagctgtggggagcatcgcctaccttttcttcaccaatcgccacgaagtcaggaaaatgactctggataggtcggagtatacctctctcattcccaatctgagaaacgtggttgctctcgatactgaagtcgcatccaaccgaatctactggtctgacctttcccagcgcatgatttgctccacacagctggatagggctcacggtgtgagtagctatgataccgttattagtagagatatacaggctccagatggcctcgccgtggactggatccactcaaacatatattggaccgacagcgtcctaggcaccgtgtctgtcgcggacaccaagggggtgaaaaggaaaaccctctttcgcgagaacgggtcaaagcctcgagccatcgtggtggaccctgttcacggcttcatgtactggactgattggggaactcccgccaaaatcaagaaaggtggcctgaatggcgttgacatttactccttggtgactgaaaatatccagtggcccaacgggattactctggatctgctgtctggccgcctctattgggtcgattctaagctgcattccatcagctctattgacgtgaacggaggaaatcgaaaaacaatcttagaagacgagaagcgccttgcccacccgtttagccttgccgtgttcgaggataaagttttttggaccgacattatcaatgaggcaatcttttcggcaaacaggctgacaggatccgacgtcaacctcttagcagagaatctgctgtctcccgaggatatggtcctgtttcacaatctaacccagccgcgcgaggccgaggccgcagtggccactcaagaaaccagtaccgtcagactgaaagtgagcagcactgctgttagaacccagcataccactacgagaccagtaccagatactagccgcctgccaggggcgactcccggtctcactaccgtagagatcgtgactatgagccatcaagccctcggagatgtggccgggcgcggtaatgagaagaagccttcaagtgttagagctctatctattgtcctgcccattgtcctgctggttttcctctgcctgggtgtgtttctcttgtggaagaactggaggcttaaaaatatcaattctataaacttcgacaaccctgtctatcagaagaccactgaggacgaggtgcatatctgccacaatcaggacggatattcatatccctctaggcaaatggtgagtttagaggacgatgtcgcatag

SEQ ID NO: 3909 - DNA, 2577 bp, synthetic construct
  misc_feature 1..2577: note = source = /note="Description of Artificial Sequence: Synthetic coding sequence"
  source 1..2577: mol_type = other DNA
atgggcccctggggctggaagctgcggtggaccgtggccctgctgctcgctgccgcaggtactgccgtcggcgaccggtgcgaacgaaacgaatttcagtgccaggacggtaaatgcatctcttacaagtgggtgtgcgatgggagcgctgagtgtcaggacggctctgacgaatcgcaggaaacatgtcttagtgtgacatgcaagtccggcgacttcagttgcggaggcagggtcaatcgatgtatacctcaattttggcggtgcgacgggcaggtggattgcgacaacggcagtgatgagcagggatgtccacccaagacttgttctcaggacgagtttcggtgtcatgatgggaagtgcatttcacgccagtttgtgtgcgattccgaccgagactgtctagacggaagcgatgaagccagctgtcctgtcttgacttgtggacccgcttcatttcaatgcaacagctccacatgtatcccccagctgtgggcttgcgacaatgatccggactgtgaagatgggtccgacgaatggcctcagcgctgtaggggactctacgtctttcagggtgattccagcccttgctctgcatttgaatttcactgtctgagcggggaatgtatccacagcagctggaggtgcgatggcggaccagattgcaaagacaagtccgacgaagagaactgtgccgtggccacctgtaggcctgatgagttccagtgtagcgatgggaactgcatccatggttcccggcagtgcgatcgtgagtacgattgtaaggatatgtccgatgaggtagggtgtgtcaatgtgaccctttgtgagggacctaataagtttaagtgtcacagtggggaatgcatcacactcgacaaagtctgtaacatggcaagagattgtagggattggtctgatgagccaatcaaggagtgtggtaccaacgagtgccttgataacaatggtggatgttctcacgtgtgtaatgatttaaagatcggttacgagtgcttgtgccccgacgggtttcagctggtcgcccagcggcggtgtgaggatatcgatgaatgtcaggatccggatacatgcagccagctatgcgtgaatcttgaagggggctataagtgccagtgtgaagaagggttccagctcgacccccacacaaaggcttgcaaggccgtggggagcattgcttacctcttcttcacaaatcgtcatgaggtccgcaaaatgactctggatcgatctgaatacacctcactcatacctaaccttcgcaatgtggtggccctcgacacggaagtggctagcaatcgcatctattggtcagatcttagccagcggatgatctgctctacccagcttgaccgcgctcacggagtgagcagttacgacaccgtgatctcacgcgacatccaggctcccgacggattagcagtcgactggattcactctaacatctactggactgattcggtactgggcactgtatccgtggcagacaccaagggcgttaagcgtaagacacttttccgcgaaaatggatcgaagcctcgcgccattgtcgtcgatcccgtgcatggttttatgtactggacagactggggcaccccggccaagattaagaagggaggcctgaacggcgtggacatatactctctggttacagaaaacatacagtggccgaatggaataacgctggacctcctttcaggaaggttgtattgggtggactctaagctgcacagtatctcaagtattgatgtcaatggggggaaccgtaagaccattttggaagatgagaagagactggcgcacccctttagtctggccgtctttgaggacaaggtcttttggaccgatatcatcaacgaagcaatattttcagcaaatcgtttaacaggtagtgacgtcaatctgctcgccgaaaatctgctctctcccgaagatatggtgctgtttcataacctcactcaaccccgaggggtgaattggtgtgaacggactacactgtccaacgggggctgccagtacttatgcctgcctgccccccaaataaacccacatagtcctaagttcacatgcgcctgcccggacgggatgctgcttgctcgtgacatgcggtcttgcctgactgaagcggaggctgcagtcgccacccaggaaactagcaccgttagactgaaagtgagttcgactgctgtcaggacacaacacacaaccacaaggcctgtccccgacacctctcggctgccgggagcaacccctggcctcacgaccgtggagattgtcactatgagccaccaggccctgggcgatgtagctggaagagggaacgagaagaaaccctctagtgtgcgtgccctgagtatcgtgctccccattgtcctgctcgttttcctgtgtctgggggtgtttctactgtggaagaactggcgactcaagaacattaacagcatcaacttcgataatccagtttaccagaaaacaacagaggacgaggtccacatttgtcataatcaagatggctactcttacccatccatggtaagccttgaggatgatgtggcctag

SEQ ID NO: 3910 - DNA, 2583 bp, synthetic construct
  misc_feature 1..2583: note = source = /note="Description of Artificial Sequence: Synthetic coding sequence"
  source 1..2583: mol_type = other DNA
atgggcccctggggctggaagctgcggtggaccgtggccctgctgttggcagcggcaggaacggccgttggagacagatgcgaacggaatgagtttcaatgtcaggacggcaagtgtatttcatacaaatgggtctgcgatggatctgcagaatgccaagatggctccgatgaatcacaggaaacgtgcctatctgttacatgtaaaagcggtgacttttcatgtggtggacgagtgaataggtgcataccacagttctggagatgcgatggccaggtcgattgtgataatgggagcgatgaacagggctgtcctcctaagacgtgcagccaggacgaatttcgatgccacgatggcaagtgcatcagtcggcagtttgtatgtgactctgacagggattgtctggatggctctgacgaagcctcttgcccggtacttacctgtggacccgctagctttcagtgtaactccagtacctgtatccctcagttgtgggcttgcgacaatgaccctgactgtgaggatggctctgacgagtggccacagagatgtcgtgggttgtacgtgtttcagggagatagtagcccctgcagtgccttcgagtttcattgtcttagtggggagtgcattcacagctcgtggcggtgtgatggcggccccgactgcaaggataagtcagacgaagagaattgcgcggtggccacctgcagaccagacgagtttcagtgtagcgacggtaactgcatccatgggtcaaggcaatgcgaccgcgaatacgattgcaaagatatgtctgacgaagtcggttgcgttaatgtcaccctatgcgagggtcccaataaatttaagtgccattctggggagtgtattactctggacaaagtgtgcaacatggcgagagactgcagagattggagcgacgaacccattaaagaatgcggaacaaacgagtgcctggacaataatggagggtgctcgcatgtgtgcaatgacctcaagatcggatacgaatgcctgtgcccagatggcttccagttggttgctcagagacggtgtgaggatattgatgagtgccaggatcctgatacctgcagtcaactttgcgtcaaccttgaaggaggatacaagtgtcagtgcgaggaaggatttcagttagatcctcataccaaagcctgcaaggccgttggaagcatagcctacctgttctttactaacagacacgaggtgaggaagatgacgttggacaggagtgaatacactagcctaatccccaatctgaggaacgtcgtggccctggatactgaagtagcaagcaacagaatctattggtctgacctctctcaacgcatgatctgttcgacccaactcgatcgggctcatggtgtctcatcctacgacacggtgattagcagggatatacaggctcccgacgggctggctgtggactggatccattccaatatctactggacagactctgttctgggcaccgtgtccgtggccgacactaaaggagtcaagcggaagaccctcttcagagagaacggctctaaacctcgggccattgtcgtcgatcccgtgcacgggtttatgtattggacggattggggaactccggctaagatcaaaaaggggggacttaacggcgtggacatatactctctcgtaacggagaatatccagtggcctaatggcatcacactcgacctcttgtcaggccgcctgtactgggtggatagcaaactccatagcattagctctatcgacgtgaatggaggaaaccggaaaactatcctcgaggatgagaagcgcctcgcacatccattctccctggccgtcttcgaagacaaagtcttttggactgacattatcaatgaagccatcttctcggccaatcgcctgactggcagcgatgtcaatctcctcgcggaaaatctgcttagtcccgaagatatggtgctgttccacaatcttacacagccgcgcggagtcaactggtgcgagaggactactttgtcaaacggaggctgccagtacttatgccttcccgcaccacagatcaatccacacagccctaaattcacatgtgcttgccctgatggtatgctcctggcacgggacatgcgtagctgtctcacagaagccgaagctgctgtggctacacaggaaacttcgactgtaaggctgaaggtaagttcaactgccgttcgtacacagcatacaacaaccaggccagtacccgacacttccagactccctggagctacccccggtctgactactgtcgaaatcgtgacgatgtctcatcaagctttaggagatgtagcaggcaggggtaacgagaaaaaaccctcatccgttcgggctctttctatcgtgctgcctatagtcttgttagtatttctttgcctcggtgtctttctcctgtggaaaaactggagacttaagaacatcaattccattaactttgacaatcccgtgtaccagaaaactacagaggacgaagtccatatttgccacaaccaggacgggtactcttatccttctagacagatggtcagcctggaggatgatgtagcatag

SEQ ID NO: 3911 - DNA, 2220 bp, synthetic construct
  misc_feature 1..2220: note = source = /note="Description of Artificial Sequence: Synthetic coding sequence"
  source 1..2220: mol_type = other DNA
atgggcccctggggctggaagctgcggtggaccgtggccctgctgctcgccgccgccggtactgctgtgggggaccgctgcgaacgcaatgattttcagtgcaactcaagcacctgtatcccacagctatgggcatgcgacaatgaccccgattgtgaggacggaagcgatgagtggcctcaacgatgcaggggactctatgtttttcagggggattctagcccatgttccgcctttgagttccattgcttgagcggtgaatgcattcatagcagctggcgatgtgatggtggaccagactgtaaggacaagtccgacgaagagaactgcgccgttgcaacctgtaggcctgacgaatttcagtgctccgacggaaattgcatccacggcagtaggcagtgcgatagagaatatgattgtaaagacatgtctgacgaagtgggttgcgtgaatgtcacattgtgtgaaggaccgaacaaatttaagtgccactcgggcgaatgcatcaccctggacaaagtgtgtaacatggctagggactgccgcgactggtccgatgaacccatcaaggagtgtggcacaaacgagtgtttagataataacggcgggtgctcccacgtgtgtaatgatctgaaaatcggatacgagtgcctctgcccagatgggtttcagttagtggctcagcgacgatgcgaggatatcgatgagtgccaggatcctgacacatgctctcagctgtgcgttaacctggaagggggttataaatgtcagtgcgaggagggcttccaactggacccacacacaaaagcctgcaaagctgtgggctctatcgcctacctgttcttcactaatcgccatgaagttagaaaaatgacgcttgataggagtgagtacaccagcttgatccccaatttacgaaacgtagtggcgctcgacacagaagtggcttccaataggatttattggtcggatctcagtcagcgaatgatttgctcgacgcagcttgaccgggcccatggagtgtcctcctatgacaccgtaataagcagagacatccaagccccggatggtcttgctgtggactggatccattctaacatctattggactgattccgtgttaggaacagtcagcgtagctgatacaaaaggggtgaagcgaaaaacgctgtttagagagaatggcagtaaaccccgcgctattgtggtcgaccccgttcatggttttatgtactggacagactggggcacacccgcaaagattaagaaaggcgggttaaatggagtcgatatttattccctagtgacggagaacattcagtggcctaatggcataactctggacctcctgtctggaaggctgtattgggtcgactctaaacttcatagcatatcctctattgacgttaacggagggaaccggaaaacaatcctcgaggacgaaaagcgtcttgcacacccgttctccctggctgtgtttgaggacaaagtcttctggactgatataattaatgaagcgatcttctctgcaaataggctcactggcagtgacgtgaacttgctcgcggagaatctgctgtccccagaagatatggtgctcttccacaacttgacacaacctcggggagttaattggtgcgagcggacgaccctctctaacgggggttgccagtacctctgtctgcctgcccctcagataaacccgcactcaccaaagttcacttgcgcttgcccagatggtatgctgctggcacgcgacatgcggagctgtctgacggaagctgaggccgctgttgccacacaggagacctccaccgtcagactcaaagtgtcctcaactgccgtgcgcacacagcacacgaccaccagacccgtccccgacacaagtagactgcccggcgccactcccggattgaccacggttgagattgtcaccatgagccaccaggcccttggagatgtggccggcaggggaaatgagaagaagccaagcagtgtcagagcgctctcgattgtgttgcccatagtcttactggtgtttctgtgtttaggggtgtttctgctttggaagaattggaggttaaagaacattaattccatcaattttgacaacccagtctaccagaaaacaactgaagatgaggtacacatttgtcacaaccaggatggctatagctatccaagccggcagatggtttccttggaggatgatgtggcatag

SEQ ID NO: 3912 - DNA, 2838 bp, synthetic construct
  misc_feature 1..2838: note = source = /note="Description of Artificial Sequence: Synthetic coding sequence"
  source 1..2838: mol_type = other DNA
tgaggccggcccggcgtgcccccccggttcctgagccagcggcggcgtcaggtgcccggccctaggtccaggttacgcgatatccacgagtcgcccagtgtgattctgggtccccctggtgaagtccccggctttcgctgcgccctttggaggcacttgcgaccccacctggtgcttggaggagccttagccccacccgcccctatcaagtttactgagggccctcccgctactctgaaggcatccgtgccttacgaggttgagactctgccccaaaatcttcctgccccgccttggtctgctgctgagattttctctcacgtgggggaccggtgtgagcgcaacgaatttcaatgtcaagatggcaagtgcatttcctacaaatgggtgtgtgacggtagcgcagagtgtcaggacgggtctgatgagagccaggaaacatgcttgtctgtcacctgcaagtccggagatttctcttgcggaggccgagtgaaccggtgcattcctcagttctggcggtgtgacggacaggttgactgtgataatgggtcggatgagcaagggtgtcccccaaaaacctgtagccaagacgagtttaggtgtcatgacggtaagtgtatcagccggcagtttgtgtgcgatagcgaccgggattgcttagatggaagtgatgaggccagctgcccggtactcacctgtggccctgcttcctttcagtgcaactcaagcacttgcatccctcaactatgggcttgtgataacgaccccgattgcgaagatggtagtgatgaatggcctcagcggtgccgcggcctgtatgtgttccagggtgattccagtccttgttctgctttcgaattccactgcctgtccggcgaatgtatacatagcagctggcgctgtgatggaggaccagactgtaaagacaagtctgacgaagagaactgcgctgtggctacctgcagacctgatgaattccaatgttctgacggaaattgtatccatggctcgcgccagtgcgaccgtgaatatgattgtaaagatatgtcggatgaagttggttgtgtgaacgtcacattgtgcgagggccccaacaaattcaagtgccactcaggcgagtgcatcaccttggacaaggtgtgcaatatggcccgcgactgccgcgactggtctgacgaaccgatcaaggaatgcgggacgaatgaatgtctggacaacaatggaggctgcagccacgtgtgcaatgatctcaaaatcggctatgaatgtctctgcccggacggatttcagttggtcgctcagcgtaggtgcgaggacatcgatgagtgtcaagacccagacacctgctcccagctctgcgttaacctagagggcggctacaagtgccagtgtgaggagggatttcagctcgacccacacacgaaggcatgcaaggctgtagggtcaatcgcctacctcttctttaccaacagacatgaagtgagaaagatgaccctcgaccgctcagaatacaccagcctgatcccgaatttgcggaacgtggttgccttggatactgaggtagcgagcaatagaatctattggtcggatctgagccagagaatgatttgtagcactcaactggatcgggcccatggagtgtcttcatatgacaccgttatcagtagagatattcaggccccagacgggctagccgtggactggattcattcgaacatctactggaccgattctgtcctgggaaccgtctcagtcgcagacacaaaaggtgtgaaacgcaagaccttgtttcgcgagaacggatccaagcccagagcgattgtggtcgaccctgtgcatggattcatgtattggaccgattggggcactcccgctaaaataaagaaaggcggtctcaacggggttgatatctacagcctggttactgagaatatacagtggccaaatggaattactctggacctgttgagcggtaggttgtactgggtggattcaaaactccatagtatatcctctatcgatgtgaacggtggcaaccgcaagaccatattagaagatgaaaaacggctagcgcatccgttttcccttgccgtgtttgaagacaaggtcttctggactgacatcattaatgaggccattttttccgcaaaccgactgaccggctcggacgtgaatctactcgcagagaacctgcttagccctgaggacatggtgctatttcataatttgacccagccacgcggagtcaattggtgtgagcgtaccacgctgagcaacgggggatgccaatacttatgtctcccggctccgcaaattaatccacacagtcccaagtttacctgcgcctgccccgacgggatgttgctcgccagagacatgcgctcatgcctgactgaggcggaggccgctgtagctacgcaggagacgtccaccgtgcggctgaaggtttcatcgaccgcagtcagaacccagcacacaactacacgaccagtccccgatacatcccgattaccgggcgctacacccggtctaacgaccgttgaaatagtgaccatgagtcatcaagccctcggcgacgttgcgggacggggcaacgagaagaaaccctctagcgttcgcgccctgtccatcgtcctgccaatcgtgttgctggtcttcttgtgcctcggggtgttcttgctatggaaaaattggaggctgaagaacatcaactctattaacttcgataaccctgtctaccagaaaaccactgaagatgaggtgcatatctgccataatcaggacgggtacagttacccaagccgacagatggtctccctggaggacgacgttgcctag

SEQ ID NO: 3913 - DNA, 1770 bp, synthetic construct
  misc_feature 1..1770: note = source = /note="Description of Artificial Sequence: Synthetic coding sequence"
  source 1..1770: mol_type = other DNA
atgagccggcggctgctgccccgggccgagaagcggcggcggcggctggagcagagacagcaaccagacgaacaacggagacggtctggggccatggtcaaaatggccgcagctggggggggtgggggcggaggtagatactacggtggaggatccgagggtggacgcgcacctaagaggctgaaaactgacaatgccggagatcaacacgggggcggggggggtggaggtggtggtgcgggtgcagccgggggtgggggaggcggagagaactatgacgatccgcacaagactcccgccagtccggtggttcacatcagaggtctcattgacggcgtcgtggaggccgatctggtagaagctctgcaggagttcggaccaatatcttacgtagtagtcatgccgaagaagagacaggcactggtcgaattcgaggatgtgcttggagcttgtaatgcggtcaattatgcagccgacaaccagatttacattgcaggacatccagccttcgttaactactctacatcacagaagatttctagacccggggactcagatgattcacggtctgttaattccgtcctgctgttcaccattctcaatcctatctacagcataacaacggacgtgttgtataccatttgcaacccctgtggtccggtgcaacgtatcgtgatcttccgtaaaaatggagtccaagccatggtggaattcgatagtgtgcagtccgcgcagagagcgaaggcctctctgaatggcgccgacatttattctggctgctgcacccttaaaatcgagtacgccaagcccacccgcttaaatgttttcaaaaacgaccaggacacatgggattacacaaaccctaacctcagcggccaaggcgatcccggaagtaacccgaataaacggcagagacagccccccctcctgggagatcaccctgcagaatatggcggccctcacggtgggtaccatagtcattaccacgacgaaggttacgggccgccacctccacactacgagggccgccggatgggtcccccggtcggaggacaccgccgaggcccttcacgctacggaccacaatacggccatccccctccaccaccccctcctcctgagtacggcccccacgctgactcaccagtgttaatggtgtacggattggatcagtccaaaatgaattgcgatagagtctttaacgtgttctgcctttatggcaacgtcgaaaaggtcaagttcatgaagtctaaacctggagctgccatggttgaaatggccgacggctacgctgtcgatcgggccattacccatttgaataacaacttcatgtttggacagaagttaaacgtctgcgtttctaagcagccagcgattatgccaggtcagagttacggactcgaggacggatcttgctcttataaagacttcagcgagagtaggaacaatcgattctctacgcccgagcaggccgcaaaaaacagaatccaacatcccagtaacgtgctgcacttttttaacgcacccttagaagtgacggaggaaaatttcttcgagatatgtgacgagttgggagtcaaacgacctagctctgtgaaggtgtttagcgggaaaagtgagcggagttcctctggcctgctggagtgggaatcaaagtccgacgcccttgaaaccttagggttcctgaatcattaccagatgaagaatcccaacggcccatatccatacactctgaaattgtgttttagcacggcccaacacgcgtcctag

SEQ ID NO: 3914 - DNA, 540 bp, synthetic construct
  misc_feature 1..540: note = source = /note="Description of Artificial Sequence: Synthetic coding sequence"
  source 1..540: mol_type = other DNA
atgggccggcccggcctgggcgccgccgtgagcgacctgggcgaggctgtaagcctgagccagggactgctcctgcttctgctcctctccatgggcggggcttgggccagccgggagccgctgcggccttggtgccacccaatcaacgcgattttggccgtagaaaaggaggggtgcccagtatgtatcacagtcaatacaaccatttgtgcaggatactgccctacaatgatgagggtactccaggccgtgttacctccccttccccaagttgtgtgcacatatcgtgacgtaagatttgaatcaatcaggctgcccggttgtcccaggggcgttgaccctgtggtgagttttcccgtggcattgagctgcaggtgcggaccatgcaggcgttcaactagcgactgtggaggaccaaaggaccacccgctgacttgtgatcacccccagcaggcctcctcctccagcaaggacccccccaggtctctgccaagtccatccaggctactggagccagacacgcccatactgccccagtag

SEQ ID NO: 3915 - DNA, 294 bp, synthetic construct
  misc_feature 1..294: note = source = /note="Description of Artificial Sequence: Synthetic coding sequence"
  source 1..294: mol_type = other DNA
atgcagctgggcaccggcctgctgctggccgccgtgctgagcctgcagttggctgccgctgaagcaatttggtgccaccagtgtacaggctttggtggctgcagccacggaagcagatgtcttcgcgattctactcactgtgtgaccacagccacccgtgtgctgtccaatacagaggacttgccattggtaacgaagatgtgtcatattggctgccctgatatcccctcgcttggcttgggcccatatgtgagcattgcctgttgccagacgagcctgtgtaaccatgactag

SEQ ID NO: 3916 - DNA, 2058 bp, synthetic construct
  misc_feature 1..2058: note = source = /note="Description of Artificial Sequence: Synthetic coding sequence"
  source 1..2058: mol_type = other DNA
atgcccgcctacacccacgccagccccatccacaacacccacaagccatatgaatgcaaagagtgcggaaagtatttctcatgtggttcaaacctcatccagcatcaatctatccacaccggtgaaaagccctacaaatgtaaagagtgcgggaaggccttccagcttcatattcaactaacccggcaccagaaatttcacacaggcgagaagacattcgaatgcaaggaatgcggaaaggccttcaacttgcctacccagctcaaccgacacaaaaacattcacacagttaagaagctctttgagtgcaaggagtgcggcaaatcctttaatcgctcatctaatcttactcagcaccagtctatccacgccggagtaaaaccatatcagtgcaaggagtgtggtaaggccttcaaccgagggtctaacctgatccagcaccaaaagatccacagtaacgagaagccattcgtgtgccgcgaatgtgagatggcctttcgctaccactaccagctgattgaacactgtaggattcataccggtgaaaagccatttgagtgcaaggaatgtaggaaggcctttaccttgctgactaagctagtgcggcaccagaaaattcatatgggagagaagccctttgagtgccgcgaatgtggaaaggcgttttcattgttaaatcagctcaatcggcacaaaaatatccatactggagagaaaccttttgaatgcaaggaatgtgggaagtcgtttaaccggtcttctaacttaatccagcatcagagcatacacgccgacgtgaagccgtacgaatgcaaagagtgcggaaagggattcaaccgtggcgctaacttaatccagcatcagaagattcactcgaatgaaaaaccgtttgtgtgtcgagagtgcgagatggccttccggtaccattaccaactgatacagcattgccaaatccacaccggcggcaaacccttcgaatgtaaggagtgcggcaaagccttcagcttgctcacgcagttggcacgacacaaaaatattcacacaggcgaaaagccatttgaatgtaaggactgcggtaaggcattcaacagaggctccaatttggtgcagcaccaatcaatccatacaggtgagaagccctacgagtgcaaagagtgcgggaaagccttccgccttcacttacagctgagccagcacgagaagacccacaccggcgagaagccgtttgagtgtaaagaatgcggaaaattcttccggcggggtagcaatctcaaccagcatcggtctatacatactggcaagaagccatttgagtgcaaagagtgcgggaaggcattcagattacacatgcatctgataaggcaccagaaatttcataccggcgagaaacctttcgagtgcaaggaatgtggtaaagctttcagcctgcacacacagctcaatcatcataagaacattcacacgggtgagaaaccttttaaatgtaaggaatgcggcaaaagctttaaccgagtgagcaatctggtgcagcaccagtcgatccacgctggggtgaagccctacgagtgcaaggaatgcggcaaaggtttttccagagtctccaaccttatacagcatcaaaagacgcattcctcggccaaaccattcgtctgtaaggagtgtcgaaagaccttccggtatcactaccagctaactgagcactaccgcatccacaccggagaaaaaccgtttgagtgcaaggagtgcggtaaggccttcggactgcttacccaacttgcccaacaccagattattcacactggcgagaaaccattcaaatgcaaggagtgcgggaaagcgtttaatcgcggctccaacttggtccagccccagtctatccacactggagaaaagccatacgagtgcaaagaatgcgggaaggcctttcgcctgcatctgcagctgagcttgcaccaaaaactggtccaagtgagaaacccactgaacgtgcggaacgtcgggcagccatccgatatttctagcaacttacttaatattcggaagttcatccttggttag

SEQ ID NO: 3917 - DNA, 564 bp, synthetic construct
  misc_feature 1..564: note = source = /note="Description of Artificial Sequence: Synthetic coding sequence"
  source 1..564: mol_type = other DNA
tgacggggcggcggcgacagctacggcgtgctgctgagcaacgccttggccaggctgaggggatttaaggaccacttcactttttgccagcagcttaatatatctatctgtcccctgtctcagacagccgcccgcttccaggtgatcgtctacaatccactaggaagaaaagtgaactggatggtccgattgcctgtaagtgaaggcgtcttcgtcgtgaaagaccctaacggacggacggtgcccagtgacgtcgtgatattcccatcgtccgattcccaggcacatcctccggagttactgttcagcgcctccctgcctgctctgggcttctccacatatagcgtagcccaggtgccacgctggaagcctcaggcccgagctccccagccaatcccacgccgatcctggtctccggccttgacgattgaaaatgaacatatacgcgctaccttcgatcccgataccggactcctgatggagattatgaacatgaatcagcagctcctactgccagtacggcagacgttcttttggtataatgccagcattggagacaactag

SEQ ID NO: 3918 - DNA, 3036 bp, synthetic construct
  misc_feature 1..3036: note = source = /note="Description of Artificial Sequence: Synthetic coding sequence"
  source 1..3036: mol_type = other DNA
atgggcgcctacgcccgggccagcggcgtgtgcgcccggggctgcctggacagtgcgggaccatggactatgagccgtgcccttcggccccccctgccacccttgtgtttttttctcctgctccttgcggccgccggagcacgagctggcggatatgagacttgcccaactgtccagcccaatatgctaaacgtgcacttgctgcctcatactcatgacgatgttggttggttgaagaccgtcgatcagtacttttacggaattaagaatgacattcaacatgccggtgttcaatacatactggattctgtcatctccgccctattggctgatccaactagacgattcatctacgtggaaattgctttcttctcaagatggtggcatcaacagacaaatgcaacacaagaagtggttagggatctggtgaggcagggacggcttgaatttgccaacggcggttgggtcatgaatgatgaagcggctacccactatggcgctattgtggaccagatgaccctggggctgcgctttttggaagacacatttggcaacgatgggcgaccacgcgtcgcatggcacattgatccatttggccacagtcgcgagcaggcttccctgttcgctcagatgggcttcgatggttttttctttggtaggcttgactaccaggacaagtgggtgcgtatgcagaagctggaaatggaacaagtctggcgcgcctccacatcactgaaaccaccaacagccgatctcttcaccggagtgttgccgaacgggtacaatccacctagaaacttgtgttgggacgtgctttgtgtggatcaaccgcttgtggaggacccccgctctcccgaatacaacgccaaagagttggtggactattttctaaacgtcgccacagcccagggacgatattaccgaacaaaccacactgtgatgacgatgggaagtgattttcagtacgagaatgccaatatgtggtttaaaaatcttgataaacttatccgcctggtgaatgcacagcaggcgaaagggtcttctgtacatgtgctatactctaccccagcttgttatttgtgggaactcaataaggcaaatttgacatggagcgtgaagcatgacgatttcttcccttatgccgacggccctcaccagttttggacgggctatttcagctccagaccagccctgaaacggtatgagcgcctgtcttataactttttgcaggtgtgtaatcaactggaagcgctggtgggacttgccgccaatgtgggcccatacggttcaggcgactcagccccccttaacgaagcaatggccgtgctgcagcatcacgacgctgtgtccggtaccagcaggcagcatgtggccaacgattacgctcgccagctggctgccggatggggaccatgcgaggttctccttagtaacgctctcgcccgcctgcgagggttcaaagatcactttacattctgtcagcagcttaatatctcaatctgtcctctatcccaaaccgctgctcgctttcaggtgatcgtgtacaacccactgggtcgaaaagttaactggatggtgcggttaccagtgtccgagggcgttttcgtggtgaaagatcccaatgggcgtacggtccctagcgacgtggtgatttttccctcaagcgatagccaggcccatcctccagaacttcttttctccgcatcgttaccagccctcggtttctctacctactctgtagcccaggtgcctaggtggaaaccacaggcacgtgcgccacagcccatccctagaagaagctggagccccgccctgacaatcgagaacgaacacatccgggcaacctttgatcccgatacgggtctgttgatggagataatgaatatgaaccagcagttactgctgcccgtccgacaaactttcttttggtacaacgcaagcatcggggataacgagtctgaccaggcatctggcgcttacattttccgcccaaaccagcagaaaccgctcccggttagccgttgggcacaaattcacctggtgaagacacctctagtgcaagaagtgcaccagaatttctcagcatggtgcagtcaggtagtgcggctttatcctggacagcgacatcttgagctcgagtggagcgtggggccaatacccgttggtgacacatggggaaaggaagtgatctctcggttcgatacaccgttagagaccaagggcagattttatacagacagtaacgggagggagatattagagaggcgaagggattacaggccgacttggaaactgaaccaaacagaacccgtagcgggcaattactatcctgtgaatacccggatctatattaccgacgggaatatgcaattgaccgttcttactgataggtctcagggtggaagttctctgcgtgacggaagtcttgagctaatggtgcatcgccgactgcttaaagacgatgggcgcggagtctctgaaccactgatggagaatggctcgggcgcttgggtacgggggcgccacctggtattgttggacaccgcacaggccgcagcagccggccaccgcctactggctgagcaggaagtgttggcgccacaggtcgtgctggcaccgggagggggcgcagcgtacaacctgggagctccacctagaactcaattctcaggtctgaggcgtgatttaccacccagcgtgcacttgctcacgttagcgagttgggggccggaaatggttctgttacggttagagcaccagtttgctgtaggtgaagatagcgggaggaaccttagcgcccccgtgaccctcaatttacgggacctgttttctaccttcactatcacaagactccaggagacaacactggtggctaaccagctgagagaggccgcctcacgcctgaaatggacaaccaataccggaccgacgccacatcagactccgtaccagctcgatccagccaatatcactctcgagcccatggagattcggactttcctggcctctgtacaatggaaagaggtggatggctag

SEQ ID NO: 3919 - DNA, 2853 bp, synthetic construct
  misc_feature 1..2853: note = source = /note="Description of Artificial Sequence: Synthetic coding sequence"
  source 1..2853: mol_type = other DNA
atgctgaacgtgcacctgctgccccacacccacgacgacgtgggctggctaaaaactgtcgatcaatacttctacggcattaaaaatgacatacagcatgctggcgtccagtatatcctggatagtgtgatatctgctctgctagccgacccaactcggcgcttcatctacgttgaaattgctttcttttcccgttggtggcatcagcagaccaacgcgacgcaagaggtcgtgcgcgacctcgtccgccaaggtcgcctggagttcgctaacggtgggtgggttatgaacgacgaagctgcaacacactacggtgcaatcgtggaccagatgaccttgggtctcaggttcctggaagacacgttcggtaacgacgggcggccacgcgttgcgtggcatatcgatccatttgggcactcccgtgaacaagcctcactcttcgctcagatgggctttgacggcttttttttcggaaggctggattaccaggacaaatgggtgagaatgcagaagctcgagatggaacaagtctggcgggcgtccacctctctgaagccccctactgctgacctgttcactggcgttctccccaatggatataatcctccgaggaacttgtgttgggacgttctttgtgtggatcagccgctcgtcgaggacccaaggagtccggagtacaacgcgaaggagctcgtagactattttctgaacgtggcaactgcccagggacggtactatcgcactaaccacaccgttatgactatgggaagtgacttccaatacgagaatgctaacatgtggtttaagaacctggataagctcattcgtttggtgaacgctcagcaggccaaggggtccagcgtgcatgttctgtattcaacccctgcatgttacctgtgggagcttaataaagcaaaccttacctggtcagtcaagcatgacgactttttcccgtacgcggatggccctcatcagttctggaccggctacttcagctctagacccgctcttaagcgttatgagagactgtcctacaacttcctgcaggtttgcaaccaactagaagcactcgtcggcctggcagcaaacgtagggccctatggcagcggggattcagctcccttaaacgaggctatggccgttttgcagcatcatgatgctgtgtctggcaccagcagacagcacgtggccaacgattatgcgcggcagcttgcagccggctggggaccatgtgaggtactgctaagtaacgccctggccagactccgggggttcaaagaccactttacattctgtcaacagttaaatatttcaatttgtccactgtctcaaacagcggcccgttttcaggtcattgtgtacaatcccctgggcaggaaagttaactggatggtgcgactacctgtgtcagagggcgtcttcgtggtcaaggacccaaatggacgcaccgtcccttctgatgtggttatcttcccctcctctgactcgcaagcccatcctcccgagctcctgttcagcgcatccctccctgcactgggattcagcacatattcagtagcccaagtgccgagatggaaaccacaggccagagccccgcaaccaatccctcgccgctcttggtcacccgctctgactatcgagaacgaacatatccgcgctacattcgatccagacactggcctcctaatggagatcatgaatatgaatcagcagttactcctaccggtgaggcagacttttttctggtacaacgcctctatcggtgacaatgaatcagatcaggcatccggagcatatatcttcaggcccaaccaacagaaacctctgcccgtcagccggtgggctcagatccacttggtgaagactcctttagttcaggaagtccatcagaacttctctgcctggtgcagccaggttgtgaggctgtacccaggtcagagacatctagagcttgaatggagcgtagggccgatcccggtgggggatacgtggggtaaggaggtcatcagcagatttgatactcctctcgagacaaagggtaggttttataccgattccaacggccgcgaaatccttgagcggaggagggactaccgccctacttggaaactgaaccagacagaacccgtcgcaggaaactactacccagttaatacccgcatctacatcacagatggcaatatgcagcttactgtgctgacagaccgatcccaggggggctctagcctgagagacggatccctcgagctcatggttcaccgtcgcctgctaaaagatgacgggcgaggagtatctgaacccctcatggagaatggcagcggagcttgggtgagaggacggcatctggttttgcttgatactgcccaggcggccgctgcgggccacaggctgcttgctgaacaagaagtgctcgctccacaggttgtgttagctcccggcggcggcgctgcttataaccttggggctcccccgaggacccagttctccggcttgaggagagacttgccgccttctgtgcaccttctaaccctcgcgagctggggcccagagatggtgctgctgaggctcgaacatcagttcgctgtcggggaggattcaggccggaacctttccgcccctgtgacactcaatctgcgagacctgtttagcaccttcacaatcacccgcctgcaggaaactacactggtagcgaatcagctgcgggaagctgcatccaggctgaaatggaccacgaacaccggccccacccctcatcaaactccataccagttagacccagctaatattacgctggaaccaatggagatacgcacattcctcgccagtgtccagtggaaggaagtggatggctag

SEQ ID NO: 3920 - DNA, 882 bp, synthetic construct
  misc_feature 1..882: note = source = /note="Description of Artificial Sequence: Synthetic coding sequence"
  source 1..882: mol_type = other DNA
atgggcttccccgccgccgccctgctgtgcgccctgtgctgcggcttgctggcccctgccgctcgcgcgggctatagcgaggagaggtgtagctggaggggcagcggactgactcaagagccaggctcagttggccagctggcccttgcctgtgctgaaggcgcagtcgagtggctctacccggctggtgctctgcggttgacactcggagggccagatccccgcgcccgacccgggatagcatgtctcagacccgtccggccgttcgcgggcgcccaggtgtttgccgaacgcgccggaggagctctggaacttttgttagccgagggcccgggacccgctggcggtagatgcgtgcggtgggggccccgcgagagacgggcactgttcctgcaagcgacgccacaccaggatatctcccgacgggtcgccgcatttaggttcgagcttcgagaagacggccggccagaactcccacctcaagcgcatggccttggcgttgatggagcttgtaggccttgtagtgatgcagagcttttgctcgcagcatgcacttccgattttgtgattcatggcattatccacggagtaacccatgatgtcgagctgcaggaatccgtgatcaccgtagtcgctgctcgggtcctgcgccagacgcctccgttgtttcaagccggaaggtcaggcgaccagggcctgacaagcatacgcacgcccctgagatgtggagtgcacccaggccccggcacgttcctgttcatgggatggagcaggttcggagaagcaagacttggttgcgccccccgcttccaagagtttcgacgagcttacgaggccgccagagccgcccatctgcacccatgcgaagttgcgctgcattag

SEQ ID NO: 3921 - DNA, 708 bp, synthetic construct
  misc_feature 1..708: note = source = /note="Description of Artificial Sequence: Synthetic coding sequence"
  source 1..708: mol_type = other DNA
atggagcaggacgaccccgtggaggccctgaccgagctgcgggagcgacgactcggcgctttggaattgctgcaggccgcagctggaagcggactggccgcctatgctgtttgggcgctgttgcttcaacctggattcaggcgcgttccccttagactgcaggttccgtacgtaggcgcttcagctcgccaggtcgaacacgttctgtccctactgcgtggaaggcctggaaaaactgttgacctcggtagcggagatgggagaatcgtgcttgctgcccatagatgcggcttacgtcctgccgtggggtatgagctgaacccatggttggtggctctggccaggctgcacgcgtggagggcggggtgcgcaggctccgtgtgctaccgtcggaaagacctatggaaagtctcactgcgggactgcaggaacgtgtccgtctttcttgcgccatccgtgctgccactactggaagataaattaagaacagaactacccgccggagcgagggtggtctctgggaggtttcctctcccaacatggcagccagttaccgcggtcggggaggggctggacagagtgtgggcctacgatgtgcctgagggagggcaggcgggcgaggccgcttcctctagaatccccatccaagcagctcctgggccatcctctgcaccaatccctggggggctcattagccaggcttcctag

SEQ ID NO: 3922 - DNA, 2253 bp, synthetic construct
  misc_feature 1..2253: note = source = /note="Description of Artificial Sequence: Synthetic coding sequence"
  source 1..2253: mol_type = other DNA
atgctgcgggccaagaaccagctgttcctgctgagcccccactacctgcgacaagtgaaggaatccagtgggtcccggctcatccagcaacggttgctccaccagcagcagccgcttcaccccgagtgggcagcattagctaagaagcagcttaaagggaaaaaccctgaggatctcatttggcacactccagaggggatcagcatcaagcctctttactctaagcgcgacaccatggaccttccagaggaactcccaggagtgaagccctttactaggggaccgtacccgaccatgtatacatttcgcccatggacaatacgtcagtatgcaggtttcagcacagtagaggaatcaaataaattttacaaggacaacattaaggccggtcagcaggggctaagcgtggcgtttgacctggcgacccataggggatatgacagtgacaaccctcgggtgcgtggtgatgttggcatggccggagttgcgattgatactgtcgaagataccaaaatcctctttgacgggattcctcttgaaaagatgagcgtttcaatgaccatgaacggggcagtcatacctgtgttagccaatttcatcgtcacaggggaagaacaaggcgtgcctaaagagaaattaacgggcaccatccaaaacgatatcctaaaagagttcatggtgaggaacacctacatctttccacctgaaccttctatgaagatcatagcagacatctttgagtacactgccaaacacatgccgaagtttaatagtattagcatctcgggatatcacatgcaggaagccggagcagatgctatactcgagcttgcttacacgttggcagacgggctcgagtactcccgcacagggcttcaggccgggctgaccatcgacgaatttgcaccgcggctttctttcttctggggtatcggcatgaatttttacatggagatcgccaagatgagagcaggacggaggctttgggcccacttgatagagaaaatgtttcaacctaagaactctaagtcactgctcctcagggctcactgccagaccagtggctggagcctcaccgaacaggatccctataataatatcgtccgcactgccatcgaagctatggctgcagtttttggaggcacccaatctttgcacactaactcgttcgatgaggcactcggcctgccaaccgtcaagagcgccagaatcgcgaggaacacccaaataataatacaagaagagtctgggatccccaaggtggctgatccatgggggggaagttacatgatggaatgtcttacaaacgatgtatatgacgctgccctgaaactgatcaatgaaatcgaagaaatgggcggcatggcaaaggcagtggccgaaggaatccctaagctccgaattgaggagtgtgccgcaagacgccaggccagaatcgatagcggttccgaggtgattgtgggggtcaacaaatatcagctggagaaagaagacgcggtggaagtcctagctatcgacaatacatccgtaagaaacagacagattgagaagctaaagaagattaagagctccagggaccaagccctggccgagaggtgccttgcagccctgacggagtgtgcggcaagcggggatggtaatattctggctctggcggtggacgcctcccgggcccgctgtaccgtgggagaaattactgatgccttaaagaaggtcttcggggaacacaaggcaaacgaccggatggtgtccggtgcctatcgccaggaattcggcgagagtaaggaaataacctctgccatcaaaagagtacataaattcatggagagggaggggagaaggccacggctgctcgttgcgaagatgggacaggatggccatgaccgcggcgcgaaggtgattgcaacggggtttgcggatctgggctttgacgttgacatcggaccactgttccagaccccgcgcgaggtggcccagcaggcggtagatgccgatgttcatgctgtgggcatcagtacgctggccgccggccacaagaccctggtgccagagcttattaaggagctaaactcgttgggcagacccgacattctggtcatgtgcggcggtgtcattccgcctcaagattacgaattcttgttcgaagttggggtgtccaacgtatttggaccaggtacaagaatccctaaggcagccgtgcaggtactggatgacattgagaagtgtttagagaagaaacagcagtcagtctag

SEQ ID NO: 3923 - DNA, 594 bp, synthetic construct
  misc_feature 1..594: note = source = /note="Description of Artificial Sequence: Synthetic coding sequence"
  source 1..594: mol_type = other DNA
acccggtacctggcccggtgcaccgtgggcgagatcaccgacgccttgaaaaaagtctttggcgagcacaaggccaacgacaggatggtctcgggtgcttatagacaggaattcggtgagagtaaggagattacatcggctatcaagcgggtgcacaaattcatggaaagagaaggacggcggcctcgactgctggtggcgaaaatgggacaggatgggcatgataggggggctaaagtcattgccacaggattcgctgatctggggtttgacgtggacattggtcctctctttcaaactcctcgcgaagtggcccagcaagctgtagacgccgacgtgcacgctgtgggtatttcaactctggctgcaggccataaaacacttgtccctgagctgattaaggaattaaattctctgggtagacccgatatactggtgatgtgtggcggtgtgatccccccacaagactatgagtttctgtttgaagtgggtgtgtcaaacgtgtttgggccaggaacaagaatcccaaaagcagccgtacaggtattagatgacattgaaaagtgtctggaaaaaaagcagcagtcagtgtag

SEQ ID NO: 3924 - DNA, 2685 bp, synthetic construct
  misc_feature 1..2685: note = source = /note="Description of Artificial Sequence: Synthetic coding sequence"
  source 1..2685: mol_type = other DNA
atgatcctgctggccgtgctgttcctgtgcttcatcagcagctactcggcctcagtgaaaggacataccactgggctgtccctaaataatgatcggctctacaaattgacctactccacagaggtgctgttggatagaggaaagggcaagctgcaggattctgtcgggtatagaattagtagtaacgtggatgttgccctcctgtggagaaatcctgacggagacgatgaccagcttatacagatcaccatgaaagatgtgaacgtggagaatgtaaaccagcagagaggggaaaaaagcatattcaagggcaagtccccttctaaaattatgggtaaagagaatcttgaagcactccagaggccaaccctcctgcatcttattcatggcaaggtgaaggaattctatagttaccagaacgaggccgtcgccattgagaatattaagcgaggacttgcctccctcttccagacccagctgagttcaggcaccacaaacgaggtggacatctcgggcaactgtaaagttacttaccaggcccaccaggataaggtgattaaaatcaaggcacttgacagctgcaagatcgcacgcagcgggtttacaacacccaatcaggtgctcggcgtcagttcaaaggcaacaagcgtgacaacctacaagattgaggattccttcgtgattgccgtcctggctgaggaaacccacaattttggtctaaacttcttacaaaccatcaaaggaaagattgtttctaaacagaaactcgagctgaagactaccgaggcaggaccgagactgatgagcggtaagcaggccgctgccatcattaaagctgtagattccaaatacactgccatccccatagtgggccaagtttttcagtcacattgcaaggggtgcccgagcctgagcgagctatggcgctccacccgcaaatatctgcagcccgacaaccttagcaaagccgaagcagttagaaatttcttggcatttatccagcacttgcggaccgctaagaaggaagagatccttcagattttgaaaatggagaacaaggaagtattacctcaattggtggacgcagtcacgtcggctcagacatcagacagcctggaggctatccttgatttcttggatttcaaatctgacagcagcattattctgcaggagcgctttctttatgcctgcggcttcgccagtcatcctaacgaggagttgctccgcgcgcttatttccaagttcaagggatctatcggaagcagcgacatcagggaaaccgtgatgattattactgggacgcttgtcaggaagctatgccagaacgagggctgtaaattgaaagcagtagttgaggccaagaagctcatcctgggagggctcgaaaaagctgaaaaaaaggaagatactaggatgtatctgctcgccctgaagaatgctctcctacccgagggcatcccgagtttactgaaatacgccgaggctggtgaggggcctatctcacatctggccacgaccgctcttcaaagatacgacttgcccttcattacagacgaagtgaagaaaacactcaatcgtatctaccatcagaatcggaaagtgcatgaaaagaccgttcgtactgccgctgccgcaatcattctgaacaataacccttcctacatggacgtgaaaaacatcctactgtcgattggggaattaccacaggaaatgaacaaatacatgcttgccatagtgcaggatatcctaagattcgaaatgcctgcctccaaaatcgtccggagagtgctaaaggagatggtagcacacaactatgatcgattttctaggagcggatccagcagtgcctatactggctatattgaaagatccccgcgatcagcttcaacctatagcctggacatactgtactcaggaagcggaatcctccggaggtctaacttgaatatatttcagtacatcggcaaagctggccttcacggatcacaagtggtgatcgaggcccagggtctggaagctctgatagccgcgacccccgacgaaggggaggaaaatctagattcttatgcagggatgagtgccattctgtttgacgtgcagttgcggcccgttactttttttaacggttactctgatcttatgtcaaagatgctgtctgcatctggggaccccatttcagtcgtgaagggattaattttactcatcgatcacagccaggagctgcagctccagtccggcctgaaggccaatatcgaagtgcaaggagggttggccatcgacatctccggagcgatggaatttagtttgtggtatcgggagtcaaaaacacgggtcaaaaatcgcgtcacagtggtaatcacaacagacatcactgtcgattccagctttgtgaaggcagggctggaaacgtcaaccgaaactgaggctggactcgagtttattagtactgttcaattctctcagtacccttttttggtatgcatgcagatggacaaggatgaggccccgtttaggcagtttgaaaagaagtatgaaagactgtccacaggaaggggctacgttagccagaagcgaaaggagtccgttcttgccggttgcgagtttccccttcaccaggagaactcagagatgtgcaaagtcgtattcgccccccaaccagatagtaccagcagcggatggttctag

SEQ ID NO: 3925 - DNA, 2685 bp, synthetic construct
  misc_feature 1..2685: note = source = /note="Description of Artificial Sequence: Synthetic coding sequence"
  source 1..2685: mol_type = other DNA
atgatcctgctggccgtgctgttcctgtgcttcatcagcagctactctgcatcagtcaaaggacacacgactgggctgagcctgaacaacgataggctatataagcttacatatagcaccgaagttcttctggatcgtgggaaaggcaagctgcaagattctgtagggtaccggatttcatccaatgttgatgtggctttgctgtggagaaaccccgatggagatgacgatcagctgattcagattaccatgaaggatgtgaatgtggaaaacgtgaatcagcagagaggcgagaagagtattttcaaggggaagtccccttcaaagattatggggaaggagaacctggaggctctgcagcggcctaccctattgcacctgatacacggcaaagtgaaggaattttactcgtatcagaacgaggcagtagccatcgagaacataaaaaggggactcgcatctctgtttcagacacagctatcttcaggaactactaacgaggtggatataagcggaaactgtaaagtgacttaccaggcacatcaagacaaggtcataaagatcaaggccctcgatagttgcaagattgcaagatctgggtttaccacacccaatcaagttctgggcgtcagctcgaaagccacgtcagtgactacctacaagatcgaagactccttcgtgatcgctgtgttggccgaggagacgcataacttcggtctgaacttcctccagacgattaagggcaaaattgttagtaagcagaagctcgaactgaaaaccaccgaggctggcccgaggctcatgtcagggaagcaagccgccgcaatcattaaagccgtggatagcaagtatacagcaatcccaatcgtaggtcaggtcttccagtcccattgcaagggatgcccctccctgtcagagctctggcggtccacccggaaatatctgcagcccgataacctctccaaggcggaggctgtgcggaactttttggcattcatccagcatttgcgaaccgcaaagaaggaggagattttgcagatactgaaaatggagaacaaggaggtgttgcctcaacttgttgatgcagtcactagtgcccagacttcagactcgctcgaagctatcctcgattttctggacttcaaatcagattcatcaattatactgcaggagcggttcctgtatgcttgcgggttcgcctctcatcccaacgaagaattacttcgggcactaatttcgaagtttaagggctctattggcagctccgacatccgggagaccgtcatgataatcaccggcacccttgttcggaaactgtgtcagaacgagggctgcaagctcaaagctgtagtggaggccaagaagttaatactgggtggcttagagaaggctgagaagaaagaggacacacgcatgtacctgctcgctctaaaaaatgcccttttgcccgaaggcatcccatcactattgaagtacgccgaggctggcgagggaccaatctctcatttggcgacaaccgctctgcagaggtatgacctgccatttattaccgatgaggtaaaaaagactttgaatcggatttatcaccagaaccgcaaggtgcacgagaagactgtgagaaccgccgccgcagcgattattctgaacaacaatcctagctacatggatgttaagaacattttgctgagcatcggcgagttgccacaagaaatgaacaagtacatgctagctattgttcaggacatattacggttcgaaatgcctgcgagcaaaatcgtcagacgggtcctgaaggagatggtagcacacaattacgacagattcagccggagtggtagctccagtgcttatactggatacattgaaaggtccccccgctcggcctcaacctactcactggatatattgtacagtggctctggcattttgcgaaggtcaaacttgaacattttccagtatatcggcaaagcaggcttacacgggagccaggtcgttattgaggcccaggggcttgaagcactcattgctgcaacacccgatgagggcgaagagaatttggacagttacgcaggaatgtcggcaattctgttcgacgtgcagttaaggcctgtgaccttcttcaacggttactccgacctgatgagtaagatgctatcagcctccggagacccaatctccgttgttaaggggctgattctcctcatcgatcacagtcaggagctccaacttcagagtggcttaaaggctaacattgaagtacagggcggcctagccatagacatcagcggagccatggagttctccctttggtatcgggaaagcaagacacgggtaaaaaaccgagtgacagtggtgatcaccaccgatattactgtggacagctccttcgtaaaggcaggcctggagacctccaccgaaactgaggcaggtctggagtttatctctactgtccagttcagtcagtatccatttcttgtgtgtatgcagatggataaagatgaggcaccttttcgacagtttgaaaaaaaatacgagagactgagcactggacgtgggtatgtctcacagaaaagaaaggagagcgtgttggcagggtgtgagtttccactgcatcaggaaaactccgagatgtgcaaggtggtattcgcaccccagcccgatagtacatcctcaggctggttctag

SEQ ID NO: 3926 - DNA, 537 bp, synthetic construct
  misc_feature 1..537: note = source = /note="Description of Artificial Sequence: Synthetic coding sequence"
  source 1..537: mol_type = other DNA
atggcccgggcccccctgcggcccgagaacaccatcgtgcggggctctgccaatcaatgccaggacacataccgggcagaggagttgacaggtcacactaccggcctgagcctgaataatgatagactctataagctgacatattccactgaggtgctgcttgaccggggcaaagggaagttgcaggacagcgtggggtaccggattagctccaacgtcgacgtcgctctgctatggaggaatcctgatggggacgatgaccagctgattcagatcactatgaaggacgtcaatgtggagaacgtcaatcaacagagaggggagaaatctattttcaagggcaaaagcccttcaaagattatgggcaaggagaacctcgaggccctccagagacccacactgctgcatctgattcacggcaaggtaaaagaattctactcttatcaaaatgaggcagtggctattgaaaatatcaagagggggctagctagcctgttccagacccaactgagctccggcaccactaatgaggtgtag

SEQ ID NO: 3927 - DNA, 1551 bp, synthetic construct
  misc_feature 1..1551: note = source = /note="Description of Artificial Sequence: Synthetic coding sequence"
  source 1..1551: mol_type = other DNA
atgatcctgctggccgtgctgttcctgtgcttcatcagcagctactcggcaagtgtcaaaggccatactactggcctgtctctgaacaacgatcggttgtataaactgacctacagtacagaggttctactagatagaggtaaaggcaaactgcaggactccgtgggataccgcatatctagcaatgtggatgtggctctcttgtggaggaatccagacggggatgacgaccaacttatccagatcacaatgaaagatgtcaacgttgagaacgtgaaccagcagcggggagaaaaatccatatttaaaggaaagagcccttcgaagataatgggaaaagagaacttagaggcgctgcagcgtcccactctgctgcatctcatccacggcaaggtgaaagaattctattcctaccaaaatgaagccgtagcaatagagaacataaaaagaggactggcttcgctcttccagacgcagttatcaagcggtacaaccaacgaagtggacataagtgggaattgcaaagtaacttatcaggcgcatcaggacaaggtgattaagattaaagcattagattcctgtaaaattgccagaagtggcttcaccacacctaaccaggtactgggggtctcaagcaaggcaacttctgtaaccacatacaagattgaagatagctttgttatcgccgtcttggcagaggagactcataactttggcttgaattttttgcagacgatcaagggcaagatcgtctctaaacagaagctggaacttaaaacgactgaggctgggccacgactgatgtcagggaaacaagctgccgccatcatcaaggcggtggactcaaaatatactgccatccctatcgttgggcaggtcttccaatcgcattgcaaaggctgtccatccctgagtgagctgtggcgaagtacgagaaaatatctgcagcctgacaacctttctaaagccgaagccgttcgcaattttctagcttttatccagcatctccgtacagccaagaaagaggaaatcttacagattctaaagatggagaacaaagaagttctcccgcagctcgtggacgccgttacaagcgcacagacaagtgactccttggaggccatactagactttctcgactttaagtcagattcctcgatcatcttacaggaacgctttctatacgcttgtggattcgcaagccaccctaacgaagagctgctgagggctctgatttctaagtttaaaggaagcatcgggagttcagatataagagagacagtcatgatcatcacaggaaccctggtaaggaaactgtgtcagaacgaaggttgtaagctgaaggccgtagtggaagctaagaaactgatactgggcgggctggaaaaagccgagaaaaaagaggacacccgcatgtatctgttggctctcaagaatgccctcttacctgaaggcatcccatccctgctgaagtacgccgaggcaggagagggtccaatctctcatctcgccacgaccgcactccagaggtacgatctgttccataactag

SEQ ID NO: 3928 - DNA, 3771 bp, synthetic construct
  misc_feature 1..3771: note = source = /note="Description of Artificial Sequence: Synthetic coding sequence"
  source 1..3771: mol_type = other DNA
atgctgttcaagctgctgcagcggcagacctacacctgcctgagccatcgttatgggctctatgtgtgtttcctcggggttgtcgtaaccattgtgtcagcctttcagtttggtgaagtcgtgttagagtggagcagggatcaatatcatgtgttgttcgactcctatcgcgacaacatcgccggtaagtcatttcaaaacagattgtgcctccctatgccaattgatgtggtatacacatgggtcaatggaactgatctagaacttctaaaagaactacagcaggttcgggaacagatggaggaggagcaaaaggcgatgagagagattctaggcaaaaataccacagagccaactaagaagtctgagaaacagttagagtgtttgcttacacattgcattaaagtgccaatgctggtcttggaccccgcgctccccgctaacatcaccctgaaggaccttccgtcactgtatccctcattccactctgccagtgacatctttaatgtggccaagccgaaaaatccaagcactaacgtgagtgtcgtcgtcttcgattccactaaagatgtggaagatgcccactccggcttgttgaaagggaatagccggcagaccgtgtggcggggctacttgacaacagacaaggaggtaccagggttagtgctcatgcaagatctggcttttctgagcgggtttcccccaaccttcaaagaaaccaaccagctgaaaactaaattgcccgagaacttgtcaagtaaagttaaactcctccagctgtattcggaagcttctgtggctctgctgaaactgaacaacccgaaagacttccaggagctgaataaacagaccaagaagaacatgacaatcgatgggaaggagttaaccatcagccctgcctacctcctctgggacctttccgctattagtcaatctaagcaagatgaagatatctcggctagtcgctttgaagataatgaagagctgcgttatagccttcgttctattgaacgccatgccccctgggtccgcaatatctttattgtcaccaacgggcagattccaagttggctgaatctcgacaatccgcgggtgacgatcgtcacccaccaagacgtcttccgcaacctgtcccatctgccaactttctccagtccagctatcgagagtcacatccatcgcatcgagggcctgagccagaaattcatctatctcaacgatgatgtaatgttcggaaaggacgtgtggccagatgacttttacagtcacagcaagggccagaaagtttatctgacatggcccgtccccaactgtgccgaggggtgccccggttcctggatcaaagatggttattgtgataaggcctgtaacaactctgcatgtgattgggatggtggagactgttctggaaatagtggtggctctaggtacatcgccggaggcggaggcaccggttcaattggcgtcggccagccctggcagtttggcggcgggattaatagcgtgagctactgcaatcagggatgtgccaatagttggctggctgataaattttgtgatcaggcttgcaatgtgctatcgtgcggttttgacgcaggagattgtggtcaagaccatttccatgagttgtacaaagtcattctactgccaaaccaaacacactatattatcccgaagggcgagtgccttccttatttctcattcgcagaggtggcaaaaagaggagttgagggcgcgtattccgataatccaatcatccgccatgcctccattgcaaataagtggaagaccatccatctcattatgcacagcggcatgaacgctaccaccattcatttcaatctgacttttcaaaacacgaacgacgaggaattcaagatgcagatcaccgtggaggtcgatacaagggaggggccaaagctaaactccacagctcagaaggggtacgaaaatctggtttcgcctatcacgctcttgccagaagctgaaatactctttgaagacattccgaaggagaagagattcccaaagttcaaacgccatgacgttaatagcacaaggcgcgcccaggaggaagtgaagatcccgttagtgaacataagtcttctccctaaggacgcccagctgtccctaaatactctggatctgcagttggaacatggcgacattacgctcaaagggtacaatcttagtaagagcgctctgttgcgctctttcttgatgaatagccaacacgctaaaattaaaaaccaggcaattattaccgacgaaactaatgattctctcgtcgccccccaggagaaacaagtgcataagagcatcttgccaaactcactgggagttagtgagcggctgcagcgtctgactttccccgcagttagtgtcaaagtgaacggccacgaccagggccagaatccaccattagacttggaaacaacagctcgtttcagggtggagacacatactcagaagactatcggtggcaacgtaacaaaagaaaaaccacctagcctcattgttccattggagagtcagatgactaaagagaaaaaaatcaccggaaaagagaaggaaaacagccgcatggaggaaaatgccgagaaccatatcggggttacagaggtgctgctgggtcggaaactccagcactataccgatagctaccttgggttcctgccgtgggaaaaaaagaagtattttcaggatctccttgacgaggaggaatcactgaaaacccagctcgcatatttcacagactcaaaaaacacgggacgccagctaaaggatacgtttgccgacagcctgcggtacgtgaataaaattctgaactcgaaatttgggttcactagccgtaaggttccggcccatatgccacacatgatcgaccgcatagtgatgcaggagctgcaggacatgtttcccgaggagttcgacaaaacatcctttcataaggtgagacatagtgaggatatgcaattcgccttctcatacttctactatttgatgtccgcagtccaaccactgaacatctcacaagtgttcgacgaggtagatacagaccagagcggtgtgctgtcagaccgtgagataagaactctggcaactcggatacacgagctgccactgtctttacaggacttgacaggcctggaacacatgcttatcaactgttccaaaatgttgcccgctgatattacacagctcaataatataccacccacacaagaaagctattatgatccaaatctccccccggtaacaaagtcgctcgttaccaattgcaagccagtcacagacaagattcacaaagcttacaaagacaaaaataaatatcgctttgaaattatgggggaagaagagatagcgtttaaaatgataagaacaaacgtctcgcatgtggtaggccagctcgacgatattcggaagaacccgaggaagtttgtgtgtctcaatgacaatatcgaccacaaccacaaggacgctcagacggtgaaagcagtgctgcgcgacttttacgagtcgatgttccctatacccagtcaattcgaattacccagagagtatagaaatcgcttcttgcacatgcatgaattacaggaatggcgggcctatagggacaaattgaagttctggacccattgtgttctcgcaaccctcattatgtttacgattttttcgttcttcgccgagcagctgatcgcactgaagaggaaaatcttccctagaagaaggatacacaaggaagcatctcctaatagaatcagagtgtag

SEQ ID NO: 3929 - DNA, 1473 bp, synthetic construct
  misc_feature 1..1473: note = source = /note="Description of Artificial Sequence: Synthetic coding sequence"
  source 1..1473: mol_type = other DNA
atgctgttcaagctgctgcagcggcagacctacacctgcctgagccaccgatatgggctgtacgtgtgcttcttaggcgttgtcgtcaccattgtgtcggcattccagtttggcgaagttgtattagagtggagccgcgaccagtaccacgtgctattcgatagttatcgggataacatagcaggcaaaagcttccagaataggctgtgtctccctatgcccatcgatgtggtatacacttgggttaacggcaccgacctagaactgctgaaagaactccagcaagtgcgggagcaaatggaggaagaacagaaggcaatgcgcgagatcctgggaaaaaatacaaccgaaccaactaagaagagtgagaaacagttagaatgtctgctgacccactgtataaaggtgcctatgcttgtactggatccagcactgccagccaatattacccttaaggaccttcctagcctgtatccaagtttccattcagcctccgatatatttaacgtggccaagcctaaaaatcccagtacgaatgtaagcgtcgtggttttcgattccacaaaggacgtggaggacgcccattctgggctcctcaaggggaactcccggcagacagtatggcggggctatttgactaccgataaggaagtcccaggccttgttctgatgcaggatttggcctttctttccggttttcctcccactttcaaggagacaaaccaactgaagaccaagttgcccgaaaatttgtcgtccaaagtgaagttactccagctatacagcgaggcatctgtggctctccttaagctcaacaatccaaaagacttccaggagctcaacaaacagacaaaaaagaatatgactatcgacggcaaggaactgactatctcacccgcttatctgttatgggacctgagcgctatctcacagagcaagcaggacgaggacattagcgccagcaggtttgaggataacgaggaactccgatattccttgcgctccatcgagcggcacgcaccctgggtccgtaacatctttatagtgaccaacggccagatcccctcatggctcaacctggataaccctcgggtgacaatcgtaacccaccaagatgtgttccgaaatctatctcatcttcccaccttctcaagccctgccatcgaatcccatattcataggattgagggcctgtcccaaaaatttatctacctgaatgatgacgtcatgtttgggaaggatgtgtggcctgacgacttttacagccacagtaaaggacagaaggtttatttgacgtggccagtgccaaattgcgcggaggggtgcccaggcagctggattaaagatggttactgcgacaaggcctgcaacaattccgcctgtgactgggacggtggagattgttccggcaaagatgtgctcaattgcaacagctttatctttatggagtattttcttctgaatcattattag

SEQ ID NO: 3930 - DNA, 1605 bp, synthetic construct
  misc_feature 1..1605: note = source = /note="Description of Artificial Sequence: Synthetic coding sequence"
  source 1..1605: mol_type = other DNA
atggccaccgccctgatggccgtggtgctgcgggccgccgccgtggcaccaagactgaggggccgcggcggaacagggggagcacgcagactgtcttgtggagctagaagacgggcagcacgcggaacctcccccgggaggaggctatcgaccgcttggtcccaaccacagccaccccctgaagagtacgccggagcggacgatgtgtcccagtctccagtggccgaggagccttcctgggtcccatccccacgaccacctgtacctcacgagagtccagagcccccttccggaaggtccctggtgcagcgcgacatccaggcttttctcaaccagtgtggcgcctccccaggggaagccagacactggctcacgcagttccaaacatgtcatcacagtgcggataaacccttcgccgttattgaagtggacgaagaagtcttaaagtgccaacaaggcgtatcaagtctggcttttgctttggccttcctgcaaagaatggacatgaagccactggtcgtcctggggctccccgctccgacagcaccgtcagggtgtctgtcattctgggaagccaaagcacagctggctaaatcatgtaaagtcctcgtggacgcacttagacacaacgcagccgctgccgtaccgttcttcggtggcggttcagtacttcgggctgcagaaccagcaccacacgcctcctacggaggtatcgtgtctgtggaaacagacctgcttcagtggtgcttagagtcaggctcaattccaatcctctgtcccatcggagaaacagccgctcgcagatcggtgttgctagattcgctggaggtgaccgcttcattagcgaaggccctcaggcctacaaagatcatcttcctgaacaatacaggtgggttgcgtgattctagtcataaagttctctctaacgttaaccttcctgcagatctggatctggtgtgcaacgctgaatgggttagcacgaaagagcggcagcaaatgaggttgattgtggacgtgctttcccgcctccctcaccatagcagtgccgttattactgccgccagtacactcctgaccgagctgtttagcaataaaggtagtggcacgctattcaagaacgcagaaagaatgctccgagtaagatcccttgacaaacttgaccagggccgcctggttgacctggtgaacgcttcattcggcaagaaactgagagatgactacctggcttctctgcggcctcggttacattctatctacgtatccgaaggctacaatgctgcagccattctgactatggaaccagtgctcgggggaaccccataccttgataagtttgtcgtcagcagctcaagacagggacagggatctgggcagatgctgtgggaatgccttcgtcgtgacttgcagaccctcttttggcgctcacgggtgactaatcccattaacccttggtacttcaagcattcagatggcagtttctctaataagcagtggatttttttctggtttgggctagctgacatcagggattcctacgaacttgtcaatcacgcaaagggtttacctgactcattccacaagccagcctctgatcctgggagctag

SEQ ID NO: 3931 - DNA, 1107 bp, synthetic construct
  misc_feature 1..1107: note = source = /note="Description of Artificial Sequence: Synthetic coding sequence"
  source 1..1107: mol_type = other DNA
atggacatgaagcccctggtggtgctgggcctgcccgcccccaccgcgccaagcggctgcctttccttctgggaagccaaagctcaactggctaaatcatgtaaagtgctggtagatgcgctgaggcacaacgctgccgccgccgtgccattctttggcggggggtccgtactcagggcagcggagcctgcacctcacgcctcctacggcggcatcgtttctgtcgagactgatcttttgcagtggtgcctggaaagtggcagtattccaatactatgtcctattggggagactgcagcccggcggagcgtgcttctcgactccttagaggtgactgcatcgttagccaaggccttgaggccaactaagattatcttcttgaataacacagggggcctccgagactccagccataaggtgttgtcaaacgtcaaccttccagcagatctggatctcgtatgcaatgccgaatgggtgtcaacgaaggagagacagcagatgcggctcatcgtggatgtcttgtcccgactaccacaccattcctccgcagttattacagccgcttccacactactaacggagctcttcagtaacaaagggtcaggaacgttattcaaaaatgcagaaaggatgctccgggtaaggtctctggacaagctggatcagggacgactggtcgatcttgtaaatgcatccttcggaaaaaagcttcgcgacgactatcttgcaagcctcaggccccggctgcacagtatttatgtcagcgaaggatataacgcggcagctatattaactatggaaccagtcctaggaggaacaccatacctggataagtttgtggtgtcatcgtccaggcagggccagggctcgggtcagatgctctgggaatgtctcagacgtgacctgcagactttgttctggcgctcccgcgtcactaatccaatcaacccgtggtatttcaaacattccgacggatcctttagcaacaagcagtggatctttttctggtttggcttggctgatatccgcgactcctacgaattggttaaccacgccaaaggactgcccgacagttttcacaagccggcctccgacccgggtagttag

SEQ ID NO: 3932 - DNA, 1188 bp, synthetic construct
  misc_feature 1..1188: note = source = /note="Description of Artificial Sequence: Synthetic coding sequence"
  source 1..1188: mol_type = other DNA
atgcccggccggagctgcgtggccctggtgctgctggccgccgccgtctcctgcgcggtcgcacaacacgcccccccttggaccgaggattgccggaaatccacgtacccacctagcggacccacctataggggtgctgtcccttggtacacgattaacttagacttgcccccatacaagaggtggcacgaattgatgctcgacaaagcacccgtgttgaaggtaatcgtgaactccttgaaaaacatgatcaatacctttgtaccttcaggaaaaatcatgcaggtagtcgatgagaaactacccggattgttggggaattttcctggccccttcgaggaggagatgaaaggaattgctgccgtgaccgatatccccctcggagagattatttccttcaatatcttttacgagctcttcacaatttgcacctcaatagtcgcggaagacaagaagggacacctgattcacggacgtaacatggattttggagtattcttgggttggaatattaataatgatacttgggtgattaccgagcagctgaaacctttgactgtgaacctcgacttccagcggaataacaaaacagttttcaaggcgagtagtttcgccggatacgtagggatgctcaccggttttaagcccggactgttctccttgacccttaacgagaggttcagcattaacggcggatatctcggcatccttgagtggatcctcggtaaaaaagacgtgatgtggatcggcttcctgacacgcactgtgttggagaacagcacatcatacgaagaggccaaaaacctactgacaaagactaagattctggcacctgcctattttatcttaggcgggaaccaaagcggagagggctgtgtgatcacccgagacagaaaggaaagtcttgacgtctacgagctcgacgcaaagcagggacgatggtacgtggtccaaactaattatgatcgctggaaacatcccttttttttggacgaccggaggacacctgctaaaatgtgtctaaatcgcacctcacaggagaacatcagcttcgaaacaatgtacgatgtcctgtcgacgaagcctgtcttgaataaattgactgtgtataccactctgatcgacgtcacgaagggacagtttgagacgtatttgagggactgtccagatccttgtatcggctggtag

SEQ ID NO: 3933 - DNA, 1170 bp, synthetic construct
  misc_feature 1..1170: note = source = /note="Description of Artificial Sequence: Synthetic coding sequence"
  source 1..1170: mol_type = other DNA
atgaactgctgcatcggcctgggcgagaaggcccggggcagccacagagctagttacccatccctctccgcgctgtttaccgaagcaagtatcctcggctttggcagcttcgccgtcaaagctcaatggacagaagattgtcggaagagtacttatcccccctccgggcccacagtgtttcctgcagttatccgctatagaggggctgtgccatggtatacaattaatctagacctgcctccatacaagcgatggcatgaattgatgctagataaggcgccagtccctggcttgctggggaatttccctggacccttcgaggaggaaatgaaaggcattgctgccgtaacggacatccccttgggcgaaataatatctttcaatatcttttacgagttgttcacgatttgcactagcatcgttgccgaggataagaagggccatctcatacacggaagaaatatggacttcggagtctttctcggctggaatataaataacgacacctgggttatcaccgagcaactgaagcctctcaccgtaaatctggatttccaaagaaataacaaaacagttttcaaagcatccagctttgccggctacgtgggcatgttgactggattcaaaccagggctgttcagccttactcttaatgaacgcttctcaattaacggaggctatctgggaattctggagtggatcctggggaaaaaggacgtgatgtggatcgggtttctgactcgcacggttctggaaaacagcacttcctatgaagaagccaaaaacttgctgaccaaaaccaagatcctggccccagcttacttcattctcggcggcaaccagagtggtgaaggctgtgtaattaccagagatcggaaagaatccctagacgtttatgaactggatgccaagcagggcagatggtatgtggttcagacaaattacgatagatggaagcaccctttctttctggacgaccggcgcacgccggccaaaatgtgcctgaaccgcaccagccaggagaatatatcttttgagacaatgtacgatgtgctgagcactaaaccagtcctgaataagctgacggtttacacaacactaatcgatgtgaccaagggccagttcgagacgtatttacgcgattgtccagatccatgtattggatggtag

SEQ ID NO: 3934 - DNA, 1236 bp, synthetic construct
  misc_feature 1..1236: note = source = /note="Description of Artificial Sequence: Synthetic coding sequence"
  source 1..1236: mol_type = other DNA
atgaactgctgcatcggcctgggcgagaaggcccggggcagccaccgggcctcctaccccagcctgtctgccttattcactgaggcgtctatactaggtttcggctcctttgctgtgaaagcccagtggaccgaagactgcagaaagtctacatacccaccttcgggcccaacataccgtggagcagttccatggtacacaataaacctggaccttccaccatacaagaggtggcatgaattaatgctggacaaagcccctgtcctcaaggtaattgtgaattctctgaaaaacatgattaatacttttgtacccagcggtaaaattatgcaagttgtggatgaaaagctgccaggcctgctgggaaattttccggggccgtttgaagaggaaatgaagggaatcgctgccgtgacagacattccccttggagagatcatctcttttaacatcttctacgagctattcaccatctgtacctcaattgtggccgaagacaaaaaaggacacttgatccacggaagaaacatggactttggggtgtttctcggctggaatatcaacaatgatacgtgggtgataaccgagcagttaaaacccctcactgtaaatcttgacttccaacggaataacaaaacagtattcaaggcaagctcttttgctgggtacgttggaatgctgaccgggtttaaacctggacttttttctttgaccttgaacgaacgtttttcaatcaatggcggatatctgggcattctcgagtggatcctagggaaaaaggatgtgatgtggattggtttcctgactcgcactgtgctggaaaattccacgtcatacgaagaagccaagaatttgctgacaaagacgaaaattctggcccctgcttactttattctgggcggtaaccagagcggcgagggatgtgtgattacccgagatcgcaaggaatcccttgatgtgtacgaattggatgccaagcagggcagatggtatgtggttcagactaactacgatagatggaaacacccattcttcttggatgatcggagaacccccgccaagatgtgtctcaacagaacatcccaggagaacatttctttcgagaccatgtatgatgttttgtccactaagcctgtcctgaataagcttaccgtgtacacaacactcatagatgtgaccaagggccagttcgaaacgtatctacgcgactgccccgacccgtgcatcggttggtag

SEQ ID NO: 3935 - DNA, 918 bp, synthetic construct
  misc_feature 1..918: note = source = /note="Description of Artificial Sequence: Synthetic coding sequence"
  source 1..918: mol_type = other DNA
atgctggacaaggcccccgtgctgaaggtgatcgtgaacagcctgaagaatatgataaacacattcgtaccaagtggcaagatcatgcaggtagtcgatgaaaagttgccaggcctgctggggaacttccctggccccttcgaggaggagatgaagggtattgctgctgtgacggacatccctttgggccacctgatacacggtaggaatatggatttcggtgtgttcctcgggtggaacatcaataatgacacctgggttattaccgagcagcttaagccactaaccgtcaacctggactttcaaagaaacaacaagaccgtcttcaaggccagtagctttgcgggctatgtgggcatgctgacggggttcaaaccgggcctcttttctctgactctcaacgagcggttcagtattaatggtgggtacctcggaatccttgaatggatacttggaaagaaagatgttatgtggattggattccttacacggactgtgctggagaatagcacctcctacgaggaggccaagaacctgcttaccaaaacgaaaatcctggctccagcgtattttatcttaggcggcaaccagagcggtgagggctgtgtgatcaccagggaccggaaagaatcactagacgtctatgaactggacgccaaacaagggagatggtatgtcgtgcaaaccaactatgatcggtggaaacacccttttttcctcgacgacaggcgaacccccgcaaaaatgtgcttaaacaggacctctcaggagaacataagttttgaaactatgtacgacgtgttatcaactaaaccagtgctcaataagttaaccgtatatacaactctcattgacgtgaccaagggacagtttgagacttacctgagagactgtcctgatccttgcatcggctggtag

SEQ ID NO: 3936 - DNA, 1113 bp, synthetic construct
  misc_feature 1..1113: note = source = /note="Description of Artificial Sequence: Synthetic coding sequence"
  source 1..1113: mol_type = other DNA
atgcccggccggagctgcgtggccctggtgctgctggccgccgccgtatcatgcgccgtggcacaacacgcccctccatggacagaagattgccgaaagagtacctatcctccttccggtcctacttaccgcggcgctgtgccttggtatacgattaatctggatttgcccccctataaaagatggcacgaacttatgcttgacaaagctcccgtcttgaaagtcattgtaaactctctcaagaacatgattaataccttcgtgcctagcggtaaaattatgcaggttgtggacgagaaacttcctggcctcctgggaaattttcccgggccatttgaggaagaaatgaagggaatcgccgcggtgacggatatcccactcggacacctgattcacggccgtaatatggatttcggcgtgtttctcggctggaacatcaataacgacacttgggtgatcactgaacagctcaagcccctcaccgttaacctggatttccaacggaataacaagactgtgtttaaggcaagtagtttcgcaggatatgtcgggatgctgaccggatttaaaccgggcctgttcagcttgaccttgaatgagagatttagcattaatggaggctatctggggatcctcgagtggattctcggaaaaaaggacgtcatgtggataggattcttgacacgcacagttctggagaactccacctcatacgaggaggccaaaaatctgctcaccaaaacaaaaatcttagcacccgcgtatttcattctgggaggtaaccaaagtggagaggggtgcgtaatcaccagggaccgtaaggaatcacttgacgtgtacgaacttgacgctaaacaaggccgttggtacgtggtgcaaaccaattacgacagatggaagcacccattcttcctggatgaccgacgtacacctgccaagatgtgtcttaacagaacatcacaggagaatatttcctttgagactatgtacgacgttctgtccacgaaaccggtactgaataagctgacggtctataccacgctaattgatgtgaccaaaggacaattcgaaacctatctgcgcgactgcccggacccatgtatcggttggtag

SEQ ID NO: 3937 - DNA, 405 bp, synthetic construct
  misc_feature 1..405: note = source = /note="Description of Artificial Sequence: Synthetic coding sequence"
  source 1..405: mol_type = other DNA
atggacccccagaccgcccccagccgggccctgctgctgctgctgttcttgcacctggccttcttgggggggcgctctcacccccttggttcaccaggctcagccagcgatctcgagactagtggcttgcaagagcagcgtaaccatctgcagggcaagctgtccgaacttcaggtagagcagacgtcgttggaacctctgcaggaatcacctcgccccacaggcgtttggaagtccagagaggtcgctacggaaggaatcagggggcacaggaagatggtcctttacactttgagagctcctagatcccccaaaatggtgcagggaagcggttgttttggaagaaagatggatagaattagtagctcaagcggcctgggatgtaaggttctgagacggcattag

SEQ ID NO: 3938 - DNA, 726 bp, synthetic construct
  misc_feature 1..726: note = source = /note="Description of Artificial Sequence: Synthetic coding sequence"
  source 1..726: mol_type = other DNA
atgagcatgctgttctacaccctgatcaccgccttcctgatcggcattcaagccgagccccattctgagtccaacgtgccagcaggccacactattccacaggcccattggaccaagctacaacattctctagatactgctttgcgtcgggcccgctcagcacctgcagccgcaatagcagcccgcgtcgccggacagacccgcaacataaccgttgatccaagactgttcaagaagagacgcctgagatctccacgggtcctgttctccacacagccaccgcgcgaggcggccgatacacaggacttggattttgaggtcgggggcgccgctccattcaatagaacccatagatccaagcggagtagttcacaccctatcttccacaggggtgagttctctgtgtgcgacagtgtctctgtgtgggtgggtgataaaaccacggctacagatataaaggggaaagaggttatggttctgggggaggtgaatatcaataactccgtgttcaagcagtattttttcgagactaaatgccgcgatccgaatcccgtcgattccggctgtcggggtatcgattcgaaacactggaactcatactgcactaccacacatactttcgtcaaagcgctgactatggatggcaagcaggcggcgtggaggtttatccgcatcgatactgcatgcgtatgtgtgctttcgagaaaggccgtcaggcgtgcctag

SEQ ID NO: 3939 - DNA, 1923 bp, synthetic construct
  misc_feature 1..1923: note = source = /note="Description of Artificial Sequence: Synthetic coding sequence"
  source 1..1923: mol_type = other DNA
atgagcgagcggaaggagggccggggcaagggcaagggcaagaagaaagaacgtggctccggtaaaaaacccgaatctgccgccgggtcacaaagtcctgccctcccccctcggctgaaagagatgaaatctcaggaatcagctgccggaagcaaattggtcctccgttgcgaaacaagtagtgagtactccagcttaaggttcaaatggttcaagaacggaaacgaactgaatcgtaagaataaacctcagaacattaaaatccagaagaaaccaggtaaaagcgagctgaggatcaataaggcctctttagcggacagtggcgaatacatgtgtaaagttatttccaaactcgggaacgattcagcttctgccaacatcactattgtggaatccaacgagattattacggggatgcctgccagtacggaaggcgcgtacgtctcgtccgaatcacccattcgtatttccgtcagcacagaaggagccaatacttcctcttcaacatccacatcaacgaccggaaccagccatctggtgaaatgcgccgagaaagaaaaaaccttttgcgtgaacggtggggagtgcttcatggttaaggatctaagcaatcctagtaggtatctttgtaaatgccagcctgggtttaccggtgcccgatgtacggaaaacgttcctatgaaagtgcagaatcaggaaaaagcagaagagctctaccagaagcgagtactgacaatcactggcatttgcattgccttgttagtggtaggcatcatgtgcgtggtagcgtattgtaagacaaagaagcagcggaaaaaactccacgaccggttacgtcagtcactgcggtcagaaagaaacaacatgatgaacatcgcaaacggaccccaccaccctaatccgcctcctgagaacgtgcagctcgtcaaccaatacgtctcaaagaacgtcatttcttcagaacatattgtggagcgcgaagccgagacatctttttctacaagccactacacttcgactgcccatcattccaccactgtcacccagaccccaagtcacagctggtccaatgggcacaccgagtcaattctgagtgagagtcacagcgttatcgtcatgagttcagtcgaaaactctcgacactcttctcccactggcggcccacgcggaagacttaacggaactggaggcccacgagagtgtaatagttttctacgccacgctagagagacacccgattcctatagggacagccctcactctgaacggtatgtgtcagccatgactacgcccgcacgaatgtctcccgtggacttccacaccccttcttctcccaagtcccccccatcggagatgtcacccccagtgagttccatgactgtgtcaatgccttccatggcggtgtccccgttcatggaggaggagcggccactgcttctggtgacccctcctcggttgagagagaagaaattcgatcatcacccacagcagttcagctcattccaccacaatccggctcatgactcaaacagcctgcccgcatctcccctaaggattgtggaagacgaagaatatgaaacaactcaagaatatgagccagcacaggaacccgtaaaaaaactcgccaacagcagaagagccaagcgaaccaagccaaatgggcacattgccaatagattggaagtggatagcaacacttcgtcacagagctcaaactccgagagtgaaaccgaggacgaacgtgtgggagaagacacacccttcctcggcatccagaatcctttggcggccagcctcgaggctacccccgctttccgtctggccgacagccgaaccaatccggcagggagattcagcacacaagaggaaattcaggctcggttgtccagtgtcatcgccaaccaggatccaatagccgtgtag

SEQ ID NO: 3940 - DNA, 1914 bp, synthetic construct
  misc_feature 1..1914: note = source = /note="Description of Artificial Sequence: Synthetic coding sequence"
  source 1..1914: mol_type = other DNA
atgagcgagcggaaggagggccggggcaagggcaagggcaagaagaaagaaaggggctctggaaagaaacccgaatccgccgcgggttcccaatcgccagctctgcctcccaggttgaaggaaatgaaaagccaggagtccgccgctggttctaagttggtgctaaggtgcgaaacctccagcgagtactcaagtctgaggttcaagtggtttaaaaatggaaacgagttaaataggaaaaataagccacaaaacatcaaaattcagaagaagcccggaaaatcagaactccgaattaataaagccagcctggccgacagcggagagtatatgtgcaaagtaatcagcaaactgggtaacgacagtgcctcggctaatatcactattgtggagagcaatgagattatcacgggtatgccagcgagcacagaaggcgcttacgtgtcttccgagagtcctatcagaattagcgtgagtacagagggggccaacaccagttcaagtacatccacatctaccaccggtacatcacacctcgtcaagtgcgcagagaaggagaagacgttctgtgtcaacgggggagagtgctttatggtcaaagacctctccaacccctcacggtacttgtgtaagtgtcctaacgaattcaccggcgacaggtgccagaattacgtgatggcctctttttataaagctgaggagctgtaccaaaaacgcgtgctcactataaccggaatttgcatcgctcttctggtcgtaggcataatgtgtgtcgtcgcctattgcaagactaagaagcagcggaaaaaactgcacgaccggctgaggcagagcctgagatctgagcgcaataacatgatgaatattgctaacgggccccaccatcctaatccacctccagagaatgtacaacttgtgaaccagtacgtgtctaagaacgttatatcttcagagcacatagtagagagggaagcagaaacatcttttagtacgtcacactatacctctaccgcccatcattccaccacagtcacccagaccccttctcacagttggagtaatgggcataccgaatcgatcctgagcgagagccattcagtgatagtgatgtcaagtgtggaaaactcccgccacagctcccctactggaggcccgaggggtcggctgaatggaacaggcggcccacgcgagtgtaatagctttctgagacacgcccgcgaaacaccagacagctaccgcgactctcctcattctgagcgctacgtgagtgctatgaccacacctgccaggatgagtccggttgactttcatacccccagcagccccaagtcacccccttcagagatgagcccacctgtgagtagtatgaccgtcagcatgccttcaatggccgttagtcctttcatggaggaagagaggccattgctgcttgtgacgcctccacggctgcgggaaaaaaagtttgaccatcatccccagcagttctctagctttcatcacaatcctgcccatgactccaattcgcttcctgcctctccattaagaattgtagaggatgaggagtacgagaccactcaagagtacgagccagcccaggagccagtgaaaaagctggccaactctaggcgggccaaacgtacaaaaccaaatggccatatcgccaatcggctcgaggtggacagcaacacaagttcccagtcctcgaacagcgaatcagaaacagaggacgaaagagtgggcgaagataccccattcctggggatccaaaatcccttagccgcctcgttggaggccacaccggcttttcgcctcgccgattcacggactaatccagcaggacgattttcgactcaagaggagatacaggcccggctatcttctgtgatagcaaatcaggatcccatcgcggtctag

SEQ ID NO: 3941 - DNA, 1836 bp, synthetic construct
  misc_feature 1..1836: note = source = /note="Description of Artificial Sequence: Synthetic coding sequence"
  source 1..1836: mol_type = other DNA
atgagcgagcggaaggagggccggggcaagggcaagggcaagaagaaggagaggggctcagggaaaaagcctgagagcgctgctgggtcacagtctcccgccctgcccccacgcttgaaagagatgaagtcccaggaaagcgcagcaggttccaaactggtgctccggtgcgagactagctcagaatacagctctctccgattcaagtggtttaaaaacggaaatgagctgaaccgaaagaataaaccccagaacataaaaattcaaaaaaagcccgggaagtctgagttacgtattaataaggcctccctagcagactccggagagtatatgtgcaaggttatcagtaagctcgggaacgacagcgcctcagctaacatcacaattgttgaatccaacgcgaccagcacgagtactacaggcacttcgcaccttgtcaaatgtgccgagaaagagaaaaccttctgtgtgaacggaggcgaatgctttatggtgaaagacctgtcaaacccctccaggtacttgtgtaagtgcccgaatgagtttacaggtgatcgatgtcaaaactatgtcatggcctcattttacaaacatctggggatcgagttcatggaggctgaggagctgtatcaaaaacgggtactgacgattaccggtatatgtattgcactccttgtggttggcattatgtgcgtggttgcctattgcaagaccaagaagcagcgcaagaaattgcatgatcgtctgagacaaagcctcagatcggagcgaaacaatatgatgaacatagccaatggtccgcaccaccccaaccccccacccgaaaacgttcagttggtaaatcagtatgtcagtaagaatgtgatcagcagtgagcacattgtggagcgcgaagctgagacgtctttctccacgtcccattatactagcactgcccaccacagtaccacggtgactcagacgcccagccattcctggagcaacgggcacaccgagtccattctctctgaaagtcatagcgttatcgtgatgtcctccgtcgaaaacagtcgccattcctcccccaccggcggtcctcgcgggcgtctcaacggtaccgggggacctcgcgaatgtaacagcttcctgagacatgctcgggagactcccgattcgtatagagatagcccccattcagaaagatacgtctctgccatgaccacccctgctagaatgtcaccggttgacttccatacgccctcaagccccaaatcccccccttcagagatgtccccacccgttagcagtatgacagtgagcatgccttctatggcggtcagccctttcatggaagaagaacggcccttgctcctggtgaccccacctaggctgcgcgaaaagaagtttgatcaccacccccaacagttcagcagtttccatcataatccagcccacgactccaactccttgccggcttcacccttaaggattgtggaggatgaagagtatgaaaccacccaggaatatgagccagctcaggagccggtgaagaagctagctaattccagacgagctaagcgtacaaaacccaacggccacattgccaaccggctggaggttgattccaatacatcttctcagtcttctaattctgagtcagagaccgaagatgagcgcgtcggcgaggacactccattccttgggatccaaaaccctctcgccgcgtctttggaggccactccggcctttagactggcagatagccgcaccaaccccgcaggcagattcagcactcaagaggaaattcaggccagactgtcttccgtgattgccaaccaggaccctatcgctgtatag

SEQ ID NO: 3942 - DNA, 1947 bp, synthetic construct
  misc_feature 1..1947: note = source = /note="Description of Artificial Sequence: Synthetic coding sequence"
  source 1..1947: mol_type = other DNA
atgagcgagcggaaggagggccggggcaagggcaagggcaagaagaaggagcgaggcagtgggaagaagccagaaagcgccgcaggatctcagtcaccggctctgccaccaagactgaaggagatgaaatcgcaggaatcagcagccgggtccaagcttgtcctgagatgcgaaacgtcgtctgaatattccagcctgagatttaaatggtttaaaaacggtaacgagctgaatcggaagaacaaaccccaaaatataaagattcagaagaagcctgggaagtcggagctgaggattaataaggcatccttggctgactcgggggaatatatgtgcaaggtgattagtaagttgggcaacgacagcgcctctgccaatatcactatcgtggagagcaatgaaattatcaccggtatgcccgctagcaccgagggcgcgtatgtgagcagtgaatcaccgatcaggatcagcgtgtctactgagggggctaacacctctagcagcactagcacttccactactggaacatcacatctggtcaaatgtgcagaaaaggagaagaccttctgcgttaatggaggtgagtgctttatggtgaaagacctgtccaatccctcacggtatctatgtaaatgccaacctggatttacaggtgccagatgcactgaaaatgtgcctatgaaggtgcaaaatcaggaaaagcactctggcgaacctttccccgaagccgaggaactgtaccaaaagagagtgctgacaatcacaggcatctgcatcgcactccttgtcgttgggataatgtgtgtcgtagcctattgcaagaccaagaagcagagaaagaaattgcatgaccggctccgacagtccctacgctcagagcggaacaatatgatgaacatagctaacggcccccaccacccaaaccctccaccagaaaacgtgcagttggtgaatcagtacgtctcaaaaaacgttatcagctccgaacacattgtcgaaagagaagccgagactagcttttcaaccagccactacacctcaacagctcatcactccactacggtaactcagactccatctcattcttggtccaacggccacactgaatcaatattgtccgaatcacactccgtcatagtgatgagcagcgtggagaatagtcgacattcaagccccaccggcggcccccggggccgactcaatggaactggcggccccagggagtgtaattctttcctgaggcacgctcgcgagacgcctgactcttacagagattccccccatagcgaacgttatgtgtctgctatgacgacccctgcacgcatgtcccctgtggacttccacacaccttcaagcccaaagagtccgccgtcggagatgagcccccccgtcagctctatgaccgtgtctatgccaagtatggctgtctcgccctttatggaagaggagcgtccactgcttctggtcactcccccacgccttagagaaaagaagtttgaccatcacccccagcaatttagcagctttcaccacaacccggcgcatgacagcaacagcttgccggccagcccactgcgaattgtcgaggatgaggaatatgagaccacgcaggaatacgagccagctcaggagcccgtcaaaaaactggccaactcccggagagccaaaagaactaaacccaacggacacatcgctaatcgccttgaagtggatagtaataccagtagccaatcttccaactctgaaagcgaaactgaagatgaaagggtgggggaagataccccatttctgggcatacagaaccctctggctgcgtctctggaagcaaccccagccttccggctcgctgacagccgcaccaatcctgccggccgctttagtacacaggaggagatacaggcacggctcagcagcgtgattgcaaaccaggatcccatagccgtgtag

SEQ ID NO: 3943 - DNA, 744 bp, synthetic construct
  misc_feature 1..744: note = source = /note="Description of Artificial Sequence: Synthetic coding sequence"
  source 1..744: mol_type = other DNA
atgagcgagcggaaggagggccggggcaagggcaagggcaagaagaaggaaaggggcagcgggaaaaagcccgaatctgctgccgggagccagagtcccgcactgccaccaaggctgaaggagatgaaaagccaggagagtgcagccgggtcgaagcttgtgttaaggtgcgagacatcctcagagtattccagcttgagatttaagtggttcaagaatgggaatgaactaaaccgtaagaataagcctcagaatatcaaaatccagaaaaaaccagggaaaagcgaacttcggatcaataaagcctctctggctgactccggagagtatatgtgtaaggtcatctcaaagctgggaaatgactctgcctcggccaacatcacaattgtggaatccaatgaaataattaccggaatgccagcatctacggagggcgcttatgtcagcagcgaatcccccattcgaatctccgtgagtaccgagggggctaacacctcgagttccacctctacgagcaccacaggcaccagccatctggtgaaatgtgcagagaaagagaaaacgttctgcgtgaacggaggggagtgtttcatggtgaaagacctgtcaaacccttcaaggtacctatgtaaatgtcagccgggatttacaggcgctaggtgcacagaaaatgtcccgatgaaagtacaaaaccaggaaagtgcccaaatgagcctgctggtgatagctgcaaagaccacatag

SEQ ID NO: 3944 - DNA, 1938 bp, synthetic construct
  misc_feature 1..1938: note = source = /note="Description of Artificial Sequence: Synthetic coding sequence"
  source 1..1938: mol_type = other DNA
atgagcgagcggaaggagggccggggcaagggcaagggcaagaagaaagaaagggggagcgggaagaagccggagtccgctgctgggtctcagagcccagcgttgcctcccagactgaaagaaatgaagtcccaggagtccgctgctggttctaagttggtgctcagatgcgaaacatcttccgaatacagcagcttgcggtttaagtggtttaaaaatgggaacgaactgaaccgtaaaaacaaaccccaaaatatcaagatccaaaaaaagcccggtaagagcgaattacgcatcaacaaggcatctctagccgatagcggggagtatatgtgcaaggtaatctcaaaactgggaaacgattccgctagcgccaacattaccattgtcgagtccaacgaaattatcacaggcatgcccgcgtcaacagaaggggcttacgtgtcaagcgagagcccgataaggattagtgtgagtactgagggggctaatacatcctcatccacttcgacctcaactaccgggacctcccacctagtcaagtgtgccgaaaaagaaaagacattctgcgtaaacggcggagaatgtttcatggtgaaagacctgagcaaccctagtcgctacttatgcaaatgcccaaatgagtttaccggagatcgctgtcagaattatgttatggcctctttttataagcacttggggatcgaattcatggaagctgaagagctatatcaaaagcgagtactgacaatcactggcatctgcatcgcactgctggtcgtcggaatcatgtgcgtcgtggcttactgtaagaccaaaaaacagaggaagaaacttcatgacagactccgacagtcattgagaagcgagcgcaacaacatgatgaacatagcaaacggcccacaccacccgaaccctccacctgaaaatgtgcagctggtcaaccagtatgtgagcaaaaacgtcatatcatccgaacatattgtcgagcgcgaggctgagacctccttttcaacatctcactatacatccacggctcaccacagtactactgtgacccaaacccccagccactcttggagtaatgggcacaccgagtctatcctgagcgaatcccattctgtaatagtaatgtcctctgtggagaacagcagacatagctcacccacgggcggccctcgtggcagactcaacggaactggcggccctagagagtgcaacagctttctgcgccatgctcgcgaaactccagacagctacagggactccccacacagtgagaggtacgtctccgccatgaccacccccgctcgaatgtcccctgtagactttcatactcccagctccccgaagagtcctccaagcgagatgtccccaccagtatcatctatgactgtgagcatgccctcaatggccgtctcccccttcatggaagaggagaggccgttgctgctggtaaccccccctaggctcagggagaagaagttcgatcatcatcctcagcagttttcaagttttcatcacaaccccgcccacgactccaattccttgccggcctcccctctgcgaatcgtcgaagacgaagagtatgagaccacccaggagtatgagccagcacaggaacctgttaagaagttggccaattcccgacgggctaagcggaccaagcctaacggtcatattgcaaaccgcctagaggttgacagcaacacatccagccagtcttccaatagtgagagcgagacagaagacgaaagagttggcgaggatacgcccttcctcgggatacagaaccctcttgccgcctctctcgaggccacccctgccttcaggctcgccgactcacggactaatcctgctggtcgcttctctacacaggaggaaatccaggccaggttgtcttcggttattgccaaccaggaccccattgctgtttag

SEQ ID NO: 3945 - DNA, 1923 bp, synthetic construct
  misc_feature 1..1923: note = source = /note="Description of Artificial Sequence: Synthetic coding sequence"
  source 1..1923: mol_type = other DNA
atgagcgagcggaaggagggccggggcaagggcaagggcaagaagaaggaacgaggaagcgggaagaaacccgagtctgcggctggatctcagagtccagcactaccccccagactgaaagagatgaaaagtcaggaatccgcagccggaagtaaacttgttctgaggtgtgagacctcatcagaatacagtagcttgagatttaagtggtttaagaacggaaatgaactgaatcgaaaaaacaagccacagaacatcaagatccagaaaaaaccaggaaagtccgaactgcggattaacaaagcaagcctcgcggatagtggagagtatatgtgcaaggtaatctcaaagctgggcaacgatagcgcatctgcgaacatcaccatcgtcgagtcgaacgagatcatcactggcatgcccgcctcaaccgagggcgcgtatgtttcttccgagagcccaatccgcattagcgttagcaccgagggggccaatacatcctcttcaacaagtacctcaaccaccggtacctctcacctagtcaagtgtgccgagaaagagaaaactttctgtgtgaacggaggcgaatgctttatggttaaggatctgtccaacccctctagatatttgtgtaagtgccagcccgggtttacaggtgctcggtgcacggagaacgtgcctatgaaggtccaaaatcaagagaaggcagaagagctgtaccagaaaagagtcctaacaatcacagggatttgtattgcactgttggtcgtgggcataatgtgtgtggttgcctattgtaagaccaagaagcagcggaagaagctgcatgatcggctcagacaaagtcttagaagtgagcggaataacatgatgaacatcgccaacggtccgcaccatcccaacccaccccctgagaatgtgcagctggtgaatcagtacgtttcaaagaacgtaatctcttcagagcatattgtcgagcgggaggctgagacgagtttcagcacctctcactatactagcacagcacaccattcaacaacagtgacccaaactcccagccattcatggagtaatgggcatactgaaagcattctctccgagagccactcagttatagtgatgagttctgtggagaacagccggcatagcagcccaaccggcggtccacgcgggcgcctcaacgggaccggagggccgcgggaatgcaatagctttctgagacacgcacgcgaaacccccgacagctacagagattcgccacactcagagcgatatgtttccgccatgaccacccctgctagaatgtctcccgtagattttcacacccccagctcaccaaagtcccccccctctgaaatgtcccccccagtgtcatctatgaccgtcagtatgcccagcatggctgtgagcccttttatggaggaagaaagacccctccttctcgttacaccccctcggctgcgcgaaaaaaaattcgatcatcatccacagcaattctctagtttccaccataacccggctcatgactcaaactccttgccagcctcaccccttagaatcgtagaggatgaggagtacgagaccacgcaggagtatgagcccgcacaggagccagtgaaaaagctggctaacagtcggcgggccaaacggaccaagccaaatgggcatattgctaatcgcctggaagtggactccaacacctccagtcagtccagtaattccgagtccgagaccgaagacgagagggtcggcgaagataccccttttctcggaatccagaatcccttggcagcctccctggaagccacccctgcattccggctggctgacagccggactaatcccgcaggtcgtttcagtactcaggaagaaattcaagctcgactttccagtgtgatcgctaatcaggatcccatagctgtgtag

SEQ ID NO: 3946 - DNA, 1773 bp, synthetic construct
  misc_feature 1..1773: note = source = /note="Description of Artificial Sequence: Synthetic coding sequence"
  source 1..1773: mol_type = other DNA
atgggcaagggccgggccggccgggtgggcaccaccgccctgcccccccggttgaaggagatgaagagccaggaatccgccgctggctcgaagctcgtgcttcggtgcgagactagcagtgaatatagcagccttaggttcaaatggtttaagaacgggaacgagctgaataggaaaaataaaccacagaacataaagatacagaaaaaaccggggaagtccgagctgcggataaataaagcctccctcgccgacagcggtgaatatatgtgcaaggtgatctccaagctcgggaatgactccgcatccgcgaatattacaatcgttgagtcaaatgctacgagcaccagcacaaccggtactagtcatctggtaaagtgtgcagaaaaggagaaaacgttctgtgtcaacgggggtgagtgttttatggtgaaggacctctcaaatccaagccgttatttgtgtaagtgcccgaacgaattcacaggcgaccgctgtcagaactatgttatggcttcattctataaacatctaggaatcgagtttatggaggccgaagaactgtatcagaagcgggtgctgacaatcactggaatttgcatcgctttgttggtggttggaatcatgtgtgtggttgcctactgcaagacgaagaagcaaagaaaaaaactacacgatcggctccgacaatcccttcgctccgagcggaataacatgatgaatatcgctaacggtccccatcaccccaatcctccgccagagaatgtccagctcgtgaatcagtatgtgagcaagaatgtgatatcttctgaacacatcgttgaaagggaagctgaaacttccttctctaccagtcactatacgagtacagcgcaccattcaacaactgtgacacagaccccttcccactcttggagcaatggccacaccgaatcgatattgagtgaatcacacagcgtgattgtaatgagtagcgtggaaaattcgcgtcatagctctcctacagggggaccaagaggcaggcttaacggcactggcggcccccgcgagtgcaactctttcttgcgacatgcgcgagaaacgcctgattcttatagggacagcccccatagtgagcggtacgtcagtgctatgaccacacctgctagaatgtctccagtggactttcacacaccgtcgagtccaaaaagtccgccctcagagatgtcccctcctgtttccagtatgactgtgagtatgcctagcatggccgtatctccattcatggaagaggaaaggccattgctattagtgacacccccccggctccgggagaagaaatttgatcaccatccccagcaattctccagcttccatcataaccccgcgcatgacagcaattctcttccagcctcccctctgcgcatagtggaagatgaagaatatgagacaacgcaagagtatgagcccgcacaggaaccagtgaaaaaactcgcaaacagcagacgtgcgaagagaacgaaacctaacgggcatatcgcaaacagattggaggtcgacagtaacacaagtagccagagcagcaacagcgagagcgagaccgaggacgagagggtcggcgaggacacaccattcttggggattcagaaccccttggcggcctccctggaggccacccccgccttccgcctggctgacagccgaacaaacccagccggtagattcagcactcaggaggagatccaggcacgtctaagctccgtaattgcaaaccaggatccgatcgctgtctag

SEQ ID NO: 3947 - DNA, 1269 bp, synthetic construct
  misc_feature 1..1269: note = source = /note="Description of Artificial Sequence: Synthetic coding sequence"
  source 1..1269: mol_type = other DNA
atgcggtggcggcgggccccccggcggagcggccggcccggcccccgcgcacagcgacccgggagcgcagccaggtcttctccacccctgccattacttccccttctcctcctccttggaactgcggccctggcccccggagccgcagccggaaatgaggccgccccggccggggcgagcgtttgttattcttcacccccatcagttggtagcgtgcaggagctggctcagcgggctgctgtggtcatcgagggtaaggtccacccgcagcgcaggcaacagggagcccttgacaggaaagccgccgccgccgccggcgaggcgggcgcttgggggggcgacagagaacctccggctgcaggtcctagagctttggggcctccagcagaagaacctctgctggccgcaaacggaacagtgcctagctggcccaccgctccagtcccaagcgccggagagcccggtgaggaagccccctatctagtgaaagttcatcaagtgtgggccgtcaaagcgggcggcctgaaaaaagacagtttacttaccgtacggcttggaacatggggacaccctgcattccctagctgtggccgcctgaaggaggactcacggtacattttcttcatggagcccgacgccaactctacgagcagggctccagccgccttcagggcttctttccccccgctggagacagggcgcaacttaaagaaagaggtgagtcgggttctctgcaagagatgtgcgcttccacccaggctgaaggagatgaagtcacaggaatccgccgcaggctccaagctcgtcctgcgttgtgaaaccagctcagaatatagtagcctgcgctttaagtggttcaagaatggaaacgaactgaacagaaagaataaaccacagaacattaagattcagaaaaaaccaggaaagtccgagttgaggataaataaagctagtctggccgactccggagagtatatgtgtaaagtgattagcaaattaggaaatgattctgcctctgcaaatatcaccatcgtggaatcaaacgctacatcgacaagcaccacaggaaccagccacctggtgaagtgcgccgagaaggagaaaactttttgcgttaatggcggggagtgctttatggtcaaggatttgtcaaatcccagtcgttacctgtgtaagtgccctaatgagtttactggagaccgatgtcaaaactatgtgatggcatcattttattccacatcaactcccttccttagtctgcccgaatag

SEQ ID NO: 3948 - DNA, 891 bp, synthetic construct
  misc_feature 1..891: note = source = /note="Description of Artificial Sequence: Synthetic coding sequence"
  source 1..891: mol_type = other DNA
atggagatctacagccccgacatgagcgaggtggccgccgagcggtcttcaagcccaagtacacagctgtctgcggacccgtcactggacggtctgccagccgccgaggacatgcctgaaccccagacagaggacggacgaacaccagggttggtcgggcttgcggtgccttgctgtgcctgcctggaagcggaaaggctgcgcggctgcctcaatagtgagaaaatatgcatcgtgccaatcctggcttgccttgtgtctttatgtctgtgtatcgctggactgaagtgggtgtttgtggacaagatctttgagtatgacagccctacgcatctcgaccctggcggattgggtcaggatccgatcatcagcctggacgctacggcggcgtcagccgtctgggtctcaagtgaagcttatacttcacctgtttcaagggctcagtcagagtctgaggtacaggtcacagtgcagggggacaaggctgtggtgtcattcgaaccttcagctgcccccactcctaagaatcgcatctttgcgttttccttcctgccctctaccgcaccctcatttccatccccgactagaaacccagaggtgcgcacccctaaatctgcgacccagcctcagactacggaaaccaacctccaaaccgcccctaagctgtccacaagcacaagtactaccggcacttcccacctggtaaagtgcgcggagaaagagaagaccttctgtgtgaacggaggagaatgtttcatggtgaaggaccttagtaatccttcacgatatttgtgcaaatgtcctaatgagttcaccggggatcgttgtcaaaattatgtgatggcatcattttattcgaccagtactcccttcctctctttgccagaatag

SEQ ID NO: 3949 - DNA, 1389 bp, synthetic construct
  misc_feature 1..1389: note = source = /note="Description of Artificial Sequence: Synthetic coding sequence"
  source 1..1389: mol_type = other DNA
atgagcgagcggaaggagggccggggcaagggcaagggcaagaagaaggagaggggttccggcaagaaacccgaatctgccgccggctcccagagtcctgcgctaccacctaggctgaaggaaatgaaaagtcaagagagtgcagctggcagcaaactagtattacgatgcgaaacctccagcgaatacagcagtttacggttcaagtggtttaaaaacgggaacgagttgaatcggaagaataagcctcagaatattaagatccagaaaaagccaggaaagagcgagcttagaatcaacaaggcatctctcgctgatagcggagaatatatgtgcaaggtgatctctaagcttggcaacgacagtgcttcggcgaacatcactattgtggagtcaaatgaaattatcacggggatgcctgctagcaccgagggggcttacgttagcagcgagagcccgatccggatctctgtgtccacagaaggcgcgaatacttcttcctccacctctacttccacgacaggcacctcccatcttgtgaagtgcgctgagaaggaaaagacgttctgcgtgaacggaggggaatgcttcatggtgaaagatctgagcaatccgagtagatacctgtgtaaatgccagcctgggttcacaggagcccgatgcaccgagaatgtgcccatgaaagtgcaaaatcaggagaaagcggaggagttataccagaagagggtcctaacaataaccggaatctgtattgccctactggtcgtgggtatcatgtgcgtggttgcatactgtaaaacaaaaaaacagcggaagaaactccatgatcgactgcgccagagcctgcggtccgaaaggaataacatgatgaacatagctaatgggccccatcatccaaaccctcctccagaaaatgtgcagttggtaaatcagtatgtgagtaaaaatgttatcagttccgagcatatagtggaacgcgaggcggagacttccttctccacctctcactacacctcgaccgcacatcattcaactaccgttacacaaactccatctcacagttggagcaatgggcacaccgaatccatcttgtccgagagccacagcgtgattgtaatgtcttccgtcgagaactcccggcatagcagtcctactggaggacccaggggaaggttaaacggcaccggaggaccaagagagtgcaactcctttctgcggcatgctagagagactccagactcctacagagactctccccattccgaaagacataaccttatagccgaactcagacgcaacaaggcccaccgctctaagtgcatgcaaattcaactgtcggcaactcatctgcggtcttcttccatcccacatctcggctttattctttag

SEQ ID NO: 3950 - DNA, 1452 bp, synthetic construct
  misc_feature 1..1452: note = source = /note="Description of Artificial Sequence: Synthetic coding sequence"
  source 1..1452: mol_type = other DNA
atgcagatccccaagcacatcagcatcgaggacatcaccgccacctcaacatcaacgaccggcacctcacacctggttaaatgtgccgaaaaggaaaaaacattttgcgttaatgggggcgagtgtttcatggttaaggacctcagcaatccaagtcgctacctgtgtaaatgtccaaatgagttcaccggagaccgctgccagaattatgttatggcctctttctataaagcagaagaattatatcagaaaagggtcctcaccattacgggcatttgtattgcactccttgttgtcggaatcatgtgtgtcgtcgcatattgcaaaacgaagaagcagcgcaaaaaactgcatgacagactccggcagagtctgagaagcgagaggaacaacatgatgaacattgccaacggaccacatcatcctaatccccccccagagaatgtgcagctcgttaaccaatatgtgagcaagaacgtcatctcttccgaacacattgtggagcgagaggccgaaactagctttagcacaagtcattatacctcgactgcccatcattctactaccgtgacacagactccttctcattcttggagcaacggacacacagaatccattctctcagagagccacagcgttattgttatgtcctcggtcgagaacagccgtcactcctctcctactggagggcccagaggaaggctgaatgggaccggtggcccgcgcgagtgtaatagctttcttcgccacgcacgggagactcctgatagctatagggattcccctcacagtgagcgatacgtcagcgctatgactacccccgctcggatgagcccggttgactttcatactccctcaagcccaaaatcaccccccagcgagatgagccctcctgtatcctcaatgacagtgtcaatgcctagtatggctgtgtctccgttcatggaagaagagagaccgctcttactcgtgactcctccccgtttgcgggaaaagaagtttgatcaccacccccagcagttctcttcatttcatcacaaccctgcgcacgattctaacagcctgcctgcttcacccctccgcattgtggaggacgaagagtacgaaacaacccaagagtatgagcctgcgcaggagcccgtaaagaagcttgccaattcgagaagggcaaaaaggacaaagccaaatggccacatagctaataggctggaggtggacagcaatacttcctcccagtcttccaacagtgaaagcgagaccgaggatgaacgagttggcgaggataccccgtttctgggcatccagaatcctctcgccgccagcctggaggccactcctgcatttcgtcttgcagattccaggaccaacccagccggccggttttccacacaggaggagatccaggctagattgtcatcggtgatcgcaaaccaggatccaatcgctgtttag

SEQ ID NO: 3951 - DNA, 1263 bp, synthetic construct
  misc_feature 1..1263: note = source = /note="Description of Artificial Sequence: Synthetic coding sequence"
  source 1..1263: mol_type = other DNA
atgagcgagcggaaggagggccggggcaagggcaagggcaagaagaaggaacgcggtagtggcaagaaacctgaatctgcagctggatctcaatcccctgccctccccccgcgcctcaaagaaatgaagtctcaggagagtgcagcgggatcaaaactcgtgcttagatgtgagacatcgtctgaatattcctccttgaggttcaaatggttcaagaatggcaacgagttaaacaggaagaacaagccccagaacattaagattcagaagaagcctgggaaatccgaactaagaattaataaagcatccctggcagactccggcgaatatatgtgcaaagtgataagcaaactgggaaacgacagcgcctcagcaaacatcactatcgtcgagtccaacgaaatcataacaggaatgcccgcctcaactgaaggcgcttacgtgagcagcgaaagtccaatacgaatctctgtctcaaccgagggcgccaataccagctccagtacttctacctctaccacaggtacctcgcacctggtcaaatgtgccgaaaaagagaaaactttctgtgtgaacggaggcgagtgttttatggtcaaagatctgtcgaatccttcccgctacctgtgcaaatgtccgaatgagtttactggtgaccgctgtcaaaattacgttatggccagtttttataaagcagaagagctgtaccagaaacgcgtgctgactatcaccgggatctgcatcgcgctgttggtggtgggcataatgtgtgttgtcgcgtattgcaagactaaaaagcaacgaaaaaagcttcatgataggctgcgtcaaagtctgcggtccgagcggaataatatgatgaacatcgccaatgggccacaccacccaaatccccctccagagaatgtgcagttggttaatcagtatgtgtccaaaaatgtaatatcctctgagcatatcgttgaacgagaagccgagacatcatttagtaccagccattacaccagcactgctcatcactccactaccgtcacgcagaccccttcgcactcatggagcaatggccacacagagtccattctgtccgagtcacacagtgtgatcgtgatgtcttctgtggaaaactcacgtcattcctctccaaccggcgggccccgcggtaggctcaacggaaccggaggtccgcgggagtgcaactccttcctgcgtcatgccagagagactccagatagttaccgcgatagtccccactctgaaaggtag

SEQ ID NO: 3952 - DNA, 1065 bp, synthetic construct
  misc_feature 1..1065: note = source = /note="Description of Artificial Sequence: Synthetic coding sequence"
  source 1..1065: mol_type = other DNA
atgctgttcaacctgcggatcctgctgaacaacgccgccttccggaacgggcacaactttatggtgagaaacttccggtgtggtcagcctcttcagaataaggtgcagcttaaggggcgcgatctccttacccttaagaatttcaccggcgaggaaataaagtatatgctatggctgagtgccgatctaaagtttcgcattaaacagaagggagagtatttacccctgctccagggcaagagccttgggatgattttcgagaagagatcaacaagaacccgtctttccaccgagacaggcttcgcacttctcgggggacatccctgcttcttgacaactcaggacatccacctgggtgtcaacgagagcctcacagacaccgccagggtcctgagttccatggccgatgccgtgttggcgcgcgtgtacaaacaatcagacctcgatacattggcgaaagaagcttctatccccatcatcaacgggctgtctgacctgtaccacccgatccaaatactcgcggactatctgacgttgcaggaacattattcctcactcaaaggcctgactcttagctggataggtgatgggaataatattctccactccatcatgatgagcgccgccaagttcggcatgcacctgcaggctgctactccgaagggttacgagcccgacgcttccgtgaccaaactggctgaacaatacgccaaagaaaatggaacaaaactgctgttgaccaacgaccccctggaagccgctcacggcgggaacgtactgatcactgatacatggatttcaatgggtcaggaagaggagaagaagaagaggctacaggctttccagggatatcaggtgacaatgaagaccgctaaagttgctgcaagcgactggactttcctccattgccttcctcgcaaaccagaagaggtggacgatgaggtattctatagtccaagatccttggtctttcctgaggccgagaaccgcaaatggactatcatggccgtgatggtgtccttactgactgactattctcctcagctccagaaaccaaaattctag

SEQ ID NO: 3953 - DNA, 348 bp, synthetic construct
  misc_feature 1..348: note = source = /note="Description of Artificial Sequence: Synthetic coding sequence"
  source 1..348: mol_type = other DNA
atgatccccgccaaggacatggccaaggtgatgatcgtgatgctggcgatctgctttctaacgaagtcagatggtaagtcagttaagaagaggtctgtgtctgaaatccagctcatgcataatctggggaagcacctgaattcgatggaacgggtcgagtggctgcgcaagaagctgcaggacgttcataatttcgtggctttaggtgctccgctggcacctcgggacgccgggtcccaacggccgagaaaaaaggaagacaacgtccttgtcgaaagccacgaaaagagcttaggggaggccgataaagccgacgtgaacgtgcttaccaaggccaaatctcaatag

SEQ ID NO: 3954 - DNA, 348 bp, synthetic construct
  misc_feature 1..348: note = source = /note="Description of Artificial Sequence: Synthetic coding sequence"
  source 1..348: mol_type = other DNA
atgatccccgccaaggacatggccaaggtgatgatcgtgatgctggccatctgtttcctgaccaagagtgacggcaagtcagtgaagaagcgaagcgtgtccgagattcagctcatgcacaatctgggcaagcacttgaacagcatggaaagggtcgaatggttgaggaaaaagctccaagatgtgcacaattttgtggcgctgggggctcctctcgccccccgtgacgcaggctctcagcgccctcgtaagaaagaggataacgtactcgtggaatctcacgagaagtcgctgggcgaggccgataaagcagacgtgaatgtcctgaccaaagccaagtctcaatag

SEQ ID NO: 3955 - DNA, 354 bp, synthetic construct
  misc_feature 1..354: note = source = /note="Description of Artificial Sequence: Synthetic coding sequence"
  source 1..354: mol_type = other DNA
atgagcaccgccgtgctggagaaccccggcctgggccggaagctgtcggattttggccaagaaacctcgtacattgaggataactgcaatcagaacggggctatcagtttgatcttttcattgaaagaagaagttggcgctctggcgaaggttctccgcctgtttgaggaaaatgatgtgaatctgactcatattgagagcagaccaagtaggctaaagaaggacgaatacgaattcttcacccacctggataagcgcagtttgccagccttgaccaacatcattaagatattgcgacacgatattggtgctaccgtgcacgaactgtcacgcgacaaaaaaaaagacacctag

SEQ ID NO: 3956 - DNA, 411 bp, synthetic construct
  misc_feature 1..411: note = source = /note="Description of Artificial Sequence: Synthetic coding sequence"
  source 1..411: mol_type = other DNA
atgagcaccgccgtgctggagaaccccggcctgggccggaagctgtctgattttggtcaagagacaagttatatcgaagataactgcaatcagaatggggccatctcccttatattttctcttaaggaggaggtcggcgccctggcaaaggtgctacggctattcgaggaaaacgatgtaaacctgactcacattgagtcaaggccatctagactaaaaaaggacgaatacgaattctttacgcacttagataaacgctctctgccggcgttaactaacatcatcaagatccttaggcacgatatcggggccacagtccacgaattgtcaagggataagaagaaggataccgtaccctggttcccccggaccattcaagagctggaccgcttcgccaatcagatcctatag

SEQ ID NO: 3957 - DNA, 1359 bp, synthetic construct
  misc_feature 1..1359: note = source = /note="Description of Artificial Sequence: Synthetic coding sequence"
  source 1..1359: mol_type = other DNA
atgagcaccgccgtgctggagaaccccggcctgggccggaagctgagtgattttggacaggagacgtcttatattgaagacaattgtaatcagaacggagcaataagtctgatattttccctcaaggaggaggtaggtgcccttgcaaaggtacttcgattattcgaggagaacgacgtaaacttgacacatattgagagccgcccctcccgcctaaagaaggatgagtacgaatttttcactcacctggacaaacgttcactgcctgccctcacaaatattatcaagattcttcggcacgatattggagctacagtgcacgagctctcccgcgacaagaagaaggataccgtcccctggttccctcgtacaatccaggaactggacaggttcgctaatcagattctatcctatggtgccgaactggacgctgaccaccctgggttcaaagaccctgtgtatcgggccaggagaaagcagttcgctgatattgcttataactaccgccatgggcagcccattccaagagttgagtacatggaggaagagaaaaagacttggggcacggtcttcaaaacacttaagagcctgtataaaacccatgcctgttatgaatacaatcacattttccccctgctcgagaagtattgcggattccacgaggacaacatcccccaactggaggatgtgtcacagtttctccagacatgtaccggcttcaggttgagacccgtggccggactcctgtcaagccgggattttcttgggggcctggccttcagggtctttcattgtacgcaatatattaggcatggcagcaaacccatgtacacgcccgagcccgacatctgccacgagctgctaggacatgtgccccttttctcagacaggagcttcgcccaattcagccaggagattggacttgcctctctgggggcacccgacgaatatatcgagaaactggctaccatctactggtttaccgttgaattcggcctatgtaagcaaggtgactccatcaaggcatacggcgccgggctgctgagctcgttcggagagttacagtattgcttgtctgagaaacccaagctattgcccctggaacttgaaaaaaccgcaatccagaactacaccgtcactgaattccaacccctctactacgtggcagaatcttttaatgatgcaaaagaaaaagtcaggaacttcgctgccaccattccccgcccctttagcgtgagatacgacccatacacgcagcgaattgaggtcttggacaatacccaacaacttaaaatcctggcagactctatcaactctgaaattggcattctgtgttctgccctgcagaagatcaagtag

SEQ ID NO: 3958 - DNA, 3261 bp, synthetic construct
  misc_feature 1..3261: note = source = /note="Description of Artificial Sequence: Synthetic coding sequence"
  source 1..3261: mol_type = other DNA
atggcctgcagccccgacgccgtggtgagccccagcagcgccttcttgaggagcggctccgtctatgagccactgaaatccatcaacctgcctaggccagataacgaaactttatgggacaaactcgaccactattaccggatcgtcaagtccaccttgttactgtatcagtcacccacaaccggcctctttccaacaaaaacatgtggtggggatcagaaagccaagattcaggattctttgtattgcgcggctggggcctgggccctggcactggcatatcggagaatagacgacgacaagggcaggacacacgagttagagcacagcgccatcaagtgtatgcgagggatcctgtattgctacatgcgacaggccgataaagtgcagcagttcaaacaggatccacgtcccacaacttgcctgcattccgtgttcaatgtccatactggagacgagttgctttcctacgaggagtatgggcacctgcagattaacgcagtctccctgtacctgctttatctcgtggaaatgattagctcagggctccagattatatacaacactgacgaagtgagcttcattcagaacctggtgttctgtgttgagagggtgtatcgcgtccccgatttcggtgtgtgggaaagaggctccaagtacaacaatggatccaccgagctgcactcgtcctctgtgggccttgccaaggccgccctcgaagccattaatggctttaatctctttggaaaccagggttgcagctggtctgtcatttttgtggacctcgacgctcacaaccggaacaggcagactctgtgcagtctcctgcctcgtgaatctagaagtcacaacactgatgcggccttgctcccttgcatctcctacccagctttcgctctggatgacgaagtgcttttttcacaaactttagacaaagtcgttaggaaactgaagggaaagtacggctttaagagattcttgagagacggataccggacctcattagaggaccccaacagatgttactacaagcccgctgagatcaagttattcgacggcattgagtgtgaattccccatattcttcttgtatatgatgattgacggcgttttcagaggtaacccaaagcaggtgcaggagtaccaggacttgctaacgccagttctgcaccacacgacggagggttacccggtcgtacccaaatattactacgtccctgcggattttgtagaatatgaaaaaaacaatccaggaagccagaaacgtttcccctctaactgcgggcgagacggcaagctcttcttgtggggtcaagccctttacatcattgccaagcttcttgccgacgagttgatctctcccaaggatatcgacccggtgcagcgatacgtgcctctaaaagaccagcgcaacgtttctatgaggttctccaatcagggacctctcgaaaacgacctcgttgtgcatgttgcactgattgccgaaagccaacgtcttcaagtctttctaaatacctacgggattcagacccagactccccagcaggttgaacctattcagatttggcctcagcaggaactggtgaaagcatatctgcaattgggtatcaacgagaaactagggctaagtggacgacccgaccgacccattggatgcctgggaacatccaagatctataggattctgggaaaaaccgtagtctgttatcctattatcttcgacctgtcagacttttacatgtctcaggatgtattcctgctgattgatgacatcaagaatgccctccaattcattaagcagtattggaagatgcacggccggccgctgtttctggtcttaatacgcgaagacaacatcaggggctcccgattcaatccgattctggatatgctcgcagcactcaagaaaggaatcatcggcggggtaaaagtccatgtcgatcggttacagaccctcatctctggtgccgtcgtcgaacagctggactttctacgtatttccgatacagaagagctgccagagtttaagagttttgaggagcttgagccccctaaacattctaaggttaagaggcagtcatccacgccctccgcccccgagctcggacaacagcccgatgtgaacatcagcgaatggaaggataaacccactcacgagattctccagaagcttaatgattgcagctgtcttgccagtcaagctatcctgctggggatcctgctgaagcgagagggcccaaattttatcactaaggaggggaccgtgtcagatcacatcgagagggtgtaccgtcgcgcaggttcacaaaagctgtggagcgtcgtgcgtagagcagccagcctgctgagcaaagtggtggattccctggccccctccatcactaatgtactagtacaagggaagcaggtgacactcggcgcttttggccatgaggaggaggttatctctaatcctctttctccgcgggtgatccagaatatcatatattataaatgcaatacccatgatgaacgcgaggcagtgatccagcaggaactcgtgatacacattggctggatcatcagtaataatcctgaactgttttcagggatgctgaaaattaggatcggctggataatacatgcgatggagtacgaacttcaaattaggggtggagacaagcccgctttggatttataccagctctctccttccgaagtaaaacagctgctgctggatattttacagcctcaacagaatggtcgttgttggctaaaccgacggcaaatcgacggcagcttgaataggacccccaccgggttttatgatcgggtatggcagattctggaacggacccccaacgggataattgtcgctggcaaacacctcccacagcagcccactctctcggacatgactatgtatgaaatgaatttcagcctcttagtggaggatactctggggaacattgaccaaccccagtatagacagatagtggtggagctgttgatggtggtctcgatcgtcctggaaaggaatcctgagctcgagtttcaggataaggttgacctggaccggctggtgaaagaagcctttaatgaattccagaaggaccagagtcgcctgaaggagatcgaaaaacaggatgacatgactagcttttacaacactcccccgctgggaaagcgtggcacctgcagctatttgacaaaagctgtcatgaacttgctgcttgagggcgaggttaaaccaaacaacgatgatccctgtttgatcagctag

SEQ ID NO: 3959 - DNA, 1221 bp, synthetic construct
  misc_feature 1..1221: note = source = /note="Description of Artificial Sequence: Synthetic coding sequence"
  source 1..1221: mol_type = other DNA
atgaccctggacgtgggccccgaggacgagctgcccgactgggccgctgctaaggaattctatcaaaagtatgaccccaaggacgtcattggaaggggggtgagctccgtcgtacgtcgttgtgtacacagagctacagggcatgaattcgcggtcaagatcatggaggttaccgctgaacgactgtcccctgagcaactggaggaggtccgcgaggcaacccgccgtgaaacccatattctccgtcaagtcgccggacacccacatatcatcactctcatcgatagttacgagagtagttccttcatgttcttagtctttgacctcatgaggaagggggagctgtttgattacttgaccgagaaagttgcactttccgaaaaagagactcggtctattatgaggtcgcttctggaggccgtcagttttctgcacgcaaataacattgttcacagggacctgaaacccgagaacatactgctggacgacaatatgcagattagattatctgattttggattttcttgtcacttggagcccggcgagaaattgagggagctgtgcggaacgcctggctatctcgcccccgagatcctcaaatgttcaatggatgagacacatcccggatacggcaaggaagttgatttgtgggcatgtggcgttattctcttcacgcttctagccggtagcccacctttttggcatagaagacagattctgatgctgcgaatgattatggagggacagtaccaattctccagtcccgagtgggatgacagaagctctacagttaaggacctgatctcacggctgcttcaggtggacccggaggcgcggctgactgccgaacaggctctgcagcacccattctttgagaggtgcgaaggctcccagccatggaatctgactccaaggcagcgctttcgcgtcgccgtatggaccgtgttagccgccgggcgagtggcactgagtacccacagggtgcgtccgctgaccaaaaacgctctcttgagggacccctatgcactgaggtccgtacgtcatctcattgataattgtgcgtttcgactctatgggcactgggtgaaaaaaggggaacagcagaacagagctgctctgtttcagcacaggccgcctggacctttcccaattatgggccccgaggaggaaggtgacagtgccgctatcactgaagacgaggccgttctggtcttaggatag

SEQ ID NO: 3960 - DNA, 3708 bp, synthetic construct
  misc_feature 1..3708: note = source = /note="Description of Artificial Sequence: Synthetic coding sequence"
  source 1..3708: mol_type = other DNA
atgcggagccggagcaacagcggcgtgcggctggacggctacgcccggctggtgcagcaaactatcctctgttatcaaaaccccgtgactgggcttctttctgcgagccacgagcagaaggacgcatgggttagggacaatatctatagcatcctcgctgtgtggggtcttggcatggcgtataggaagaatgcagatcgagacgaagacaaggcaaaggcttacgaactggaacagaacgtggtgaagcttatgaggggcttgttgcaatgtatgatgcgtcaggtggctaaagttgagaagttcaaacatacccagtcaacaaaggactcactgcacgccaagtacaatacagctacctgtgggaccgttgtgggcgacgaccagtggggtcatctgcaggtggacgctacctcactctttctgttattcctggctcagatgacggcttctggcttgagaattatttttaccctggacgaagtggcttttattcagaatcttgtcttttacatcgaagccgcatacaaagtggcagactatggaatgtgggaacggggcgataaaacaaatcagggcatccccgaattaaatgctagctccgtaggcatggctaaagccgctttggaagccattgacgaacttgatttgtttggagcacacggcggaagaaagtcagtgatccatgtcctgcccgacgaggtggagcactgtcagtctatcttgtttagcatgctgcctcgtgcctctacctcaaaagagattgacgctggtttgctctctatcattagcttccctgcttttgcagtcgaggatgtaaatctggtcaacgtgacaaagaatgagattatatctaagctacaggggagatacgggtgttgcagattcttgagagacggatacaaaactcctcgggaagaccccaaccgactgcattatgaccctgctgaacttaagcttttcgagaatattgaatgcgaatggcctgtcttttggacatattttatcatcgacggagttttctccggggacgctgtccaggtgcaggaatatcgcgaggccctggaaggtatcctgattagaggcaagaacggcattcggctcgtccccgaactgtacgctgttccacctaataaagtcgacgaagaatataaaaaccctcatactgtcgaccgtgtgcctatgggaaaggtgccccacctttgggggcagtcgctttatatcctgagtagcctgctagctgaaggcttcttagccgctggcgagatagacccactgaacagaagatttagcactagtgttaaacccgacgtggtcgtgcaggtaactgtcctagctgagaataatcacatcaaagacctacttcggaagcacggtgtgaacgttcagtcgattgccgacatacaccccattcaggtgcaacctggaagaatactgtctcacatttacgctaagttgggcaggaacaaaaatatgaacctaagtggcaggccttataggcacatcggggtcttaggtacaagcaagctgtacgtaatccggaatcaaatctttaccttcacaccacagttcactgaccaacatcatttctatcttgcactggataacgaaatgatcgtggaaatgcttaggatagaactggcctacctgtgcacctgctggcggatgactgggaggccaacccttacctttccaatatcgaggactatgctaactaatgatggatcagacatacactctgctgttctttcaaccatcagaaaactggaagacggctatttcgggggtgctcgggttaaattaggcaatctgagtgaattcctgactacttctttttatacgtacctgacctttctcgacccagattgcgacgaaaagttgttcgacaacgcaagcgagggcaccttttctccagattctgattccgatctggtgggctatcttgaagacacctgtaaccaggaatctcaggatgagttagatcattatattaaccatctactacagagcacaagcctgagatcatatctgccaccactatgtaaaaacacagaagaccgccacgtttttagcgccatccactctacaagagatattctctcagtcatggccaaggccaaggggctggaagtcccctttgtgccaatgacacttcctacgaaagtactgtctgctcaccgcaagagtctgaacctggttgacagtccacagccactcctggaaaaagttccagaaagcgacttccagtggcctcgcgatgatcatggggacgtggattgcgaaaagctggtcgaacagctcaaggattgttccaatcttcaggatcaagctgacattctctacatcctgtatgttatcaaaggcccatcatgggatactaacttatcggggcaacacggcgttaccgtccaaaacctgcttggggaactgtatggcaaagccggacttaaccaggaatgggggttgatccgctatataagcgggctgttgcggaagaaagtagaagtgctggccgaggcttgcactgatctgctgagccaccagaagcagctaacagtcggacttcccccagaacctagggagaagattatctctgctcctctgcccccagaggagctgactaagctaatttacgaggctagcggacaggatatttctatagcagtactcacgcaggaaatagtggtgtacctggccatgtacgtgagggcacagcccagtctctttgtggagatgctgaggctcaggatcggactcattatccaggtgatggcaacggagttagccaggtctctgaactgttcaggcgaggaagccagtgagtcgctgatgaacctgagccccttcgacatgaaaaacttgctccaccacatactctccggaaaggaattcggggttgagaggtcggtaaggccaatccactcttccacctctagtcccacaatctccatacacgaggtgggacacaccggggtcaccaaaactgagcgctcgggaattaacagattgcggtcagaaatgaagcaaatgacccggcgattttccgccgacgagcaattcttctccgtgggccaggctgcttcaagcagcgctcattcctcaaagtctgcgagaagctctacaccctcttcaccaacagggacaagcagcagtgacagcgggggtcaccacatcggttggggcgaacggcagggacagtggttgagacggaggcgcctggatggcgcaatcaatagggtgcccgtgggcttttaccagcgagtgtggaagattttgcaaaaatgccacgggctgagcattgatggctacgtcctcccgtcatcaacaacccgggagatgaccccacatgaaatcaagttcgccgtccacgtcgagagcgtgttgaatcgagttccgcaaccagaatataggcagctcttggtcgaggctataatggtgctcacactcctgagcgacacggagatgacgtctatcggcggaatcatccatgttgaccagattgtccagatggcgtcgcaactgttccttcaggaccaggtgagcatcggagccatggacacgctggagaaagaccaggccaccggcatatgccacttcttctacgattccgcaccttccggagcttacggcacaatgacttacctgaccagagccgtcgcaagttaccttcaagaactgctacctaacagcggatgccagatgcaatag

SEQ ID NO: 3961 - DNA, 3261 bp, synthetic construct
  misc_feature 1..3261: note = source = /note="Description of Artificial Sequence: Synthetic coding sequence"
  source 1..3261: mol_type = other DNA
atggcctgcagccccgacgccgtggtgagccccagcagcgccttcctaaggagcgggtctgtttacgagcccttgaaatccataaacctgccgagacccgataacgaaaccctgtgggacaaactggaccattactaccgtatagtgaagtcgacgcttctcttataccagagtccaaccacaggcttgtttccaaccaaaacgtgtgggggcgaccagaaggctaaaattcaggactcgctctactgtgcggcaggagcatgggcactggcacttgcgtatcgccggattgacgacgataagggtcggacccatgaactggagcactcggctattaagtgcatgcggggaatactctactgttatatgaggcaggccgataaagttcagcagttcaaacaggatccgcggcctacaacgtgcttgcattccgtcttcaacgtgcatacgggcgatgagctgttaagctatgaggaatacggccacctgcagataaacgccgtaagcctgtatttgctctacctcgtcgagatgatcagctcagggctgcagatcatctacaatacggatgaagtgtcttttattcagaatcttgtgttttgcgtggaaagagtgtaccgggtccccgactttggagtgtgggaaagaggcagtaagtataacaacggaagcacggaactacacagcagctcggtcggacttgccaaggccgcgctggaagccatcaatggattcaacctttttggcaaccaaggatgctcttggtcggtgatattcgtcgatctcgacgcccacaaccggaacaggcaaactttgtgcagtctactacctcgcgaatctcgctcacataacaccgacgcagcactgcttccttgcatttcttatcccgcttttgctctggacgatgaagtacttttttcccagacgctggataaagtagtgcgcaagttgaaagggaagtacggctttaaaaggttcctgagagatggctacaggacatctctggaggaccctaaccggtgttattataagcccgcagaaattaagctgtttgatggaattgaatgcgagtttcctattttcttcctgtacatgatgattgatggagtgtttcggggcaacccaaagcaggttcaggaatatcaagatctgcttacccccgtgttgcaccatacaaccgagggatatccagtggtgccgaagtattactacgtccccgctgactttgtcgagtacgagaagaacaatccagggtcccagaaacgcttcccatcgaactgcggcagagacggcaaactgttcctctggggtcaggccctctacatcatcgccaaactgctcgcggacgaactgattagtcctaaggatattgatcctgtgcaacgatatgtgcccttgaaagatcagaggaacgtttccatgaggttcagtaaccagggcccactggaaaatgatctggttgtgcacgtcgccctcatcgctgagtcccagcgcctccaggtctttttgaatacctatggaatacaaacccaaaccccacagcaggtcgaacctattcagatatggccacagcaggagctggtgaaagcatatcttcaactgggcattaatgaaaaactgggcctttccggtaggccagacagacccataggttgcctcggaacgtcaaagatctatcgaatcctgggtaaaaccgtggtctgctacccaattatttttgacctgtccgatttttacatgagtcaggacgttttcttgttgattgacgacatcaaaaatgcactgcagtttattaagcagtactggaaaatgcacggtcgtccccttttcctcgtcctcatcagagaagacaatattagaggtagccgatttaacccgatccttgatatgcttgccgcattgaagaaaggcatcattggcggagttaaggtgcacgtagacaggctccaaacactcataagcggtgccgtggtggaacaactggatttcctaagaataagcgacaccgaggagctcccagaatttaaatctttcgaggaactcgagccgccgaagcattctaaagtgaagcggcagtcgtctactccgtccgccccagaattgggacagcagcctgacgtaaatattagcgaatggaaagacaagccaacgcatgagattctgcagaaactcaacgactgttcttgtctcgccagtcaggctattctgctcgggatattgttgaagcgggagggacccaattttattacaaaagaaggcacggtaagcgaccacatagagcgcgtgtaccggagggctggatcccagaaactatggagtgtggtgcggcgggccgcttctctactgagcaaagtggtggacagcctagcaccctctatcacaaacgttctggtgcaaggcaagcaagtaaccctcggcgcattcggccacgaggaggaggtgattagtaaccctctgtcccccagagtgattcagaacatcatctattacaaatgcaacacacatgatgagagggaggcagtgatacagcaggaattggtgatccatatcggttggattattagcaataaccccgaactcttttctgggatgttgaagatccgaatcgggtggatcattcatgcaatggagtacgagcttcagatccgcggaggcgataaaccagccctggatctctatcagcttagcccatctgaagtaaagcagctgctgctggacatacttcagccacagcagaacggaaggtgctggttaaataggaggcaaattgacggttctctgaacagaacccccaccggattttatgacagagtatggcaaatcctagaacgtacccctaacggtatcatagttgccgggaaacatctcccacaacagcctaccctgtctgacatgacaatgtacgaaatgaacttcagcttgctggtggaagatacactggggaacatcgatcagccgcaatatcgacagattgtggtggagctccttatggtggtgtccattgtcctggagcgaaatccagaactggagttccaagacaaggtggaccttgatcgacttgtgaaggaagcctttaacgaattccagaaggatcagtcgagactcaaagaaatagaaaagcaagatgacatgaccagcttttataacacaccaccactcgggaagcggggaacatgttcttatctgaccaaggcggtcatgaaccttttgctggagggcgaggtcaaacctaataacgacgacccttgcctgatttcttag

SEQ ID NO: 3962 - DNA, 3282 bp, synthetic construct
  misc_feature 1..3282: note = source = /note="Description of Artificial Sequence: Synthetic coding sequence"
  source 1..3282: mol_type = other DNA
atggccggcgccgccggcctgaccgccgaggtgagctggaaggtgttggaaagaagggcgagaacaaagcgaagtggaagcgtgtacgaacccctgaagtcaatcaacctgcctcggcctgacaacgagaccttatgggataagcttgaccattattatagaatcgtcaagtctacactgctcctttaccagtctccaactacaggcctgttcccgacaaaaacttgtggcggcgaccagaaggcaaaaattcaggattccttgtattgcgcggcaggggcctgggcgttggctctggcctatcgaaggattgacgacgataagggacgtacccatgaacttgagcacagcgcaatcaaatgtatgcgagggatactttattgttacatgagacaggccgacaaggtccaacagtttaaacaagacccacgtccaaccacctgcctgcactcagttttcaatgtccatacaggtgatgagctgctttcttacgaggagtacgggcatctgcagatcaatgcagtatcattatacctattatacttagtggaaatgatcagtagtggcctgcagatcatctacaataccgacgaagttagtttcatccaaaatttggttttctgtgttgaaagggtgtacagggtgcctgatttcggcgtgtgggagcggggcagcaagtacaacaatgggtcgaccgagctacactcaagttccgtggggctcgccaaggccgctctggaagccatcaacggcttcaatctgttcggcaaccagggttgctcttggagcgtcatattcgtggatctcgacgctcacaacaggaacagacagaccctatgctcactactgcctagggagagccggtcccacaatactgatgccgcactgcttccctgtatcagctaccctgcttttgccctcgacgatgaagttttattttcccaaacactggacaaagtcgtccggaagctgaaaggaaagtacggattcaagaggttcctcagggatggatacaggaccagcctggaagacccaaatcggtgttactataaaccagctgaaattaaacttttcgacggtatagagtgtgagttccctattttcttcctatacatgatgattgatggagtgtttcgagggaatcctaagcaggttcaggagtaccaggatctgctgaccccggtgctgcaccatactactgaaggttaccccgtggttccaaagtattattatgtgccagccgatttcgtggaatatgaaaaaaacaaccctgggagtcagaaacgcttcccgtccaactgcggacgggatggcaaactcttcctctgggggcaagccctgtacatcatagccaagctgctagcagatgagctaatctccccgaaggacatcgatcccgtacaaaggtacgtaccattgaaggaccagaggaacgtgtcaatgcgcttcagcaaccaaggaccactggagaatgatctggtggtccacgtggcacttattgccgagtctcagaggcttcaagtgtttcttaacacgtatggcattcagacacagacccctcagcaggttgagccaattcagatctggccccagcaggagttagtaaaagcttatttgcagctggggattaacgagaagctggggcttagcggccggcctgaccgccccatagggtgtctgggcacaagtaagatctaccgcatccttgggaaaacagtggtctgctacccaatcatatttgacctgtccgatttttatatgagccaggacgtgttcctgcttatcgacgatatcaaaaatgccttacaattcattaaacagtattggaagatgcatggccgcccactgttccttgttctaatcagagaggataatattaggggctccaggttcaacccaatcctggacatgctggctgccttgaagaagggaatcattgggggagtaaaggttcacgtggatcggctgcaaacactgattagcggagccgttgttgaacagctggatttccttcgtattagtgataccgaagagcttcctgagtttaagagctttgaagagctcgaaccccctaaacatagtaaggtgaagagacagtctagcaccccttcagcacctgagcttgggcagcaaccagatgtgaatatatctgagtggaaggacaagcccactcacgaaatcctacaaaagttgaacgactgtagttgtctggcctctcaggctatcttactgggaatactgcttaagcgggaaggccccaatttcattaccaaagagggaaccgtctcagatcatatcgaacgcgtgtatcggcgagcagggtcacagaagctgtggctggctgtccgatacggtgccgcttttacacagaagttttcctcctccattgcaccccatataaccactttcttagtccacgggaaacaggtgactttgggcgcctttggtcatgaggaagaggtaatttcgaaccctctgtccccgcgggttatacagaacataatttattacaagtgtaatactcatgatgagcgggaagctgttatccagcaggaattggttattcacatagggtggatcatcagcaataatccagaactgttttcagggatgctgaagatcagaattggatggatcatacatgctatggaatacgagctccagataaggggaggagataaacccgcgctcgatctgtaccagcttagcccgagtgaggtgaagcagctattgctggatattctgcagccccagcagaacggcagatgctggctcaatcgcaggcagattgatggttcactgaatagaacgccgactggtttttatgatcgggtctggcaaattctggaaaggactccaaatggcatcattgtcgccgggaaacacctacctcaacagcctactctgtcagacatgacaatgtatgagatgaacttctcactgctggttgaggacactcttggtaacattgatcagccccaataccggcaaattgtcgtggaattacttatggtagtcagcatcgtgctcgaaaggaacccagagttggagttccaggacaaggttgacctggatagacttgttaaggaagccttcaacgaattccagaaagaccagagccgactaaaagagatcgaaaagcaagacgatatgacgagcttctacaataccccccctttgggcaaacgtggtacatgcagctatctgacgaaagccgtcatgaacctcctcctcgaaggagaggtcaagccgaacaatgacgatccctgcctgatttcgtag

SEQ ID NO: 3963 - DNA, 3261 bp, synthetic construct
  misc_feature 1..3261: note = source = /note="Description of Artificial Sequence: Synthetic coding sequence"
  source 1..3261: mol_type = other DNA
atggcctgcagccccgacgccgtggtgagccccagcagcgccttcctccggagcggatccgtttacgaacctttgaagagcataaacttgccaagaccagacaacgagacgttgtgggacaagctggatcactactacagaattgtaaaatctaccctcctcctgtaccagtccccaaccactgggttgttccctacaaagacatgcgggggagaccaaaaggctaaaatacaggatagcttatattgcgccgccggagcctgggccctagccctggcatatcggagaatagacgacgacaagggccgcacacacgagctggaacatagcgcgattaagtgcatgcgcggcattttatattgctacatgcgacaagccgacaaggtgcaacagttcaagcaggatccacgccctactacctgccttcacagtgtgtttaatgtgcacacaggtgacgagctccttagctatgaggaatatggccatttgcaaatcaatgccgtgtcactgtacctcctgtatctggtggagatgattagtagcggactgcagatcatttacaacacggatgaagtgagcttcatccaaaacctggtattctgtgttgagcgcgtgtatcgcgtgcctgattttggtgtgtgggagcgcggctccaagtacaataatggcagtaccgaactgcattcgagctccgtcgggctcgccaaagctgcactcgaagcgatcaatggattcaatctgtttggcaatcaggggtgtagctggagcgtgattttcgttgatttggatgctcataaccgcaatcgccagactctttgctcacttcttccccgtgagtcgcggtctcacaacacagatgccgcactcttaccctgtattagctatcctgccttcgcactcgacgacgaggtgctgttttctcaaaccctcgataaagttgtgaggaagctgaaaggtaaatacgggtttaaacgctttctgagggacggatacagaacctcgttggaggatcctaataggtgctactacaaaccagccgagatcaaactgtttgacggtatcgaatgtgagtttcctatctttttcctctatatgatgattgatggagttttccgtggtaacccaaagcaggttcaggagtatcaagacctgctcactcctgtcttgcatcacacaaccgagggttatcccgtagtgccaaagtactactatgttccggctgactttgtggaatatgaaaaaaataatccggggagccagaaacgattcccatctaactgcggtcgggatggaaagttgttcctgtggggccaggccctctatattatcgccaaattactggcggacgagttgataagtcctaaagatatcgatccagtccagcgatatgttcctttgaaggatcaaagaaacgtttctatgcgcttcagtaaccagggtcccctggaaaacgacctggtcgtgcacgtggctctcatcgcggagtcgcaacgactccaggtctttctaaatacctacgggatccagactcagacccctcagcaggtcgaaccaatccaaatctggcctcaacaggagctggtgaaggcttacttgcagctgggcatcaacgagaaactgggcctctctggtaggccggaccgacctatcggttgtttgggaacctccaagatctacagaattctgggaaaaacagtggtgtgctacccaatcatcttcgacttatctgatttctacatgtctcaggacgtcttcttgctgatcgacgacataaaaaatgcccttcaattcatcaagcagtattggaaaatgcacggtaggccgttgtttctcgtgctcatccgggaggataacatccgggggagcaggttcaatcctattcttgacatgctcgccgctctgaagaaaggaatcattggaggggtcaaagtgcacgttgacagactgcagaccctgatctctggggccgtggttgaacagctggacttccttaggataagcgacacagaggaacttcccgagttcaagtcatttgaagaacttgagccaccaaaacattctaaggtcaaacgccaatcttcaacacccagcgccccagagctcggacagcagccggacgtaaatatatctgaatggaaagacaagccgacccatgagatcctccagaagttaaatgattgttcttgcctggcatcacaggccatcttgttgggaatattgctgaagagagagggaccaaattttattacaaaggaagggacagtctctgaccatatcgaacgggtgtatcgtcgggccggcagccagaagttgtggctagccgtgaggtacggcgccgcattcacacagaagttcagctccagtatcgcacctcatattacaacatttttggtgcacggcaaacaggtcacacttggggcattcggtcacgaggaggaggttattagtaatccactgagtccacgcgtcatccagaatatcatctattataaatgtaatacacacgacgaaagagaggccgttatccagcaggaactcgtcattcacatcggctggataatcagtaataatcccgagttgtttagtgggatgctcaaaatacgaattggttggatcatccatgcaatggagtatgagctgcagatcagagggggagataagcctgcacttgatctctaccagctgtcaccatccgaggtgaaacagctcctcttagacatccttcagccgcagcagaatggacgatgttggttaaaccgaaggcaaatcgacggttccctgaacaggacccctactggattttacgatcgggtttggcagattttagagcgcacgcctaatggcatcatagtggccggcaagcatctgcctcagcagccaaccctgtcggatatgacaatgtatgaaatgaacttctcattacttgtggaggacacgcttggcaacatcgaccagccacagtaccgacaaattgttgttgagctgttgatggtcgtgagcatcgtcctcgaaaggaatcccgaacttgagtttcaggataaggtcgacctggacagactagtgaaagaggcctttaacgagttccagaaagaccagagccgcctgaaagagattgaaaaacaggatgacatgacctccttctacaatacgcccccactgggtaaaagaggcacttgttcctacctgacaaaagccgtgatgaatcttttgctggagggagaggttaagcccaataacgacgacccctgcctaatctcgtag

SEQ ID NO: 3964 - DNA, 1221 bp, synthetic construct
  misc_feature 1..1221: note = source = /note="Description of Artificial Sequence: Synthetic coding sequence"
  source 1..1221: mol_type = other DNA
atgaccctggacgtgggccccgaggacgagctgcccgactgggccgccgctaaggagttctaccagaaatatgaccctaaagatgttatcggtcggggcgtctctagtgtggtgcgcaggtgtgtccaccgagccactggacacgaattcgcagttaaaattatggaagtgactgccgaacggctctcacccgaacagcttgaggaagttagagaagcaacgcgtcgggagacacatatcttacgccaggtagccggacacccacatatcattactctaattgacagctacgagagctcttccttcatgttcttagtgtttgacctcatgcgtaagggggagctcttcgattatttgactgagaaggtggcactttcagagaaagagacgaggtccattatgcgctctcttctggaggccgtgtccttcctacacgcgaacaacatagtgcatcgggacctgaaaccagagaacatcttgctcgatgataacatgcagatccgcctaagcgatttcggcttttcgtgtcatcttgagcctggggaaaagctgagggagttgtgcggaacacctggctacctggcccctgagatccttaagtgttctatggacgagacacacccggggtatgggaaggaagttgatttgtgggcctgtggcgtcatactgttcaccctgttggctggaagccccccattttggcaccgcaggcaaatcctgatgctgagaatgatcatggagggccagtaccaatttagcagtcccgagtgggacgaccgctcatccaccgttaaggacttgatctcacgactcctgcaggtggaccccgaagcaagactcaccgctgagcaggcgcttcagcatcctttttttgaacgctgtgaaggatcccagccatggaacctgaccccgcggcagcggttcagggtcgctgtgtggacagtcctcgccgcagggagggtggcactatctacccaccgtgtacggcccctgactaagaatgcgctgctgcgagacccttatgccctcagaagcgtcaggcacctgatagataactgcgcttttagactgtatggtcattgggttaagaagggggaacaacaaaaccgagccgctctcttccagcatcggccaccaggccctttccctataatgggccccgaagaggagggggactctgccgcgatcacagaggacgaagctgtgttagtgctgggttag

SEQ ID NO: 3965 - DNA, 1125 bp, synthetic construct
  misc_feature 1..1125: note = source = /note="Description of Artificial Sequence: Synthetic coding sequence"
  source 1..1125: mol_type = other DNA
atgaccctggacgtgggccccgaggacgagctgcccgactgggccgctgcaaaggagttctatcaaaaatacgatcccaaggatgtgatcggcaggggggttagctcagtggtaaggcgctgcgtccatagggctactggccacgagtttgccgtgaagataatggaggtgactgctgagagattgtcgcccgaacagttggaagaggtgcgtgaggccacaaggagagagacccacatcttgagacaagttgctggacatccccatatcataacactcatcgattcttacgaatcttcgtcattcatgttcctagtctttgatttgatgaggaaaggagaactgtttgactatctcacagagaaggtggccctcagcgagaaggaaacccgcagcatcatgcggtcactccttgaggccgttagctttctccatgcaaacaatattgtacatcgggacctgaagcctgaaaacatcctactggacgataacatgcagattaggctgtcagacttcggtttttcctgtcatctggaaccaggagaaaagctacgggaactttgtggcacccctggctatctcgctcccgagatcctgaagtgctctatggacgagacccacccaggctacggaaaagaagtagatttatgggcctgcggggtgatcctgtttactctcctggcgggttcccctcctttctggcaccgcagacagatcctgatgcttcgaatgattatggaggggcagtaccagttttcatctccagagtgggatgacagaagctccactgttaaagacctgatcagccgtctgctccaggtggatcctgaggcccgcctgaccgccgagcaggctctgcagcatccattctttgagagatgcgaggggtcccaaccctggaacctgacccccagacagcggttccgagtagctgtctggaccgtgcttgctgccgggcgggtagcccttagcactcaccgagtcaggcctctgactaagaacgccctcttgcgggacccctatgccctgcgtagtgtacggcacttaattgacaactgtgcattccgactctatggtcattggatcaggaagcagtggatcggcaagctgatggcttgcgtatag

SEQ ID NO: 3966 - DNA, 3999 bp, synthetic construct
  misc_feature 1..3999: note = source = /note="Description of Artificial Sequence: Synthetic coding sequence"
  source 1..3999: mol_type = other DNA
atgcagcaggccccccagccctacgagttcttcagcgaggagaactcccctaagtggaggggactgctggtttcagctcttcggaaggttcaggagcaggtgcatccgactctgtcggccaacgaagaatccctctattacatcgaagagctgatctttcagcttttgaataaactgtgcatggcccagccacgaacagtccaggacgtggaggagcgcgtgcagaaaacatttccacaccccatcgataagtgggccatagccgacgctcagtccgcgatagagaaacgcaaacgtagaaatccattattgctgccggtggacaaaatccacccttccctaaaggaggttctgggctacaaggtggactaccatgttagcctgtatatagtggcagtgctggagtacatctccgccgatattctcaaactagcaggaaactatgtgttcaatattagacattatgaaatatcccaacaagatatcaaggtgtccatgtgcgctgataaggtactgatggatatgtttgaccaggatgatattgggctcgtgtctttatgtgaggacgaacccagcagtagtggggagttaaactactacgacctcgtgagaacagaaatcgctgaagaaagacagtacctgcgagaattaaatatgatcattaaagtcttccgcgaggcatttcttagcgatcggaaactgttcaaaccctcggacatcgaaaaaatcttctctaatattagcgacatccatgagctcaccgtcaagttgcttgggcttattgaagacacagtggaaatgaccgacgaatccagtccacacccacttgcaggctcatgtttcgaagacttagcagaagagcaggccttcgatccttacgagaccttgtctcaggacattttgagtcctgagttccatgaacacttcaacaaactgatggctaggccggctgtggcactgcacttccaaagcattgctgatggattcaaagaagctgtccggtacgtgctgccgcggttgatgcttgtccctgtttaccattgctggcattatttcgaactgctaaagcaactcaaagcctgttctgaggagcaggaggatagagagtgcctcaatcaggctattacggccttgatgaacttgcagggctcaatggaccgcatttataagcagtactctcctcgtcgccgacctggcgaccccgtgtgtcctttctattcacaccaactgcgaagcaaacatctggccatcaagaagatgaatgagatccagaagaatatagacggctgggaaggcaaggacatcggccagtgctgtaatgagttcatcatggagggtcctctgacccggatcggggccaagcacgaacgccatatattcttgttcgacggactcatgatttcatgtaaaccgaatcacggacaaacacgcctgcctggatactcttcggctgaataccggttaaaggagaagtttgtcatgcggaaaatccagatatgtgataaagaggacacatgtgagcataagcacgctttcgagcttgtgtccaaggacgagaactccattatttttgcagccaaatctgcagaggagaagaataattggatggctgcactgattagtttacactataggagcacgctggaccgcatgttggacagcgtgctgttaaaggaagaaaacgagcaaccgctgaggttgccgtccccggaagtgtaccggtttgtggtgaaagactctgaagaaaatatagttttcgaggacaatctgcaaagccgatccggtatacccattatcaagggcggcacggtcgtcaagctgattgagcggctgacttaccatatgtacgctgatcctaatttcgtccggacctttctcaccacctacaggtcattttgtaagccacaagaactgctctctctgcttatcgagcgtttcgagatccccgaacctgagccaacagatgccgataaattggccatcgagaaaggcgagcagccaatctctgctgacctgaaacgcttccgtaaggagtatgtgcaaccggtgcagctgagaatcctgaatgtgttcagacactgggtggagcaccacttctatgacttcgagagagacttggagctcctggagcgactggagagcttcatatccagtgtcagggggaaagccatgaagaagtgggtggagtccatcgccaagataatccgcaggaaaaaacaggcacaggctaatggagtgtcgcacaacatcaccttcgaaagcccccctccacctatcgagtggcacattagtaagcctggccagttcgagacctttgatctgatgacgctgcatcctattgaaatcgcgaggcagctgactttgctggaatccgacctctataggaaggttcaacctagcgaactggtggggagcgtctggacaaaagaagacaaggaaatcaatagccccaacctgcttaagatgatcagacatactactaacctgacattgtggttcgagaagtgtatcgtggaagccgagaattttgaagaaagagtggccgtactgagccgcataatcgagatccttcaggtcttccaagatctaaacaatttcaatggtgttctggaaatagtaagcgcagttaactccgtgtcggtgtaccggcttgatcatacctttgaggcgctgcaggaacggaaacggaagattctggacgaggccgtcgagctgagccaggaccacttcaaaaagtacctcgtgaagctgaagtccattaacccgccttgtgtacctttttttggaatctacctgaccaatatccttaagacagaggaggggaacaacgattttctcaagaagaagggcaaagatctcatcaattttagcaagcgccgaaaagttgctgaaatcactggggagattcagcagtaccagaaccaaccctattgtctgcgcatcgaaccggatatgcggcggtttttcgagaacctgaaccctatggggtctgcaagcgagaaggaattcactgattacttattcaacaagagcctcgagatagaaccaaggaattgtaagcagcctccgcgcttcccaagaaaatccacctttagtctgaaatcccccggtatcagaccaaataccggcagacatggtagcacctccggaactttgcgggggcacccgacccctctcgagcgagagccctgcaaaatatcattcagccgtatcgcagagaccgagttagagtctacagtgtcggcccccacatcacccaatactcccagcactccccccgtaagcgcttcttccgacctcagcgtgtttctggacgtggaccttaatagttcctgcggctctaactccatattcgcgcctgtgctcttacctcacagtaagagcttcttttcatcttgcgggtctctccacaagctgagcgaggaaccgttaatcccacctcccctgcccccacggaagaaatttgaccacgacgctagcaactccaaaggcaacatgaagtcggatgatgatccaccagccattccgccaaggcagcccccaccccccaaggtgaaaccacgcgtgccagtgcccaccggggcatttgacggcccgctgcacagcccaccccctccacctccccgcgatcctctcccagatacacccccccctgtgccgctacggcctcccgagcattttatcaattgcccatttaacttacaacctcctcctcttggacacctgcatcgggactcagattggctccgcgatataagtacatgccctaattcaccatctacccccccatctactcctagcccacgggtacctagaagatgctatgttctgtcatccagccagaataatctcgcccatccgccagccccacctgtgccacctcgccagaattcctctcctcacctgcccaagctccctcccaaaacttacaagagggagctgtctcacccccctctctataggcttccattgctggaaaatgccgagaccccgcagtag

SEQ ID NO: 3967 - DNA, 2442 bp, synthetic construct
  misc_feature 1..2442: note = source = /note="Description of Artificial Sequence: Synthetic coding sequence"
  source 1..2442: mol_type = other DNA
atggccaagcccctgaccgaccaggagaagcggcggcagatcagcattcgcggtatcgtgggcgttgagaacgtggcggagctgaagaaaagcttcaataggcacttgcatttcacactcgtgaaagaccggaatgtggcaacgactagagattattattttgcattggctcataccgtccgcgaccatttggtcggccggtggataaggactcagcagcactactacgacaaatgccccaaactggggctggatatcgaagaactggaggaaatcgaagaggatgccggcctgggaaatggcggtctcggccggcttgctgcttgcttcctcgacagtatggctacccttggcctggcagcttacgggtacggtatccgttacgaatatggcatcttcaatcagaagattagggacggatggcaggtggaggaagccgatgactggctccggtacggaaacccttgggaaaagtccaggcccgagttcatgttgccagtccacttttacggcaaggttgaacacaccaataccggaactaagtggattgatacacaggttgtacttgctctgccgtatgacaccccagtcccgggttatatgaacaacacagtgaatacaatgaggctgtggagcgcccgcgcacccaatgacttcaaccttcgcgactttaatgtgggtgactacatccaggctgtgttggaccgaaatttagcggagaatatcagcagagttttgtaccctaatgacaattttttcgaaggcaaggagctgcggttgaaacaggaatattttgtcgttgccgcgaccctccaggacatcatcaggagattcaaggcatcaaaatttggctctaccaggggcgccggcactgtgtttgacgcttttcccgatcaggttgctattcagctgaacgatacccaccctgcacttgcaatcccggagcttatgcgcattttcgtagatatcgagaagcttccgtggtctaaggcttgggagttaactcaaaaaacatttgcttataccaatcacacagtcctaccggaggctctcgagaggtggccggtggacctggtggaaaagctgctccccaggcatctggaaatcatttatgagataaaccaaaaacacttggaccggattgtcgctctgttccctaaggacgtggacaggctccgacgcatgtccttgatcgaggaagagggcagcaagcggatcaacatggcccatctgtgcatcgttggctctcacgctgtcaacggcgtggctaaaatacattccgacatcgtaaagactaaggtttttaaagatttctcagagctggagcccgacaagttccagaacaagaccaatggaatcactcctcggcgctggctcctcctgtgcaatcctggattggcagagcttatcgctgaaaagatcggggaagactacgtgaaggacctaagtcagcttacgaaattacacagtttcttgggggacgatgtgtttcttagagaactcgcaaaggtgaaacaagaaaataaattgaaatttagccaattcctcgaaacagaatacaaggtaaaaatcaacccctcttctatgtttgatgtccaggtcaagcggatccacgagtataaacggcagctgttgaactgtctacatgtgataactatgtataaccgtataaagaaagacccgaaaaagctgtttgtgccaagaaccgttattatcggaggcaaggccgcacctggatatcatatggctaaaatgatcataaagcttattacatcagtggcagatgtggtgaataatgatcctatggttggttccaaactcaaagtgatctttctcgagaactaccgggtgtccctggccgaaaaggtgattccagcaactgatctgtctgagcaaattagtacagcagggacggaggccagcggcaccggcaatatgaagtttatgctgaatggcgctttaaccattggcactatggacggcgctaatgtggagatggcagaggaagcgggtgaagagaacctctttatattcggcatgcggatagacgatgtcgccgcccttgacaaaaagggatatgaggctaaggagtactatgaagcacttcctgaactcaagttggttatagaccagattgacaacgggttctttagcccgaagcagcctgacttgttcaaagacatcatcaacatgctgttttaccacgacagatttaaggtgtttgccgattacgaagcttatgtgaagtgtcaggacaaggtctctcagctgtatatgaatccaaaggcctggaataccatggtgctgaagaacatcgcggcctcaggaaaattttctagtgacagaacgattaaggagtatgctcagaatatctggaatgtggaaccaagcgatctgaagatatctctgagtaatgagtccaacaaagtgaacggaaattag

SEQ ID NO: 3968 - DNA, 2433 bp, synthetic construct
  misc_feature 1..2433: note = source = /note="Description of Artificial Sequence: Synthetic coding sequence"
  source 1..2433: mol_type = other DNA
atggagcacaaggaggtggtgctgctgctgctgctgttcctgaagtcgggtcagggcgagcctttggatgactatgtgaacacccagggcgccagtctcttctctgttaccaaaaaacaactcggagccgggagtatcgaggaatgcgcagctaagtgcgaagaggatgaagaattcacgtgccgcgcattccaatatcacagcaaggaacaacaatgcgtcataatggccgagaaccgaaagtccagcatcatcattcgaatgcgtgacgtggtgttatttgagaaaaaggtttatctgtccgagtgtaaaacgggcaatggtaaaaactatcgtggcaccatgagtaaaacaaaaaacgggataacttgccaaaagtggtcaagcacatctcctcacaggccgaggttctcacccgccacgcatccatctgaggggcttgaagagaattactgcagaaacccagacaacgacccgcaaggcccatggtgttacacaactgatcccgagaaaagatacgactattgcgatattctagagtgtgaggaggaatgcatgcattgctcaggagaaaattatgacggaaagatttctaaaaccatgtctggcctggaatgtcaagcttgggactctcagtcaccccatgcgcacggctatattcctagcaaatttcctaacaaaaaccttaagaaaaattactgtaggaatcccgacagagagctgcgcccctggtgcttcactacagatccaaacaaacgatgggagttgtgtgatatccccagatgcacaaccccgcctccctcaagtggccccacttaccagtgtttaaaagggaccggagagaactaccgcggcaatgtcgcggtcaccgtgtctggccacacatgtcagcattggtccgcacaaactcctcacacgcacaatcgcactccggaaaattttccttgtaagaacctggacgaaaattactgtagaaaccctgatggcaaaagagctccatggtgccatactacaaatagccaggtgcgttgggaatactgcaaaatccctagttgtgactcctcaccagtgagcacagagcagctagcgccaacagctccccccgagctgacccccgtcgtgcaggattgctaccacggagacgggcaatcctaccggggcacgtccagtacaacaactacagggaaaaaatgtcagagctggtcttcgatgactccccatcggcatcagaaaacacctgaaaactacccaaatgccggactcaccatgaactactgcaggaatcccgacgccgacaaaggcccttggtgtttcacaacagacccaagcgttagatgggagtattgcaacctgaaaaagtgtagtggtaccgaagcatccgtcgttgcaccgccacccgtagtgttactcccggatgtcgaaacgccttccgaagaggactgcatgtttgggaatggcaaaggatatcggggcaaacgtgcaaccaccgtcactgggaccccttgtcaagactgggccgctcaggagccccaccggcatagtatcttcactcccgagacaaaccctcgcgccggactggagaagaattattgtcgaaaccctgatggtgatgtgggagggccctggtgctacacaacaaacccccgcaagttgtatgactactgtgatgtcccgcagtgcgctgcaccttcatttgactgtggtaagcctcaagtggaacctaaaaagtgtcccggaagggttgtaggcggttgtgtggcacatccgcactcttggccctggcaggtcagcttgcgcactcggttcgggatgcacttctgcggcggcaccttgatcagccccgaatgggtcctgaccgcagcgcactgccttgaaaagtccccacggccaagttcctataaggtgatcctcggtgcgcaccaggaggtaaatttggaacctcacgtgcaggaaatcgaagtatcccgactcttcctcgaacctacccgcaaggatatcgcactgttgaagctcagctctcccgccgtcattaccgacaaggtgattcctgcctgccttcctagccccaactacgtggtggcagaccgaacggagtgctttatcaccggttggggggagacacagggaaccttcggagctggtctactcaaggaagcacaattgcctgtgattgaaaataaggtgtgcaatcggtacgagttcctgaatggcagggtccagtctacggaactgtgcgcgggccaccttgcaggcggcactgactcttgccagggggattccggaggtccccttgtgtgcttcgaaaaagataaatacatcttgcagggggtgaccagttggggacttggatgcgctcggccgaacaagcctggagtatatgtccgggtgagccggtttgtgacctggatagagggagttatgcggaacaactag

SEQ ID NO: 3969 - DNA, 633 bp, synthetic construct
  misc_feature 1..633: note = source = /note="Description of Artificial Sequence: Synthetic coding sequence"
  source 1..633: mol_type = other DNA
cggttcggcatgcacttctgcggcggcaccctgatcagccccgagtgggttctgactgccgcccactgcctggagaagagccctcgcccatcttcctacaaagtcattttgggagcccaccaggaggtgaatctagagcctcacgtgcaggagatcgaagtgtccaggctgttcctcgagcctacgcgaaaggacatcgctctgctgaaactctcgagtcctgctgtgattacagacaaggtaatcccagcttgcctgccgtcccccaactatgtggtcgctgaccgcacagaatgtttcattacaggctggggtgagacacagggcacctttggagcagggcttctgaaggaagcgcagctgccggtcattgagaataaggtgtgtaatcggtatgagttcctcaacggccgagttcaatcaaccgagttatgcgccggccatctggccggcggcaccgacagctgtcagggagacagcgggggacccctggtttgtttcgagaaagataagtacattctccagggggtgacctcatggggtctgggttgcgctcgaccaaataaaccaggtgtgtatgtgcgcgtgagcaggttcgtgacatggattgagggtgtgatgagaaataattag

SEQ ID NO: 3970 - DNA, 411 bp, synthetic construct
  misc_feature 1..411: note = source = /note="Description of Artificial Sequence: Synthetic coding sequence"
  source 1..411: mol_type = other DNA
atggagcacaaggaggtggtgctgctgctgctgctgttcctgaagtccggccagggcgagcccctcgatgactacgtaaacactcagggggcttctctgttttcagtcaccaaaaagcagcttggcgcagggtctatcgaagagtgcgccgctaagtgtgaggaggatgaagagtttacttgtagagctttccagtaccactctaaggagcaacaatgtgttatcatggcggaaaataggaagtcgtctattattattagaatgagggacgtcgtgctgtttgaaaaaaaagtctatctttctgaatgtaaaactggcaatggcaagaactatcgggggaccatgtcaaaaacaaaaaacggcattacctgccagaagtggtccagcacttccccccatcggcctagatag

SEQ ID NO: 3971 - DNA, 945 bp, synthetic construct
  misc_feature 1..945: note = source = /note="Description of Artificial Sequence: Synthetic coding sequence"
  source 1..945: mol_type = other DNA
atgggcatcggccggagcgagggcggccggcggggcgccgccctgggagtcctcctcgcattgggtgcagctttgctcgccgtgggttctgcttccgaatacgactacgtctcatttcagagtgatattggtccataccagtccggccgcttttacactaaacctccccaatgcgtcgacattccggccgacttacggctgtgccataacgtaggctataagaagatggtgcttcccaatctgttggagcacgagacgatggccgaagttaagcagcaggccagcagctgggttcctctgctgaataaaaattgtcatgccgggactcaagtttttctttgcagtcttttcgcacccgtgtgcctcgacagacctatctacccatgcagatggctgtgtgaagccgttagagattcatgtgaacctgtgatgcagtttttcggtttctactggccggagatgctgaagtgtgataagtttccagagggagacgtgtgtatagcgatgacaccccccaatgcaacagaggcctccaagcctcagggcaccaccgtctgccctccatgcgataatgagcttaagtccgaggcgattatagagcacctgtgtgcttcagagttcgcactacggatgaagataaaagaggttaagaaggagaacggcgataagaagattgtgcccaagaaaaaaaaacctctcaaactcggcccaataaagaaaaaggacctcaaaaagctggtcctgtacctgaaaaatggagcggattgtccctgccaccaactggataatctttctcatcattttctaattatgggacggaaggtgaaatctcagtaccttctgaccgcgattcataaatgggacaagaagaataaggagtttaagaactttatgaagaagatgaagaatcacgaatgtcctacctttcagtcagtgttcaagtag

SEQ ID NO: 3972 - DNA, 882 bp, synthetic construct
  misc_feature 1..882: note = source = /note="Description of Artificial Sequence: Synthetic coding sequence"
  source 1..882: mol_type = other DNA
atggacgccatgaagcggggcctgtgctgcgtgctgctgctgtgcggtgcggtcttcgtgtcaccctcacaggagatccacgcaaggttccgtcggggagctcgaagctaccaggtaatctgcagagatgagaagacccagatgatctaccagcagcatcagagctggctgcgacctgtcctcagaagtaatagggttgagtattgctggtgtaactcggggagagcccaatgccactcagtgcccgtgaagtcctgtagcgagcccaggtgcttcaatggaggtacgtgccagcaggccctctacttttctgacttcgtctgccaatgtcctgagggcttcgccggaaaatgctgcgagattgataccagggcaacatgttatgaagatcaagggatttcgtaccgcggaacgtggagtaccgctgagtctggggcagaatgcactaattggaacagttctgccctggcacaaaaaccctattccggccgccgacctgatgctatccgcctcggtttgggcaaccataactactgtcggaaccccgacagggatagcaaaccctggtgttatgtcttcaaggccgggaagtactcaagtgagttttgttccaccccagcatgtagcgaggggaacagcgattgttatttcgggaacggaagcgcgtatcgagggacacactctctgacagagagcggagccagttgcctgccttggaactcgatgattctcatcggcaaggtgtacaccgctcagaacccgagcgcccaggccctcggcttaggcaagcacaattactgccgctgtaggaccggccgaagcgtttcctctccagccaccgctagtatgaggccttgtctcttgagcatccgatccggatag

SEQ ID NO: 3973 - DNA, 1551 bp, synthetic construct
  misc_feature 1..1551: note = source = /note="Description of Artificial Sequence: Synthetic coding sequence"
  source 1..1551: mol_type = other DNA
atggacgccatgaagcggggcctgtgctgcgtgctgctgctgtgcggggctgttttcgtgtcgccatctcaggaaatccacgcccgatttagacggggtgcaaggtcctatcagggctgtagcgaaccaaggtgcttcaatggaggtacttgtcagcaggctctgtatttcagcgactttgtatgtcaatgtccagagggctttgctggcaagtgctgtgagatagataccagagctacgtgctacgaggaccagggaatctcctacagggggacctggagtacagcagagtcaggggcagagtgtacgaactggaactcgtccgccctcgcacagaagccctactcaggccggcgccctgacgccatcagactgggtttggggaaccacaattactgtcgaaatcctgatcgggactctaaaccttggtgttatgtgttcaaagccggtaagtactctagcgaattctgtagcacgccagcttgcagtgaaggaaattcagattgctatttcgggaatgggtccgcttaccggggtacacatagtcttacagagtcaggagcgtcatgcttgccttggaactctatgatacttatcggtaaggtgtacactgcacagaatcccagtgcccaagctctgggactgggcaaacataattactgtcgtaatccagacggggatgccaagccctggtgccatgtactgaaaaatcgccggctgacatgggagtactgcgacgttccctcgtgtagcacgtgcggcctgcgtcagtatagccagcctcagttcaggatcaagggaggcctgttcgctgacatcgccagtcacccttggcaagctgccatcttcgctaaacacagaagaagcccgggtgagcgctttctgtgtggagggattctgatcagttcttgctggatcttgtccgcagcccattgtttccaggaacgcttccctcctcaccaccttacagtgattttgggcagaacttacagggtggttccgggcgaggaggaacagaagtttgaggtggaaaagtatatcgtgcacaaggaattcgacgatgatacctacgacaacgatatcgctctgctccagttgaaaagtgattcaagtcgctgtgcccaagagtcctccgtggtacggacagtgtgtctgcccccagctgatctccaacttccagattggacagagtgcgaactttcaggatacggtaaacatgaagctctctccccgttctattcagaacgcctgaaggaggcccatgtacgactgtaccccagcagccggtgtaccagccagcatctgctaaatcgcacagtaacagataatatgctgtgtgccggagatacgcgctccggaggtccgcaggctaatctgcacgatgcatgtcagggggactccgggggtcctttggtctgcctcaatgacggcagaatgaccctggtggggatcatcagttggggcctgggatgcggccagaaagacgttccaggcgtatacacgaaagtcactaactatttagactggattagagacaacatgcgtccatag

SEQ ID NO: 3974 - DNA, 1689 bp, synthetic construct
  misc_feature 1..1689: note = source = /note="Description of Artificial Sequence: Synthetic coding sequence"
  source 1..1689: mol_type = other DNA
atggacgccatgaagcggggcctgtgctgcgtgctgctgctgtgcggagcagtgtttgtgagccctagtcaagagatccatgctcgatttcgcaggggagctcgctcgtatcaagtcatttgcagggatgagaaaacccaaatgatctatcaacagcatcaatcctggctgcggccggtgcttcgaagtaatcgggtcgagtattgctggtgtaatagcggcagggcccagtgtcactcagtgcctgtcaaaagctgctcagaaccgagatgtttcaacggagggacctgtcaacaggccctgtatttcagcgacttcgtatgtcagtgccctgagggctttgccggtaaatgctgtgaaatcgacacacgcgcgacgtgctacgaggatcagggaatcagttacagggggacctggagcaccgcggaatctggcgctgagtgtaccaattggaattccagcgcactggcccagaaaccttacagcggaagaaggcccgatgcgattcgcctggggctggggaaccataattactgcagaaacccagacagagatagcaaaccgtggtgctatgtctttaaggccggtaagtacagctccgagttttgctccacgcctgcgtgtagcgagggcaacagcgattgctacttcggcaacggaagcgcctacaggggaactcacagccttactgagtcgggagcttcatgcctaccatggaactccatgatcctgatcggcaaggtgtatacagcccagaatccaagtgcccaagcactcggcctagggaagcataactattgtcggaatcccgacggtgatgcaaaaccctggtgtcacgtgttgaaaaacaggcggctcacctgggaatattgtgatgtcccttcttgctctacatgcggactcaggcagtacagccagccccaattccgcattaaggggggcctgtttgctgacatagcttcccacccctggcaggccgccatcttcgccaagcaccgccgcagcccaggcgaaagattcctatgcggcggaatcctcatttccagttgctggatcctttccgccgctcactgttttcaggagcgcttccccccccatcatctgactgtaatcctgggccgaacatatagggtcgtgccaggcgaagaggagcagaagttcgaagtagagaagtatatcgtccataaagaattcgatgacgatacctacgacaacgacattgccctgttgcagctgaagagcgactccagccgctgcgcccaggagtctagtgtcgtgaggaccgtgtgtctgccccctgctgacctccagctgcctgattggacagagtgtgagctgtctgggtacgggaagcacgaggccctgagcccattctacagtgaacgtctgaaggaagcccatgtgcgcttatatccatccagccgatgtacctcgcagcatctgctgaacaggaccgttaccgataatatgctttgcgccggagacacacggtccggaggccctcaggccaatctgcacgacgcgtgtcagggcgactctggcggaccgcttgtctgtcttaatgacggccgtatgactctggtgggcatcatctcatggggtctcggctgcggccaaaaggatgtccccggcgtgtacacgaaagttaccaactacttagattggattagggacaacatgagaccctag

SEQ ID NO: 3975 - DNA, 1311 bp, synthetic construct
  misc_feature 1..1311: note = source = /note="Description of Artificial Sequence: Synthetic coding sequence"
  source 1..1311: mol_type = other DNA
atggacgccatgaagcggggcctgtgctgcgtgctgctgctgtgcggggcggtgttcgtgagcccttcacaggaaatccacgccagatttcggaggggtgccagatcctatcaagtgatttgcagggacgaaaaaacgcagatgatttaccagcaacaccagagctggttgcggcccgtgttgcggagcaaccgggtggaatattgttggtgtaattcaggtcgagctcagtgccattccgttccagtaaagcgaaactctgactgttactttgggaacggcagcgcttacaggggaacccacagtcttacagagagcggagcatcatgcttaccatggaactctatgatcctgattggtaaggtctacaccgcccagaacccaagcgctcaagcactcggtcttggcaagcataattattgcaggaacccggatggggatgctaagccctggtgtcacgtgctgaagaacaggaggcttacgtgggaatattgcgacgtgccaagctgttctacctgcggcttaaggcaatatagtcagccacaatttcgcatcaagggtggcttgtttgccgacatagcttcccacccgtggcaagctgctatcttcgccaaacaccgtcgatcccctggggaaaggtttctatgcgggggaatcctgatcagctcatgctggattctttccgccgctcattgctttcaggaacgattccctccccaccatctcactgtgattctgggcagaacctacagagtggtgcctggggaagaagaacagaagttcgaagtcgaaaagtacatcgttcataaagagtttgatgatgacacgtacgacaacgatatcgcccttcttcagctgaaatcagattcaagcagatgtgctcaggaatcatcagttgtaagaaccgtctgcctcccacccgcagatctgcagctccccgattggaccgagtgtgagctgtctgggtatgggaagcacgaagccctgagccctttctacagcgaacggcttaaagaggctcacgtcaggttgtacccctcttccagatgcacaagccagcatcttctgaatcgcacggtgacagataacatgctgtgtgccggcgacactcggtctggtggtccccaagcgaatctgcacgatgcctgtcaaggggattcgggagggccactggtttgtttaaacgacggacgcatgacactggttggcattattagctggggtttgggctgcggccagaaagatgtgccaggcgtgtacaccaaggtgactaactacctggactggattcgggacaatatgagaccttag

SEQ ID NO: 3976 - DNA, 1500 bp, synthetic construct
  misc_feature 1..1500: note = source = /note="Description of Artificial Sequence: Synthetic coding sequence"
  source 1..1500: mol_type = other DNA
atggacgccatgaagcggggcctgtgctgcgtgctgctgctgtgcggcgcagtgtttgtttccccgagtcaggagattcacgcaaggttccgcagaggggcgagaagctatcaggtaatatgtagggatgaaaaaacccagatgatatatcagcaacaccagtcctggctgagacctgtgcttaggagcaatagagtggagtactgctggtgtaattcaggtcgcgcccagtgtcacagcgtccctgtgaagtcttgtagtgagcccagatgtttcaacggcggcacatgtcaacaggcactgtactttagtgacttcgtatgtcagtgtcccgagggctttgctgggaagtgctgcgaaattgattctaaaccttggtgttatgtattcaaggcaggtaagtactcgtctgaattttgttcaacaccagcttgctctgagggcaattccgactgctactttggaaacggaagcgcctatcgaggtactcactcccttaccgaaagtggcgcatcctgtctgccctggaactccatgattctgatcgggaaggtgtacacagcacagaatccaagcgcacaggcactgggacttggaaaacataactattgccgcaaccctgatggggatgctaagccctggtgtcatgttctcaaaaatcgcagactcacatgggagtattgtgacgtgcctagttgctccacatgtggcctgagacaatatagtcaaccccagtttcgcatcaagggtggtctgtttgccgacatcgctagccacccatggcaggccgcaatctttgccaagcaccgaagatctcccggggaaaggttcctttgcggcggaatcttaatcagcagctgttggatactctctgctgcacactgcttccaggagcgctttccaccccaccatttgacagtcattctgggcagaacttatcgggtggtccccggcgaggaggagcagaagttcgaggtggagaaatacattgtccataaagagtttgacgatgatacctatgacaacgacatcgccctcctgcagcttaagtctgatagcagtcgatgcgcccaggagtcgtcagtggtacgaacagtttgtctcccaccggctgaccttcagcttcccgactggacggagtgcgaactgagcgggtacggcaaacatgaagcactgtcgcccttctattcagagaggttgaaggaggcgcatgtaagactgtacccgagcagccggtgtacctcacaacatctgctgaacagaaccgtaacagacaatatgctgtgcgccggagatactcggagcggcggcccccaggccaacctgcacgacgcctgtcagggcgactccggcgggccattagtgtgcctgaacgacggacgtatgacactggtgggaataatatcttggggacttggttgcggtcaaaaagacgtgcccggagtatacacgaaggttaccaattatttagactggatccgggataatatgcggccatag

SEQ ID NO: 3977 - DNA, 537 bp, synthetic construct
  misc_feature 1..537: note = source = /note="Description of Artificial Sequence: Synthetic coding sequence"
  source 1..537: mol_type = other DNA
atggacgccatgaagcggggcctgtgctgcgtgctgctgctgtgcggggctgtgtttgtgtcccctagccaggagatccacgctcggttcaggcgcggggccagaagctatcaggtcatatgtagagacgaaaaaacacagatgatatatcaacagcaccagtcctggctgcggccagtcctgagaagcaacagggtggaatactgctggtgcaatagtggccgagcccaatgtcatagcgtgcctgtcaagtcctgctctgaacctaggtgtttcaatgggggcacttgccaacaagccctgtacttttctgattttgtttgtcagtgcccagagggatttgccggcaagtgctgtgaaatcgatacccgcgccacctgctatgaagaccagggtatctcttacagaggcacgtggtcaacagccgagtctggcgccgagtgcactaattggaactcaagtgccctcgcccaaaagccctacagcgggaggaggcctgacgcgatcagactcggactgggaaatcacaattactag

SEQ ID NO: 3978 - DNA, 474 bp, synthetic construct
  misc_feature 1..474: note = source = /note="Description of Artificial Sequence: Synthetic coding sequence"
  source 1..474: mol_type = other DNA
atggacgccatgaagcggggcctgtgctgcgtgctgctgctgtgcggtgctgtgttcgtttcaccttctcaggaaattcatgcaagattccgccggggggcacgaagctatcaagtgatttgtcgcgacgaaaagacgcaaatgatctaccaacagcaccagagttggctgcggcctgttctccgttctaatcgcgtggaatattgttggtgcaatagcggacgggcacagtgccactccgtgcccgtaaaatcttgcagcgagccccggtgtttcaacggagggacctgccaacaagccctctatttctccgattttgtgtgtcagtgtccggaaggattcgccggcaaatgttgcgagatcgatacaagagccacatgctatgaggatcaaggaatctcgtaccgggggacgtggtcaaccgccgagtcaggcgcagagtgtaccaattggaatagcagcgccttggcctag

SEQ ID NO: 3979 - DNA, 1422 bp, synthetic construct
  misc_feature 1..1422: note = source = /note="Description of Artificial Sequence: Synthetic coding sequence"
  source 1..1422: mol_type = other DNA
atggacgccatgaagcggggcctgtgctgcgtgctgctgctgtgcggggcggtgtttgtttccccatcacaggaaatacacgcaaggttccgtaggggagcccgttcttatcaagtgatttgcagggacgaaaaaactcagatgatctatcagcagcaccaatcctggctgcgaccagtcctccggagtaatcgcgtggagtactgttggtgtaattcgggaagagctcagtgccactccgttcccgtgaagtcctgttccgagcctcgttgtttcaacgggggaacgtgtcaacaggctttgtacttttctgacttcgtatgccaatgccctgagggttttgctggaaagtgttgcgaaatcgggaactcagattgctattttggaaatgggagcgcttaccggggcacgcacagtctcacggagtctggtgcctcttgcctgccatggaactcaatgattcttattggaaaagtatatacagcacaaaacccatcggcccaggcccttgggctggggaaacacaattactgtcgaaacccagacggcgatgcaaagccatggtgccacgtactgaagaataggcgacttacttgggagtactgtgacgtacctagttgctcgacatgtggcctaaggcagtactctcagcctcagttcagaatcaaaggggggttatttgccgatatcgccagtcacccatggcaggctgcgatttttgccaaacatcgtagaagcccaggggagcggtttttgtgtggcggaattcttatctcctcctgctggattcttagcgccgcccactgctttcaggaaagatttcccccccatcaccttacagttattctcggaagaacataccgcgttgtgcccggcgaggaagaacagaagttcgaagtggagaagtatatcgtccacaaagagttcgacgacgacacatatgataatgatatagccctccttcagctgaaatccgattcttcccggtgtgcgcaggagagcagcgtggtgaggactgtgtgcctgccccccgcagatctgcagcttcccgactggacagagtgcgaactaagtggatatgggaaacatgaggctctatccccattctactctgaacgtctgaaagaagctcatgtgagactgtatccttcgagtaggtgcaccagccagcatctcttaaatcgcacagttactgataatatgctctgcgctggtgacactcgatcaggtgggccacaggcaaatctccacgacgcctgtcaaggggattcagggggtccactggtctgcctgaatgatggcagaatgaccctggttggcattatctcctggggactgggatgcggtcaaaaggatgtgcctggcgtctacaccaaagtgactaattaccttgactggatacgcgataacatgcgcccatag

SEQ ID NO: 3980 - DNA, 1083 bp, synthetic construct
  misc_feature 1..1083: note = source = /note="Description of Artificial Sequence: Synthetic coding sequence"
  source 1..1083: mol_type = other DNA
atggccggccacctggccagcgacttcgccttcagccccccccccggtgggggaggtgatggcccgggcggacctgagcccgggtgggtggatcctagaacctggctaagcttccagggaccgccaggggggccgggcataggccccggggttggaccaggcagcgaagtgtgggggatcccaccatgccctcccccttatgaattttgcggcggcatggcctactgcgggccacaggtcggagtggggctcgtgcctcaagggggtctggagacgtcccaacccgagggggaagccggcgtaggcgttgagagcaactccgatggtgcctcccccgagccctgtaccgtcaccccaggcgccgtcaagctggagaaggagaagctggaacagaaccccgaggagtcacaggacataaaagccctgcaaaaggaactcgagcagttcgccaaattgttgaaacaaaagaggataactctcggttacacccaggccgatgttggactcaccctgggagttctgttcgggaaagttttttcacagacaaccatttgcagatttgaggctctccagctgagtttcaagaatatgtgcaagttgcgtcctctcctgcagaaatgggtggaggaggcagacaataacgaaaacctgcaagagatttgcaaagccgagacactggtacaggctcggaaaaggaagcgcacatccattgagaatcgggtgcgcggtaacctggagaatctgtttctccagtgtccaaagcccacactacagcagatatcgcacatcgctcagcagctcggtctcgaaaaggatgtggtccgcgtttggttctgcaacagacgacaaaagggaaagaggtcgtccagtgactacgctcagcgcgaagatttcgaagctgccggctcacccttcagcggcggcccagtatcttttccattagccccagggccacattttgggacacccggctacggcagtccgcatttcaccgctctttacagctccgtgcccttcccagagggagaagcgttccccccggtgtctgtgaccacccttgggtcccctatgcatagtaattag

SEQ ID NO: 3981 - DNA, 798 bp, synthetic construct
  misc_feature 1..798: note = source = /note="Description of Artificial Sequence: Synthetic coding sequence"
  source 1..798: mol_type = other DNA
atgcacttctaccggctgttcctgggcgccacccggcggttcctgaatcctgagtggaaaggtgaaatcgacaattggtgtgtgtatgtgctgacctctcttttgccctttaagattcagtcacaggacattaaggccctgcagaaagaactcgagcagttcgctaagctgcttaagcaaaaaagaatcacactaggctacacacaagcagatgtgggactcaccctgggcgtcctttttggaaaggtgttctcacagacaacaatttgtaggtttgaggccctccagttgagctttaagaatatgtgtaagctaaggcccctgctccagaagtgggtggaggaggccgacaataatgaaaaccttcaggagatctgcaaggcagaaacactggtgcaggctcggaagagaaagcgaactagcatagaaaacagagtgcgtggaaacctagaaaacctctttctccaatgtcccaagccaaccctgcagcagatctcccatatcgcacaacagcttggtctggaaaaggatgtggtccgggtgtggttttgtaaccggagacagaaaggcaagaggagctcatctgattacgctcagagagaggatttcgaagccgcagggtcccctttctcaggaggcccggttagcttccctctcgctcctggtcctcacttcggaactcccggatatggtagcccacactttacagcactctatagttcagtcccatttcctgagggggaagcgtttccccctgtttcagttacaacattaggttctcccatgcacagcaactag

SEQ ID NO: 3982 - DNA, 1083 bp, synthetic construct
  misc_feature 1..1083: note = source = /note="Description of Artificial Sequence: Synthetic coding sequence"
  source 1..1083: mol_type = other DNA
atggccggccacctggccagcgacttcgccttcagccccccccccggcggagggggagatggcccgggtggacccgagcccggctgggtggaccccagaacatggctctcatttcaaggaccccctggaggacctggtatagggcctggggtaggacccgggagtgaggtgtggggtatcccaccctgtccgcccccttatgaattttgtgggggcatggcctattgtggcccacaggtaggtgtaggtctggtcccccaaggggggttggaaacctcccagcccgaaggagaggctggagtgggagtcgaatctaactctgatggcgcctctcctgaaccgtgtaccgtgactcccggtgcagtgaagctggagaaggagaagctcgagcaaaacccagaggagtcacaggatattaaagctcttcagaaagagttagaacagttcgctaagctccttaagcaaaaacgcatcactttgggttatacacaggcggacgtgggtctgacccttggagtgctgtttggaaaggtgttctcccagacaacaatttgtcgctttgaggcccttcagctgagtttcaagaatatgtgcaagctaagacctttgctacagaagtgggtggaggaagcagacaataatgaaaacctgcaagaaatctgcaaagccgagacgctggttcaggctcgcaaacgcaagcgaacaagcattgagaatagagtgagagggaacttggagaatctgttcctgcagtgccccaagccaaccctccagcaaatctcacacattgcccagcagctaggtctggaaaaagacgtagttagggtgtggttctgcaaccgccggcagaaaggcaagcgcagcagctctgattatgctcagcgggaggacttcgaggccgctggtagcccattttcgggaggtccagtgtcatttcctctggcgccagggccacacttcggtacacccggttatgggagcccccatttcaccgccctgtacagctcagtcccattccccgagggtgaggccttccctcccgtgtccgtaactactctggggagcccaatgcacagcaactag

SEQ ID NO: 3983 - DNA, 798 bp, synthetic construct
  misc_feature 1..798: note = source = /note="Description of Artificial Sequence: Synthetic coding sequence"
  source 1..798: mol_type = other DNA
atgcacttctaccggctgttcctgggcgccacccggcggttcctgaaccctgagtggaaaggcgagattgataactggtgcgtctatgtcctgacctccctgctaccatttaagattcaaagccaggatattaaggcactccaaaaggaactcgagcagttcgcaaagcttttgaagcagaagcggatcactctcggctatactcaggccgacgtcggacttaccttaggggtcctcttcggtaaggtgttctctcagacgacaatctgtcgatttgaagccctgcagttgagcttcaaaaacatgtgtaagctacgccctctacttcagaaatgggtggaggaagcagacaacaacgagaacctgcaggagatctgcaaagctgaaaccctagtccaggcaaggaaacgaaagaggacctctatcgagaaccgcgtccggggcaatctcgagaatctgttcctccagtgccccaaacccactctgcagcagataagtcacatagcgcagcagctcgggctcgagaaagacgtggtgcgtgtctggttttgtaatagacgccagaaggggaaacggagttcctctgattacgcacaacgggaagacttcgaggctgcaggcagtcccttctcaggagggccagttagctttcctttagctccagggccgcattttgggactccaggttacggctcaccacatttcactgccttgtattccagtgtgccgttccccgaaggtgaggcattcccccccgtgtcagtgacaacactaggatcccccatgcacagcaattag

SEQ ID NO: 3984 - DNA, 798 bp, synthetic construct
  misc_feature 1..798: note = source = /note="Description of Artificial Sequence: Synthetic coding sequence"
  source 1..798: mol_type = other DNA
atgcacttctaccggctgttcctgggcgccacccggcggttcctgaatcccgaatggaagggggagatcgacaactggtgcgtgtacgtcctgacctcgctacttccatttaagatccaatcacaggacattaaggccttgcagaaagaactggagcagttcgctaagttactgaaacagaagagaattacattgggatacactcaggctgatgtcggcctcactctgggggtgctgttcggtaaggtgttctcacaaactactatctgtaggtttgaggccctgcaactgtccttcaagaacatgtgcaagctgagaccacttttgcagaagtgggttgaagaggcagacaataacgagaacctgcaggaaatctgcaaggcagaaacacttgtacaggcgagaaagcggaagaggacctctatagagaaccgggtaagggggaacttagaaaatctatttttgcaatgtcctaaacccactctgcaacaaatatcacacatagcccagcagctaggactggaaaaagacgtcgtccgtgtctggttttgcaaccgccggcagaagggcaagcgatcctcaagtgactacgcgcagcgtgaggacttcgaagcagctggatcaccattctcgggagggcctgtgtcatttccccttgcaccagggccccatttcggtaccccgggctacgggtcaccgcactttaccgcactgtattcctctgtgcccttcccagaaggcgaggcgtttcctcccgtctccgtgaccactctggggtctccaatgcacagcaattag

SEQ ID NO: 3985 - DNA, 1083 bp, synthetic construct
  misc_feature 1..1083: note = source = /note="Description of Artificial Sequence: Synthetic coding sequence"
  source 1..1083: mol_type = other DNA
atggccggccacctggccagcgacttcgccttcagccccccccccggcggtggcggtgatggccctgggggtcctgaacccggatgggtcgacccacggacttggctaagcttccagggacccccaggaggaccaggaatcggccccggcgtcggtcccgggagtgaggtctggggaatccctccgtgcccgcctccttatgaattttgcgggggcatggcctactgtggtccccaggtgggggtgggactggtcccccagggcgggctggagacgtcacaacctgaaggagaagcgggtgtcggagttgaatctaactccgatggcgcgtcaccagaaccctgcaccgtgacccctggggctgtgaagttagaaaaagagaagcttgaacagaatccagaggaaagccaggatataaaagctttgcagaaggaacttgagcagtttgccaaacttctgaagcagaagaggataacactcggttatacacaggcagacgttggacttaccctcggtgttctcttcggtaaggtcttttctcagactacaatctgtcgatttgaggccctgcagttgtctttcaagaacatgtgtaaactgaggcctctcttacagaaatgggtagaagaggccgacaacaatgagaatctgcaggagatttgcaaggcggagacgctcgttcaggcacggaagcggaaacgaacatcaattgagaaccgggtccgaggtaatttggagaacctgttcctgcaatgccccaaacctacactccagcaaatttctcacattgctcagcagctcggcctggaaaaagatgtagtgcgggtttggttctgtaatcgcagacaaaagggcaagcgttccagctcagattatgcccagcgagaagattttgaagcagcggggtctcccttttctggagggcccgtatcattccctctagcccctgggccacattttggcaccccaggctatggcagcccacacttcaccgccctgtatagtagcgtcccatttccagaaggggaggccttcccccctgtgtctgtgactaccctgggtagccccatgcatagtaactag

SEQ ID NO: 3986 - DNA, 1083 bp, synthetic construct
  misc_feature 1..1083: note = source = /note="Description of Artificial Sequence: Synthetic coding sequence"
  source 1..1083: mol_type = other DNA
atggccggccacctggccagcgacttcgccttcagccccccccccggaggggggggggacggcccagggggtccggaaccggggtgggttgacccacgtacctggctttcatttcaagggcctccgggagggcccgggatcgggccgggtgtgggcccgggctcggaagtgtgggggatacccccatgccctccaccctacgaattctgcggcgggatggcctattgcgggcctcaagtgggcgtgggcctggtgcctcagggagggcttgagacttcccagccagagggtgaagccggcgtgggggtggaatctaatagcgatggagcttccccagaaccatgcacagtgacccccggcgcagtgaagttggaaaaggaaaagttggagcagaaccccgaggagagccaggacataaaagcactgcaaaaagagttggagcaatttgccaagctcctgaagcagaagcgcataaccttgggttacacccaggccgatgttggactgactctgggcgtcctgtttgggaaggtgttcagccaaactactatctgtagatttgaggccctgcagctctccttcaagaacatgtgtaagttgaggcccctgctgcagaagtgggtggaagaagcagataataatgagaatctgcaagagatctgcaaggcagagactttagtgcaagcacgaaagagaaaacgcacctcgattgaaaacagggtgagaggtaatttagaaaacctcttcttgcagtgccctaaacccaccctgcagcagattagccacattgcacaacagctggggctggaaaaggatgttgtgagagtgtggttctgtaaccggcgtcagaagggtaaaaggagctcatctgactacgcacaaagagaagattttgaggccgctgggagtcccttcagtggagggcctgttagctttccactcgcccccggaccccactttggcaccccggggtacggctctccacacttcaccgcattatattcaagcgtgcccttccctgaaggcgaggcgttccctccagtgtccgtgacaactcttggcagcccgatgcattcaaattag

SEQ ID NO: 3987 - DNA, 798 bp, synthetic construct
  misc_feature 1..798: note = source = /note="Description of Artificial Sequence: Synthetic coding sequence"
  source 1..798: mol_type = other DNA
atgcacttctaccggctgttcctgggcgccacccggcggttcctgaacccggaatggaagggtgagattgataactggtgtgtgtacgtgctgacatcattgctgccgtttaagatacaaagccaggatattaaggctcttcagaaagaattagagcaattcgcaaaattgctgaagcagaagcgcattactctgggctacacccaggccgatgtgggcctaactctcggcgttttgtttgggaaggtttttagccagactaccatctgtcgatttgaggctctgcagctgagctttaagaatatgtgcaagttaagacccttattgcaaaaatgggtagaggaagccgacaacaatgagaatttacaggaaatttgtaaggcggaaaccctggtccaagccaggaagagaaagaggacgtctattgaaaatagagttcgcggcaacttggaaaacctatttttgcagtgcccaaagccaacacttcagcagattagtcacatagcccagcaactgggtctcgaaaaggatgtggtcagggtgtggttctgcaatagacgccaaaaggggaaaaggtcttcctcagattacgctcagagggaggatttcgaggccgccggtagccctttttcggggggccccgtctcgtttcctttggcacctggcccccactttgggacccctgggtacggttccccacactttaccgcattgtactccagtgttcccttccccgagggagaggccttcccgcccgtaagcgtgacaactctcgggtcccctatgcatagcaactag

SEQ ID NO: 3988 - DNA, 1083 bp, synthetic construct
  misc_feature 1..1083: note = source = /note="Description of Artificial Sequence: Synthetic coding sequence"
  source 1..1083: mol_type = other DNA
atggccggccacctggccagcgacttcgccttcagccccccccccggaggtgggggggacggtcccggtgggccggagcctgggtgggttgacccgcggacttggctgtcttttcagggcccaccaggtggacctggcatcggacctggtgtgggacccggctctgaggtgtggggaattcccccttgcccccctccctatgagttttgcggcggaatggcttactgcggcccccaggtcggcgtggggttggttccacagggcggactggaaacctcccaaccagaaggggaggctggagtgggtgtggaatctaatagcgatggggcttctcccgagccttgcacagtaaccccaggtgcagttaagctcgagaaagaaaaattggaacagaatcctgaggaatcacaggatataaaagctctgcaaaaggagctggaacaattcgcaaaactcctcaagcagaagcggataactctcgggtacactcaggctgacgtcggcctcacgctcggggtgctgtttggtaaagtgttcagtcagactaccatctgtcgcttcgaggctcttcaactgtctttcaagaacatgtgtaagctacggcccctactgcagaagtgggtggaagaagcagataacaatgagaacttacaggagatatgcaaggctgagacgctagtgcaggctaggaagagaaaacggacctctattgagaacagggtccgggggaacctggaaaatctgttcttgcagtgccctaagccaacattacagcagatctcacatattgcccaacagctgggcctggaaaaagacgtagtgcgggtgtggttctgcaatcgacggcagaaaggtaagcgaagcagttctgactatgctcagagggaggatttcgaagccgccggtagcccgtttagtggaggccctgtatccttcccacttgcacccggcccccatttcggaaccccaggctatggttctccacacttcacagctctttactcctccgtgcctttccccgaaggggaggcattcccacccgttagcgtgactactctagggtctcctatgcactctaattag

SEQ ID NO: 3989 - DNA, 369 bp, synthetic construct
  misc_feature 1..369: note = source = /note="Description of Artificial Sequence: Synthetic coding sequence"
  source 1..369: mol_type = other DNA
atggccggccacctggccagcgacttcgccttcagccccccccccggtggcggcggagatggtccgggcgggccagagcctggctgggtggatcctcgcacctggctttccttccaaggccctcccggtggaccaggcattggtccaggggtaggacccggctccgaagtatggggtatccctccttgccctccaccttatgaattctgtggcgggatggcatactgtggcccccaggtcggggtgggactggtgccacagggtgggttggagacttctcagcccgagggcgaagccggcggaggcgaacagctgaggtggggcctgccaggtgctcttcatagacacccctggtgccgagaagcttag

SEQ ID NO: 3990 - DNA, 798 bp, synthetic construct
  misc_feature 1..798: note = source = /note="Description of Artificial Sequence: Synthetic coding sequence"
  source 1..798: mol_type = other DNA
atgcacttctaccggctgttcctgggcgccacccggcggttcctgaacccagaatggaagggagagattgacaattggtgtgtctatgtgctcaccagcctactgccatttaagatacagtcccaagacataaaagctttgcagaaggagttggagcagttcgccaaattgttaaaacagaaaaggataacattggggtatacccaagccgatgttggtctcacactgggcgtcctgttcggcaaggtattcagccagactacaatttgcaggtttgaggccctgcagctgtccttcaagaatatgtgcaaattaaggccgctcttacagaaatgggtggaagaagctgacaataatgagaacctccaggaaatctgtaaggcagagacactcgtgcaggctcgcaaacgaaaacgcactagtattgaaaacagagttcgcggcaacctggagaacctgttcctgcagtgcccgaaacccaccctccagcagatctcacatatcgcacaacagttgggcttggaaaaagacgttgtgagagtttggttctgcaaccggcggcaaaagggaaagcgctcctcatccgactatgcccagcgggaggattttgaggcagccggctccccattctccggaggacccgtgagctttcccctcgcgccgggccctcacttcgggacccccgggtatggaagccctcactttaccgctctctacagctccgtgccatttccagagggcgaagcctttcccccagtgagcgtcacaaccctgggaagcccgatgcattccaattag

SEQ ID NO: 3991 - DNA, 1083 bp, synthetic construct
  misc_feature 1..1083: note = source = /note="Description of Artificial Sequence: Synthetic coding sequence"
  source 1..1083: mol_type = other DNA
atggccggccacctggccagcgacttcgccttcagccccccccccggagggggtggagatggtccaggggggccggaaccaggctgggtggatccgcgtacctggcttagcttccagggccctcccgggggtcccgggatcggtcccggagttggccctggctctgaagtatggggaattcccccttgccctcctccttatgagttctgtggcggcatggcctactgtgggcctcaagtcggcgtggggctggttccacaggggggattagagacaagccagcccgaaggcgaagctggcgttggcgtggagtccaacagcgacggggcctccccagagccttgcacagttacaccaggcgccgtcaagctggagaaagaaaagctggaacagaacccagaggagtctcaggatattaaggccctgcagaaagaacttgagcagtttgcaaaactgctgaagcagaagcggatcacccttggctacactcaggccgacgtcggactgacactcggtgttttgttcgggaaggtgttttctcagacaacgatttgtaggtttgaagctctgcagttgagttttaagaacatgtgtaaacttaggcctttgctgcagaagtgggtagaggaagcagataataacgaaaatctgcaggaaatatgtaaagctgagaccctagtacaggcccggaaaaggaagcgaacaagtatcgaaaacagagtacgcgggaatttggagaatctgtttttgcagtgcccaaagcctactttacaacaaattagtcatattgctcaacagctgggactggaaaaggatgttgtacgggtgtggttctgcaatagaaggcagaaaggcaagagaagctcctccgactacgcccagcgggaagactttgaggcagccggatctccatttagcggtggacccgtgagctttcctttggcgcccgggccccatttcggcactcctggatacggctcgccacatttcacagcactctactcctctgtgccattccctgagggggaggcctttcctcccgtatccgtgacaacattgggtagcccaatgcactccaactag

SEQ ID NO: 3992 - DNA, 372 bp, synthetic construct
  misc_feature 1..372: note = source = /note="Description of Artificial Sequence: Synthetic coding sequence"
  source 1..372: mol_type = other DNA
atggccggccacctggccagcgacttcgccttcagccccccccccggtggtgggggagacggaccgggtgggccggagcctggatgggtagacccccgtacctggctgtcatttcagggaccacctggcggccctgggatcgggccaggagtcggacccggctcagaggtctgggggatccccccctgcccccccccgtatgagttttgtggcgggatggcctactgtggcccccaggtgggtgtggggctggtgccacaaggcggactggagacgtcccaacccgaaggagaggccggagtgggagtcgagacacctatgggacccccccggtcccccgccccccaccccttcccttttccacttttgtag

SEQ ID NO: 3993 - DNA, 558 bp, synthetic construct
  misc_feature 1..558: note = source = /note="Description of Artificial Sequence: Synthetic coding sequence"
  source 1..558: mol_type = other DNA
atggccggccacctggccagcgacttcgccttcagccccccccccggcggtggaggtgatggccccgggggaccagaacctggatgggtagatcctcgcacatggctgagttttcaaggcccccccgggggccctggcatcggacccggcgttggtcccgggtccgaagtttggggcatccccccatgtccccccccatacgaattttgtgggggaatggcatactgcggccctcaggtcggggtcggacttgtgcctcagggtggcctggaaacgagccagcccgagggtgaagccggtgtaggggttgagtctaattccgatggcgctagcccagagccctgcaccgttacaccaggagctgtgaaactggagaaggagaagctggaacagaaccccgaggaatctcaggacataaaagccctgcagaaagaattggaacaattcgccaaactgctgaagcaaaagaggatcaccctggggtacactcaggcagacgtccatcccggcggctccatctgggagggcattcaacctaatgaccacttgcccctgtag

SEQ ID NO: 3994 - DNA, 372 bp, synthetic construct
  misc_feature 1..372: note = source = /note="Description of Artificial Sequence: Synthetic coding sequence"
  source 1..372: mol_type = other DNA
atggccggccacctggccagcgacttcgccttcagccccccccccggaggagggggggacgggcctggggggcccgaaccgggctgggtggaccccaggacttggctctcttttcaggggccgcctggagggcctggaatcggacccggagtcggtcctgggagcgaagtgtggggcatccctccttgccctccgccctacgagttctgtggtggcatggcctactgtggcccccaggtgggggtggggctggttccccagggcggccttgagacaagccagccagaaggtgaagcaggagtcggagtggagaccccaatgggccccccacgaagcccagcgccacatccttttccctttccactgttgtag

SEQ ID NO: 3995 - DNA, 558 bp, synthetic construct
  misc_feature 1..558: note = source = /note="Description of Artificial Sequence: Synthetic coding sequence"
  source 1..558: mol_type = other DNA
atggccggccacctggccagcgacttcgccttcagccccccccccggggggggcggcgatggtcccggaggtcccgaacccggctgggtcgatccccgcacctggctgagcttccagggtccacctggcggtcccgggattgggcctggcgtggggcccgggtcagaagtgtggggcattcccccctgcccccctccatacgaattttgcggagggatggcctattgcggcccgcaggtgggcgtcggtcttgtcccccagggcgggctggaaacaagtcaacctgaaggggaagccggcgtcggagttgaatctaactcagacggtgcatctcctgagccatgtactgtgactccgggcgccgtcaaattagaaaaggagaagttggagcagaatcccgaggagtcgcaggatatcaaagctctgcagaaggaactcgaacaattcgccaagcttctgaagcaaaagcgtattacacttggctacacccaagcagacgtacaccctggaggctcaatttgggaggggattcaaccgaatgaccacctgccattgtag

SEQ ID NO: 3996 - DNA, 372 bp, synthetic construct
  misc_feature 1..372: note = source = /note="Description of Artificial Sequence: Synthetic coding sequence"
  source 1..372: mol_type = other DNA
atggccggccacctggccagcgacttcgccttcagccccccccccggcggcgggggcgacggaccgggaggacctgagccagggtgggttgatcctcggacctggctgagtttccaggggcccccaggcggcccaggaatcgggcctggggtgggtccgggatctgaggtctggggaataccgccctgcccaccgccttatgagttttgtggaggcatggcatattgtggaccacaggtgggggtaggcctggtaccacagggcgggttggagacgtcacaaccagaaggagaagctggcgtgggagtggaaacaccgatgggtccaccacgctcacccgccccacatccgttcccttttcccctgctgtag

SEQ ID NO: 3997 - DNA, 558 bp, synthetic construct
  misc_feature 1..558: note = source = /note="Description of Artificial Sequence: Synthetic coding sequence"
  source 1..558: mol_type = other DNA
atggccggccacctggccagcgacttcgccttcagccccccccccggcggggggggggatggccccgggggacctgaacccggatgggtcgatcctaggacctggctaagttttcagggacctcccggagggcccggtatcggacccggagtcggtcctgggagcgaagtgtggggaatacctccttgtccaccaccttacgagttctgtggcggcatggcctattgcggtccacaggtgggcgttgggctggtgcctcagggtggtctcgagacatctcagcccgaaggcgaggccggagtcggagtggagtcgaatagcgacggcgcttctcccgagccttgcaccgttacacccggggcggtgaagcttgaaaaagagaagctggagcagaacccagaagaatctcaggatattaaggccctgcagaaagaattagaacaattcgcaaaattactgaagcagaaacggatcacgctggggtacacccaggccgatgtgcacccaggtggcagcatttgggaggggatacagcccaacgatcatctccctttgtag

SEQ ID NO: 3998 - DNA, 558 bp, synthetic construct
  misc_feature 1..558: note = source = /note="Description of Artificial Sequence: Synthetic coding sequence"
  source 1..558: mol_type = other DNA
atggccggccacctggccagcgacttcgccttcagccccccccccggcggaggaggggacgggcccggaggcccggagcccgggtgggtggaccctagaacgtggctctccttccaagggcctcctggtggaccgggaatcggtcctggagtcggacccggtagcgaggtttggggcatccctccctgcccaccaccctacgaattctgtggaggcatggcgtactgtgggccacaggtaggcgtaggactagtgccccaggggggtctggagactagtcagccagagggagaggctggggtaggcgtggaatcaaactccgacggggctagcccagagccttgcactgtaactcccggagcggtcaagctggaaaaggagaaactggaacagaatccagaggaatcccaggacattaaagcgctgcagaaagaactcgagcaatttgccaagctgcttaagcagaagaggatcaccctggggtatacccaagctgacgtgcacccgggcgggagtatttgggagggaattcagcccaacgaccatctgcccttgtag

SEQ ID NO: 3999 - DNA, 372 bp, synthetic construct
  misc_feature 1..372: note = source = /note="Description of Artificial Sequence: Synthetic coding sequence"
  source 1..372: mol_type = other DNA
atggccggccacctggccagcgacttcgccttcagccccccccccggtggaggaggtgacggcccgggcggccccgagcctggatgggttgacccccggacttggctgagctttcaagggcccccaggtggccccggaatcgggcctggggttgggccgggatctgaggtgtggggcatccccccgtgtcctccaccatatgagttctgtggaggtatggcgtactgcggcccccaggtcggcgtgggtctggtgcctcagggcggattggaaacaagccagcccgaaggcgaagcaggcgtgggcgtagagacccccatgggcccacctaggagccccgctccccacccttttcctttccctctcctctag

SEQ ID NO: 4000 - DNA, 372 bp, synthetic construct
  misc_feature 1..372: note = source = /note="Description of Artificial Sequence: Synthetic coding sequence"
  source 1..372: mol_type = other DNA
atggccggccacctggccagcgacttcgccttcagccccccccccgggggggggggcgacgggcccggaggccccgagccaggttgggtagatccccgtacctggctgagctttcagggcccaccaggaggcccaggcattggcccaggggtggggcctggttctgaggtctggggaatacccccctgccccccaccatatgagttttgcggcggaatggcttactgcggacctcaggtgggcgtgggcctggtgccgcaaggaggcctcgaaacatcccaaccagaaggagaagccggagtgggggtcgaaacccctatgggcccccctagaagtcccgcaccgcacccatttccttttcccctgttgtag

SEQ ID NO: 4001 - DNA, 2079 bp, synthetic construct
  misc_feature 1..2079: note = source = /note="Description of Artificial Sequence: Synthetic coding sequence"
  source 1..2079: mol_type = other DNA
atgggcaccgtgagcagccggcggagctggtggcccctgcccctgttgctgctgcttttgctcctcctgggtcccgcaggtgctagagctcaggaagacgaggatggcgactacgaagaactagtcttggcactgagatccgaggaggacgggttggccgaagcgccagagcacggcacaacggcaacattccatcgatgtgcaaaagacccttggcggctccctggaacctacgtggtggtgctgaaggaggaaactcacctgagccagtccgaaagaacagccaggaggttgcaagcacaagctgctagaaggggctaccttactaagattctgcacgtgtttcacggtcttctgcccggctttcttgtcaagatgtcgggcgacctcctcgaactggcccttaagttaccccacgtggattacatcgaagaggactcatccgtgttcgcccagtctattccatggaatctagagaggatcacacctcctcggtaccgtgccgacgagtaccagccccccgatgggggcagtctcgtggaggtctacctgttggataccagcattcaatccgaccacagagagattgaggggcgggtcatggttacagacttcgaaaacgtgccggaggaggatgggacccgctttcatcgccaggcttccaagtgtgacagccacggcacacatttggcaggagtggtcagtggtagggatgccggagtggcaaagggcgcctcaatgagaagtctgagagtcttaaattgtcagggtaagggcaccgtgagtggcacactgatcgggttagagttcatccggaagtctcagctggtgcagcctgttggcccactcgtcgtgctcctgccactagccggcggatattctcgggtcctgaacgctgcttgccagcggctggcaagagccggggtcgtcctcgttacagccgctggtaattttcgggacgacgcctgcctgtattctcccgcatctgcccccgaggtgatcactgtcggagcaacgaacgcacaggaccagccagtgaccctgggaaccctgggtaccaattttggccgctgcgtggacttgtttgcccccggcgaagatataattggagcctctagcgactgtagcacttgttttgtcagtcagtcaggtacctcccaggcagcagcccacgtagccggaatcgctgccatgatgctctccgcagaaccagaactcacactggccgagctaagacagcggctgattcactttagcgctaaggatgtaatcaacgaagcttggttccctgaggaccagagggtcctgacaccaaatctagtcgcggccctcccaccctctacacatggggccgggtggcaactattttgcaggaccgtgtggtcagcgcactccggccccacgcgcatggccacagcagtagcccgatgcgccccggatgaagagctactctcctgcagctcattcagtcggtccggcaagcgcagaggggagaggatggaagcccaggggggaaagttggtgtgtagagcacacaacgcttttggcggagagggggtgtatgcaattgcccgatgttgcctcctccctcaggcgaattgttctgtccacacagcgcctccagcggaagcgagcatggggactcgagtacattgccatcaacagggacacgtgctgacgggctgctcatcacactgggaggtggaggacctgggaactcataagcccccggtgcttcggccccgcggacagcccaaccagtgcgtggggcaccgagaagccagcattcacgctagctgctgtcacgcccctggtttggaatgcaaggtgaaagagcacgggattcctgctccccaggagcaggtcacagtggcctgcgaggaggggtggaccttaactgggtgttccgcgcttccaggcacctctcacgtcctcggggcctacgccgtagacaacacatgcgtggtgcgatcccgggacgtgagcacgacgggaagcactagcgaaggggccgtgacagctgttgcaatttgctgtaggtctaggcacctcgctcaggccagccaggagctccagtag

SEQ ID NO: 4002 - DNA, 618 bp, synthetic construct
  misc_feature 1..618: note = source = /note="Description of Artificial Sequence: Synthetic coding sequence"
  source 1..618: mol_type = other DNA
atgggcaccgtgagcagccggcggagctggtggcccctgcccctgctgctgttacttctactccttctcggccctgccggggccagagcccaggaggacgaggatggcgattatgaagagctggtgctggctcttagatctgaggaggatggcctggccgaggcgccagaacacgggaccactgcaaccttccacagatgcgccaaggatccatggaggctgcctggcacgtatgtggttgtcttgaaggaggagactcatctgtcccagagtgaacgaaccgctcgacgtctgcaagcgcaggctgccaggcgcggatacctaacgaaaatccttcatgtgtttcacggattgctccctggttttctggttaaaatgagcggcgatcttctggagctggcgctgaaactccctcatgtcgattacattgaagaagatagctctgttttcgcccagagcataccatggaatttggagcggataacaccgccccggtacagagcggacgaataccagccgccagcctatctcgaggaccactgtggcggacaccggggggccgtgcaaatggctttgcagaaaactcaggagaccctcgggcaggagcaattcgattag

SEQ ID NO: 4003 - DNA, 801 bp, synthetic construct
  misc_feature 1..801: note = source = /note="Description of Artificial Sequence: Synthetic coding sequence"
  source 1..801: mol_type = other DNA
atggtgaccgacttcgagaacgtgcccgaggaggacggcacccggttccacagacaggcaagcaagtgcgacagccacggaactcatcttgcaggtgtcgtcagcggtagggatgcaggggtggccaagggagcaagtatgcggagcttaagggtgctgaactgccagggcaagggcactgttagcggcaccttaatagggcttgaattcatcaggaagtctcagctggttcagccagtaggccctctcgtcgttttgctgccactggccggcggatattcccgcgtactcaatgctgcatgtcagcgactggctagggccggcgtagttctggtcactgccgctggcaacttccgggacgatgcctgtctgtactctcctgcctccgcccccgaagtgattaccgttggcgcaactaacgcccaggatcaacccgtgacacttggcacactcgggaccaatttcgggaggtgtgttgatttatttgctccaggcgaagatatcataggtgcatctagcgactgtagcacgtgtttcgtgtctcaatccggtaccagccaggcagcagcccatgtggccggcatagccgccatgatgctaagtgctgaaccagagctgacactggccgaactcaggcagcgcctcattcatttttccgccaaggacgtaattaatgaagcctggtttcctgaggatcagcgagtgggaagctgttttgctgggttatacgggcagcatacccgcggtctccacggctggcctcagccttcccccgcagcccctcagatgagaagctgttag

SEQ ID NO: 4004 - DNA, 3972 bp, synthetic construct
  misc_feature 1..3972: note = source = /note="Description of Artificial Sequence: Synthetic coding sequence"
  source 1..3972: mol_type = other DNA
atggaggacggcggcctgaccgccttcgaggaggaccagcggtgcctgagccaatccctcccacttcctgtctccgccgaaggacccgcagcacagaccacagctgagccttctcgatcttttagcagtgctcatcggcaccttagccgaagaaacggactttcgagactgtgccagtccaggacagccctttctgaggaccgctggtctagctactgcttgtccagccttgcagcacagaacatctgtacatcgaaattacactgtcccgcggcaccagagcatacggatccttccgaaccacggggatcagtttcatgttgctccctgctacggggcctcagtagcggatggtcttcgccactgctgccagcgccggtttgcaatcccaacaaggcaatcttcaccgtggatgccaagactacagaaatcctggtggccaatgacaaggcttgtggactactgggttactcatctcaggatctgattggacagaaactgacccaattctttctgagatcggatagcgatgttgtcgaggccctgagtgaggagcatatggaagctgacgggcacgcagcggttgtattcgggactgttgtggacatcatcagtcggtctggggaaaaaattccagtgagcgtatggatgaaaagaatgcgccaggagcgcagactttgttgtgttgtggtcttggaaccagttgagcgggtatctacctgggtggctttccagagtgatggcaccgtgacatcctgcgattccttgttcgcccatctccatggctatgtatcgggtgaggacgtggctgggcagcatatcactgatctaatcccatccgtccaactgccgccatctgggcagcatattccaaagaatctgaaaattcagaggtcagtcggccgcgcacgggatggaacgacattccctctctccctgaaactgaaatcccagccgagttctgaggaagcgactactggcgaggcagctccggtatccggatatcgcgcatctgtctgggtgttctgtactatcagcgggttaattaccttgctgccagacgggactattcacggcatcaaccacagtttcgctctgaccctgtttggctatggcaagacggaactccttggcaaaaacatcacttttctgatccctggcttctacagctatatggacctcgcttataactctagcttacagcttcccgatctggcttcatgccttgacgtgggcaatgagagcggctgtggagaacggacgctcgacccttggcagggccaggaccccgccgaaggcggccaggaccccaggatcaacgttgttttggccggtggtcatgtagtcccaagggacgagatacgaaagctaatggagagccaagacatattcacaggcactcagaccgaactgatagccggcggccagctgttgtcatgcttatccccacagcccgcacctggcgtggataacgtcccagaggggtctcttccagtgcatggtgaacaagccctgcctaaggaccagcagattaccgccctcggaagagaggaacccgtcgctatagaaagcccaggccaggacctcctgggagagagtcgtagtgagcctgtcgacgttaaacccttcgcgtcatgtgaagatagcgaagcacctgtgccggccgaggacggaggcagtgatgcagggatgtgtgggctgtgccagaaagctcagcttgaacgcatgggggtcagtggacccagcggttccgacttgtgggccggggctgctgtcgcgaagcctcaagcaaaaggccaactggctggtggctctctgcttatgcattgtccctgttacggtagcgagtgggggctgtggtggcgtagccaggacttggccccttcgccaagtggaatggctggcttgtcgtttggcacgcctactctggatgagccatggctgggggtggagaatgatcgggaggaactgcagacctgcctgatcaaggaacagctgagccaactgtctttagccggggcattggacgttccgcatgcagagctcgttcccaccgaatgccaagctgtcacagcgccggtgtcatcatgtgacctcggggggcgagacctgtgtgggggatgcaccggatcgagctctgcctgctacgccctggccaccgatctgcccgggggcctggaagctgtggaagctcaggaagtggacgttaatagtttttcttggaacttgaaagagctgtttttttctgatcagactgatcagaccagctcaaactgctcctgcgctactagcgagttaagggagacaccttccagcctcgctgttgggtctgaccccgacgttggttcactgcaagagcaaggcagctgcgtcctcgatgaccgagaactgctcctgctcacaggtacgtgcgtcgacctcgggcagggccggcgcttccgcgaaagttgcgtcggacacgacccaactgaaccactggaagtatgtctggtgtccagtgagcattatgccgctagtgatagagagagcccaggacatgtcccctctactctggatgccggtcctgaggacacttgccctagcgctgaggagccccgtttaaatgttcaggtcacctcaacacccgtgatcgtcatgagaggcgccgctggtcttcagagagagatccaggagggcgcctacagcggaagctgctaccacagagacggactgcgcttgtccattcagttcgaggtgcgaagagtggagctgcagggtcccacccccctgttctgttgttggcttgttaaagatctcctgcatagccaaagggattctgccgcccgcaccaggctgttccttgctagcttaccaggctcgactcactccaccgccgcggaactaacagggccgtcactggttgaggtgctccgtgccagaccttggttcgaggaaccacccaaagctgtggagttggagggcctggccgcatgcgagggggaatacagccaaaaatactcaacaatgtctccacttgggtccggcgcctttggattcgtgtggaccgcagtggataaggaaaaaaacaaggaggtagtggtcaaatttatcaagaaagaaaaagtgcttgaagactgttggattgaggaccctaagctgggaaaagtgactctcgaaatcgcaatcttgagtagagttgagcatgcaaacattataaaggtcctggatatcttcgaaaaccagggctttttccagctggtcatggagaagcacggctctggcctggacttgtttgcttttattgaccgtcatccccgcttagacgagcccctggcgtcatatatcttccgccagctggtgagtgcagtgggctatctgcgactgaaggacattattcaccgggacattaaggatgagaacatcgtcattgctgaagacttcactatcaagctcattgattttggatctgctgcttacctcgagcgcggtaagttgttctatacattttgcggcacaatcgagtattgcgctcccgaagttttgatgggcaacccatatagaggccctgaactggagatgtggtcactgggggtgaccctgtatacgctggtgttcgaagagaacccgttttgtgaattagaggagactgtcgaagcggcgatccatccaccttatctcgtatcaaaggagctcatgagcctggtgtctggattgctgcagcccgtcccagagcgccggacgaccctggagaagttggttaccgatccttgggttactcagcccgtcaacttagccgattatacatgggaagaggtgttccgagtcaacaagccggagtccggagtcctttcagccgccagcctggaaatgggcaataggtcacttagtgacgtcgcccaggcccaggagctctgcggtggccctgtgccgggcgaagcccccaacggacaagggtgtctgcaccccggggaccctagacttctgactagctag

SEQ ID NO: 4005 - DNA, 1488 bp, synthetic construct
  misc_feature 1..1488: note = source = /note="Description of Artificial Sequence: Synthetic coding sequence"
  source 1..1488: mol_type = other DNA
atgtggcagctgaccagcctgctgctgttcgtggccacctggggcatcagtggtacccccgcacccctggacagcgtgttcagttcgtcagaaagggcacaccaggtattgcgaatcagaaaaagagccaattcatttctagaggaactccgccacagctcccttgagagggagtgtattgaagagatttgtgattttgaagaagcaaaggaaatatttcagaacgtcgacgataccctggccttctggtccaagcacgtggacggcgaccagtgccttgtgctgccactggagcatccttgcgctagcctctgttgcggtcacggaacctgtatcgatggcataggctcttttagctgtgattgcagatcgggatgggagggccgcttttgccagcgcggagagggcgaaagatggatgctagccggaggaggagccggcctgggaccgggatgggggagaggtacctctacatcttgtcctcgacccccactgcctgctgaagttagctttctgaattgttcactcgataatggtgggtgtacacattattgcctggaggaggtcggctggcggaggtgcagttgtgcaccagggtataagctgggcgatgacctgctgcagtgccacccggccgttaaattcccatgtggacggccttggaagcgcatggaaaagaagcgcagccatctcaaacgagataccgaagaccaggaagatcaagtcgatccacgcctcatcgatggtaaaatgacgaggaggggagacagcccgtggcaggtggtcctgctggacagcaagaagaaactggcatgtggcgccgtgctgatacacccatcatgggtgctcactgcagcacattgcatggatgagtctaagaagttactggtgcgactcggcgaatatgacctccgtcggtgggagaagtgggaacttgacctggatatcaaggaagtgttcgtgcatcctaactattcgaaatccacaactgacaacgacatcgctctgctgcatctggcgcagccagcaacacttagccagacgatcgtgcccatctgtctgcctgacagtggtctcgctgagcgggaattaaaccaggctgggcaggaaaccctggttaccggctggggttatcactcctcgagagagaaggaagcaaaaagaaaccggacctttgtgttgaacttcattaaaatcccggtggttccccataacgaatgcagcgaggtaatgtcaaacatggtgtcagagaatatgttatgtgccggcattctcggagaccgccaggatgcttgcgagggtgacagcggggggccaatggtcgccagcttccacggtacctggttcctcgtgggtttggtctcatggggagaaggttgcggactcctgcataattacggtgtttacaccaaggtcagccgctatctcgactggattcatggccatatccgagacaaggaggcacctcagaagagttgggccccttag

SEQ ID NO: 4006 - DNA, 1386 bp, synthetic construct
  misc_feature 1..1386: note = source = /note="Description of Artificial Sequence: Synthetic coding sequence"
  source 1..1386: mol_type = other DNA
atgtggcagctgaccagcctgctgctgttcgtggccacctggggcatctcaggcactccagcgcctctcgacagtgtcttcagcagcagtgagagagctcatcaagtgctgcgtattcgcaaaagggccaatagcttcctcgaagaactgcgacatagcagtctggagcgcgagtgtatcgaagagatctgcgacttcgaagaggccaaggagatatttcagaacgtagacgataccttagccttttggtcaaagcatgtggacggcgatcagtgtcttgtgctgcccttggaacacccatgcgctagcttgtgctgtgggcacggaacatgcatcgacgggattggctctttttcttgcgattgccgatcaggctgggagggccgcttttgccaaagagaggtgagctttctgaactgtagtctcgataatggcggctgcacacattattgcctagaggaagtgggctggcggcggtgttcctgcgcccctggatacaaactgggagacgatctgttacagtgtcatcctgcagtgaaatttccttgtggaaggccttggaagaggatggaaaagaaaaggtctcatctcaaaagagatactgaggatcaggaggaccaggtcgatccacgtttgatcgacggcaagatgaccagacgaggtgactccccatggcaagtcgttttgttggattccaagaagaagctcgcctgtggcgcagtattgattcacccctcatgggttctgaccgctgcacattgtatggatgagagcaaaaaactgctggtgagacttggcgagtacgacctacggcgatgggagaagtgggagctggacctcgacattaaagaagtgttcgtgcatccaaattacagtaagtctacgaccgacaatgacatcgcgctgctgcacctggctcaacccgccacacttagccaaacaattgtgcccatttgcctgcctgatagcgggctggctgagagggagttgaaccaggccggccaggagaccctggtgaccggttggggctaccactcttctagagaaaaggaggcaaagcgcaatcgaacatttgtgttgaactttatcaagatcccagtagtgcctcacaacgagtgctccgaagtgatgagtaatatggtgtcggagaatatgttgtgtgcgggtattttaggagatcggcaggatgcttgtgaaggggacagtggagggccgatggtcgctagctttcatgggacctggtttctggttggcctcgtgtcttggggggaagggtgcgggcttctccacaattacggcgtgtatactaaggtgagccgatatcttgactggatccacggacacatccgagacaaggaagcgcctcagaaatcttgggccccctag

SEQ ID NO: 4007 - DNA, 351 bp, synthetic construct
  misc_feature 1..351: note = source = /note="Description of Artificial Sequence: Synthetic coding sequence"
  source 1..351: mol_type = other DNA
atgtggcagctgaccagcctgctgctgttcgtggccacctggggcatatctgggacacctgcccctctggatagtgtgttctctagtagcgagagagcgcatcaggttctgcggatacgtaaaagggccaattcttttttggaagagcttcggcattcgagcttagagcgagaatgtattgaggaaatttgtgactttgaagaggctaaggagatttttcaaaatgtggacgacacactggccttttggtctaagcacgtggacggagaccaatgtctcgtattacctttagaacatccttgtgcctccctatgctgtggacacggcacctgcatagatggtatcggctag

SEQ ID NO: 4008 - DNA, 381 bp, synthetic construct
  misc_feature 1..381: note = source = /note="Description of Artificial Sequence: Synthetic coding sequence"
  source 1..381: mol_type = other DNA
atgtggcagctgaccagcctgctgctgttcgtggccacctggggcatctctggcacccccgcccctcttgattcggtgttcagtagctcagaacgagcccaccaggtcctccggataagaaagcgtgcgaattcattcctggaggaactgagacatagttcgctggagcgcgaatgcattgaagagatatgtgattttgaagaggcaaaggaaattttccagaatgtggatgacaccctggctttctggtccaaacatgtggatggcgatcaatgcctcgtcttgccactagagcatccttgcgcgagcctatgttgcggccatggcacatgcattgatggaattggttcattcagctgcgactgtaggtctgggtggtag

SEQ ID NO: 4009 - DNA, 1551 bp, synthetic construct
  misc_feature 1..1551: note = source = /note="Description of Artificial Sequence: Synthetic coding sequence"
  source 1..1551: mol_type = other DNA
atggccgccggccggcggacctgcagcatcagcaccacccggccctgcgcaagcgcctctaggatgtggcagctcacatctctgctgctcttcgtagcaacttgggggatttctggtacccctgcccccctcgacagtgtcttcagcagttctgagcgagcacaccaggtgcttcggatcagaaaaagagcaaattcgttcctcgaggagttaagacacagttcactggagagggaatgcatcgaggaaatctgcgatttcgaggaggccaaggaaatctttcagaatgtggatgacactctcgcattctggagtaagcacgtggacggtgaccagtgcctcgttttgcccctggagcatccatgcgccagcctgtgctgcggacacggcacgtgcattgacggcatcggtagcttctcttgcgactgccggtcagggtgggaggggcgcttctgtcagcgcggagagggtgagcgctggatgcttgcaggtgggggggcagggctcgggcccggctggggtcggggtacctcaacatcctgcccacggccacccctgccagctgaagtctcgtttctaaactgttccctagacaacggggggtgcacacattattgtctggaagaagtgggttggcgccgatgtagctgtgcccccggctataagctcggtgacgatctgctccaatgtcaccccgcagttaagttcccttgcgggcggccatggaagagaatggagaaaaaaagatctcacttaaaacgggatactgaggatcaggaggaccaagtggaccccaggctgatcgacggaaagatgactcggaggggggacagtccctggcaggtggtgctgcttgacagcaaaaagaagctcgcgtgtggtgccgtgttgatccacccctcatgggttcttaccgccgctcattgtatggatgagtcaaaaaagctgctcgtgagactgggcgagtacgatctgcgacggtgggaaaaatgggaacttgacttggacattaaagaagtctttgtccatcccaattattccaagtcaaccaccgataatgacatcgccctactccacctcgcccaaccggcgacactgtctcagacgatcgtgcccatctgtctgccagacagcggtctggcggagcgagaacttaatcaagcggggcaagaaacattagtgacaggctggggataccactcttcccgagaaaaagaggccaagagaaaccggacctttgtgttgaatttcataaagataccggtcgtgccccataatgaatgctcagaggtcatgtccaacatggtcagcgagaacatgctttgcgccggcatcctgggagatagacaggacgcatgcgagggcgatagcgggggacccatggtcgcgtcttttcatggcacgtggttcctggtggggctggtgtcctggggcgagggatgcggccttctgcataactacggtgtgtacacaaaggtgagccgatacttggactggattcatggtcacatacgcgacaaagaggcccctcagaagtcttgggctccatag

SEQ ID NO: 4010 - DNA, 1263 bp, synthetic construct
  misc_feature 1..1263: note = source = /note="Description of Artificial Sequence: Synthetic coding sequence"
  source 1..1263: mol_type = other DNA
atgtggatgacccactggcccagcggccccagcaccagcaccgtgacttcagcctggagctgcccctggagcaccagagcccccgcgtgcgcggcgggcaccgctcgcgctagcactgcctccgccgcatccgcggctactgccgccgctgccggaagagctgcgtctgctagcgccgtccgcggtaggggaggctgttggaggggtggagctggcttaggacccggttggggccgtggcacttcaacctcatgcccacggccaccgcttcctgctgaggtgagcttcttgaactgctccttagacaatggcggttgcacccattattgtcttgaggaggtggggtggcgcaggtgtagttgtgcacccgggtacaagctcggcgatgacctgttgcaatgtcatccagctgttaagttcccttgtgggagaccttggaaaaggatggagaaaaaaaggtcacatttgaagagggacacggaggatcaagaagatcaggtggatccgagacttatcgacggcaaaatgacccgccgtggagactcaccttggcaggtggtgctcctggattccaagaagaagttagcctgcggcgccgttctgatccacccttcatgggttctgaccgctgctcactgcatggacgaatctaaaaagcttctcgttcgactgggggaatatgaccttagacgctgggagaaatgggaactggacctggatattaaggaggtgtttgttcatcctaattactcaaaatccacaaccgacaacgacattgcccttctccacctggcccagcctgctaccctgagccaaaccatagttcccatatgcctgccggacagcggccttgctgagcgggaactcaaccaggcgggccaggaaaccctggttaccggctggggttaccacagcagcagggaaaaagaggccaagcgcaatcgaacctttgtgctgaatttcatcaagattccggtggtgccacacaacgaatgttctgaagttatgtcgaatatggtatcagaaaacatgctgtgcgcgggtattctgggggaccggcaggacgcatgtgagggcgatagtggtggcccaatggtcgcaagcttccacggtacttggttcctggtcggcctggtgtcctggggagaaggctgcggcctgctacacaattatggcgtgtacactaaggttagtcgttacctcgactggattcatggacatataagggataaggaagcacctcagaaatcttgggctccgtag

SEQ ID NO: 4011 - DNA, 354 bp, synthetic construct
  misc_feature 1..354: note = source = /note="Description of Artificial Sequence: Synthetic coding sequence"
  source 1..354: mol_type = other DNA
atgccccggctgttcttcttccacctgctgggcgtgtgcctgctgctcaaccaattcagtagggcagtggccgacagctggatggaagaggtgataaagctgtgcggccgcgaactggtgcgcgcccaaattgctatctgtggcatgagcacttggagcaagagatccctgtcccaggaagatgctcctcaaactccaaggccagttgccggagactttatccagacagtatctctaggaatcagccctgatggaggtaaagccttaaggaccggctcatgttttacccgggagttcttaggcgctctctccaagttatgccatcctagctcaacgaaaattcaaaagccctag

SEQ ID NO: 4012 - DNA, 558 bp, synthetic construct
  misc_feature 1..558: note = source = /note="Description of Artificial Sequence: Synthetic coding sequence"
  source 1..558: mol_type = other DNA
atgccccggctgttcttcttccacctgctgggcgtgtgcctgctgcttaaccagttctcccgcgccgtcgctgatagttggatggaggaagtgattaagctgtgtggaagagagctggtcagagcacaaatcgcaatttgtgggatgagcacctggtccaaaagaagccttagtcaggaagatgcacctcagactccacgaccagtcgcagagatcgtgccctctttcattaacaaggacaccgagacgatcaatatgatgagcgaatttgtggctaacctgccccaagaactgaaactgactttgtcagaaatgcagccagccttgccacagctccagcagcacgtgccggtgctgaaagactctagcctcctgttcgaagagttcaagaagctgattcggaatcggcagtctgaagccgccgacagcagcccgtccgaactgaaatacctgggcctggacacacacagtcgcaagaagaggcagctctactccgcactggctaataaatgctgccatgtgggttgtacaaagcggagtctggcacgtttttgctag

SEQ ID NO: 4013 - DNA, 1047 bp, synthetic construct
  misc_feature 1..1047: note = source = /note="Description of Artificial Sequence: Synthetic coding sequence"
  source 1..1047: mol_type = other DNA
atgaacggcaccgagggccccaacttctacgtgcccttcagcaacgctaccggggtcgtgaggtcacctttcgagtacccccagtactacctcgccgagccatggcagttctccatgctcgctgcatacatgttcctgctcatcgttcttggattccctataaacttcttgactctgtatgtgaccgttcagcacaaaaagctgagaactcccctcaactacatcctcttgaacctggctgtggccgacctgttcatggtacttggtgggttcaccagcactctgtacacatcgctccatggatatttcgtatttggccccaccggctgtaacctcgaaggcttcttcgcaacgcttgggggcgagatcgccctctggtctctggtagttctcgccatcgagcggtatgtagttgtctgtaagccaatgtcgaactttcgatttggggagaaccacgctattatgggagtagctttcacatgggtcatggcactggcttgcgcggcgcctcctctggctggctggagccggtatattcctgagggcctccagtgttcttgcgggatcgactactacacactgaagccagaagtcaataatgagtcattcgtaatttatatgtttgtggtgcacttcactatccctatgatcataatattcttttgttacggccagctggtcttcaccgtcaaggaggctgctgcccagcagcaggaaagcgccaccacacaaaaagcggagaaagaagtcacacgcatggtgattataatggtgatcgcctttctcatatgctgggttccgtacgcttccgtcgctttttacattttcacgcaccagggttccaacttcggacctattttcatgacaatccccgctttcttcgctaaaagtgctgccatttataaccctgtcatttatatcatgatgaacaaacagtttcgtaactgcatgttgaccacaatctgctgcggaaagaatcctctgggggatgacgaggccagtgccacggtcagcaagactgaaacgtcacaggtggcgccggcatag

SEQ ID NO: 4014 - DNA, 1257 bp, synthetic construct
  misc_feature 1..1257: note = source = /note="Description of Artificial Sequence: Synthetic coding sequence"
  source 1..1257: mol_type = other DNA
atgcccagcagcgtgagctggggcatcctgctgctggccggcctgtgttgcctcgttccagtgagcttggccgaggatccgcagggggacgccgctcagaaaactgacaccagtcaccacgaccaagatcaccccacattcaacaaaatcaccccaaatctggccgagttcgccttcagtctttatcgccagttggcccatcagtcaaattccacaaacatctttttttctccagttagtatcgctaccgccttcgctatgctgtctctgggcacaaaagctgacactcatgacgaaattttggaaggcttgaattttaacctcactgagattcccgaggcgcagattcacgaggggttccaggagcttctgcgcacactgaatcagccagactcacagctacaactgacaaccggaaatgggctgtttctttctgaaggccttaaacttgtggataagtttctggaggacgtgaaaaaactgtaccattctgaggcctttacagtgaatttcggagacactgaggaggctaaaaagcagattaatgactacgtggaaaagggcactcaaggcaaaatagtggacctggttaaggagttggatagagataccgtgtttgctttggtcaactacatcttcttcaagggtaagtgggaacgcccattcgaggttaaggacactgaggaggaagactttcatgtcgaccaggtgacaactgtcaaagttcccatgatgaagagattgggtatgttcaatatccagcattgtaaaaagctctcctcctgggtgctgctgatgaaatatctgggtaatgctaccgcaatattttttctacccgacgaagggaaactgcagcacttagagaatgaactgacacacgatatcatcactaagtttcttgagaacgaagaccgtaggtctgcttcccttcatctgcctaagttgtcaataacggggacgtacgacctaaaatctgtcctgggccagctaggcatcacaaaggtcttcagcaatggagctgacttgagcggagtgaccgaggaagccccactgaaactgagtaaagctgtccataaagccgtgctaaccatcgacgaaaaaggcaccgaggctgcaggggcgatgttcctcgaagccattcctatgagcattccgcctgaggtgaagtttaataagcccttcgtctttctcatgatcgagcagaacactaaatccccattgtttatgggcaaggtcgtaaacccaacccaaaagtag

SEQ ID NO: 4015 - DNA, 1257 bp, synthetic construct
  misc_feature 1..1257: note = source = /note="Description of Artificial Sequence: Synthetic coding sequence"
  source 1..1257: mol_type = other DNA
atgcccagcagcgtgagctggggcatcctgctgctggccggcctgtgctgtctcgtgccagtgtctctagccgaggacccccagggagatgccgctcagaaaacagatacatcccaccacgaccaggaccaccccacctttaataaaattaccccaaacctagcagagttcgcattcagcctgtacaggcagctcgctcatcagtccaattccaccaatatttttttttctcctgtgagtatcgccaccgccttcgccatgctcagcttaggaacgaaggccgatacccacgacgagatcctggaggggttgaactttaacctcacggagataccagaggcacagattcatgaaggctttcaggagcttctcaggacccttaaccagccagactcccaacttcagttgactaccgggaatggactgtttctcagtgaggggctcaaactcgtggataagttcctggaagatgtgaagaaactgtaccactcagaggcatttactgttaactttggtgacacagaagaggctaaaaagcagatcaatgactatgtggaaaaaggaacacagggaaaaattgtagatcttgttaaggagctggacagggatacagtgtttgcactcgtgaattacattttctttaagggcaaatgggaacggcccttcgaggtgaaggatactgaagaagaggatttccacgttgaccaggtgacaactgtcaaggttcctatgatgaaaaggctaggtatgttcaacatccaacactgcaagaaactcagtagttgggtgttactaatgaagtacctgggtaacgctactgccattttttttctgcctgacgaaggcaaactgcagcatcttgaaaacgagttgacacatgatattattactaagttcctggaaaatgaggatcggaggagcgcgtcattgcatctgccaaaactctcgatcactggcacctatgacctcaagagcgtgctgggtcagctcgggatcactaaggtcttcagcaatggcgcagacctctcaggcgtcacagaagaggcaccacttaaattatctaaagccgtccacaaggccgtcctcacaatcgatgaaaaagggactgaggcagccggggctatgttcctggaagcaatccccatgagcatcccaccagaagttaagtttaataaaccctttgtcttcctgatgattgaacaaaacactaagagtccactgttcatggggaaagtggtgaatcctactcagaagtag

SEQ ID NO: 4016 - DNA, 1257 bp, synthetic construct
  misc_feature 1..1257: note = source = /note="Description of Artificial Sequence: Synthetic coding sequence"
  source 1..1257: mol_type = other DNA
atgcccagcagcgtgagctggggcatcctgctgctggccggcctgtgctgcctggttcccgtgagcctggccgaagacccacagggcgacgctgctcaaaagacagacacatctcaccacgaccaggaccacccaaccttcaacaaaattactcctaacctagccgagtttgctttctccctgtatagacagcttgcacatcagagcaactcaacaaacatttttttctcaccggtttctatagcgacggccttcgcaatgctgagtctggggacaaaagcggacacacacgatgaaattctggagggtctgaattttaacctcaccgaaattccagaggcccagatccacgaaggttttcaggagctgctgaggactttgaaccaacccgacagccagctacagctgactaccgggaatggcctctttctttccgaggggctgaaattagtggacaagttcctggaagacgttaaaaaactatatcacagcgaggcttttaccgttaacttcggcgacacagaggaggctaagaagcaaatcaacgattacgtcgagaaaggcacacagggcaagatagttgatctcgtaaaggagcttgatagagacactgtatttgccctagtgaattacatatttttcaagggcaagtgggagaggcctttcgaggttaaagatactgaagaggaggactttcatgtggaccaggtgacgacagttaaggtgcctatgatgaagagactgggcatgttcaatatccaacactgtaagaaactcagttcctgggtcctccttatgaagtacctgggcaacgctacagccattttctttctccctgacgagggaaaattacagcacctggagaacgaactgacacacgacatcatcaccaagttcttagagaacgaagacagaaggtcagcctcactgcatctccccaaattgtctataaccggtacctacgatcttaagagcgttcttggtcagctagggatcaccaaagtattcagtaacggagctgaccttagcggtgtcaccgaggaggcgcccttgaaattgtcaaaagccgtgcacaaggccgttcttaccattgatgaaaaggggacggaagccgctggtgccatgtttttggaggcaattcctatgtccatcccacctgaggtgaaattcaataaaccttttgtttttctcatgatcgagcaaaataccaaatcacccctcttcatgggcaaggtcgtcaatcccacgcagaagtag

SEQ ID NO: 4017 - DNA, 1080 bp, synthetic construct
  misc_feature 1..1080: note = source = /note="Description of Artificial Sequence: Synthetic coding sequence"
  source 1..1080: mol_type = other DNA
atgcccagcagcgtgagctggggcatcctgctgctggccggcctgtgttgcttagtccccgtgagcctggcagaggatccccagggggacgccgcacagaagactgatacgagccatcacgatcaggatcaccccacgttcaacaaaataaccccaaatcttgccgagtttgctttctctctgtatcgccagttagcccatcagagcaattccactaacatctttttctcccctgtgtctattgcaaccgcattcgctatgctctctctgggaaccaaggccgacacacacgatgaaatcctggagggtttgaacttcaatcttacagaaatacctgaggcccaaattcatgaaggttttcaggagcttctcaggaccctgaaccagccagactcacagctgcagctcactactgggaacgggctgtttctgtctgaggggctgaagcttgtggataaattcctggaggatgttaaaaaattatatcactctgaagcctttaccgtgaatttcggggacacagaggaagctaagaaacagataaacgactatgtggagaagggaacccagggaaagatcgttgacttagtaaaagagctagaccgggacaccgtattcgctcttgtgaactacattttttttaaagggaagtgggagcggccttttgaggtgaaggataccgaggaagaggatttccatgtagatcaggtgaccaccgtgaaagtaccgatgatgaaacgcctgggaatgtttaatattcagcattgcaagaaactgtccagctgggtgctgctcatgaagtacctgggaaacgccaccgccatttttttcctaccagatgaaggcaagcttcaacacttggagaacgaactgacgcacgatatcataacaaaattcctggagaacgaggacaggaggtctgccagcttacatctgccaaaactgagcattactggcacatatgatctcaagtccgttctcgggcagctgggaataacaaaggttttcagcaatggcgccgatctctcgggcgtcaccgaggaagcccctctgaagctgtctaaagtgagatctccctag

SEQ ID NO: 4018 - DNA, 1257 bp, synthetic construct
  misc_feature 1..1257: note = source = /note="Description of Artificial Sequence: Synthetic coding sequence"
  source 1..1257: mol_type = other DNA
atgcccagcagcgtgagctggggcatcctgctgctggccggcctgtgctgcctggtcccggtgtccctggccgaagacccccagggagacgctgcacaaaagaccgacacttctcatcacgatcaggatcatcccaccttcaataagataacacctaacctggccgagttcgccttctcgctgtataggcagttagcccaccagtctaactccaccaacatctttttcagtccagtgagcatcgccactgccttcgccatgctctccttgggaactaaggccgacacccacgacgaaatccttgaggggttaaattttaatctaactgaaatccccgaggctcagatccacgaaggctttcaggaactcttaagaacccttaatcaacctgattcacagctgcagctcacaactggcaacgggctcttcctatctgaaggactgaagttggtggacaaattcctagaagatgttaagaaactctatcactctgaagcatttaccgtcaacttcggtgatacggaggaagcaaagaagcagatcaatgattacgtggagaagggcacccagggtaagattgtggacctcgtaaaagagttagatagagataccgtattcgccttggtcaactatattttcttcaagggcaagtgggaaagaccgttcgaggtgaaggacacagaggaagaggacttccacgttgaccaagttacaactgtgaaagtccctatgatgaagcggctcggtatgtttaacattcagcactgtaaaaagttatctagctgggtcctgctaatgaaatatctcgggaacgccacagcaatcttcttcctgccggacgagggaaaactgcagcaccttgagaatgaactgactcatgacatcattaccaaattcctcgagaatgaggaccggcggtccgctagtctgcatcttccgaagctgtcaattaccggaacctacgacctcaagtctgtactggggcagctaggcattactaaagtattttctaatggagctgacctgtcaggagtgactgaagaagccccactgaagttatctaaggctgtgcacaaggccgtgttaacgatagatgagaagggcaccgaagccgccggtgccatgttcctcgaggctattccaatgagtattcccccagaggtcaagtttaacaaaccattcgtattcctcatgatcgaacagaacacaaagtccccactgttcatgggcaaagtggtcaatccaacccagaaatag

SEQ ID NO: 4019 - DNA, 1257 bp, synthetic construct
  misc_feature 1..1257: note = source = /note="Description of Artificial Sequence: Synthetic coding sequence"
  source 1..1257: mol_type = other DNA
atgcccagcagcgtgagctggggcatcctgctgctggccggcctgtgctgcttagtgcctgtttctttggccgaggatccgcaaggcgatgccgctcaaaagaccgatacctctcaccacgatcaggaccatcctacgttcaataagataacccctaacctcgcagagttcgccttttccttataccgtcagttggcccatcagagtaattccactaacatcttcttctcacccgtcagcattgctacggcctttgctatgttaagtcttggtaccaaagctgacacacacgacgaaatcctcgaaggtttgaattttaacctgaccgagatcccagaggcccaaatccacgagggattccaagaattacttagaactctgaatcagcctgatagtcagctgcagctgacaacaggaaatgggcttttcctctctgaagggctgaagttagtcgataagttcttggaggatgtgaaaaaactgtaccattccgaagctttcactgtcaatttcggagacaccgaggaggccaagaagcagattaatgactatgtggagaaaggcactcagggaaagatcgtcgatttggtgaaggagcttgacagggacaccgtgttcgcactcgtgaattatatcttctttaagggaaaatgggagcgtccttttgaagtgaaagatactgaagaagaagactttcatgtagaccaggtgactacagttaaagtccccatgatgaaacgcctcgggatgttcaatatccaacattgcaagaaactctcaagctgggtccttctcatgaaatatttgggaaatgccacagcaatattcttcctacctgatgaggggaaactgcagcaccttgagaatgaattgacacatgatattatcactaaattcctggagaacgaggaccgacgatccgcaagcctccacttgcccaaactctcaattaccggtacgtatgacctgaagtcagtgctgggacagctggggatcacaaaagtgtttagtaacggggccgatctgtccggcgttactgaggaggcccccctcaagctgtccaaggccgtccacaaagccgtgttgactatcgacgagaaagggaccgaggcggccggcgcaatgttccttgaggccatccccatgagcatcccgccggaggtgaagtttaataaaccgtttgtgttcctgatgatcgagcagaataccaagagccccctattcatgggaaaggtcgtaaatcccacacaaaaatag

SEQ ID NO: 4020 - DNA, 1257 bp, synthetic construct
  misc_feature 1..1257: note = source = /note="Description of Artificial Sequence: Synthetic coding sequence"
  source 1..1257: mol_type = other DNA
atgcccagcagcgtgagctggggcatcctgctgctggccggcctgtgctgcctagtgccagtctcgcttgcagaggatccacagggcgatgcggcccaaaagaccgatacgtcacatcatgaccaagaccatcctacatttaacaagattaccccaaacctcgccgagttcgcctttagcctgtaccgccagctggcccatcagtctaatagcaccaacatcttcttctctcctgtgagcatcgcgactgcattcgccatgctctccctgggcacgaaagcggatacacacgatgaaattctggaagggttgaactttaacctaaccgaaatccctgaagcgcagatccacgagggatttcaggagttgctgcgaacactaaatcaaccggattcccaattgcagctgaccacaggcaatggtctattcctgagcgaggggctgaagctcgtggacaaatttctcgaagatgtaaagaagctgtaccactccgaagcttttacagtgaactttggcgacacagaagaggctaagaaacagataaatgattacgtggagaaggggacccaaggcaagattgtggacttggtgaaggaactggacagggacactgtgttcgctttggtgaattacattttttttaaggggaaatgggagcgcccgtttgaggtgaaagacaccgaggaggaagacttccatgtagatcaggtgactaccgtgaaagtacccatgatgaaacgactggggatgtttaacatacaacactgcaaaaaacttagttcatgggtactgctgatgaaatacttggggaacgcaacagctatcttctttcttcctgatgaagggaagcttcagcatcttgagaatgagctaacacacgacatcatcacaaaatttctggagaatgaagaccgccgctcagcttctctccacttgccaaagttatctattactgggacgtacgatctgaaaagtgtactgggccaactcggtatcactaaggtattttctaacggcgccgacctgtccggtgttactgaagaggccccgctcaagttgagtaaggccgtccacaaggccgtgctgaccattgacgagaaaggcacggaggcggcgggggccatgtttttagaggctatccccatgagtatccctccggaagtgaaatttaataaaccatttgtcttcctgatgatcgagcagaacacaaaatcaccgttattcatggggaaggtggtaaacccgactcagaagtag

SEQ ID NO: 4021 - DNA, 1257 bp, synthetic construct
  misc_feature 1..1257: note = source = /note="Description of Artificial Sequence: Synthetic coding sequence"
  source 1..1257: mol_type = other DNA
atgcccagcagcgtgagctggggcatcctgctgctggccggcctgtgctgtctggtgccagtgtcactggccgaggatccgcagggagatgccgcccagaaaacagacaccagccaccatgaccaggatcacccaactttcaacaaaataaccccaaatctcgctgaattcgccttcagcctctaccgacagctggcgcatcagtctaacagtaccaatatctttttctcccccgtgagcatcgcaacagcgttcgccatgctgtcacttggaactaaggctgacactcacgacgagattctggagggccttaacttcaatttgactgagatccccgaggcccagatccatgaaggcttccaagaactcttaaggacgctgaaccaaccagactcccagctccagctgactacaggcaacggcttattcttatcagagggtctcaagctagttgataaatttctagaagacgtgaaaaaactctaccactccgaagcttttaccgtgaattttggggacactgaggaagctaagaaacagattaacgactacgtggagaagggcacacagggaaagatagtggatttagtcaaggagcttgaccgagatacggtgttcgccctcgtcaactacatcttcttcaagggaaagtgggagagaccattcgaagtcaaggataccgaagaggaagactttcacgtggatcaagtgaccacagtgaaggtgccaatgatgaagcggctcggaatgtttaatatccagcattgcaaaaaattatcatcttgggtgttgctaatgaaatacctgggcaacgccacggctatattcttcctccctgacgaaggaaaactgcagcatttggagaatgagctgacgcatgacattattacaaagttcctggaaaacgaagaccgccgcagtgccagcttgcacctgccaaagctctccatcacgggcacgtatgacctcaaatctgtcctggggcagctaggcattaccaaagtgttcagcaatggcgctgatctcagtggagtaacggaggaggcgccccttaagctgagcaaggccgtacacaaggccgtccttaccattgatgagaaaggtactgaagcagcaggagcgatgtttctggaggccatccccatgtccataccccccgaagtcaaattcaataaacctttcgtttttctgatgattgagcagaacacaaagagtccacttttcatgggaaaggtggtcaaccctacccaaaagtag

SEQ ID NO: 4022 - DNA, 1257 bp, synthetic construct
  misc_feature 1..1257: note = source = /note="Description of Artificial Sequence: Synthetic coding sequence"
  source 1..1257: mol_type = other DNA
atgcccagcagcgtgagctggggcatcctgctgctggccggcctgtgctgcctcgttccagtaagtttagccgaagatccccagggagacgctgctcagaagactgatacctcccaccacgatcaggaccaccccacatttaacaagattacgcccaatcttgccgagttcgcgttttctctgtatcgacaactagcccaccagagtaactcgaccaacatatttttctcacccgtctccatcgcaacggcttttgcaatgctgtctctcggaactaaagctgacacccatgatgagattctcgaagggctgaatttcaatctcactgaaattcctgaggcacagattcacgagggatttcaagagctgctccgcactctaaatcagcccgacagccagctgcagctcactacaggaaatggactattcctcagcgagggacttaagctggtggacaaattcctggaagatgtgaagaaattgtatcattctgaagcatttacagtcaatttcggcgatactgaggaagctaagaaacagatcaacgactacgtagaaaaaggcactcagggcaagattgtggatctggtgaaggaacttgaccgggatacagtatttgctctcgttaactacatttttttcaaaggcaagtgggagcgaccctttgaagtgaaagataccgaggaggaggacttccatgtggatcaggtcactacggtgaaagtgcctatgatgaagagacttggtatgtttaatattcagcactgtaaaaagctcagctcttgggtgctgttgatgaaatatctcggaaatgctaccgcgattttctttctgcctgatgaaggcaaactgcagcacttggagaatgagctgacacatgacattatcaccaagttccttgaaaatgaggatcgccgcagcgccagcctgcacctcccaaaactgagcataacaggtacttatgatctcaaatccgtgttgggacagctcggcatcactaaggtcttcagcaacggggctgatctcagcggagttaccgaggaggcaccactgaaactcagtaaagcggtgcacaaggccgtgctgaccatcgacgaaaaggggaccgaagcagccggggctatgttcttggaggccatccccatgagtattccgcccgaggtgaagtttaataaacctttcgtgttcctgatgattgagcaaaacaccaaatccccactttttatgggcaaagtggtgaaccctacccaaaaatag

SEQ ID NO: 4023 - DNA, 279 bp, synthetic construct
  misc_feature 1..279: note = source = /note="Description of Artificial Sequence: Synthetic coding sequence"
  source 1..279: mol_type = other DNA
atgcccagcagcgtgagctggggcatcctgctgctggccggcctgtgttgcctcgtgccagtgtctctcgctgaagatccacaaggtgacgccgcccagaagacagacactagccaccacgaccaggatcatccaaccttcaataaaattacccccaatttggctgagtttgccttttccctgtaccgacagctggcacaccagtctaactctacaaacatattctttagtccagtcagtattgccaccgccttcgccatgctgagcttgggaacatag

SEQ ID NO: 4024 - DNA, 471 bp, synthetic construct
  misc_feature 1..471: note = source = /note="Description of Artificial Sequence: Synthetic coding sequence"
  source 1..471: mol_type = other DNA
atgcccagcagcgtgagctggggcatcctgctgctggccggcctgtgttgtcttgttcctgtctcccttgccgaggatccccagggagatgcagcacagaaaacagataccagtcatcacgaccaagaccacccgacctttaacaagattaccccgaaccttgctgagttcgcattttctctttacaggcaattagcacaccaatccaacagcacaaatattttctttagccccgtgtctattgcaactgcattcgcaatgctcagtcttggaaccaaggccgatacccacgatgaaatccttgaaggccttaatttcaacttgacagagattcctgaagcacaaatccacgaggggttccaagagctcctcaggactctcaatcagccagactctcagcttcagttgactaccggtaacgggctatttctgtcagaaggactcaaactggtcgacaaattcctcgagtag

SEQ ID NO: 4025 - DNA, 354 bp, synthetic construct
  misc_feature 1..354: note = source = /note="Description of Artificial Sequence: Synthetic coding sequence"
  source 1..354: mol_type = other DNA
atgcccagcagcgtgagctggggcatcctgctgctggccggcctgtgctgcctggtgcccgtgtctttagccgaagatccccagggcgacgctgctcagaagaccgatacaagccatcatgatcaggaccatcccactttcaataaaatcacacccaacctggccgaatttgccttcagcctatatcggcagctggcgcaccagtccaacagcacgaacatctttttcagtccggtatccatcgccacagctttcgccatgctctctttaggtacaaaagcggacacccatgacgagatcctggaaggtcttaattttaacctgaccgagatccccgaggcccaaattcactag

SEQ ID NO: 4026 - DNA, 69 bp, synthetic construct
  misc_feature 1..69: note = source = /note="Description of Artificial Sequence: Synthetic coding sequence"
  source 1..69: mol_type = other DNA
atgcccagcagcgtgagctggggcatcctgctgctggccggcctgtgctgcctggtacccgtgtcctag

SEQ ID NO: 4027 - DNA, 435 bp, synthetic construct
  misc_feature 1..435: note = source = /note="Description of Artificial Sequence: Synthetic coding sequence"
  source 1..435: mol_type = other DNA
atgcccagcagcgtgagctggggcatcctgctgctggccggcctgtgctgcttggtcccagtcagcctcgcagaagatccacagggcgacgccgctcaaaagacagacacatctcatcatgaccaggatcatcccacttttaataagattacccccaatttggccgaatttgctttctctttgtaccggcagttggcccaccagtccaactcaaccaacatattcttttctcctgttagcattgccaccgcttttgcgatgttgtcccttgggactaaggccgacacccatgacgagatcctcgaaggcctgaatttcaaccttaccgagattcctgaggctcagattcatgaaggatttcaggagctcctccggacccttaatcagccagacagccagctccaactgactactggaaatggcctgttcttgtag

SEQ ID NO: 4028 - DNA, 780 bp, synthetic construct
  misc_feature 1..780: note = source = /note="Description of Artificial Sequence: Synthetic coding sequence"
  source 1..780: mol_type = other DNA
atgtacagcaacgtgatcggcaccgtgaccagcggcaagcggaaggtatatctcctgagccttctgctaatcggattctgggattgtgtgacttgtcacggtagtcctgtagatatctgcaccgctaaacccagagatatcccgatgaatccaatgtgtatctaccggtctccagaaaaaaaggcaacggaagatgaaggaagtgaacaaaagatccctgaggctactaatcgacgagtctgggagctctcaaaagccaatagccgctttgcaaccaccttttatcaacacctggcagattctaagaacgacaacgataacattttcctgtcccctctcagtatcagcacagccttcgcgatgaccaagctgggcgcatgcaacgatactcttcaacagttaatggaggtcttcaagtttgacactatctctgagaagacatccgatcagatccattttttttttgcaaaattgaattgcaggttataccggaaggccaacaagagctctaaactggtcagcgctaacaggctgttcggagataagagcctgactttcaacgatttatatgtgtctgacgcttttcacaaggctttcctagaagtcaacgaggaaggttctgaagctgccgccagcacagctgtcgtgatcgcagggagaagcctgaatccgaatcgcgtcaccttcaaggcaaatcgtcctttccttgtctttattagggaagtgccactcaacacaatcatcttcatgggacgggttgccaatccttgcgtgaaatag

SEQ ID NO: 4029 - DNA, 1395 bp, synthetic construct
  misc_feature 1..1395: note = source = /note="Description of Artificial Sequence: Synthetic coding sequence"
  source 1..1395: mol_type = other DNA
atgtacagcaacgtgatcggcaccgtgaccagcggcaagcggaaggtgtacctgctgtccctcctactaattgggttttgggactgcgtcacctgtcacggcagcccagtggacatctgcacagcaaaacctagggatatccccatgaacccaatgtgcatataccgttccccagagaagaaggcaaccgaggacgaaggcagtgagcagaaaatacctgaagctactaaccggagagtgtgggagctgtccaaagcgaacagtcgtttcgctactacattttatcagcaccttgccgactcaaaaaatgataatgataacatttttttatcccctctgagtatttcgacggcctttgctatgactaagctcggggcttgcaacgacactctccagcagttaatggaggtgtttaagtttgatactataagtgaaaagacctccgatcagatccatttttttttcgctaagctgaactgcagactctaccgaaaggcgaacaagtctagcaagctggtgtcagcaaatagactgtttggcgataagtccctcacatttaatgagacataccaggacatctctgagctggtgtatggcgcgaaactacagcccctggatttcaaggagaatgccgaacagtcccgagccgccattaacaagtgggttagtaataaaacagagggaaggatcaccgacgtgatcccctcggaagcgatcaatgaacttacggtgctggttctggtcaacacaatctactttaaagggctgtggaagtcgaagttctctccggagaatacaagaaaagaattgttttacaaggcagatggggagtcttgcagtgcctccatgatgtatcaagagggaaaatttaggtaccgcagagtggctgagggtactcaagttctggagcttcctttcaagggcgatgatatcaccatggtgttaattcttcccaagcctgagaagagcctggcaaaagtggagaaggagttaactccagaggtgctgcaagagtggctggacgaacttgaagagatgatgctcgtagttcatatgcccagattcaggatcgaggacgggttctcactgaaagaacagttgcaggacatgggactcgtcgaccttttttccccagaaaaatcaaaactgccgggtatagttgccgagggcagagacgatctgtacgtgagtgatgcatttcacaaggctttcttagaagtgaacgaagagggctctgaagctgcggctagtacagcggtggtcatcgctggacgatcccttaatccaaatagagtgaccttcaaagctaaccggccgtttcttgtcttcatccgcgaagtccccctgaacacaatcatctttatggggagggtggccaacccctgcgtgaaatag

SEQ ID NO: 4030 - DNA, 1476 bp, synthetic construct
  misc_feature 1..1476: note = source = /note="Description of Artificial Sequence: Synthetic coding sequence"
  source 1..1476: mol_type = other DNA
atggccctgctgtggggcctgctggtgctgagctggagctgcctgcagggtccgtgttcagtttttagccctgtgagcgccatggaacccctgggccggcagctgacatcaggccccaatcaagaacaggtcagtccgctcaccctattgaagctcgggaatcaggagcccgggggacaaaccgccttaaagtctccgccaggagtgtgcagtcgtgatcctactccagaacagacccatcgcctggcacgcgcaatgatggcattcacagcagacttattttctctggtcgcacagacatccacctgccccaatctgatcctctccccactatcagttgcacttgccctgagccacctggcactgggtgcacagaaccacactctccagcggttgcagcaagtgttacatgctgggtctggaccttgtctcccacaccttctgtctagactctgccaagatttaggtcccggagcattcagactagccgctcgcatgtatctccaaaagggtttcccgatcaaggaggacttccttgagcaatccgaacaattatttggggcaaagccagtgagcctgactggcaagcaggaagacgacctggccaacatcaaccagtgggtcaaagaggctactgagggcaaaatccaggagtttctgagtggcttgccagaggacacagttctgctgctgctgaatgctattcactttcagggattctggagaaacaagttcgacccgagtctgacacaacgggatagctttcatttggatgagcagttcactgtgcccgtcgaaatgatgcaggcacggacttacccgctgcgttggttcctgctcgagcaacctgaaatccaggtggcccattttcctttcaaaaacaatatgagcttcgtggtgttggttccgacacattttgaatggaacgtctcccaagtgttggctaatttgagttgggacactctgcatccacctctagtgtgggagagacctaccaaggttagacttccgaagctctatctgaaacatcagatggacttggtggccacgctgagccagctcgggctgcaggaactcttccaggccccagacctgcgcgggatcagcgaacagtctcttgttgtcagtggggtgcagcaccagagcaccctcgaactctctgaagttggggtagaggctgctgcagccacctcaatcgcaatgtccagaatgtcactctctagtttcagcgtgaatcggccattcctgttctttatcttcgaggacactacgggactaccactgttcgtcggctcagttaggaatcccaaccctagtgcaccaagagagctaaaggaacagcaggactccccgggtaataaggatttcctgcagtcactcaaaggttttcccaggggtgacaaactcttcgggcctgatttgaaactggttcctcccatggaagaagattacccacagttcggtagtcctaagtag

SEQ ID NO: 4031 - DNA, 1476 bp, synthetic construct
  misc_feature 1..1476: note = source = /note="Description of Artificial Sequence: Synthetic coding sequence"
  source 1..1476: mol_type = other DNA
atggccctgctgtggggcctgctggtgctgagctggagctgcctgcagggtccttgctccgtcttctcccccgtcagtgctatggaaccgttagggcgccagcttacctccggtcctaatcaggaacaggtgtcaccattgactcttctgaaattgggcaatcaagaacctggcggacagaccgccttgaaatctccccccggggtttgcagtagagatccaacccccgagcagacccaccgactagctagagcaatgatggcttttactgcagatctgttttcccttgtggcccaaacttccacatgtcctaacctcattctgtcccccctgagcgtagccctcgcgctgagccaccttgcccttggagcgcagaatcacacactgcagaggctgcaacaggtcctccatgcgggcagtggtccttgcctgcctcatctgctgagccggctatgtcaggatctgggacctggggcattccgtctggccgctcggatgtacctgcagaagggctttccaattaaagaggacttcctcgaacagtcggagcagctgttcggcgcaaagccagtctctttgactggtaagcaggaggatgacttggcgaatatcaatcagtgggttaaagaggccaccgaaggaaagattcaggagttcctctccggtctgccggaagatacagtgctcttgttgttgaatgccatccatttccaaggattttggaggaataagtttgacccaagcctgacccagcgcgactcctttcacctggacgaacagttcacagttccggttgaaatgatgcaggcaaggacatatcccctccgttggttcttactggagcaacccgaaattcaggtcgcccacttcccattcaagaataatatgagcttcgtcgtcctggtgcccacccattttgagtggaacgtgagccaggtgctggctaatctgtcatgggataccctccatcctcctctagtgtgggagagaccaactaaggtgaggctgcccaagctgtacctgaagcaccagatggatctcgtggcgaccctctctcagctgggcctacaggaactgttccaggccccggatttgagggggatcagcgagcagtctcttgtggtgagcggtgtgcaacatcagagcacactcgaactgtctgaggtgggcgtagaagccgctgcagcaacaagcatagccatgagccgtatgagtttgagctcgttcagcgtcaacagaccgtttctcttcttcattttcgaggacacaaccggcttgccactgtttgtcgggagtgttcgcaatccaaacccaagcgctccgagggagctgaaagagcagcaggattccccaggaaacaaagacttcctccaatccctgaagggcttccctaggggtgacaagctgtttggacctgatcttaaactggtccctcccatggaagaggattacccccagtttggaagcccgaaatag

SEQ ID NO: 4032 - DNA, 1284 bp, synthetic construct
  misc_feature 1..1284: note = source = /note="Description of Artificial Sequence: Synthetic coding sequence"
  source 1..1284: mol_type = other DNA
atggccctgctgtggggcctgctggtgctgagctggagctgcctgcaggggccttgttccgtgttctcgcccgtctccgccatggagcccctgggccggcaattgacatccggtcctaaccaggagcaggtcagtccattgactctcctgaagttgggcaatcaggtgcaacccggagcccaaaatcataccctgcagcgtttgcagcaggtccttcacgccggctcgggaccgtgcctaccacacctgttgagccgactgtgtcaggacctaggacctggcgcatttcgactcgccgctagaatgtatctgcaaaagggcttccccattaaagaagatttcctggagcagagtgaacagctgttcggagccaagcctgtgtcacttacaggtaaacaagaggacgacctggctaatattaatcagtgggtgaaggaagcaaccgaggggaaaatccaggaattcctgagcggacttcctgaggacacggtgcttctcctgctgaacgccatacactttcaaggcttttggcgcaacaaatttgaccccagcctgacccagcgcgactccttccacctcgatgaacagttcacggtgcccgtagagatgatgcaggccagaacatatccacttaggtggtttctcttagaacagcccgaaattcaggtggcacactttccgttcaagaacaatatgagttttgttgttttggtgccgacacatttcgagtggaacgtcagccaggtgctagccaacctctcctgggatacccttcatccccccctggtgtgggaaagacccactaaggtccggcttccaaagttgtatctcaaacaccagatggacctggtcgcaaccctgagtcagttgggtctccaggaactattccaggcacccgatttacgcgggatctcagaacaaagcttggttgtgtcaggcgtgcagcaccagagtaccctggagttgagcgaggtcggggtggaggcagccgcggccacatctatcgcgatgagccgcatgtcattgtcatcattctccgtaaaccggcccttcctgtttttcattttcgaagacactaccgggttaccccttttcgtgggctctgtccgtaatccaaaccccagcgccccacgggagttgaaagagcagcaagacagcccagggaacaaagacttcctgcaatctcttaaagggttccccagaggtgacaagcttttcggacctgacctgaagctggttccaccgatggaagaggactaccctcagttcggaagtcctaagtag

SEQ ID NO: 4033 - DNA, 768 bp, synthetic construct
  misc_feature 1..768: note = source = /note="Description of Artificial Sequence: Synthetic coding sequence"
  source 1..768: mol_type = other DNA
atggccctgctgtggggcctgctggtgctgagctggagctgcctgcaaggaccttgctccgtattttcccctgtgagcgccatggagccgctaggtagacagctgacgagcgggcctaaccaggagcaggtgtctccgctgaccctcttaaaattggggaaccaggaacctggggggcagaccgcactgaaatccccccccggagtttgtagccgagacccgacacccgagcagacccaccgcctcgcacgcgcgatgatggccttcactgctgacctctttagtttggtggcgcagacatccacgtgcccaaatctgatcctttctcccctttcggtggcattggcactcagccacctcgctctgggagctcagaatcacacactgcagcgactccagcaggtgctgcacgctgggagtggaccatgcctgccccacttgttgagtcgtctttgtcaggacttaggtcctggggcgttcaggctggcagccaggatgtatttgcagaaggggttcccaatcaaggaggatttcttagaacaaagtgaacagttgttcggcgctaaacccgtgtctttaacaggcaaacaagaagatgatttggccaatataaaccagtgggtcaaggaagcaacggaagggaagatccaggagtttctctcaggccttccggaagacacagtcctgctgctgctgaatgctattcatttccagggattttggcgcaacaagtttgacccatcccttacacagagagattccttctag

SEQ ID NO: 4034 - DNA, 1503 bp, synthetic construct
  misc_feature 1..1503: note = source = /note="Description of Artificial Sequence: Synthetic coding sequence"
  source 1..1503: mol_type = other DNA
atggccagccggctgaccctgctgaccctgctgctgctgctgctggcgggcgaccgtgcttcttctaatccaaatgccacatccagcagtagccaggatccagagtctctccaagatagaggcgaggggaaggtagcaacaaccgtgattagtaaaatgttattcgtcgaacccattctcgaggtctcctctttacctacaaccaactccacaacgaattcagccaccaagataactgccaatacaacggacgagcctaccacccagcccaccactgagcccaccacacaacccacaatccaacccacccagccaactacacagctaccgaccgactcccctacgcaacctactactggtagcttctgccctggcccagttacactgtgctcagatctggaaagccattctactgaagccgttctgggcgatgcgctagtggatttctccctgaaactctaccacgcctttagtgcgatgaaaaaagtagaaaccaacatggccttttcccccttttcaatcgcttccctgttaacgcaggtgctactcggcgccggagaaaatactaaaaccaacctagaatccatcctgagttaccctaaggactttacatgcgtccatcaagcccttaagggattcactaccaaaggagtgacatctgtgagtcagatctttcactcaccagatctggctattagagataccttcgtaaatgctagccgcacactctatagttcctctccacgggttctttctaacaacagtgacgctaatttggaactcataaacacatgggtggctaaaaacaccaacaataagatctctcgcctgctggattcacttccttccgataccagactggttctcttaaatgccatctacctttctgctaagtggaagaccacattcgaccccaagaagactcgtatggagcccttccactttaaaaattctgtcatcaaggtgcctatgatgaattctaagaagtacccggtggctcactttattgatcagacgctcaaggccaaggtgggacagcttcaactctcacataaccttagcctggtgattctggtgccccagaatctaaaacacagacttgaggacatggagcaagcattgagcccatccgtgtttaaggcaatcatggaaaagcttgagatgtctaagtttcagccaacccttttgaccttgcctaggattaaggtgactactagccaggatatgttgtccatcatggaaaaactggagtttttcgacttctcctacgatctgaacctgtgcggtctgaccgaagatccggatcttcaggtttcggctatgcagcaccagacagtgctggagcttactgaaactggagttgaagctgccgctgcatccgcgatctcagtggccaggaccctcctggtgtttgaggtccagcagccgttcctgtttgtcctctgggaccagcagcacaaatttcctgtgttcatgggtagggtgtacgatcctagggcatag

SEQ ID NO: 4035 - DNA, 1518 bp, synthetic construct
  misc_feature 1..1518: note = source = /note="Description of Artificial Sequence: Synthetic coding sequence"
  source 1..1518: mol_type = other DNA
atggccagccggctgaccctgctgaccctgctgctgctgctgctggccgggttcctggagccccaagaccgagcctccagtaaccctaacgcaacctcctcctcctcccaggacccagaatccctgcaggatcgtggcgaaggcaaagttgctaccacagtaatatccaagatgttgttcgtggagcccatcctcgaggtgtcatccctgccaacaacgaattctactactaatagcgccaccaaaattactgccaacaccaccgatgaacccaccacccagcctacgacagagcctactacacagccgacaattcagccgacacagccaactacgcaactcccgacagacagtcccacacagcctaccacaggatctttttgtcccggccctgttaccctgtgctcggatttagaatcccacagcaccgaagcggttttaggagacgcgcttgtagacttcagcctgaaactgtaccatgcattcagtgccatgaagaaggtcgagaccaacatggccttcagtccgtttagtattgcctctctgttgacccaggtgctgttgggagccggggagaataccaaaaccaatctcgagtctattctctcttacccaaaagatttcacttgcgtgcaccaagccctcaaaggcttcaccaccaagggtgtcacgtctgtcagtcaaatcttccacagcccagatcttgcaattcgggacacttttgtgaacgcaagcagaaccttatattctagctcgcctagagtgctctccaacaattccgacgcgaacctcgagctgatcaacacctgggtggcgaagaatactaataacaaaatttctaggctgctggactcattgccctccgacacgcggttggttctcctaaacgccatctacctatccgccaaatggaaaacaacctttgatccaaagaagacacgcatggagccatttcatttcaagaacagcgtaatcaaagtgccaatgatgaacagtaaaaagtaccccgtggcccatttcatcgaccagactctcaaggcgaaggtggggcagctacaactgtcacataacctctccctcgtaatcctggtgccacagaacctcaagcataggctggaggatatggaacaggcccttagccccagcgtgtttaaggccattatggaaaaactcgaaatgtctaagttccagccaactctgctcacgctgccccgcatcaaagtgacaacgagtcaagatatgctcagcattatggagaaactggagttcttcgatttcagttacgaccttaatctgtgtggactaaccgaagacccggacctacaggtgagcgcgatgcagcaccagacggtgctggaactgacggagacaggtgtcgaggcggctgcggcgagcgccatcagtgtggcacgaacccttctcgtgttcgaagtccagcagccattcctctttgtgctctgggaccaacagcacaaatttcccgtgtttatgggcagggtctacgatccaagagcatag

SEQ ID NO: 4036 - DNA, 1347 bp, synthetic construct
  misc_feature 1..1347: note = source = /note="Description of Artificial Sequence: Synthetic coding sequence"
  source 1..1347: mol_type = other DNA
atgctgttcgtggagcccatcctggaggtgagcagcctgcccaccacgaactcgaccactaactccgcaacaaaaatcactgccaatacaacagatgagcccaccacacagcccacgacagaaccaacaacccagcccaccatccaacctactcaacccactacacagctgcctactgacagccctacccaacctacaactggcagcttctgtccagggccagtaaccctatgctctgacctcgaatcacactcaaccgaggccgtcttgggggacgccctggtcgacttttcacttaagttgtaccacgcattcagtgctatgaagaaggtagagaccaatatggccttttctccctttagtatcgcctcgcttcttactcaagtgctgctgggcgctggagagaatacgaagacgaatttggagtccattttatcataccccaaggactttacttgtgtgcatcaggcattgaagggttttacgactaagggggtgacttccgtgtctcagattttccacagccctgatcttgccattcgcgatacgttcgtgaatgcaagtagaactctgtacagctcttccccaagggtgcttagcaataattccgatgcaaacttggagttgatcaacacatgggtagcaaaaaataccaacaacaagatctcaagactgcttgatagcctgccctctgacacccgcttggtgctattgaatgcaatctacctaagcgctaagtggaaaacgacctttgatcccaaaaaaactcggatggagcccttccatttcaaaaatagcgtcattaaagtccccatgatgaactcaaaaaaataccctgtcgctcattttatagaccaaactctgaaggccaaggtgggacagctgcaactcagccataatctgtcgttagtgattttggtgccccagaatttaaagcacaggctcgaagacatggagcaagccctgtccccatctgtgtttaaagcaattatggagaagctcgagatgtccaagttccaacccacgttactgaccttgccccgcatcaaagtaacaaccagccaggacatgctcagtattatggagaagctggaatttttcgatttctcttacgaccttaatctgtgcggactcaccgaagatccagaccttcaggtgtccgcaatgcagcaccagacagtgcttgaactgacagaaaccggtgtcgaagctgccgctgccagcgccatcagcgtcgcccgtactctcctggttttcgaagtacaacaacccttcttattcgttttatgggatcagcaacacaaattccccgtctttatgggcagagtttatgaccctagggcctag

SEQ ID NO: 4037 - DNA, 483 bp, synthetic construct
  misc_feature 1..483: note = source = /note="Description of Artificial Sequence: Synthetic coding sequence"
  source 1..483: mol_type = other DNA
atggccagccggctgaccctgctgaccctgctgctgctgctgctggcaggtgatcgggcaagctccaacccaaatgccacatcctcctctagtcaggaccctgagtcactgcaggaccggggagagggcaaggttgccacaacagtaatttcaaaaatgctgtttgtagagccaatactggaggtatcttccctgcctactacaaacagtacaactaacagcgccaccaagataaccgccaacaccacggacgaacccaccacacagccgactacggagcctacaacccagccgaccatacagcctacacagcccaccacccagctgcccaccgattctccaacgcagccaacaaccggctccttctgtcccggcccggtgacactgtgctcagaccttgagtcccactctaccgaggcagtgttaggcgacgctctggtagacttctctttgaaactctatcacgccttttccgccatgtag

SEQ ID NO: 4038 - DNA, 402 bp, synthetic construct
  misc_feature 1..402: note = source = /note="Description of Artificial Sequence: Synthetic coding sequence"
  source 1..402: mol_type = other DNA
atggccagccggctgaccctgctgaccctgctgctgctgctgctggccggagacagggcctcttccaaccccaacgcaaccagcagctcttcccaagaccctgagagtcttcaggatagaggcgaaggcaaggtcgcaactactgtcatttccaaaatgctgttcgtagaacccatactggaggtgagctccctccctactacaaattctactacaaacagtgctactaaaatcactgccaacacgacagatgaacccacgacacagccaaccactgaacccaccacacagccaacgatccagccgacacagccgacaacacaactaccaaccgactcccctactcagccagggtacgccctgaaccacggagaaattggcatcttgagattctttctctag

SEQ ID NO: 4039 - DNA, 3405 bp, synthetic construct
  misc_feature 1..3405: note = source = /note="Description of Artificial Sequence: Synthetic coding sequence"
  source 1..3405: mol_type = other DNA
atgcccgtgttccacacccggaccatcgagagcatcctggagcccgtggcccagcagatctcacatctggtgattatgcatgaggaaggagaggtagatggcaaagccatacccgatttgactgcccctgtggccgccgtgcaggcagccgtttctaacctggtccgtgtgggtaaggagacggtgcaaacaacagaagatcagatccttaagcgcgacatgccgcccgcattcattaaggttgagaatgcatgcaccaagttggtgcaggccgcccagatgctgcagagcgatccttacagcgtgcccgccagggattatctcatagacggcagccgcggcatactgagcggcacttcagacctattgttgacttttgatgaggctgaagttaggaagattatccgagtgtgcaagggaattctggaatacctgacagtggccgaggtcgtcgagaccatggaggacctggtgacctatactaagaacctggggcctggcatgacaaagatggctaagatgattgatgagcgccagcaggagctgactcatcaggagcacagagtcatgctggtgaacagcatgaataccgtgaaagaactgttaccggtgttaattagcgccatgaagatctttgtgaccaccaagaatagtaagaatcagggcatcgaagaggccctgaagaacagaaacttcacggttgagaaaatgtctgctgagatcaacgaaatcatcagagttctgcagctgaccagctgggatgaggacgcctgggcttctaaagatacagaggccatgaagcgtgctctggcctctatcgacagcaagctgaaccaggcaaagggctggttacgcgatccaagcgcctctccgggagacgcaggagagcaggcaatccgtcagatattggacgaagccggaaaggtcggcgaactgtgcgcaggaaaggagcgaagggaaatcttgggcacttgcaagatgctgggccagatgacagatcaggtagccgatcttcgggctcggggacagggcagttcacctgtcgcaatgcagaaggctcagcaggtgagccagggacttgacgttctcacagctaaggtggagaacgccgcccggaaacttgaagcgatgaccaatagtaaacagagcatcgcgaaaaagatcgatgcagctcagaactggctcgctgatcccaacggagggccagagggagaggagcagattagaggggctttggccgaggcgagaaagatcgccgagctttgcgacgatcccaaggagagggacgacatcttgcgtagcctaggggagatcagcgccctgacaagtaagttagccgacctgcgtagacaggggaaaggcgactcacctgaggctcgcgctctcgcaaagcaagtggcgacggccctccagaatctgcaaaccaagaccaatagggcagtagccaacagccggcccgctaaagccgctgtgcacctggagggcaagattgaacaggctcaacggtggattgacaaccccacagtggatgatcgtggcgtgggacaagcagccattaggggactggtagcagagggccaccgcctcgcaaatgttatgatggggccttatcgacaagatttgttggcaaagtgcgatagggttgaccaattgaccgcccaactcgccgatctagccgcgagaggagaaggcgagagtccacaggcgcgggctttagctagccagcttcaggactctcttaaagatctcaaggcaagaatgcaggaggcaatgactcaggaagtgtcggatgtgtttagcgacaccaccacacctatcaaactcctggctgttgccgctaccgcgccaccagatgccccaaaccgggaagaggtgtttgatgaaagggcagccaatttcgaaaatcacagtggcaagttaggggccaccgcggagaaggccgcagcggtgggcacagcgaataagtctactgtcgaaggcattcaggcctccgtcaagaccgctcgggaactgacaccgcaggtagtgtctgcggcccggatcctcttgcgcaatcccggcaatcaggccgcgtatgaacactttgagaccatgaaaaatcaatggatagataatgtggagaagatgacaggtctggtggacgaggccatcgacacgaaatccttactggacgcctccgaagaagctatcaagaaagacctagacaaatgtaaggtggccatggctaacattcaaccgcagatgctggtggccggggccactagcattgcacgacgcgccaatcggatcttactggtggccaagagggaggtggaaaattcagaggaccctaaatttagggaggccgtcaaggcagctagcgacgagctgtctaagaccatttcacccatggtgatggacgcaaaagccgttgcaggaaacatttctgacccgggcttgcagaaaagctttctagactccggctatagaatattaggcgcagttgcgaaggtaagggaggcttttcaaccgcaagaacctgattttcctccccctcctccagatctggagcagttgagactgacagacgagttggcgccccccaagccgccgttacccgagggcgaagtccccccccccaggccccccccacccgaagagaaggatgaggagtttccggaacagaaggcaggggaagtgataaaccagcctatgatgatggcggcaagacagcttcatgatgaggcacgcaagtggtcttcgaaaccaggtattccagccgctgaagtcggcatcggagtagtggccgaagctgacgccgcagacgccgcaggattcccagtgcctcccgacatggaagatgattatgaacctgagctcttgctaatgcctagtaatcagcccgtcaatcagccaattctggccgcggctcagagcctacaccgtgaagctaccaagtggagtagcaaggggaatgacatcattgcggccgccaagagaatggccctgttaatggccgaaatgtctaggctggtgcggggtgggtccggcacgaagcgggcgctgatccagtgcgccaaggacatcgctaaagcctctgacgaggtaactcggctggctaaggaggtcgcgaaacagtgtaccgataaacgcatcagaacaaacctgctccaggtttgcgaaagaataccaaccatttcgacacaattaaaaattctctctacggtgaaggctactatgctcggacgcaccaatataagtgacgaagagagcgagcaagctaccgaaatgttggtgcataacgcacagaacctgatgcaatccgtaaaggagacggtccgggaggccgaagccgcaagcatcaagatacgaaccgacgctgggttcactctgaggtgggtgcggaagaccccttggtaccagtag

SEQ ID NO: 4040 - DNA, 1335 bp, synthetic construct
  misc_feature 1..1335: note = source = /note="Description of Artificial Sequence: Synthetic coding sequence"
  source 1..1335: mol_type = other DNA
atgtgcctgtgcagcggccggaagaccatcctggagatctaccccggccagttccaaccgtccttgtgtcataagtttatagctctgtctgacaaggaagggaaactattgaggaactatactcaaaatatcgacaccctagagcaggtcgcagggattcaacggataatccaatgccatggatcttttgccaccgcatcttgcctgatttgcaagtataaagtcgactgcgaggcagttagaggcgacattttcaaccaggttgtgccaaggtgtcctcgatgtccggctgacgagcctttagcgataatgaagcccgaaatcgtctttttcggcgagaatctccctgaacagtttcacagagcaatgaaatacgataaagacgaggtggatctgctgatcgttataggaagttccttgaaggtgcgacctgtggccctgataccgtcttctatccctcacgaagtcccacaaatcctcataaatcgggaaccgctaccacacctacattttgatgtggagctgttgggcgactgtgatgtcattattaacgaattatgccacagactggggggtgaatatgcgaagctctgctgtaacccagttaaactgtcagagatcaccgagaaaccgccacgcacgcaaaaagaattggcttacctttcggaactccctccaacacccctgcacgtctccgaggatagcagttcgcccgaaagaacttcacccccagatagttcagtgatcgtcactctcctggatcaggcagccaagtccaacgacgacttggacgtgtcagagagtaaaggctgcatggaagaaaagccccaagaggtgcagacatcacgcaatgttgagagtatcgccgaacagatggagaatcctgatctgaagaacgtcggatccagcaccggagagaagaatgaaaggacatccgtggcaggaaccgtgaggaagtgctggcctaacagagtagctaaggagcaaatttcccgccgactagatggcaaccaatatctctttctgccgcctaatagatatatatttcacggagccgaggtgtactctgacagcgaggatgatgtcctatccagcagctcctgtgggagtaatagcgactccgggacttgccagagcccttccttagaggagcctatggaggatgagtctgaaatcgaggagttttacaatggtttggaagatgaaccagatgtgcctgaaagagccggtggagccggattcgggaccgacggtgacgaccaggaagcaatcaatgaagccatcagcgtgaaacaggaggtaactgacatgaattacccttcaaacaagagctag

SEQ ID NO: 4041 - DNA, 1335 bp, synthetic construct
  misc_feature 1..1335: note = source = /note="Description of Artificial Sequence: Synthetic coding sequence"
  source 1..1335: mol_type = other DNA
atgtgcctgtgcagcggccggaagaccatcctggagatctaccccggacagtttcagcctagtctttgccacaagttcatcgccttatccgacaaagagggaaaactgttaagaaactatacgcagaatatagacactctggaacaggtggcgggaatccagagaatcattcagtgtcacggttcgttcgcaactgctagttgtctcatctgcaagtataaagtggattgcgaggcagtgaggggtgatatatttaatcaagtcgtgccacgctgccctaggtgccctgccgacgaaccattagcgatcatgaaacccgaaatcgtatttttcggagagaatctcccagagcagttccacagggcaatgaagtatgataaggacgaggtcgatctgctgatagtcatcgggtcctctctaaaagtccgccctgtggctctgatcccttcttctatcccacacgaggtgccgcagatcctgataaatagggagcccttgccccacctgcacttcgacgttgagttattgggagattgtgacgtgatcattaatgagctgtgccataggctcggaggagagtacgctaagctttgttgtaacccagttaaactatccgagataaccgagaagccaccaaggacccagaaggaactcgcgtatctctccgaattgcctccgacgccactccacgtgagtgaagacagttcttcacctgaaaggacctccccccctgattctagcgtgattgttactcttcttgatcaggcagccaaatcgaacgatgatcttgatgtaagtgaatccaaaggctgcatggaggaaaagccccaagaggtgcagacatcacgcaacgtcgagtcaatcgctgagcagatggagaatccagatctaaagaacgtaggcagcagcacaggcgagaagaatgaacggacttctgttgccggaactgttcggaagtgttggcccaaccgagtcgcaaaggagcagatctcgagaaggttggatgggaatcaatacctgttcttgccacccaacaggtacattttccatggcgcagaggtctattctgatagcgaagatgacgtgttgagctccagttcatgtggctcgaattcggacagcggaacgtgtcagtccccctctttggaagagcctatggaggatgaatcagagatagaggagttttacaatgggcttgaagatgaacccgatgtgccagagagggcgggcggcgctggattcgggactgacggggatgaccaagaggccataaacgaggctataagcgtgaaacaggaggtgacggacatgaactatcctagtaacaagagctag

SEQ ID NO: 4042 - DNA, 1359 bp, synthetic construct
  misc_feature 1..1359: note = source = /note="Description of Artificial Sequence: Synthetic coding sequence"
  source 1..1359: mol_type = other DNA
atgttcgacatcgagtacttccggaaggacccccggcccttcttcaaatttgccaaggaaatctatccaggacagtttcagccatctctgtgtcataagtttattgccctgagcgataaggaggggaagcttcttagaaactacactcagaacatcgacacgctagagcaggtggcagggatccagcgcatcatccagtgccacggaagttttgctacggctagctgtttgatctgtaagtacaaagttgattgtgaagcggtgcgcggagatatctttaaccaggtcgttcctcgatgtccacgatgccccgctgatgaaccactggcaattatgaagcctgagattgtgttctttggagagaatttgccggaacaatttcaccgcgcgatgaagtacgacaaggacgaggtggatctcctaattgtgattggctcctcgcttaaggtccgtccagtagcactcataccgtcttccatcccgcatgaagttccgcaaatcttaatcaaccgtgaaccacttccccatttacacttcgatgtggagctgctgggggattgcgacgtaataattaatgaactctgccaccggctcggtggagagtatgcaaaattgtgctgtaatcccgtgaagttgtccgaaataacggaaaaacctcctcggacccagaaagagctggcatatctctctgaattgcctccaacacccctgcacgtatctgaggatagctccagcccagaaagaacatcacccccggactctagtgtaatagtgaccctcctcgatcaggccgccaaaagcaatgatgatttggacgtttcagagtccaaaggctgcatggaggagaagcctcaggaagtgcagacctcccgaaacgtggagtcaatagccgagcaaatggagaatccggatctcaaaaatgttggtagctctaccggcgaaaaaaacgagcggacaagcgtcgcagggacggtgcgaaagtgttggccgaatcgcgtggctaaagagcagatctctcgccgtctggacggcaatcagtatttgtttctgccacctaacaggtacatcttccacggggcggaggtatacagcgattccgaggacgatgttctgagctcttcttcctgcggaagcaattcagactctggtacgtgtcagtcaccatcactggaggagccaatggaggatgaatcagaaattgaggagttctataacggtctggaagacgagcccgacgtgcctgagcgcgcgggcggggcaggattcggaactgatggcgatgaccaggaggccattaatgaagccatctccgtgaaacaagaggtgacagacatgaactaccccagtaataaaagctag

SEQ ID NO: 4043 - DNA, 987 bp, synthetic construct
  misc_feature 1..987: note = source = /note="Description of Artificial Sequence: Synthetic coding sequence"
  source 1..987: mol_type = other DNA
atgagcgtgaactacgccgccggcctgagcccctacgccgacaagggaaagtgcggccttccagaaatatttgaccctccagaggaattagagaggaaggtctgggagcttgctcggctggtgtggcagtccagctcagttgtgtttcatacaggagcagggatctccaccgctagcgggatcccagatttccgcggaccacacggggtctggaccatggaagagagggggctggcaccgaagttcgacacaacattcgaatctgcaagaccaactcaaacccatatggccctcgtgcagctggaacgggtgggtttgctcaggtttctggtatcccagaatgtcgacggattgcacgttagaagtggatttccaagagataagcttgctgagcttcacggcaatatgttcgttgaggagtgtgctaaatgtaagactcagtacgtaagggacaccgtggtgggtacaatgggactgaaggccaccggaaggctctgcaccgtggcaaaggcccgtggacttagggcttgccggaacgccgacctgagtattacactcggaactagcttacagattcgaccatcagggaacctccctttggcaaccaagaggcgggggggtcgcttggtaatcgtaaacctccagcccactaagcacgacagacatgcggacctcaggatccatggctacgtggatgaagtgatgactcgcctgatgaagcacttgggtctggaaatcccagcatgggacggcccaagggtcctagaaagggctctccctcctctaccaaggccacctacacccaagctagaacctaaagaagagagccctacaagaataaatggaagcatcccggcaggacctaaacaggagccctgcgcacagcacaacggttctgagccagcctccccaaagcgcgaacggccaactagtccggctcctcaccggccccctaagcgggtaaaggctaaggcagttccatcatag

SEQ ID NO: 4044 - DNA, 1068 bp, synthetic construct
  misc_feature 1..1068: note = source = /note="Description of Artificial Sequence: Synthetic coding sequence"
  source 1..1068: mol_type = other DNA
atgagcgtgaactacgccgccggcctgagcccctacgccgacaaggggaaatgcggactgcccgaaattttcgacccgccagaagaattggagcggaaagtgtgggagctggcccgactcgtgtggcaatcctctagcgtggtattccataccggggctggcatcagcactgcatcagggatccccgactttaggggcccacacggagtgtggacaatggaagagcgtggtctggcccctaagtttgatacaactttcgagagcgccaggccgacacagacccatatggcactggtgcagttagagcgagtcggcctcctgcgtttcctcgtgagccagaatgtggacgggctgcacgtgcgcagcggtttccctcgtgacaagttggccgagctgcacggaaatatgttcgtcgaagagtgtgccaaatgtaagactcagtacgttcgggacactgtggtgggtacaatggggctgaaggcaacagggagactgtgcacagtcgcaaaggcaagagggctgcgagcatgccgcggagagcttagggatacaatcctcgattgggaagactctcttcccgacagagacctggcgcttgcagatgaagctagcagaaatgcagatcttagtatcaccctgggcactagcctgcaaatccggccgagcggcaatcttcccttggccaccaagcgacgcggcggccggcttgtaatcgtcaacctgcagcccactaagcacgaccggcacgctgatctgcggatccatggatatgtggacgaggtcatgactcggctgatgaaacacctcggtctggagattccggcctgggacgggcctcgcgtcttagagcgcgctttgcctcctctgccgcggccaccgactcccaagctggagccaaaggaggagagtcccactcggatcaacggatccatccccgctggacccaagcaggaaccttgcgcacagcacaatggcagcgagcccgcttcacccaagagagaacggcccacttctccggccccccaccgccctccgaaacgcgtaaaggccaaagctgttccttcctag

SEQ ID NO: 4045 - DNA, 852 bp, synthetic construct
  misc_feature 1..852: note = source = /note="Description of Artificial Sequence: Synthetic coding sequence"
  source 1..852: mol_type = other DNA
atggaggagcggggcctggcccccaagttcgacaccaccttcgagtctgccagaccaacacagactcacatggctctcgtccaactggagcgcgtgggacttcttcgattcctggtgagccaaaatgttgacgggctgcacgtgcggtcgggatttccgcgagataaacttgctgaacttcatggcaatatgtttgttgaggaatgcgctaagtgcaaaacccaatacgtgcgcgacactgtggtgggtacgatggggcttaaggccaccggcaggctttgcacggtggcaaaagcaaggggattgcgagcatgcagaggcgagcttagagataccattctggactgggaagattccttgccagatagagacctggctcttgcagacgaggctagccgcaacgctgatttatctatcactctcgggacctctctacagatacggccttccggcaacctccccctggcgacaaaacgccgggggggtagacttgtgattgtcaatctgcagcctaccaagcacgaccgacatgctgatctcaggatccacgggtacgtggatgaagtaatgacacgcttgatgaagcacctaggactggagatacctgcctgggatggacctcgggtgctcgaacgcgctctcccccctcttccgagaccacctactcctaagctagaaccaaaagaggaaagtcccactcgaatcaacggaagcatccctgccggtcctaagcaggagccatgtgcccagcacaacggatctgagccagcatcccctaagcgagaaagaccaaccagcccagccccacatagacctccaaaaagggtgaaggctaaggccgtgccttcttag

SEQ ID NO: 4046 - DNA, 1575 bp, synthetic construct
  misc_feature 1..1575: note = source = /note="Description of Artificial Sequence: Synthetic coding sequence"
  source 1..1575: mol_type = other DNA
atgaccgaggacaaggtgaccggcaccctggtgttcaccgtgatcacagctgtgttgggctctttccagttcggatacgatatcggggtgattaacgctccccagcaggtcatcattagtcattatcggcacgttcttggggtcccattggatgatcgcaaggccatcaacaattacgtcatcaactcaacagatgaactccctacaatcagttactccatgaatcccaaacccactccatgggccgaggaagagactgttgccgccgcgcagttgatcacaatgctttggagcctgagcgtttcaagtttcgccgttggtggtatgacagcttccttcttcggcggctggctcggggacactctgggtcgaattaaggcaatgctggtggccaatattcttagcctggtgggagccctgctgatgggatttagcaaattgggacccagtcacattctcatcatcgcaggtcggtccataagtggactgtactgtggcctgatcagtggtctggtccctatgtacatcggcgaaattgcccccaccgcgctgaggggagctctggggaccttccaccagctggccattgtcaccgggatcctcatttcccaaattattggattggagttcatcctcggcaactatgatctgtggcatattctgctgggcctgtcaggcgtccgcgctatcctgcagtcactgttacttttcttttgtcccgagagtccccgttacctttacataaagcttgatgaggaagttaaggccaagcagtcactcaagagactacgagggtacgatgacgtgactaaggacatcaacgagatgcgcaaggagcgcgaggaagcatcaagcgagcagaaagtaagtattatacagctcttcactaatagtagctacaggcaaccgatcctcgtcgcccttatgctccacgtggctcagcagttcagcggcattaatggcatattctattacagtacctccatcttccagaccgccggcatctccaagccagtctacgccacaatcggggtcggagccgtgaacatggtttttacagcggtgtctgtcttcctggtagagaaagcgggacgccgttcactgttcttgatcgggatgtccggtatgttcgtgtgcgcgatcttcatgagtgtaggcttggtgcttctcaataagtttagttggatgagctatgttagcatgatcgccatctttctgtttgtatcttttttcgagattggccctggaccaattccttggtttatggttgccgaattcttctcacaggggccgaggccagccgcactggctatcgctgcattctccaattggacctgcaattttattgtggccctatgcttccagtacattgccgatttctgcgggccgtatgtgttctttctcttcgcgggcgtccttctcgcatttacacttttcaccttctttaaggttcctgaaacaaaaggcaagtctttcgaagaaatcgcagccgagtttcagaaaaagagtgggagcgcccatagacccaaagcagctgtggaaatgaaattcctgggggcaacagaaactgtttag

SEQ ID NO: 4047 - DNA, 1218 bp, synthetic construct
  misc_feature 1..1218: note = source = /note="Description of Artificial Sequence: Synthetic coding sequence"
  source 1..1218: mol_type = other DNA
atgcacctgaaccggatcaaggccatgctggtggccaacatcctgagcttggtgggcgccctcctcatgggattttctaaactgggtccttcccatatccttataattgcgggtcggagcatctctggactctattgcggtctgatcagcggcctggtacccatgtacatcggcgaaatcgctcccacggcgctccggggggctttaggcaccttccatcagctggcaatagttacaggaatactcattagtcagataatcggtctcgaatttatccttggtaattatgacctttggcatatactcctgggactgtcgggtgttcgcgctatcctccagagcctgttgctgtttttctgccctgaatcaccccggtacctctacatcaaattggacgaggaagtgaaggcaaagcagagcctaaagaggctgcgcggatacgatgatgtgaccaaggatattaacgaaatgaggaaagaaagagaggaggctagcagtgagcagaaagtcagcatcattcagctgtttactaacagcagttatcgccagcctatcttagtggcactgatgctgcacgttgcacagcagttctccggcatcaatggaatattttattacagcacgtctattttccaaaccgcgggtatcagcaagcccgtttatgccacaattggagtaggcgctgttaatatggtgtttacagcagtgagcgtgttcctggtagaaaaggctggtagacggtcgctttttctgatcggcatgagtggcatgttcgtgtgcgctattttcatgtccgttggccttgtactacttaataagttcagttggatgtcttatgtttccatgatagccatcttcctattcgtcagcttcttcgagattgggccaggccccattccttggtttatggtggcggaatttttcagccaaggtccgagacccgctgctctggcgattgcagcattcagcaactggacttgtaactttatcgtggccttgtgctttcaatacatagctgatttctgcggaccctacgttttctttctgtttgctggagtgttactggcattcacgctcttcacctttttcaaagtgccagagacaaagggcaagagtttcgaggaaatagccgccgagttccagaaaaaaagcggatcagcccaccgcccaaaggcagccgtggaaatgaagtttctgggagcaaccgagaccgtgtag

SEQ ID NO: 4048 - DNA, 1290 bp, synthetic construct
  misc_feature 1..1290: note = source = /note="Description of Artificial Sequence: Synthetic coding sequence"
  source 1..1290: mol_type = other DNA
atggccgcccagggctacggctactaccggaccgtgatcttcagcgctatgttcggggggtatagcctttactatttcaacaggaagaccttctcttttgtcatgcccagcttggtggaggagatccccctggacaaagacgatctgggattcatcaccagcagccagagcgctgcctacgccatttctaagttcgtgtccggtgtgttgtccgatcaaatgagcgcaaggtggctgttcagcagcggtttgttgctggtgggcctggtgaacattttcttcgcatggtcctcaaccgttccagttttcgcagcactatggtttctgaacggcctcgcgcagggccttggctggccaccgtgcgggaaggtgctcagaaaatggttcgaaccctcacagttcgggacttggtgggctatccttagtacctccatgaacctggcaggaggtctggggcccattttggcgaccattctcgcccagtcctactcatggcggtctacacttgctctcagcggcgcactgtgtgtcgtggtctcgttcttatgcctgctgctgattcacaacgaaccagcagatgtaggccttcgaaacttggacccgatgcctagcgaggggaaaaaaggatcgttgaaggaagagagcaccctgcaggaactgctcctctccccctacttgtgggttttaagcacaggctatctggtggtgtttggagtaaagacttgctgcacagactgggggcagttttttttaattcaggaaaagggacagtctgccctcgtgggctcctcttatatgtccgcactcgaagtgggcgggctggtcggcagcatcgctgccggctacttgtctgacagagcaatggccaaggcgggcctgagcaattatggcaatccccggcacgggcttctactctttatgatggccggaatgaccgtctccatgtatcttttcagggtgaccgtgacttccgactcccctaaattatggatccttgttctaggagcagtgtttggtttctcttcctatggacctattgccctgtttggggtgattgctaacgagagtgcaccccccaacctatgtggcacatcccatgccattgtcggcctgatggcaaacgtgggcggatttctggccggcttgcctttcagtaccatcgctaaacattactcgtggtccacagcgttctgggtggctgaggtaatctgtgcagcatccactgccgccttcttcctgttaaggaatattaggaccaaaatgggccgtgtttccaaaaaggctgagtag

SEQ ID NO: 4049 - DNA, 1356 bp, synthetic construct
  misc_feature 1..1356: note = source = /note="Description of Artificial Sequence: Synthetic coding sequence"
  source 1..1356: mol_type = other DNA
atggccgcccagggctacggctactaccggaccgtgatcttcagcgccatgtttggcggctactctttgtattacttcaataggaaaaccttctcgtttgtgatgcccagtcttgtggaagagattcccctggacaaagacgatctggggtttatcacctcctcccagtccgccgcttacgccatttcaaagtttgtgtctggggtgttgtctgatcagatgtcagcgcggtggctcttctccagtggtctcctgcttgtgggcctggtgaatatcttctttgcctggtcctcaacggttccggtttttgccgccttgtggttcttgaatggactggcacagggcctcgggtggcccccgtgtggcaaggtactccgtaaatggtttgaacccagccagtttggcacctggtgggccatcctatcaacgtctatgaatttggctggtgggttgggacccattctggccacaattctggctcagtcatactcctggaggtcaacgctggctttgtctggagctttatgcgtcgtagtgtcatttctgtgtctgctcctaatccacaatgaaccggcagatgttggattacgcaatctcgacccaatgcccagcgagggcaagaagggttccctcaaagaggaatccacactgcaggagctgctgctctccccctatctgtgggtgctgagtacaggttacctggttgtctttggcgtgaaaacctgttgtacagattggggccagttcttcctgatccaggagaaaggtcagtccgccctggtcggaagcagctacatgtcagccctggaggtagggggcctcgtaggctctatagccgcgggatatttgtctgatcgagccatggcaaaggccggattgtctaattatgggaatccacgacacggcctcttgctgtttatgatggccggtatgactgtgagtatgtatctgttcagagttacagtcacatccgattcccccaaggacgtggcgttctggacattggcgttacatcccctagctgagttgaccggatttacggaacatgagttatggattctggtacttggagccgtatttggattttcctcctatgggccgatagccctttttggcgttatcgctaatgagtccgctccccctaatctctgcggaacatcacatgccattgtcggtctgatggcaaacgtcggaggcttcttagccgggctccccttctccaccatcgctaaacactacagctggtccactgcattttgggtggctgaagtgatttgtgctgcatctaccgcagccttcttcttgttaagaaatatcagaacaaagatggggcgcgtatctaagaaagccgagtag

SEQ ID NO: 4050 - DNA, 1716 bp, synthetic construct
  misc_feature 1..1716: note = source = /note="Description of Artificial Sequence: Synthetic coding sequence"
  source 1..1716: mol_type = other DNA
atgacccgggccggcgaccacaaccggcagcggggctgctgcggctccttggccgactaccttactagcgcaaagtttctgctctatcttggacatagcctgtctacctggggcgaccgcatgtggcacttcgcagtgagcgtttttctcgtagaactgtacggtaattccctgctcttaactgccgtgtatggtttggtcgtcgcgggctccgttcttgtgctcggagccatcataggggattgggtcgacaagaacgcacgcctgaaggtggcacaaacctccctcgtcgtgcagaacgtctccgttattttgtgtggtatcatactaatgatggtcttcctgcacaaacacgagttgctgacaatgtaccacggatgggtactcacttcgtgttacatacttataataacaattgcaaacatcgccaacttagcatccactgctacagccataacaatacagcgcgattggattgtcgtggtggccggggaagaccggagcaagctggcaaacatgaatgccaccattcgcaggatcgaccagctcactaatattttagcacccatggcagtcggacagattatgacattcggcagccctgtcatcggatgtggattcatctctggctggaaccttgtgagcatgtgcgttgagtatgtcctgctgtggaaagtgtaccagaaaacgccagccctggcagttaaggctggcttgaaagaggaagaaaccgagctgaagcagctgaacctccacaaagatacagagcctaagcctctggagggcacccatttgatgggagtgaaggactctaacatccatgagctagagcatgagcaagaaccaacttgtgcctcgcaaatggctgagccattccggacttttagagacggatgggtcagctattataatcagcctgtctttctagccggaatgggcctagcgttcctttacatgaccgtactggggttcgactgtatcaccacggggtacgcctatacccaggggctgagtggctctatactatcaattctgatgggggccagtgcgatcacgggtattatgggcaccgtggcctttacttggctgcgccggaaatgcgggctcgtccgcaccgggctcatctcaggactcgcccagctgtcctgcctgatcctgtgtgtgatttcagtgttcatgcccggtagccctttggatctgtccgtcagcccatttgaggatatacgatctagattcattcagggagagtccattactcctactaagattcctgaaatcaccacagagatatacatgagcaatggctcgaacagtgctaatatagtccctgagacgagccccgaaagtgtgcctatcattagcgtctctctgctctttgcaggagtaatcgccgctcggattggactgtggtcctttgacctcaccgtcacccagctgcttcaagagaacgtgatcgaatcagagagagggattataaacggggtccagaacagcatgaactacctcctggacctgctccacttcattatggtgatcttggctccaaatccagaagcctttgggttgctggttctgattagcgtatcttttgtggccatgggccatatcatgtactttaggtttgctcagaacacactgggtaacaagctgtttgcatgcgggcccgacgccaaggaggtacggaaggaaaaccaagccaatacgtccgttgtctag

SEQ ID NO: 4051 - DNA, 603 bp, synthetic construct
  misc_feature 1..603: note = source = /note="Description of Artificial Sequence: Synthetic coding sequence"
  source 1..603: mol_type = other DNA
atgacccgggccggcgaccacaaccggcagcggggctgctgcggcagcctggcggactatctaacgtctgccaagtttttactctatttaggacattctttatctacatggggagatcgcatgtggcattttgccgtgagtgtcttcctggtagagctctacggcaacagcttgctgttgactgcagtgtatggcctggtcgtcgccgggagtgtcttggtcttaggggcaattataggcgactgggtggacaagaacgctcggctcaaggtcgctcaaaccagcttggtcgttcagaatgtctccgtgatattgtgcggtataatcctcatgatggtgttcctgcacaaacacgaactgttgacgatgtaccacggctgggtattgacatcctgttatattcttatcatcaccatagctaatatagccaatcttgcgagcacagccactgcgattacaatccagcgcgactggatcgtggttgtggcaggcgaggacagatcgaagttagctaatatgaatgctaccattcggcgaatcgaccagctgactaatatcctggcacccatggccgtgggacaaatcatgactttcggaagctag

SEQ ID NO: 4052 - DNA, 78 bp, synthetic construct
  misc_feature 1..78: note = source = /note="Description of Artificial Sequence: Synthetic coding sequence"
  source 1..78: mol_type = other DNA
atgacccgggccggcgaccacaaccggcagcggggctgctgcggctccttagccgactacctgactagcgcaaagtag

SEQ ID NO: 4053 - DNA, 78 bp, synthetic construct
  misc_feature 1..78: note = source = /note="Description of Artificial Sequence: Synthetic coding sequence"
  source 1..78: mol_type = other DNA
atgacccgggccggcgaccacaaccggcagcggggctgctgcggcagcttggccgactacctgactagtgctaagtag

SEQ ID NO: 4054 - DNA, 168 bp, synthetic construct
  misc_feature 1..168: note = source = /note="Description of Artificial Sequence: Synthetic coding sequence"
  source 1..168: mol_type = other DNA
atgacccgggccggcgaccacaaccggcagcggggctgctgcggctccctcgcagactacctaacctctgccaagttcctgttgtacctcggccactctctttcaacttggggcgaccgtatgtggcatttcgcggtaagtgtttttttggtggagttatacgggtag

SEQ ID NO: 4055 - DNA, 300 bp, synthetic construct
  misc_feature 1..300: note = source = /note="Description of Artificial Sequence: Synthetic coding sequence"
  source 1..300: mol_type = other DNA
atgcgggccagcatccacaagaagctgcggaagagcagcggcatcgtcaccatcctatactctgcgttcgttctggtctcaacgagtgacatggcagaggagacagaagatgcatggccaagatgttacctgcaattccttgcactactgctgaccagcacgtctgcaagggcagccgccgctatcgcagcagccgaagagcccgccgggtcaccaagcgttatgaccagagccggtgaccacaacaggcagcgcggctgttgtggcagcctggcggactatcttaccagtgcaaaatag

SEQ ID NO: 4056 - DNA, 504 bp, synthetic construct
  misc_feature 1..504: note = source = /note="Description of Artificial Sequence: Synthetic coding sequence"
  source 1..504: mol_type = other DNA
atgggcgtgaaggacagcaacatccacgagctggagcacgagcaggagcctacctgcgctagccaaatggccgagcccttcaggacatttcgcgatggctgggttagctactacaaccaacctgtctttttggctggaatggggctggccttcctctacatgacagtcctggggtttgattgtatcaccaccggctacgcatacacacaaggactgagtggaagcatcttgagtatactgatgggggccagtgcaatcacaggcattatgggcaccgtggcgtttacttggctgcgccgtaaatgcgggctggtccggactggcctgatatccggcttggcccagctctcatgcctgatactgtgtgtaattagcgtgttcatgccaggaagccctctggacctatccgttagcccatttgaggatatccgctcacggttcattcagggggaatcaatcacccccacgaaaattccagagatcaccactgagattcatgtttag

SEQ ID NO: 4057 - DNA, 2496 bp, synthetic construct
  misc_feature 1..2496: note = source = /note="Description of Artificial Sequence: Synthetic coding sequence"
  source 1..2496: mol_type = other DNA
atggagcggccctggggcgccgccgacggcctgagccggtggccccacggcctgggcctgctcttactgctccagcttttgccgccaagcaccctctcacaggatcggttagatgccccacctccacctgctgccccgcttccaagatggagcgggccaattggtgtgagctggggccttagggccgctgccgcaggaggagcatttcctcggggcggcagatggcgaagatccgccccaggcgaagacgaagagtgtggacgagtgcgtgactttgtcgccaaactggccaacaatactcaccaacacgtattcgatgacctgaggggctctgtatcccttagttgggtgggagattccactggggtcattctcgtgctcactacgttccacgtgcctcttgtaattatgacatttggccagtcgaagctgtatagaagcgaggattatggcaagaacttcaaggatataacagatctcattaacaacactttcattaggaccgagtttgggatggccataggacccgaaaactccggcaaagtagtgcttacggcagaagtgtcaggcggaagccgcgggggcaggatattcagatcttcggactttgcgaagaacttcgtgcagacagacctgcctttccacccactgacacaaatgatgtactctccacaaaactccgattacctgttggcactatctactgagaacggcctctgggtctccaagaattttggcggcaagtgggaagaaatacacaaagccgtgtgcctagccaaatggggaagtgataacacaatctttttcacgacttacgcaaatgggtcttgtaaggcggatctaggcgcccttgagctgtggaggacaagcgacctgggcaagtcttttaaaactattggagtaaagatctactcatttgggctgggggggcgctttctgtttgcctccgtcatggcggacaaggacactacacggcgaattcacgtctctactgaccaaggggatacatggtcgatggcacagctgcctagcgttggacaggagcaattctattctatacttgctgccaatgacgatatggtgtttatgcacgttgatgaaccaggtgatactggctttggcaccatatttacctccgatgatcgtggcattgtatacagtaaaagcctggatagacacctgtacacaacgacaggaggggagaccgactttacaaacgtcacgtctctgaggggcgtttacatcacatctgttctttctgaggacaactccattcagacaatgatcacattcgatcagggtgggagatggactcatctacgaaaacccgagaattcagagtgtgacgctacggccaagaacaagaatgagtgctctctgcatatccatgcttcctactccattagccagaagttgaatgtgccaatggcccccctctctgagccaaatgcggtgggaatcgtgatagcccatggtagtgttggcgacgccatctcagtcatggtgcctgatgtgtacattagcgatgacggcggatattcatggaccaaaatgttagaaggtcctcactactatacgatcctcgattccgggggcattattgtcgccatagagcatagctctaggcccatcaatgttatcaaattctccacagacgaaggccagtgctggcagacatatacttttactagagatcccatctacttcaccgggcttgcgagtgagcccggcgcccgtagtatgaatatcagcatttgggggtttactgagtccttccttacaagccagtgggtctcatacacgatcgattttaaggacatattggagcgaaactgtgaagaaaaggattacacaatttggctggcgcactccacagatcctgaagactatgaggacggatgcatccttggttacaaagaacagtttctgaggctgcggaagtcttccgtgtgccagaatggccgggactacgtagttacgaagcagccatccatatgcctctgtagtttggaagattttctgtgcgacttcgggtattatagaccggaaaatgattccaagtgtgtcgagcaacctgaattgaaaggtcacgatctggaattctgcctgtacggtcgtgaagaacacctgaccaccaacggctatcgcaagatcccaggcgacaagtgtcagggcggcgttaatccggtgcgggaggtaaaagacttgaaaaagaaatgtactagtaattttcttagcccggagaaacagaactcaaagtcgaattctgtgcctattatacttgccattgtgggtcttatgctggtcaccgtcgtagctggggtcctcatcgtgaagaagtacgtgtgcggaggacgctttctggtccataggtattccgtgcttcagcaacatgccgaagccaacggagtagacggtgtggatgccctcgatactgcgtcacacacaaataagagcgggtatcacgatgacagcgatgaagacctgctggaatag

SEQ ID NO: 4058 - DNA, 2085 bp, synthetic construct
  misc_feature 1..2085: note = source = /note="Description of Artificial Sequence: Synthetic coding sequence"
  source 1..2085: mol_type = other DNA
atgaccttcggccagagcaagctgtaccggagcgaggactacggcaagaatttcaaagatatcactgacctcattaacaacacttttatcaggactgaattcggcatggcaattggccctgaaaatagcgggaaggttgtgctaacggccgaagtgtccggcggatctcgggggggcaggatcttccgcagctctgatttcgctaagaatttcgtacagacagatctgcctttccatccactcacccagatgatgtattctccacaaaacagcgattatctgctagcattgagtactgaaaacggcctttgggtaagcaaaaactttggggggaagtgggaagagattcacaaagctgtatgcctggctaaatggggatctgataataccatcttcttcaccacttacgccaacggcagttgtactgacctcggcgccctcgagctctggcgaacaagcgacctgggaaagagctttaaaactattggcgttaaaatctattccttcggtttaggcggccggttcctcttcgcctcagtcatggccgataaagacaccacacgccgaatccacgtctccacagatcagggggatacttggtccatggctcagctaccaagtgtcggccaggagcaattttacagtatcctggctgcaaatgacgacatggttttcatgcacgtggatgaaccgggggacacagggtttggcaccatctttacatccgacgaccgcggtatcgtctatagcaaaagcctggaccgccatctatatacgaccacaggtggcgaaacagactttaccaatgtcacctccttacggggagtctacattacaagtgtgctttcagaagataacagcatccagacaatgatcacctttgatcaaggcggtagatggacacacctgaggaaacctgagaacagcgagtgcgatgccacagccaagaacaagaatgagtgcagtctccatatacacgcaagctactccatttcccaaaagcttaatgtgccaatggccccactgtcggagcccaatgctgtgggaattgtgatcgcccatggatccgtgggcgacgccatctccgtgatggtgccagatgtgtacattagcgatgatggcggatactcctggacaaagatgctcgaagggccacactattacactatactggactcaggaggaatcattgtggccatcgaacattcaagtcggcccataaatgtcataaagtttagcactgatgaaggacaatgctggcagacctatacctttactcgggacccaatatacttcacaggcctcgcaagcgagcctggtgctagatccatgaatattagcatctggggctttactgaatcattcctgacgtcacagtgggtgtcatacactatcgattttaaggatattctggagcggaattgtgaggaaaaagattacactatctggctggcgcacagtaccgatcccgaagactatgaagacggttgtatcctgggatataaagaacagtttctccgtctgaggaaaagcagcgtctgtcagaacggtagggactacgtggtgacaaaacagccatcaatctgtctctgttctctggaggacttcctttgtgacttcgggtattataggcccgagaatgattccaagtgtgtcgaacaaccagagctcaaggggcatgacttagagttttgcctgtacggccgcgaagagcacctgacaacaaatggctatcgaaagattccaggcgataaatgccagggcggagttaatcccgtacgggaagtgaaggatctgaagaaaaagtgtacatcgaactttttgagccccgagaagcaaaatagcaagtccaactctgtccccatcattctcgcaatcgtggggctcatgctggttactgtcgtggccggcgttctgatcgtgaaaaagtatgtctgcgggggaagattcctggtgcacagatactcggtcctgcagcagcatgcagaggcaaacggcgtggacggtgtcgacgcgctggatactgcttcccataccaacaaaagcggctatcatgacgattctgacgaggacctgcttgagtag

SEQ ID NO: 4059 - DNA, 1446 bp, synthetic construct
  misc_feature 1..1446: note = source = /note="Description of Artificial Sequence: Synthetic coding sequence"
  source 1..1446: mol_type = other DNA
atgaaggtgctgagcgagggccagctgaagctgtgcgtggtgcagccggtccaccttacatcgtggttgctcatattctttatactaaagtcaataagctgtcttaaacccgccaggctccctatttaccagagaaaacctttcatcgctgcctggaatgcccccacagaccagtgcctaatcaagtacaatctgaggctcaacctgaagatgtttccagtcatcgggagcccactcgcaaaggcccgcggccaaaacgtgacaatattttatgttaatcggttaggttattacccatggtacaccagccagggcgtacctattaacggggggcttccgcagaatatctcattgcaggtgcatctcgagaaggccgaccaagatattaactactacatacccgccgaggacttctctggtctggcagtgattgactgggagtactggcggcctcagtgggcccgaaactggaactctaaggacgtgtatagacagaaatctagaaaacttattagtgatatggggaaaaatgtatcggctacggatatcgagtaccttgctaaggtgacttttgaagagagtgccaaggcttttatgaaagagaccattaagctcggtatcaagtctcgccccaaaggtctgtggggatactatctttatcctgattgtcacaactataacgtttatgcccccaactacagcggcagttgcccagaagatgaggtgcttcggaacaacgaactttcttggctctggaattcctctgccgctctttatccatccattggggtgtggaagagtctcggtgactctgagaatattcttcggttctccaagttcagagttcatgagtctatgcgcatcagtactatgacctcccatgactacgccctgccagtctttgtgtatacacgcctgggctacagagacgaaccactgttcttcctcagcaaacaagacctagtatctactattggagaatcagccgcgcttggcgctgctggtattgtgatttggggagacatgaatcttactgccagtaaggcgaattgtacgaaggtgaagcagttcgtgtcatccgacctcggtagctacatcgccaacgtcacaagagccgctgaagtgtgctctttgcacctttgcagaaataatggtaggtgcattcggaaaatgtggaacgctccttcatacctgcacctgaaccccgcgtcataccacatcgaagcatccgaggacggggaatttacagttaagggaaaggcctccgataccgatctcgccgtgatggccgatactttttcatgccactgttatcagggctatgaaggagccgattgtcgcgagattaagacagcagacgggtgctctggcgtgtctccttctcccggatccctgatgaccctatgcctgctactgctcgcaagttaccgctctatacagctgtag

SEQ ID NO: 4060 - DNA, 1536 bp, synthetic construct
  misc_feature 1..1536: note = source = /note="Description of Artificial Sequence: Synthetic coding sequence"
  source 1..1536: mol_type = other DNA
atgggcgtgctgaagttcaagcacatcttcttccggagcttcgtgaagtcatcaggggtgtcccagattgtgtttacgtttctgctcatcccctgttgcctcactctcaatttcagggccccaccagtgatccctaacgtaccctttctctgggcctggaacgcacccagtgaattttgtctggggaagtttgacgaaccactcgatatgtcgctgttcagttttatagggtccccaaggattaatgcaaccggccaaggtgtcacaatcttctatgttgatcgactcggctactacccctatatcgacagtatcacgggcgtcacggtgaacggcggcattccccagaagatttctttgcaggaccacctggacaaagctaagaaagatatcacattctacatgccggtggataatttgggtatggccgtgattgactgggaggaatggaggccaacatgggcacgtaattggaaacccaaggatgtctataaaaaccgctcaatcgaactggtccaacagcagaatgtgcagctcagccttacggaggccacagaaaaagccaagcaagagttcgaaaaggctgggaaagacttccttgtcgaaactatcaagctcgggaaactactgcgccccaaccacctttggggctactacctgtttccagactgttataatcaccattacaaaaagcccggttacaatggcagctgcttcaatgtcgaaatcaaaagaaacgatgatctgtcctggttatggaatgaatcaaccgccctgtatcctagtatttacttaaacacacagcagtctcccgtggccgccactttgtacgtccggaatagggtgcgtgaggcaattcgggtgagcaaaattccagacgcaaaaagcccactacccgtgttcgcctacacgcgcatagtcttcaccgatcaggttctgaaattccttagtcaggacgaacttgtatataccttcggagaaactgtagctctcggagcaagcggaatcgtgatatggggcacattgtcaatcatgagatcgatgaaaagttgcctgctcctcgacaattacatggaaacaatcctgaatccctatattataaacgttacgctcgccgccaagatgtgttctcaagttctgtgccaggagcaaggggtgtgtatccgcaagaattggaactccagtgactatttacatcttaacccagacaacttcgctatccagctcgaaaaaggggggaaattcactgtcagggggaagccgactctggaggatttagaacagttttccgagaaattctactgtagttgttattctaccctgagttgcaaagagaaggcagatgttaaagataccgatgctgtcgacgtgtgcatcgccgacggggtctgtattgatgcttttctgaagcctcctatggagacggaagagcctcaaatcttctacaacgcctccccctcgaccctgagcgcaacaatgttcatctggagactggaagtatgggatcaggggattagccggattggcttcttttag

SEQ ID NO: 4061 - DNA, 1530 bp, synthetic construct
  misc_feature 1..1530: note = source = /note="Description of Artificial Sequence: Synthetic coding sequence"
  source 1..1530: mol_type = other DNA
atgggcgtgctgaagttcaagcacatcttcttccggagcttcgtgaaatccagcggggtctcacaaattgtattcacattcctgctcattccctgctgcctcacccttaatttccgcgctccccctgtaatccctaacgtacccttcttgtgggcctggaacgctccttcagagttttgcctcgggaagttcgacgaaccgttagacatgtcacttttctcattcattgggtccccccggatcaacgcaactggtcagggtgtgaccatcttctacgtggatagactcggatattatccatatattgattcgatcaccggcgtaaccgtgaacgggggcataccccagaagatatccctgcaggaccatctcgacaaggctaagaaagacattaccttttacatgccagttgataatctgggaatggcagtcatcgactgggaggagtggcgccccacgtgggctaggaactggaaacctaaagatgtgtacaagaacaggagcatcgaactggtgcaacagcagaatgtccaactgtcactgaccgaagcaacagagaaagctaaacaggaatttgagaaggcagggaaagactttctggtggagacaataaagttaggcaagttgctcagaccgaatcatctttgggggtattacctgtttcccgattgctataaccaccactataaaaaacctggctataacgggagctgtttcaacgtggagataaaacgaaacgacgacctgtcctggttgtggaatgagtccactgccctctatccttcgatttacctcaatacacagcagtcccccgtcgcagcaacattatacgttcggaatagagtccgagaggccatccgcgtcagcaaaattcccgatgccaagagcccattgcccgtcttcgcctacactcgaattgtctttaccgatcaggtgctgaaatttctcagccaggatgaactcgtgtacacctttggggagactgttgcccttggcgccagtgggatagtgatttggggcaccctctctatcatgaggagtatgaagagttgtcttcttttagacaactatatggagacgatcttgaatccttacatcataaatgtgaccttagccgctaaaatgtgcagccaggttttgtgtcaggagcagggagtatgcattcgcaaaaattggaactccagtgactaccttcatctcaaccctgataactttgcaattcagctcgagaagggggggaagttcaccgtaagaggtaagcccacgctggaggatctggagcagttttctgagaagttttattgctcttgttattccacactgagctgcaaggaaaaagcggatgtgaaggacaccgatgctgtcgacgtgtgcatcgctgacggtgtatgtattgacgccttcctcaaacccccaatggaaacggaggagccacaaatcttctataatgcatcaccaagtaccttaagtgctacaatgtttatagtaagcatactgttcctgattatctcttccgtggcttctctgtag

SEQ ID NO: 4062 - DNA, 243 bp, synthetic construct
  misc_feature 1..243: note = source = /note="Description of Artificial Sequence: Synthetic coding sequence"
  source 1..243: mol_type = other DNA
atgggcgtgctgaagttcaagcacatcttcttccggagcttcgtgaagtcaagcggcgtgtcccagatcgtttttacattccttctcatcccttgttgtctgactttgaactttcgggccccacctgtaatcccaaatgtccctttcctgtgggcctggaacgcaccttcggagttttgtctcgggaagtttgacgagcccctggacatgagcctgttcagcttcatcggtagccctcggtag

SEQ ID NO: 4063 - DNA, 1530 bp, synthetic construct
  misc_feature 1..1530: note = source = /note="Description of Artificial Sequence: Synthetic coding sequence"
  source 1..1530: mol_type = other DNA
atgggcgtgctgaagttcaagcacatcttcttccggagcttcgtgaagtcttctggcgtgtcacagatcgtgttcacattcctcctgatcccttgctgcctgactctgaactttcgcgctcccccagtgatccctaacgtgcctttcctctgggcctggaatgccccttcggaattctgtctgggaaagtttgatgagccgttagatatgtctcttttctctttcattggatcacctaggataaacgcaactggccagggggtcactatcttttacgtggaccggctcggatactacccttatatagactctataacaggcgtaaccgtgaatgggggaatcccccagaagatcagtctgcaggaccacctggataaggcaaaaaaggacataaccttctatatgccggtggataatctgggaatggccgtaatcgactgggaggagtggagacccacatgggccagaaactggaaacctaaggatgtctacaagaatcggtcaatcgagctggtgcagcagcaaaatgtgcagctgtcactcactgaagcgaccgagaaagccaaacaggagtttgaaaaagccggaaaagacttcctggttgagaccattaaattaggcaagctgctgaggcccaatcatctttggggatattacctattccccgattgctacaaccatcactataagaaacccggctataatgggagctgttttaatgtagagatcaagcgaaacgatgacctgagctggctgtggaatgagtccacagctctgtacccaagcatatacctcaatacacaacagagccccgttgcagccaccttgtatgtgaggaatagggtgcgggaggcaattagggtctcaaaaatccccgacgccaaatctcccctcccagtgtttgcatatacgcggatagtgtttaccgaccaggttctcaagttcttgagccaggacgagctagtctacacattcggggagaccgtagctctcggcgcatcaggcattgttatttggggtacacttagcattatgagatcaatgaaaagctgtctgctgcttgataactatatggaaaccatccttaacccatatatcatcaacgtgacactggcggctaagatgtgcagtcaggtactgtgtcaagaacagggtgtctgcatccgcaagaattggaactcctctgattatctccatttaaatccggacaactttgctatacagctagaaaaaggtggcaagtttaccgttcgtggcaaacctaccctggaggatttagaacagttctcggaaaagttctactgctcatgttacagcactctctcttgtaaggaaaaagcagatgtgaaggacactgatgcagtggatgtctgcatcgcggatggcgtgtgcattgatgcatttctcaaaccccccatggagacagaggagccccagatcttctataatgcctcaccatctactctatccgctaccatgttcattgtatctatactgtttctcatcataagtagtgttgccagcctttag

SEQ ID NO: 4064 - DNA, 1530 bp, synthetic construct
  misc_feature 1..1530: note = source = /note="Description of Artificial Sequence: Synthetic coding sequence"
  source 1..1530: mol_type = other DNA
atgggcgtgctgaagttcaagcacatcttcttccggagcttcgtgaaatcttctggagtgagccaaatcgtgttcacttttttgctgataccctgttgcctgaccctgaatttcagggcccctcctgtgattccaaacgttccttttttatgggcatggaatgccccgtccgagttttgcctgggcaagttcgatgaaccactggacatgtcgctcttcagtttcataggcagcccccggattaacgccacgggccaaggcgtgacaatattctacgtggacaggcttgggtactacccctacattgactccattaccggcgtgaccgtgaatggcggtatcccacagaagatcagtctgcaggaccatttagacaaggccaaaaaagatattaccttctatatgccagtggataatcttggcatggcagtgatcgattgggaggagtggcgccccacctgggcaagaaactggaagcccaaggacgtttacaagaatcgctcaattgagcttgtgcagcagcaaaatgttcaattatccttgactgaagctactgagaaggctaagcaggaatttgagaaggcagggaaggattttctggtggagactatcaagctggggaagctcttgcgcccaaatcacctgtgggggtattacctttttcctgattgctataaccaccattataagaagcccgggtataatgggtcatgcttcaacgtggagataaaaaggaatgacgacctcagctggctgtggaacgagtctacggcactgtacccctccatctatctcaacactcaacagtcgcccgtcgcagctaccctatatgtgcgaaacagagtgcgggaagcaattcgggtgagcaaaatcccagatgccaaatcacctctgccggtgttcgcatatactcgtatcgtgtttaccgatcaggtcctcaaatttctgagtcaagacgaacttgtgtacaccttcggagagacagtggcactgggcgcatctggaattgtgatctggggcaccctgtcaattatgcgttccatgaagtcctgcctgctcctggacaattacatggaaacaatactcaatccttacataatcaacgtcaccctcgctgcaaaaatgtgtagtcaggtactgtgtcaagaacaaggagtctgcatccggaagaattggaacagctccgactaccttcatcttaaccccgacaattttgctattcagctagaaaaagggggcaagtttaccgtacgcggaaaacccaccctggaagacttggagcagttctctgaaaagttttactgtagttgctactcaacactctcctgtaaagaaaaggccgacgtgaaggataccgacgccgtggatgtgtgcattgctgacggagtgtgtatcgatgccttcctcaagccacccatggaaacggaggagcctcaaatcttttataacgcaagtccttcgacactgagtgccacaatgtttatcgtgtctattctttttttgatcatcagcagcgtggcttcattatag

SEQ ID NO: 4065 - DNA, 1764 bp, synthetic construct
  misc_feature 1..1764: note = source = /note="Description of Artificial Sequence: Synthetic coding sequence"
  source 1..1764: mol_type = other DNA
atgccccggtacggcgccagcctgcggcagagctgcccccggagcggacgcgagcagggacaagatggcactgctggtgcccccggactattgtggatgggcctcgttttggcccttgcacttgccctggcattagctctggccctgtccgattctcgggtactttgggctccagctgaggcgcatcctctgagtccccaaggccaccccgcacggctgcacaggattgtacctaggctgcgggacgtgtttggctgggggaacctaacttgtccaatctgtaaaggacttttcacagcaatcaatcttggccttaagaaagagcccaacgtggccagagtcggttcagtggctataaaactgtgcaacctgctgaaaatcgctccgccagccgtgtgtcagagcatcgtccacttgtttgaggacgacatggtcgaggtgtggcggcgctctgtgctgtccccaagtgaggcgtgcggactcttgctggggtccacttgtggtcactgggacatcttttcttcatggaacattagtttgccgactgtgcctaagccaccacccaaacctcctagcccgcccgcacccggagcacctgtcagcagaatcctgttcctaactgacctccattgggaccatgactacctggaagggaccgatcccgattgtgctgatccactctgttgtaggagggggtccggacttccccctgcgtccaggcctggagctggctactggggcgagtatagcaagtgtgatctaccactcagaactctagagagccttttaagtgggttaggccctgccggcccatttgatatggtgtactggactggcgacattcctgctcatgacgtctggcaccagacacgccaggatcagctgagggctctaactactgttacggcccttgtgcggaagtttctgggccctgtccctgtgtatccggccgtcggtaatcatgaatccacgccagtcaatagttttccacccccctttattgagggcaatcattcgtcaagatggttgtatgaagcgatggctaaggcctgggaaccttggctaccggccgaggccctgaggactctgcgctacctcagctctgtggagacacaggaagggaaacgaaaggtccacattatcgggcacatcccccctggacattgtctaaagagctggagctggaattactatcgtattgtggcccggtatgagaatactctggctgcccaatttttcggccacacacacgtggatgagtttgaggtcttctacgacgaagagactctctcgagacccttggcggttgccttcctggctcccagcgctacaacatacattggtctgaaccccggctatagagtctatcaaatagacggaaattactctggctcctcccacgtggtgctggaccacgaaacatatattctgaacctcacccaggctaacattcccggcgcaatcccccattggcagctgctgtatagggcccgggaaacttacggtctccctaacaccctgccaaccgcatggcataatctggtctatagaatgcgcggggatatgcaattgtttcagacattctggtttctataccataagggccatccaccatcagaaccctgcgggactccctgcagattggctactctgtgcgcgcagctctcggcgcgcgccgattcaccggccctttgcagacatttgatgccagacggatccctgccagaggcccaaagcctgtggccgcggccactcttttgctag

SEQ ID NO: 4066 - DNA, 1896 bp, synthetic construct
  misc_feature 1..1896: note = source = /note="Description of Artificial Sequence: Synthetic coding sequence"
  source 1..1896: mol_type = other DNA
atgccccggtacggcgccagcctgcggcagagctgcccccggagcggccgggaacaggggcaagacggcacagctggcgcaccaggcttgctttggatgggcttagtgctagctctcgccctggccctcgcacttgcgctggctctctccgactctagagtcctctgggcccctgcagaagcacaccctttgtctcctcaggggcaccctgctaggctgcatcgcattgtccccagactaagggatgtattcgggtggggtaacctgacctgtcctatctgcaaaggactctttactgcgatcaatctaggattaaagaaggagcctaacgtggctcgcgtgggaagcgtcgccataaaattatgcaaccttctgaaaatagctccccccgctgtgtgtcagtccatagtgcatctcttcgaggacgatatggtggaagtttggcgacgatcagttctaagtccatcagaggcatgtggcctgctgcttgggagtacatgtgggcattgggacatattttcctcatggaatatttctctgcctaccgtcccaaaacccccaccaaaacccccctctccacctgctcccggggcccccgtgtcaagaattctatttctcaccgacctgcattgggaccacgactatcttgagggcactgaccctgattgcgcagaccccctttgctgccggcgcggtagtggattgccacccgccagccgtccgggagctggctattggggggagtacagtaagtgcgacctccctcttaggaccttggaatccctcctatcagggctcggcccggcggggccattcgatatggtgtactggaccggcgacataccagctcatgacgtgtggcaccagacccggcaagatcaactgcgggctttgacaactgttacagctctggtgaggaagttcctgggtcccgtaccagtctacccagctgtgggcaatcacgagagtacgcccgtgaacagtttccccccgccctttattgagggcaatcatagttctagatggctgtatgaggccatggccaaggcttgggagccttggctccccgccgaagccctgcgtactctgaggataggcgggttctatgctcttagcccatacccaggcctgcgcctcatctcattaaatatgaatttctgctcacgagaaaatttctggttgctgattaactctacagatcccgccggacaactgcagtggctggtcggtgagctccaggctgcagaagaccgcggcgataaggtccatatcattggacacattcctcccggccattgcttgaagagctggtcctggaactattaccgaatcgtcgctcgctatgagaacactctggctgcccagttttttggccacactcatgtggatgaatttgaggtgttttatgacgaggaaactctgtctagacctcttgctgtggccttcctggctccatcagcgaccacctacatcggattaaaccctggctatagagtctaccagatagatggtaactactcgggatcaagccatgtggtattggaccatgaaacctacatcctgaacctgacacaggccaatatccccggcgctatcccccactggcaactgctgtacagggcacgagagacctacggcctgccgaatacgctgcctacagcctggcataatttagtatataggatgcgaggagatatgcagctttttcaaactttctggtttctttatcacaagggtcacccgccatccgaaccctgcggcaccccttgtcgactcgctactctctgcgcccagctgtcagcgcgggcggatagccctgcactttgtagacacttgatgcccgacggatctctacccgaggcccagtctctgtggcctaggcccctgttttgctag

SEQ ID NO: 4067 - DNA, 1728 bp, synthetic construct
  misc_feature 1..1728: note = source = /note="Description of Artificial Sequence: Synthetic coding sequence"
  source 1..1728: mol_type = other DNA
atgccccggtacggcgccagcctgcggcagagctgcccccggagcggaagagaacaggggcaggatggcaccgcaggggcccccggactgttgtggatgggactggttctggcattagccctcgcactagctctggccttggcgctttctgatagtagagtgctctgggcgcccgccgaagcccacccactgtccccccagggtcatcccgctaggttgcataggatcgtgccacggctgcgcgacgtatttggatggggcaacctgacatgtccgatctgtaagggcctgtttaccgccattaacttgggtttgaagaaagagcccaacgtggctcgcgttgggagtgtggcaattaagctgtgtaacctccttaagatcgcccctcctgccgtgtgtcagagtatagtccacctgtttgaggatgacatggtggaagtgtggagaaggtccgttctgtccccctcagaagcttgtgggctgctcctggggagtacatgcggccactgggatatcttctcgtcttggaacatcagtctgcctacagtacccaaaccaccccccaagccaccctctccacccgcacccggagcccccgtttctagaattttgttcttgactgaccttcattgggaccacgactaccttgaggggactgacccggactgtgccgaccctctgtgctgcagacgcggctcgggccttccgccggcctcacggccaggagccgggtactggggagaatactctaaatgcgacttgccattgcgcactctggaaagcctactgtctgggctgggaccagcaggcccattcgatatggtttactggactggcgacattcccgcccacgacgtgtggcatcagactagacaggaccagcttcgcgccttaacgactgtcacagctctagttagaaaattcctcgggcctgtgccagtttaccccgctgtcgggaatcatgagagtactccggtcaattccttcccccctccctttatagaagggaatcactcttcaagatggttatatgaagccatggctaaagcctgggaaccctggttgccggcagaggccctgcgtaccttgcggaaggtgcatatcattggccacattccccccggacattgcctgaagtcctggtcgtggaattactatcgcatcgtggctcgatacgaaaacacattggcagcccagttctttggccacactcacgtggatgagttcgaagtgttttatgatgaagaaactctgagcagaccgcttgcggttgcatttctggctcctagcgcaaccacatatatcggactgaacccaggctatagagtgtatcagatcgatggcaactattccggaagcagccacgtagtgctcgaccatgagacctacattctgaatcttacacaggccaatataccaggtgctattccacactggcagctcttgtaccgcgctcgcgaaacctatggcctgcccaacactctgccgactgcttggcacaatctggtttataggatgcgcggcgatatgcagttgttccagacattttggtttctataccataagggccacccaccttctgagccctgcggcaccccctgtcggctggccacactatgtgcacagttatctgccagagcggacagcccagcgctttgcaggcacttgatgcctgacggctccctgcctgaagcacagtcgctgtggcccagaccattgttttgctag

SEQ ID NO: 4068 - DNA, 1893 bp, synthetic construct
  misc_feature 1..1893: note = source = /note="Description of Artificial Sequence: Synthetic coding sequence"
  source 1..1893: mol_type = other DNA
atgccccggtacggcgccagcctgcggcagagctgcccccggagcggacgtgagcaaggccaagacggcacggccggggccccaggtctgctctggatggggttggttttggccctggcactggcacttgccctcgcgctcgccctctctgatagccgcgtgctctgggctcccgcagaagcccatcctctcagtccgcagggacatccagcccggctccacagaattgtgcccaggctaagggatgtgtttggctggggcaacctaacgtgtccgatctgcaagggtctgttcactgctataaacctgggcttaaaggagcctaacgtcgcccgcgtaggatccgtagccataaagctttgtaatctgctgaagattgcccccccggctgtatgtcagagcattgttcaccttttcgaggacgacatggtggaagtctggcgcaggagtgtgctgagtccttctgaggcctgcgggctgctgctgggtagtacctgtggacattgggatatcttctcttcctggaacatctccctgccaacagttccaaaacctccacctaagccacccagcccacccgcccctggtgcacctgtcagtaggattttgtttcttaccgacctgcactgggaccacgattacctcgaagggactgatccggactgcgctgacccattatgctgcagaaggggcagcgggttgccacccgcgagcaggcctggcgccggctactggggcgaatatagtaagtgcgatctgcccctgcgcaccttagaatctctactgagcggactgggcccagcgggaccattcgatatggtgtattggacgggtgatatcccagctcatgatgtgtggcaccaaactaggcaggatcaactgcgagctctgacaaccgtgacggccctggtcagaaagtttctgggcccagtgcccgtttatcccgcagttggcaaccatgagtctacgcccgttaacagttttcccccaccctttattgagggcaaccactctagtcgttggttgtacgaagccatggccaaagcctgggaaccgtggctgcccgccgaggccctccgcaccctaagaattggtggcttttacgcgttaagcccctatcccggactcaggttgatctccctgaacatgaacttctgctctcgggagaacttctggctcttgatcaattctacggatccagcagggcaactgcagtggctcgtcggcgaactacaggctgcggaggatagaggcgataaggttcatatcataggccacattccgcctggccattgcctgaagtcatggtcttggaattactatcgaattgtggctcggtatgagaataccctcgccgctcagttcttcggacacactcatgtagacgagtttgaggtattttatgacgaagagactttgagccgtcctctcgccgtcgcttttctggcgccctccgccaccacctatatcggcctgaatcctggatatagagtctatcagatagacggtaactactcaggcagctctcacgtggtgctggatcacgaaacctacatactgaatttgacccaggccaacattcctggagcaatcccccactggcagctgctatatagagctagagagacatatggactgccaaacaccctccccactgcatggcataaccttgtgtatcggatgcggggcgacatgcaactgtttcagaccttctggtttctgtaccataaaggacatcccccatccgagccatgtggaactccttgtcgactggcaacgctttgtgctcagctgtcggcccgagcagatagcccagcattgtgtcgtcacctaatgcctgatggtagtttgcctgaagcccagagtctgtggcctcggcctctgttttgttag

SEQ ID NO: 4069 - DNA, 1101 bp, synthetic construct
  misc_feature 1..1101: note = source = /note="Description of Artificial Sequence: Synthetic coding sequence"
  source 1..1101: mol_type = other DNA
atgccccggtacggcgccagcctgcggcagagctgcccccggagcggacgggagcagggccaggatggtaccgccggcgcccctggcttactgtggatgggcctagtcctggcgctagccctggctctggccctagcactcgccctatccgatagcagagtgctgtgggccccggccgaggcccacccgctgtctccacagggccatcccgcacgactccaccgtatcgtgccccggctacgggatgtgttcggctggggaaatctcacttgccctatctgtaaaggtctgttcactgccatcaacctgggcttgaagaaggagccgaatgtggccagagtcggatcagtggctattaaattgtgtaaccttctaaaaatcgccccacctgctgtgtgtcagtcaattgtgcatttgtttgaggacgatatggtagaggtgtggaggaggagcgtgctttccccatctgaggcctgcggtttgctcctgggctccacctgtggacattgggacatttttagctcctggaacataagtctgccaacagtcccaaaaccaccccctaaacccccttccccccctgccccgggagcccccgtctcaagaatcctgtttctgaccgacctccattgggatcatgactatctggaaggtactgaccctgactgtgccgaccccctttgctgcagacgtggaagtggcttgcctcctgcttcccgacctggtgcaggctattggggcgaatacagcaaatgcgatctgccccttaggactttggagagccttctgagcggcctcggcccggctggccccttcgatatggtatattggacaggggacatccccgctcacgatgtttggcaccagacacgacaggatcaactgcgcgctctgaccacagtgaccgcattagtccggaaattcctgggccctgtgccggtgtatcctgccgtcgggaatcatgaatccacccctgtgaacagtttcccccctcccttcattgaaggcaatcacagtagccgctggttgtacgaagccatggccaaagcatgggagccttggttgcccgcggaggcgcttcgaaccttgagatgtatttag

SEQ ID NO: 4070 - DNA, 1209 bp, synthetic construct
  misc_feature 1..1209: note = source = /note="Description of Artificial Sequence: Synthetic coding sequence"
  source 1..1209: mol_type = other DNA
atgccccggtacggcgccagcctgcggcagagctgcccccggagcgggagggagcagggacaagatggtacagccggtgcccccggtctgctgtggatgggcttggtccttgcgctggcactggccctggcgttggccttggccctgtccgacagtcgagtcctgtgggctccagccgaggcgcacccactatcgccccagggtcatccagctaggctgcacagaattgtcccacggctgcgggacgtgtttggatggggcaacttgacctgtcccatatgtaaagggctgtttaccgcaatcaacctgggcctgaagaaagagcccaacgttgcaagggttggaagcgtggcaataaaattgtgcaacctcctgaaaatcgctcccccagctgtgtgccagtcaatcgtgcatttatttgaggacgacatggtggaagtatggagacgctcagtgttaagcccctctgaagcatgcggactgctacttggaagcacttgcggccattgggacatcttctcttcttggaacatttctctgcccacagtgcccaagcctccaccaaaaccaccctccccccctgcacctggtgcgccagtgtcccggattcttttccttaccgatcttcactgggatcacgattatctggaaggtaccgatcccgattgtgcagatcctctatgttgccggcgcggtagcggattaccaccggcaagtcgaccaggcgccggctactggggtgagtactccaagtgcgacctgcctctcagaacccttgagtccttgctttccgggctcggtcctgctggaccgtttgacatggtctattggaccggcgacattcccgctcacgatgtgtggcaccaaacgaggcaggatcagcttcgtgcacttaccaccgtaacggccctcgtgcgcaagtttctggggcccgtacctgtttacccagccgtagggaatcacgaatccacaccagtgaattcattcccccctccgttcatagaaggcaaccattctagtaggtggctatacgaggctatggcgaaagcctgggaaccatggcttcctgctgaagccctgcgaaccctccggtacctcagttcggtcgagacacaggaaggcaagagaaaaaactggggcgtgctgtgcagctttcccattccccggtctcctcctcacctctcgcagtatgaatttcttttcccatag

SEQ ID NO: 4071 - DNA, 954 bp, synthetic construct
  misc_feature 1..954: note = source = /note="Description of Artificial Sequence: Synthetic coding sequence"
  source 1..954: mol_type = other DNA
atgtacaacatgatggagaccgagctgaagccccccggcccccagcaaacgtctggcggtggaggcggcaactccacggccgcagccgctggtgggaaccagaagaattcccccgacagagtgaagagaccgatgaatgccttcatggtttggagccggggacagaggcggaaaatggcccaggagaatcctaaaatgcacaattcagagatttctaagcgtcttggcgcagagtggaagctgctctccgagacggagaaacgtccattcattgacgaagccaagcgcctgcgcgcacttcatatgaaagaacaccccgactacaaatacaggccgagaagaaagactaagacattaatgaaaaaggacaaatatacactgccgggtgggctacttgccccgggggggaactcaatggcctcaggagttggtgttggggcaggcttgggggcgggagtaaaccagcggatggacagttacgcccacatgaacggttggagcaatggatcatattcaatgatgcaggatcagctgggatatccacagcaccctggcctgaatgcacacggagctgctcagatgcagccgatgcatcggtacgacgtctcggcactgcagtataacagtatgacttcttcacagacctacatgaacggatcacccacttactccatgagttactcccaacaaggtacccctgggatggctctgggttccatgggatccgttgtcaagagcgaggcaagctcctcacctcctgtggtcacttcttcatcacattcacgcgctccatgccaagccggggatctgcgggatatgatttctatgtatctgccgggggcggaagtgcccgaacccgctgcaccatcacgcctccacatgagtcagcattatcaatctggacctgtgcctggcacagctataaacggaacattgcctctatcgcatatgtag

SEQ ID NO: 4072 - DNA, 954 bp, synthetic construct
  misc_feature 1..954: note = source = /note="Description of Artificial Sequence: Synthetic coding sequence"
  source 1..954: mol_type = other DNA
atgtacaacatgatggagaccgagctgaagccccccggcccccagcaaacttccggaggcgggggcggcaactcaacagccgctgctgccggcggcaatcagaaaaattcgcccgacagagttaaaagaccaatgaacgcgttcatggtgtggagcagaggtcagagacgcaaaatggcacaggaaaatccaaaaatgcataacagcgagattagtaaaagactcggcgctgagtggaagctgctgtctgaaactgagaagaggcccttcatagatgaggccaaaagactcagagcccttcatatgaaagagcaccccgattataagtaccggccaagacgaaagacaaaaactctaatgaaaaaagataagtataccctgcctggggggttgctggccccaggcggcaatagcatggcctctggcgtgggcgtcggcgccggcttgggggccggcgttaaccagcgaatggattcatatgctcacatgaacggttggtctaacggaagttactcaatgatgcaggatcagcttgggtatcctcagcaccccggcctgaatgcgcatggggctgctcagatgcagccaatgcatcgctacgacgtgtcggctctacagtataactcaatgacatcttcgcaaacatacatgaatggcagccccacctactccatgagttactcacagcagggtaccccgggtatggccctgggctccatggggtccgtggtgaagtcagaagccagctccagccctccagtcgtgacaagctcaagccactcccgcgccccctgccaggccggagacctcagagatatgatttccatgtatctgcctggtgccgaggttccagaacccgccgcaccttccaggctccacatgtctcaacattatcaaagtggacctgtgccaggcacagctatcaatggcacgttgccactctcccacatgtag

SEQ ID NO: 4073 - DNA, 1182 bp, synthetic construct
  misc_feature 1..1182: note = source = /note="Description of Artificial Sequence: Synthetic coding sequence"
  source 1..1182: mol_type = other DNA
atgcaccaggccggctaccccggctgccggggcgccatggccgagtctcacttactgcagtggcttctcttactccttccaactctgtgcggtccagggacagctgcttggaccacatcatcgctggcctgcgcgcaaggaccagagttctggtgccagagtctggagcaagcactgcagtgccgcgcacttggtcattgcctgcaggaagtgtggggacacgttggcgctgacgatttgtgccaggagtgcgaagacatagtccatattctgaataagatggcaaaggaagctatttttcaggacacaatgaggaagtttctggaacaggagtgcaacgtgctcccattaaaattgcttatgccccagtgcaatcaagtgctggacgattactttccgttggtgatagattacttccagaatcagaccgattcaaacgggatctgcatgcatctcggtttgtgcaaatctcgccaacccgagcccgagcaggagcctgggatgagcgatccgcttcctaagccacttcgtgatcctcttcctgacccgttacttgacaagctggtgcttcctgtcctgcctggcgccttacaggctcgacctggcccacacacccaagatttatctgagcagcagttcccaatacccttgccatactgctggctttgtcgggccctgattaaacgcatccaggctatgatccccaagggcgcattggcagtggcagtggctcaggtatgccgggtggtaccattagtcgcaggtggcatatgtcagtgtctcgcagaacgctacagcgtaatcctgctggacaccctgcttggcaggatgctgcctcagctggtgtgcagactggtgctccggtgttctatggacgactctgctgggcctaggagtcctaccggcgagtggctcccacgcgacagcgagtgtcacctttgcatgagcgttaccacccaggcagggaattctagtgaacaggcaatccctcaggctatgctacaagcatgcgttggcagctggttggatcgggagaagtgcaaacagttcgtggagcagcataccccccagctgctgaccctggtcccgcggggttgggatgcccacaccacatgccaggccctcggagtctgtgggactatgagttcacctctgcagtgtattcactctccagacttgtag

SEQ ID NO: 4074 - DNA, 1182 bp, synthetic construct
  misc_feature 1..1182: note = source = /note="Description of Artificial Sequence: Synthetic coding sequence"
  source 1..1182: mol_type = other DNA
atgcaccaggccggctaccccggctgccggggcgccatggccgagagccatctccttcaatggttacttcttctccttcccacactgtgtggaccaggcacagccgcttggaccacatctagcctggcttgcgcgcaggggcctgagttctggtgtcagagcctcgaacaagctttgcagtgccgagccctgggccattgcttacaagaggtatggggtcacgtcggagccgacgacttgtgtcaggagtgcgaggatattgttcacattctcaataagatggctaaggaggcaatattccaggatactatgcgaaagttcctggagcaggagtgcaatgtgctcccactcaagctgttgatgcctcagtgtaaccaggtgctggatgactatttcccgctggtgatcgattacttccagaaccagacagatagcaatggaatttgtatgcatctaggcctgtgtaaatccagacaaccagaacctgagcaagagcctgggatgtcggacccattaccgaagccacttcgagacccgttgcccgatcctcttctggataagcttgtcctgcccgttctgcctggcgctctccaggccaggcccggcccgcatacccaggatctttccgagcagcaattccccatcccccttccctattgctggctgtgcagagcccttattaaaagaatacaagctatgattcccaaaggagcattagctgtggctgtcgctcaggtgtgccgggtggtacctctggttgccgggggcatctgtcagtgcctggccgaaaggtattccgtgattctgctggacacactgctgggacgcatgctgccccagctcgtatgccggctcgtgctgaggtgtagtatggatgatagcgccggtcctcgttccccgactggcgaatggcttcccagagatagtgagtgtcatctctgtatgtcagtgaccacccaggcgggtaattcgagcgaacaagccatacctcaagcgatgctgcaagcatgcgttggaagctggctcgaccgcgaaaaatgcaagcagttcgtcgaacagcatactcctcaactgttgactctcgtccccagaggctgggacgcacatacaacatgccaggctctgggcgtgtgtggaacaatgagtagccctctacagtgtatccattctccagatctttag

SEQ ID NO: 4075 - DNA, 1050 bp, synthetic construct
  misc_feature 1..1050: note = source = /note="Description of Artificial Sequence: Synthetic coding sequence"
  source 1..1050: mol_type = other DNA
atggccgagagccacctgctgcagtggctgctgctgctgctgcccacactgtgcggacctggcaccgctgcttggaccacgtcctccctcgcgtgcgcccagggtcctgaattttggtgtcagtcactggaacaggccctgcagtgccgggcccttggccattgcctgcaggataccatgcgcaaatttctggagcaagaatgcaatgtgctgcctctgaagctgcttatgcctcagtgcaaccaggtgcttgacgattacttccccctggtcattgactacttccagaatcaaacagactctaacggcatatgtatgcacctaggcctttgcaaatccaggcagcctgagccagaacaggagccagggatgtccgatccactgcccaagccactcagagaccccttgcctgaccccctgctggacaaactggtgctcccggtgttgcctggcgctcttcaggctcgcccggggccccacactcaagatctaagtgagcagcagtttcccatcccgttaccctactgttggttgtgtagggccttaatcaagaggatccaggccatgatccctaagggcgccctcgccgtcgcagtggcccaagtgtgtcgcgttgtgcccctcgtcgccggcggtatctgccaatgcctggctgaacgttattctgtgatcttgctggataccctgctcggacggatgctgccacagctggtctgtcggctggttctcaggtgcagcatggacgattcggcgggccctcgttcacctacaggagaatggttgcctagagacagcgaatgtcacctgtgtatgtctgttactacccaggctggaaattccagcgagcaggcaatcccccaggccatgttgcaggcatgtgtcggttcatggctcgaccgcgagaaatgtaagcagtttgtggagcagcatacccctcagctgctgactcttgtgccccgagggtgggatgctcacactacgtgccaggccctgggtgtgtgtggtaccatgtcatcccccctgcagtgcattcatagccctgacctctag

SEQ ID NO: 4076 - DNA, 1152 bp, synthetic construct
  misc_feature 1..1152: note = source = /note="Description of Artificial Sequence: Synthetic coding sequence"
  source 1..1152: mol_type = other DNA
ggcgccatggccgagagccacctgctgcagtggctgctgctgctgctgcctacactgtgtggccctggcactgccgcctggacgaccagctcattggcatgtgcccagggacccgagttttggtgtcagagtcttgaacaggctttacagtgtagagcgctgggacattgtctacaggaggtgtggggccacgtgggggccgatgatctttgccaggagtgtgaggatattgtccatattcttaacaagatggccaaggaggccatcttccaagacactatgagaaagttcctggaacaggagtgcaacgtcttacctctcaaactactcatgcctcaatgtaaccaggtgctcgacgactactttccattagtgatcgactacttccagaaccagactgattctaatggaatctgcatgcacctgggcctgtgcaagagcaggcagcccgagcctgagcaggagcctggcatgagtgaccctctgccaaagccgctgagggatcccctgcctgatcctctcctggacaaactcgtactgcctgttctgcccggggcacttcaggctcgtccaggacctcacacacaggacctgtctgaacagcagtttcctatcccattgccctattgttggctctgtagagcactcatcaaaaggattcaggcgatgataccaaaaggggccctggccgtcgctgtagctcaggtttgtcgggtggtcccactcgtcgcagggggtatctgccagtgcctggctgagcgctattcggtcattcttcttgacaccctgctggggcgcatgcttcctcagctggtctgtaggctcgtcctccggtgctcgatggatgactccgctggcccccggagcccaactggggagtggttacctcgtgactccgagtgccacctgtgtatgagtgtgacaactcaagcgggtaactcatccgaacaggctatcccacaggcaatgctccaagcgtgcgtgggctcttggctggatcgcgagaagtgcaagcaattcgtcgaacagcatacgcctcagctgctcacactcgtcccacggggctgggacgcacatactacctgccaagcactgggagtgtgtggtaccatgtcttcgccactgcaatgcatacactcgccagacttatag

SEQ ID NO: 4077 - DNA, 1728 bp, synthetic construct
  misc_feature 1..1728: note = source = /note="Description of Artificial Sequence: Synthetic coding sequence"
  source 1..1728: mol_type = other DNA
atgctgggcgtgctggtgctgggcgccctggccctggccggcctgggcttccccgctccagccgaaccccaaccgggtggatcacaatgtgtagaacacgactgctttgccctataccctggaccagcaactttcctgaacgcatcacagatttgtgatggccttcgtgggcacttaatgacggttaggagctctgttgccgccgatgtaatctcattgctcttgaacggtgacggtggcgtggggcgcagacgcttgtggatcgggctgcagcttccacctggttgcggcgatcccaagcggcttggaccattgcggggcttccaatgggtgacgggagacaataacacgtcatactcacgatgggcaaggctcgatctgaatggcgcgcctctgtgtgggccactatgtgtggccgtctcagcagccgaggccactgtgcccagtgagcccatttgggaagaacaacagtgtgaagtcaaggcagatggattcctctgcgagtttcattttcccgctacatgcagacccctggctgtcgagcccggagcagccgctgctgccgtttcaataacctatggaaccccattcgccgctaggggcgctgatttccaggccttaccggtcgggtccagtgccgccgtggccccacttggactccagctcatgtgtacagcgccgccaggagccgtgcaggggcactgggctcgcgaagctccaggagcgtgggactgcagcgtggagaacgggggatgtgaacatgcctgtaatgctattcctggggcaccgaggtgccagtgtccagcaggtgcagcactacaggctgacggaaggagctgcactgcatctgccacacagagctgtaatgacctctgcgagcatttctgtgtgcctaacccagaccagcctggatcctactcgtgcatgtgcgagaccggctatagactggcggccgaccaacatagatgtgaagatgtggatgattgcatccttgagccctccccatgcccgcaacggtgcgtgaatacacagggcggctttgagtgccattgctaccctaattatgacctggtcgatggcgagtgcgtagagcccgtcgatccatgctttagagcgaattgtgaatatcagtgccagccactgaaccagacctcttacctgtgtgtgtgcgccgaggggttcgcccccatccctcacgagccacaccgctgtcagatgttttgcaaccaaacggcatgcccagcagattgcgatccaaacacgcaagcaagctgcgaatgccccgaaggatacatactggacgatggatttatatgcaccgacatagatgaatgtgaaaatggcgggttctgctctggagtctgccataacctccctgggacttttgaatgtatttgcggtcctgacagcgcactggcaaggcacataggcaccgattgcgacagtggtaaggtcgacggaggtgactccgggtctggggagccacccccctcccctacgcccgggtctacactcactcctccggcagttggactggtgcatagcggacttctgataggcatcagtatcgctagtttgtgtctggttgtcgctttgctagcactgctctgccatctgcggaagaagcagggagccgctcgggctaagatggaatataagtgtgccgccccaagcaaggaggtagtcttacagcacgttagaactgagagaacacctcaacggctttag

SEQ ID NO: 4078 - DNA, 1674 bp, synthetic construct
  misc_feature 1..1674: note = source = /note="Description of Artificial Sequence: Synthetic coding sequence"
  source 1..1674: mol_type = other DNA
atgagcgaggccgccagccagggcctgcgggccgccgcccggagcgtgtgggccggcaccgatcgaagaggatgccgccatcgaaggccagtgcccttgtgtagcggtacagcgctttctcagtgcccccgctttccgcgccgactgcacgccgctcggctgggcaatatgttaggggtgcttgtcctcggtgcgctggcccttgctggccttgggtttcccgctccaggctgtggcgacccaaagcgcctgggccccctccgagggttccagtgggttactggtgacaacaacaccagttactccagatgggcccggttggatcttaatggtgcaccactgtgcggacctctgtgtgtggccgtgtctgccgccgaggcaacggttcctagtgagcccatctgggaggagcagcagtgcgaggtcaaagcagatggctttttgtgtgaattccatttccctgccacatgtagacccctcgccgtggagcccggggcagccgctgcggctgtttccatcacctatgggactccgtttgccgctagaggggccgacttccaggcactccctgtgggaagctccgcggcagtggcccctctgggtctgcaattgatgtgcacagctccaccgggagcagtacagggccactgggctagagaagccccaggtgcctgggattgtagtgtcgagaatgggggctgtgaacacgcctgtaatgcaatccccggcgcgccccgttgccagtgtcctgcaggggcagcgttgcaggctgatggtaggtcctgtacggcctccgccacccagtcttgtaacgatctgtgcgagcacttctgtgtacctaatccggatcagccgggctcctattcttgtatgtgcgaaacaggatatcgcctagcagctgatcagcatcgctgtgaggacgttgatgactgcattctggaaccgtcaccttgtccccagaggtgtgtgaacactcaggggggttttgagtgtcactgttaccccaactatgatctggttgacggagagtgcgtcgagccagttgatccatgtttccgggcaaattgcgaataccaatgtcagcctctcaaccagacatcttatctgtgcgtgtgtgcagagggatttgcccctattcctcacgagccacatagatgccagatgttttgcaaccaaactgcctgccctgcggactgtgaccccaatacacaagcatcttgtgagtgtcccgaggggtacattctggacgacggattcatatgtaccgacatcgatgagtgcgagaatggggggttttgcagcggcgtatgccataatctcccagggacctttgagtgcatatgcggacccgattctgcgctggctcgacatattggaacagattgtgattcaggaaaggtcgacggtggagactccggttccggcgagcctccgcccagccccacacccgggtctactctcaccccgcctgctgtgggactggtgcactctggcttgctgatcggcatcagtattgcctccctttgtctcgtcgtggcgctcctggcacttctgtgccacctgcggaaaaagcagggcgctgctcgggctaagatggaatacaagtgtgctgccccctctaaggaagtcgtgcttcagcacgttcgcacagagcgtacaccgcagaggctgtag

SEQ ID NO: 4079 - DNA, 1062 bp, synthetic construct
  misc_feature 1..1062: note = source = /note="Description of Artificial Sequence: Synthetic coding sequence"
  source 1..1062: mol_type = other DNA
atggagctgaccgagctgctgctggtggtgatgctgctgctgaccgcgcgcctgactctttcaagccccgcgccccctgcatgcgatttgagagtgctgtcaaaactgctgagagacagccacgtgctgcatagtcggctgtcccaatgcccggaggttcatcccctgcctacgccagtgctcctacctgcagttgactttagtcttggggagtggaagacccagatggaggagacgaaggcccaagacatcctaggtgcagtgactttgctgttagaaggtgtgatggccgctagagggcaacttggtcccacatgtctcagctctttgctcggacagctgtctgggcaggtgcgtcttctgctaggtgcgctgcagtccctcctcggaacccagctcccacctcagggtaggacaactgcacataaggatcccaatgctatctttctcagctttcagcacttgcttagaggcaaagtacgcttccttatgctggtcggtggatccaccttatgcgtcagacgagcccctccgacaacggctgttccatcgaggacatcactggtactcactttaaatgaacttcctaaccgaacctctggactcctcgaaacaaatttcaccgcgtccgcgaggacaactggatcaggactgctcaaatggcagcagggcttccgcgcaaaaattcccggcctcttgaaccagacatcacgaagtctggatcagatccctggatacctcaacaggatccacgagctgctgaacggaactaggggcttatttcctggtccctcacggaggacactgggggctcctgacatctccagcggcaccagtgacactgggtccttgcctcccaatctgcagcccggctactccccatctcctacccacccgccgacaggacagtatacgcttttccccctgcctcctaccctacccacgccagttgtgcagctgcacccacttctgccggacccgagtgcgccaactccaaccccaaccagcccattactgaatacgagctacactcacagtcaaaacctgagccaggagggctag

SEQ ID NO: 4080 - DNA, 945 bp, synthetic construct
  misc_feature 1..945: note = source = /note="Description of Artificial Sequence: Synthetic coding sequence"
  source 1..945: mol_type = other DNA
atggagctgaccgagctgctgctggtggtgatgctgctgctgaccgcacgactgactctgtctagtcctgcacccccagcctgcgatctgcgggtgctgtccaaattgttacgggactcacatgtcttgcacagtcggctcagccaatgcccagaggtccaccccctgccgacacctgtgctgctcccggccgtggactttagcctcggcgagtggaagacgcagatggaggaaactaaggctcaggatattctgggtgcagtgacgttgcttctggagggagttatggcagccaggggccagctgggacccacctgtcttagcagcctcctcgggcagctctctggccaggtgcggctgctgctcggagcactccaatctttgctgggtacacaactccctccccagggcaggactactgcccacaaggatccgaacgctatattcctgtcttttcaacacctgctgcgaggcaagacctcagggctgttggaaacaaatttcactgcctccgctcgaaccacaggcagcgggctgctgaaatggcaacagggctttcgcgctaaaataccaggcctcttgaaccagacgagtagatccctggaccagatccccggttatctgaaccgcatccatgaactcctcaatgggacaaggggtctgtttcccggccctagtcggagaaccctgggcgcccctgatatatcctcggggacctcagataccggatcactaccccctaatttgcaacccggatattctccttcacctacccatccacctacgggtcagtacaccctgtttccccttcctcccactctcccaaccccggtggtgcagctgcatcctctccttccagatcctagtgctccaacgcccactccaacttcacctctgctcaacacgtcatatacccactcccagaacctgagtcaggaggggtag

SEQ ID NO: 4081 - DNA, 861 bp, synthetic construct
  misc_feature 1..861: note = source = /note="Description of Artificial Sequence: Synthetic coding sequence"
  source 1..861: mol_type = other DNA
atggagctgaccgagctgctgctggtggtgatgctgctgctgaccgctcgattaacccttagctcccccgccccacctgcctgcgacctccgggtcctgagtaagctactccgggacagccatgtgctccacagtcgcctgagtcagtgtccagaggtgcatcccctcccgacacctgtattgctgcccgccgtcgacttctccctgggagagtggaaaacgcagatggaagaaacgaaggctcaagatatcctgggagccgtaacactgctgctagaaggggtgatggccgccaggggccaactcggccctacctgcttaagtagtctcctcggacagttaagcggccaggtgagattactgctcggcgccctccagtctctcttggggactcagctcccacctcagggtcgcacaacagcccataaagatccaaatgccatcttcttatcttttcagcacctgctccgagggaaggacttctggattgtcggcgataagctacattgcctgtcccaaaattattggctctgggcaagcgaggtcgcagctggaatccagagccaggattcttggtccgcagagccgaacttgcaggtgcctggccctaacccacgaattccagaacaggatactcgcacactggagtggaactcatggacactctcgtggactctgacccaggacccaagaagtccaggacattttctaagaaatattagacaccgtcttcctgccacgcaacctccagcatggattttcagcttcccaaatccctcttcatattggacagtgtacgccctgcccagttctacccacctggcacatccctgtggaccagcccctccccctgcttcttag

SEQ ID NO: 4082 - DNA, 1050 bp, synthetic construct
  misc_feature 1..1050: note = source = /note="Description of Artificial Sequence: Synthetic coding sequence"
  source 1..1050: mol_type = other DNA
atggagctgaccgagctgctgctggtggtgatgctgctgctgaccgccagactaacattgtcttctcccgcacctccagcctgcgatcttagagtgcttagcaagttgctgcgcgactctcacgtgctgcactcaaggctgagccagtgccctgaagtgcaccccttgccaaccccagttctgttgccagccgtggacttctcccttggcgagtggaagacccagatggaggaaaccaaggctcaagacattctgggcgcagtcactttactattagagggagtgatggccgctcgaggacagctcgggcccacctgtctgtcttccctgctgggacagctgtctggccaggtgcgtctgctgttgggagcactgcagtcgcttcttggaacgcagggacgcacaactgcgcataaagaccccaatgccatcttcctctccttccagcacctgctacgcgggaaagtgcgcttcttgatgctcgttggcgggtctaccttgtgtgtgaggagggctcctcccacaacagcagtgcccagccgtacttctctcgtgctgacgcttaacgagttgcctaaccgtacatctggccttctggaaactaattttacagccagtgcccgtaccaccggctccggactgctgaagtggcaacaaggatttcgagctaagatccccggcctgctgaatcagaccagccggtccctggatcagatccctggctacctcaataggatccacgagctcctaaacggcacaaggggcctcttccccgggcccagtcgcagaactttgggggctccagatattagcagcggaacctctgatacgggttctttgccgcctaacctgcagcccggatattcaccgagcccgacccacccacctacagggcagtacacccttttcccactgcccccaactttgccaacaccggtcgtgcagcttcatcctctgctgccggatccatccgctcccacccccacaccgacttcccctctcctaaacacttcttatactcatagccaaaacttgtcacaggaagggtag

SEQ ID NO: 4083 - DNA, 963 bp, synthetic construct
  misc_feature 1..963: note = source = /note="Description of Artificial Sequence: Synthetic coding sequence"
  source 1..963: mol_type = other DNA
atgcccatgtaccaggtgaagccctaccacggcggcggcgcccccttgagagtcgagcttccaacatgtatgtacaggctgccgaatgtccacgggaggtcctacggacctgcccccggggcgggacacgtgcaggaggaaagcaacttgtctctgcaagccctggagtctcgccaggacgacattttaaagcgcctttatgagctgaaagcagcggtggacgggttgtccaaaatgatacagacaccagacgctgatcttgacgttactaacataattcaggcggacgagcctacaaccctgacaaccaacgcgttggatctcaatagcgtgttgggcaaggactatggcgccctcaaggacatcgtgataaatgccaacccagcatcaccacctcttagcctgcttgtgttgcacaggctgttgtgcgagcacttccgcgtgctgagcacagtgcacactcactcatcggttaagtccgtgccggagaatctgttgaagtgcttcggagaacaaaataagaaacaacctcgccaggattaccaactcggctttactttgatctggaagaacgtacctaagacgcaaatgaagttctccattcaaactatgtgtcctatcgaaggtgagggcaatatcgcccgattcctgttctctctctttgggcagaagcacaatgcagtgaacgccactctgattgactcatgggtggatatcgccattttccagttgaaagaagggtctagtaaagaaaaagccgcagtattccgttctatgaatagcgctctcgggaagtctccttggctggccggaaatgagttgaccgtcgcagatgtcgttctctggagcgttcttcagcagatcggaggatgttctgtgacagtgcctgcaaacgtacaaaggtggatgcgttcctgcgaaaacctggcaccgttcaacaccgccttaaagcttctgaagtag

SEQ ID NO: 4084 - DNA, 1068 bp, synthetic construct
  misc_feature 1..1068: note = source = /note="Description of Artificial Sequence: Synthetic coding sequence"
  source 1..1068: mol_type = other DNA
atggagcggctgtggggcctgttccagcgggcccagcagctgagcccccgaagttctcagaccgtgtatcagagagttgaaggcccgcgaaagggacatctggaagaggaggaggaggatggggaagagggagccgagactctggcacacttctgtcctatggagctccgcgggccagagccactgggtagcaggcctagacaacccaatttgataccatgggctgccgctggtaggagagccgctccctacttggtgctaacagcacttctgatatttaccggagccttcttattggggtatgtcgctttccgagggagttgtcaggcctgtggagattccgttctggtcgttagcgaagatgtaaattatgaaccagacctggacttccatcaggggcggttgtattggtcggatctgcaggctatgttcctgcagtttcttggtgaggggcggctggaggataccatcagacagacgagcctccgggaaagagtcgcaggttccgcaggaatggcagcactgacccaggatatccgggctgcgctatccaggcagaagctggatcatgtctggaccgatactcactatgtagggctacagttccccgacccagcgcatcccaacactctccactgggtagatgaggctggcaaggtgggcgaacaactgccattggaggatccagacgtctactgcccttatagcgctataggaaacgtgacgggggagctggtgtatgcgcattacggcaggcccgaagacctccaggaccttcgcgctcggggggtggaccctgtcgggagattgctgctggtgcgagttggcgtcatttcgtttgcccagaaagaggctcaacgaccttgtggccctccccgaatggcaggtgagcccccaagattacctctcagcccaggacctagagctacaaccgccgcgtcggggcaacagagccaggatttacacccccatcagcagcatttgcggctgcacagaaggcccctgcgagcaaggagtctgcgatgccacagaggccctgagggttgcatgggcccaaggtcttcatag

SEQ ID NO: 4085 - DNA, 2406 bp, synthetic construct
  misc_feature 1..2406: note = source = /note="Description of Artificial Sequence: Synthetic coding sequence"
  source 1..2406: mol_type = other DNA
atggagcggctgtggggcctgttccagcgggcccagcagctgagcccacgatccagccagacagtgtaccaacgtgtggagggccccagaaaagggcatcttgaggaagaggaggaagacggagaagagggagccgagactctggcccacttttgtccaatggagttgcgcgggcccgaaccactgggatcacgacccagacagcccaatctgataccgtgggccgcagctggccgacgcgcagccccatacctggtcctgactgctctcctgatattcacgggcgcctttttgctgggctatgtggcttttcgtggatcttgccaggcatgcggcgactcggtattagtggtgagcgaagatgtgaactacgagcccgatctcgatttccatcagggtaggctgtattggagcgatctgcaagctatgtttttacagttccttggtgagggacggctggaggataccattcgccaaacctcactgagggagcgggtcgcaggatccgctggcatggctgccttgacacaggatatccgcgccgcactgtctcggcagaagctcgatcatgtttggacagatactcactacgtagggctgcagtttcccgatcccgcacaccccaatacccttcattgggtcgatgaggccgggaaggtgggagagcaacttcccctcgaggaccctgatgtgtattgtccctactccgccattggcaatgtcaccggagagctggtgtatgctcattatggcagacccgaagatctgcaggacctgcgagcacgcggggtcgaccctgtaggtaggttgctgctggtccgcgtcggcgtcatatctttcgctcagaaggttacaaatgcacaggacttcggggcacagggggtgcttatctacccagagcctgccgatttctctcaagacccgccaaaaccatccctgagttctcagcaggccgtgtatggtcatgtccacttaggcaccggtgatccatatacacccgggttcccaagctttaatcagactcagttccctccagtggcctcctccggtttgccctcgatcccggcccagccaatcagtgctgacattgcctctcgattgcttcgcaagctcaaagggccggtggccccacaggagtggcaaggatcactacttggaagtccataccacctgggtcccggtcccagattaagattggttgttaacaaccaccgtaccagtacccccattaacaatatttttggatgtattgagggacggtcagagcctgaccactatgtggtgatcggcgcccagcgagacgcttggggaccgggagccgccaaatccgccgtaggcactgcaatcctgcttgagttggtaagaacgttcagttccatggtgtcaaacgggttcaggcccagacggagtctgctgtttatttcatgggatgggggggactttggcagcgtcggttcaacggaatggctggaagggtatctttccgtgctacacctcaaagccgtggtgtatgtgtcactggacaatgccgtgctgggagacgataagttccacgctaagaccagtcctctgttaacatccctgattgagtccgtcttgaaacaggtggactccccgaaccactccgggcagaccttgtacgaacaggtggttttcaccaacccttcttgggatgccgaggtgattcggccactgccaatggattcttcggcctatagctttacagcgtttgtgggggtccctgccgtggagttttcgtttatggaggatgaccaggcataccccttcttgcataccaaggaggacacttacgagaatttgcacaaagtgcttcaggggcggttaccagccgtggcgcaggccgtcgcccagctggcaggtcaactgctgattcgactgtcgcacgataggttactgccactagattttgggagatatggcgacgtcgtcctccgacacattggtaacttaaacgagttctcgggggaccttaaggcaaggggtctgacactgcagtgggtgtactctgccaggggggactatatccgcgcagctgagaagctgaggcaggaaatttatagttccgaggagagggatgagaggctgacacggatgtataacgtgagaatcatgcgagtggagttttactttctgtctcagtatgtctctcctgctgactcgccctttaggcacatttttatgggccggggtgatcacaccttgggagccctcctcgatcacctgaggctgcttagaagcaatagctctggcactcccggtgctacatcatcgacaggctttcaagaaagccggtttaggagacaactggcattactcacctggacccttcagggagcggccaatgccttaagtggcgacgtgtggaacatagacaacaatttctag

SEQ ID NO: 4086 - DNA, 1029 bp, synthetic construct
  misc_feature 1..1029: note = source = /note="Description of Artificial Sequence: Synthetic coding sequence"
  source 1..1029: mol_type = other DNA
atggtgagcaacggcttccggccccggcggagcctgctgttcatctcctgggacggaggtgacttcggatccgttggcagcacagagtggttagaagggtatctgagcgtgttgcatctgaaggctgtggtatatgtaagtctggacaatgccgtcctcggagacgataagttccatgccaaaaccagccccctacttacttccctcatcgagtctgtcctgaagcaggtagattccccaaaccatagcggtcaaacactatatgaacaagttgtgtttacaaatccctcttgggatgcggaagtgattcgccccctgccaatggacagtagtgcttacagctttaccgcctttgttggagttcctgctgttgaatttagttttatggaggatgatcaggcgtaccctttcctgcacaccaaggaggacacctacgaaaacctgcacaaggttcttcagggacggctccccgctgtggcacaagccgttgcccagctagcaggacagctgctgatccggctttctcatgaccggctgcttcccctcgatttcggaaggtatggcgacgttgtgctccggcacattggaaacctcaatgaattctccggggatctgaaagcccgcggtctgaccctacagtgggtttatagcgctcgcggcgactatatccgggccgccgagaaattacggcaggagatctatagctcagaggaaagagacgaacgcctcacaaggatgtacaatgtccgcataatgcgggtagagttctatttcttgtctcagtatgtgagccccgctgactcccccttccggcatatcttcatgggtcggggcgaccatactttaggcgctctacttgatcacctgagattgttgaggtctaattcgtctggaactcccggagccacttccagcacaggcttccaggagtctcgatttcggcggcagctcgctctgctgacttggactctccagggcgcagccaatgctctgtctggagacgtctggaatattgataacaatttctag

SEQ ID NO: 4087 - DNA, 1596 bp, synthetic construct
  misc_feature 1..1596: note = source = /note="Description of Artificial Sequence: Synthetic coding sequence"
  source 1..1596: mol_type = other DNA
atggccgccaccctggacctgaagagcaaggaggagaaggacgccgaactcgataagcgcatcgaagcactccggcgcaagaacgaggctctgattagaaggtatcaggagatcgaggaggacaggaagaaagccgaactagagggggtggctgttactgcgcccaggaagggccgaagcgtggagaaggagaatgtggccgtggagtcagagaagaaccttgggccgtcccgcaggagtccaggtacgcctcgaccccctggcgcttccaaaggcgggagaacgccaccccagcagggaggacgcgccgggatgggccgcgcgtcacggagttgggagggatcaccaggcgagcaacccagaggtggcggagccggtgggagggggcggagggggcgcggccggggctcgccacatctctctggagctggagacacctctatatctgatcggaaaagcaaagagtgggaggagaggcgccgccaaaacattgagaaaatgaatgaggagatggaaaagattgccgaatatgagcgaaatcagcgggaaggcgtcctcgagcctaacccagtgcgcaatttcttagatgatccccgacgcaggtccggaccgctcgaggagtcagaacgcgataggcgtgaagagagccgccgccatggccgcaactgggggggacctgattttgaaagagtcaggtgcggccttgaacacgaacggcagggcagacgcgcaggtctcggatctgccggagacatgacactcagtatgacaggccgagaacgcagcgagtatttacgttggaaacaggaacgggagaagatagaccaggaacgcttgcagagacatagaaaacctactggccagtggcgaagggaatgggacgctgagaagaccgacggaatgtttaaggatggaccagtgccagctcacgagccatctcacaggtatgacgatcaggcctgggctcggcccccgaaacctcctacttttggagagttcttgagccagcacaaggctgaggccagctctaggaggcggcgaaaatcaagtcgtccgcaggccaaagctgcacctcgcgcatacagcgatcacgatgatagatgggagactaaggagggggctgccagccccgctccagagacgcctcaaccaacaagtccagagacgagccccaaagagacaccaatgcaaccgccggagattcctgccccagctcatcgtcctccagaagacgaaggcgaggagaacgaaggggaggaggatgaagagtgggaggacatctcggaagacgaagaggaagaagagatcgaggttgaggagggggatgaggaagaaccagctcaggatcatcaagcaccagaggccgccccaacgggtattccctgtagtgagcaggcccacggtgttccatttagccccgaagaacccttgttagagccacaagcacctggcaccccttcatcaccgttctccccgccgagcggccatcagccggtcagcgactggggcgaggaagtggagctgaactctccacgcacaacccacttagccggggccctctcccccggagaggcctggccattcgaaagcgtctag

SEQ ID NO: 4088 - DNA, 1329 bp, synthetic construct
  misc_feature 1..1329: note = source = /note="Description of Artificial Sequence: Synthetic coding sequence"
  source 1..1329: mol_type = other DNA
atgcactactgcgtgctgagcgccttcctgatcctgcacctggtgaccgtggccttaagtctgtccacatgttcaacactggatatggaccagtttatgagaaaacggatcgaggccatccgaggtcaaatcctgagcaagctaaagcttaccagtcctccagaggactacccggaacctgaagaagtgccccctgaggtaatctcaatatacaattcgacacgcgacctgctccaggagaaggcaagcagacgagccgcagcatgcgaacgggagcgctccgatgaggagtattacgctaaagaggtgtataaaattgacatgcccccattcttcccttcagaaacggtatgtccagtggtgaccaccccatctggctccgtagggtctctgtgttcccgtcaatcacaggtgctctgtgggtatcttgacgcaatccccccaactttttataggccttattttcggattgtgcgtttcgacgtcagcgctatggagaaaaacgcttccaatctggtgaaggccgagttcagagtcttccgcctccaaaacccaaaggctcgggtgcccgaacagcggattgaactctaccagatcttgaaaagtaaagacctcacatctcccacgcaacgttatattgattcaaaagtcgttaagactcgggcggagggcgagtggctgtcattcgacgtgacggacgccgtgcacgagtggctgcaccacaaggatagaaatttgggtttcaagatctcccttcattgtccatgctgcacgttcgtgccctctaacaattacatcattccaaataagtccgaagagcttgaggcccgatttgccggaattgacggtacctctacctacacttctggggatcaaaagacaatcaaaagcacaaggaaaaagaactccggcaagactcctcacctgttactcatgctattaccaagctaccgattggaatcccaacagacaaaccgtaggaagaagagggcgcttgatgccgcatattgcttcaggaacgtgcaggataattgctgcttaagaccattatacattgacttcaaacgagatctcggctggaagtggatccacgagcctaaggggtacaacgcgaatttttgtgccggggcatgcccctacctctggtcctcggacacacaacatagcagggtgctgagcctctacaatacaattaatcccgaggcaagcgcatctccctgttgtgtgtcacaagacttagagccgctgacaatcctttactatatcggaaagacccctaaaatcgagcagctgtctaacatgatcgttaaatcttgcaagtgttcttag

SEQ ID NO: 4089 - DNA, 1245 bp, synthetic construct
  misc_feature 1..1245: note = source = /note="Description of Artificial Sequence: Synthetic coding sequence"
  source 1..1245: mol_type = other DNA
atgcactactgcgtgctgagcgccttcctgatcctgcacctggtgacagtggccctgtccctgtcaacatgctctaccctggacatggatcaatttatgcggaaacgcattgaagcaattcgtggccagatactgagtaaactgaagctgacaagcccgcccgaagactacccagagcctgaggaggtcccaccagaagtgatctccatttacaattccactcgtgacttgctccaagagaaagcctcaagacgggccgctgcatgtgagcgggaaagaagcgatgaggaatattacgcaaaggaggtctacaaaatcgatatgccccccttctttccaagcgagaatgccatccctcccaccttttaccggccctactttagaattgtgcggtttgatgtgtctgctatggaaaagaacgccagtaatctcgttaaagccgagttcagagtttttcggcttcagaatcccaaagcacgtgtgcccgagcagcgcatcgaactctaccagatactcaaatctaaggacttgacctctcccacccagaggtatatcgactcaaaggttgtgaaaaccagggcagagggtgagtggctctctttcgacgtaaccgacgccgttcacgaatggcttcatcacaaagacagaaatttaggctttaagatttcccttcactgcccctgctgcactttcgtgccgtccaacaattacattattcccaataagagcgaagagctggaagcccgatttgccggtatcgatggaacttcaacctacacatctggggatcagaaaacaataaaatctactcggaagaagaatagcggcaagacccctcatctcctcttgatgcttctgcctagctacagactggaatcccaacagacaaaccgtcggaagaagcgggccctcgacgccgcctactgcttcaggaatgttcaggacaattgctgccttcggcctctgtatatagacttcaagagagatctgggctggaaatggatacacgagccaaaaggatacaacgcgaacttctgtgctggcgcctgtccttacctgtggtcaagcgatactcagcattccagggtgctctccttgtacaatactattaatcctgaggcctctgcaagcccatgttgtgtaagtcaggatctggaaccccttactatcctctattacatcggcaagaccccaaagattgagcagctgagcaatatgatcgttaagagctgtaaatgttcttag

SEQ ID NO: 4090 - DNA, 1239 bp, synthetic construct
  misc_feature 1..1239: note = source = /note="Description of Artificial Sequence: Synthetic coding sequence"
  source 1..1239: mol_type = other DNA
atgaagatgcacctgcagcgggccctggtggtgctggccctgctgaacttcgcaaccgtgtccttaagcctttcaacctgtacaaccctcgattttgggcatataaaaaagaaacgtgtcgaagccattcgcgggcagatccttagcaagctgaggctcactagcccacccgaacccaccgtcatgacacacgtgccctaccaggtgctagctctgtacaatagcactcgcgaactccttgaggaaatgcatggggagcgggaggaaggctgcacacaggagaacactgaatccgagtattacgctaaagaaatccacaaattcgatatgatccaggggctggccgagcataacgagctggccgtttgccctaagggcattacatccaaggtcttccgctttaatgtatcgtccgttgaaaagaacagaactaacctgttccgcgccgaattcagggtactgagagtgccgaatccttcttccaagcgaaatgagcagagaatcgaactgttccagatcctgcgacctgacgaacacatagctaaacagcgctatataggcgggaaaaatctgccgacccgtggcacggccgagtggctctcctttgatgttaccgacaccgtgcgtgaatggttgttgagaagggagtccaacttagggctggaaatttctattcactgcccgtgccacactttccagccaaacggggatattctggagaatatacacgaggtgatggaaatcaagttcaagggcgttgataatgaggacgatcacggtagaggcgaccttggtcggctcaaaaagcagaaggaccaccacaatccccacttgattttaatgatgattccaccacaccggctagacaacccaggccagggcgggcagcgcaaaaagcgggctttggacaccaattattgttttcgcaatctggaggagaattgttgtgtgcgaccattatatatagacttcaggcaggacctgggctggaagtgggtgcatgaacctaaaggatactacgcaaacttctgttctggaccctgtccatacctgcgttctgcggacaccacccattcaactgtcctggggttgtataacacactgaatcctgaggcctccgcgtcaccatgctgcgtcccccaggacttggaacctctcaccatactgtactacgtaggacgcactccaaaagtagagcagctatccaatatggtggtgaagagctgcaaatgctcttag

SEQ ID NO: 4091 - DNA, 930 bp, synthetic construct
  misc_feature 1..930: note = source = /note="Description of Artificial Sequence: Synthetic coding sequence"
  source 1..930: mol_type = other DNA
atgaagatgcacctgcagcgggccctggtggtgctggccctgctgaacttcgctacagtttccctctcgctctccacatgtacaacattagattttgggcatattaagaagaaaagagtggaagcaatcaggggacagattttatccaagctgaggttaactagcccgccagagcccactgtaatgactcacgtgccttatcaagtgttagccctgtataattctacccgtgagctgctagaagaaatgcacggtgaacgggaggaaggttgcactcaggagaacaccgaatccgagtattatgcgaaagagatacacaaattcgacatgattcagggactggcagagcacaatgagctggctgtgtgtcctaaaggaataacttcgaaggtctttaggtttaatgtaagttctgtcgagaagaacaggacaaatttgttcagggcggagtttcgcgtcctgcgggttcccaacccatcttccaaaaggaacgagcagcgcattgaactgttccagattctgcgcccagatgagcacatcgctaagcaacgctacatcggcggcaaaaatctccccacacgaggcacagcagaatggcttagcttcgacgtcactgataccgtcagagaatggctccttcggagggagagtaacttagggctggaaatttctatccactgtccatgtcacacttttcaaccaaatggagatatcctcgagaacatccacgaagtgatggaaattaagtttaagggggtagacaatgaagatgatcacgggagaggcgacctcggacgcctaaagaagcaaaaggaccaccacaacccacacctgatcctcatgatgattcccccccacagactggacaatcccgggcaaggcgggcagcgtaaaaaaagagccttagacacaaactattgttttcggtag

SEQ ID NO: 4092 - DNA, 444 bp, synthetic construct
  misc_feature 1..444: note = source = /note="Description of Artificial Sequence: Synthetic coding sequence"
  source 1..444: mol_type = other DNA
atggccagccaccggctgctgctgctgtgcctggccggcctggtgttcgtgtccgaggctggccctacaggaaccggtgaatctaagtgtccactgatggtcaaggtcctggacgctgtaaggggaagtccagcaataaacgtcgccgtccacgtatttcgcaaagccgccgacgacacttgggagcccttcgcgagtggtaaaacttctgaatctggcgaactacacgggctgactactgaagaggaatttgtggaaggcatctacaaagtggagatcgatacgaaaagctactggaaagccctagggatttcaccgttccatgagcatgctgaggtggttttcaccgctaacgattccgggcctcgacgttacactatcgccgctttgctctccccatactcttatagcactacagccgtggtgacaaaccccaaggagtag

SEQ ID NO: 4093 - DNA, 555 bp, synthetic construct
  misc_feature 1..555: note = source = /note="Description of Artificial Sequence: Synthetic coding sequence"
  source 1..555: mol_type = other DNA
atggccagccaccggctgctgctgctgtgcctggccggcctggtgttcgtgtcagaggccggcccaacggggacaggggaatcaaagtgtccactgatggtcaaggttttggacgccgtgagagggagcccggccatcaatgtcgctgtccatgtattccgtaaagcagccgatgacacttgggagccgtttgccagtggaaaaacatccgagagtggggaactgcacgggctgaccaccgaggaggagttcgtagagggtatctataaggtggagatcgataccaaatcatactggaaagccctagggatctccccttttcacgaacacgccgaggtgagcatccagacattcgaagcattccaggaaattctgtacaaaaagaagtttactactctgtggcattggaccagtggcggacaatccttctttagagcactcgtggaggtcgtgttcacagccaacgactctggccctagaaggtatactatcgctgcactgctcagcccttactcatacagcaccacagccgtcgttaccaaccctaaggagtag

SEQ ID NO: 4094 - DNA, 420 bp, synthetic construct
  misc_feature 1..420: note = source = /note="Description of Artificial Sequence: Synthetic coding sequence"
  source 1..420: mol_type = other DNA
atggccagccaccggctgctgctgctgtgcctggccggcctggtgttcgtctcagaggcgggcccaacaggcaccggagagtccaaatgcccacttatggtgaaagtcctggatgccgtgagagggagccctgcaattaatgtggctgtgcacgtgttcaggaaagctgccgacgatacttgggaacccttcgcatctggtaagacctccgagtcgggggaattgcatgggctgactactgaggaagaatttgtggagggcatctataaagtggaaatcgacactaaaagctactggaaggcactcggcatttcgccattccatgagcacgctgaagtcgtgtttacagctaatgactccggccctcgccgctattactcctacagcaccaccgcagtagtgacgaaccccaaggaatag

SEQ ID NO: 4095 - DNA, 996 bp, synthetic construct
  misc_feature 1..996: note = source = /note="Description of Artificial Sequence: Synthetic coding sequence"
  source 1..996: mol_type = other DNA
atgaacggcacccggaactggtgcaccctggtggacgtgcaccccgaagatcaggctgcagtatacctgaaggggagaagcggcgataaaatgatacacgagaagaacatcaaccagctgaagagcgaggtacagtatattcaggaggcccgcaattgtcttcagaagctgcgcgaggacatctcgtccaaattagatagaaatctgggagactctctccaccgacaggaaattcaggtggtcctggaaaagcctaatggcttctcccagagcccaaccgcactgtattcatctcctcccgaggtcgacacttgcatcaatgaggatgtggagagcctgcgaaagaccgtccaagacctcttagcaaaacttcaggaggcaaaacgacagcaccagagtgactgcgtcgctttcgaggtaacactctcccgctatcagagggaagctgaacagtccaatgttgcccttcagagagaagaagacagggtggaacagaaggaagccgaggtgggcgaactacaacgaagacttctcggtatggagactgagcaccaggctctactcgccaaagtgagggaaggagaagtggcgctggaggaactccgcagtaacaatgccgactgtcaagctgaaagagaaaaggctgctaccttagaaaaagaggtggcagggttgcgggagaagatacatcacttagatgatatgttgaaaagccaacaaagaaaggtgcgccagatgatcgagcagctccagaattccaaagcggtgattcagtcaaaagatgctactatccaggagctgaaagagaaaatcgcttatcttgaggccgagaacctggaaatgcacgaccgcatggagcacctgatcgaaaagcagatctcccacgggaacttcagcacacaggcccgggccaagacagagaaccccggtagcatccggatcagtaaaccaccatcaccaaagcctatgcctgtaattcgggtagtggaaacttag

SEQ ID NO: 4096 - DNA, 1098 bp, synthetic construct
  misc_feature 1..1098: note = source = /note="Description of Artificial Sequence: Synthetic coding sequence"
  source 1..1098: mol_type = other DNA
atgaacggcacccggaactggtgcaccctggtggacgtgcaccccgaggatcaggccgctgcaggtaggaagacatatgccatggtgtctagccatagtgcgggacactctctggcaagcgaattagtggaatctcacgatggccatgaggagattattaaggtgtacctcaaaggcaggtcaggcgataaaatgatccatgagaagaacatcaatcagcttaaaagcgaagttcagtatatccaggaagctagaaactgtctgcaaaagttgagagaagacattagtagcaagctggatcggaatctcggcgattcactgcatagacaggaaattcaggttgtgctagagaaacctaacggcttcagtcagtctccaaccgcgctctactctagtcctccggaggtggatacctgtattaacgaggacgtggagtctttgcgcaagaccgtgcaggacctcctcgccaagctgcaggaggccaagcggcagcaccagtccgactgcgtggcctttgaagtcacactgagccggtatcagcgggaagcagaacagagcaatgtggctctgcagagggaggaagatagagtggaacagaaagaagccgaggtgggtgaattgcaaaggcggttgctagggatggaaaccgagcatcaggcactgcttgccaaagtgcgggagggtgaggtcgccctggaggagctgcgaagtaataatgctgattgtcaggctgaaagggagaaagcagctaccctggaaaaggaagttgccggcctgcgtgaaaagattcatcatctagatgacatgctcaaaagtcagcagagaaaagtgcggcagatgattgagcagctacaaaactccaaagctgtgattcagagtaaagacgccaccattcaagaactgaaagagaagattgcttatctggaagcggaaaatttagagatgcatgacaggatggaacacctgatcgagaagcagatatcacacggaaacttctctacccaggctcgcgccaagacagagaatccaggatctatccgcatctcaaaacctccatcgcccaaaccaatgcccgttattcgggttgtggagacctag

SEQ ID NO: 4097 - DNA, 1173 bp, synthetic construct
  misc_feature 1..1173: note = source = /note="Description of Artificial Sequence: Synthetic coding sequence"
  source 1..1173: mol_type = other DNA
atgaacggcacccggaactggtgcaccctggtggacgtgcaccccgaagaccaggcagcagggagcgtcgatatcctgcgtttgaccctgcagggcgaactgaccggcgacgagctcgaacacatcgcccaaaaggctggaaggaagacgtacgctatggtgagctctcatagcgcaggccactcccttgcatcagaactggtcgagagccacgacggccatgaagagattatcaaagtttacctgaaggggaggtcaggggacaagatgatccacgaaaaaaacattaaccagctgaagtcagaagtgcagtatattcaggaggctaggaactgcctgcagaaactgcgtgaagatatcagctcaaagctggatcgcaacctgggggacagcctgcatcgacaggagattcaggtggtgttggagaagcctaacggcttctcccaatccccaacggccctttattcaagcccacccgaggtggatacatgcatcaacgaggatgtcgagagccttagaaagacggtccaggacctgttggcgaaactccaggaagcaaagcgtcagcaccagagtgattgcgtggctttcgaggttacactctcacggtatcagcgcgaagccgagcagtcaaacgttgccctacagagagaagaagatcgcgtcgaacagaaagaggccgaagtcggcgaactgcagcggcgtttgctaggcatggaaaccgagcaccaagccttactagccaaggtgagggaaggagaggtagcactagaagagttgaggtcgaacaatgccgactgtcaggctgagagagaaaaagccgccaccctagaaaaggaggtcgctggcctgcgcgagaagatccatcacctggacgatatgctgaagtctcagcagcgcaaggttcgccaaatgatcgagcagttacaaaactctaaagccgttatccaatcaaaagacgctactatccaggagctaaaggaaaagatcgcttatttggaagctgaaaacctggagatgcacgatcggatggaacatctgattgagaagcagatctcacatggtaattttagcacacaggcgagggccaaaaccgagaaccctggaagtataagaatatcaaagcctccatctcccaaacctatgcccgtgatccgagtggtagagacgtag

SEQ ID NO: 4098 - DNA, 600 bp, synthetic construct
  misc_feature 1..600: note = source = /note="Description of Artificial Sequence: Synthetic coding sequence"
  source 1..600: mol_type = other DNA
atgaacggcacccggaactggtgcaccctggtggacgtgcaccccgaggatcaggcagctgcaggccggaaaacatacgccatggtgtctagccactctgccggccattccctggcaagtgagctcgtcgagtctcacgacgggcacgaggaaatcatcaaagtgtacttgaaaggaaggagcggggacaaaatgattcatgagaagaacattaatcagctgaaatctgaagtgcagtatattcaggaagctcgcaactgtctgcaaaagctgagagaggatatcagcagcaaacttgacagaaatctgggcgattctctgcaccgtcaagaaattcaagtagtattggagaaacctaacggcttctcgcaatccccaaccgccctgtactcgagcccccccgaggtggatacctgcatcaacgaagacgttgagtcccttcgtaaaacagtgcaagatttgttggcaaaactccaggaggccaagagacaacatcagtcagactgtgtggcctttgaagtgaccctgtctagatatcagcgcgaggcggagcagtccaacgttgcgcttcagcgcgaggaggaccggtgccccgaatag

SEQ ID NO: 4099 - DNA, 1230 bp, synthetic construct
  misc_feature 1..1230: note = source = /note="Description of Artificial Sequence: Synthetic coding sequence"
  source 1..1230: mol_type = other DNA
atgagcagccccggcatgaccagcctgcagctggagaaggaggagtgcatgcaatgtgtgccttgttcacctcggacaagagtcgctctgctggaattgtacagagccatgtgccagggcagcgtggatatcctaaggctgaccctccaaggcgagttgaccggggacgagcttgagcacatcgctcagaaagctggccggaagacttacgccatggtcagctctcatagcgcaggccacagcctcgccagcgaacttgtggagtcccacgacggacatgaggagataattaaggtctacctcaaaggccggagcggcgacaagatgattcatgagaagaacattaaccagctgaagagcgaagttcagtacatccaagaggcgcgcaattgtttgcagaaactgcgcgaagatatctcaagcaaattagacagaaacctgggtgactccctccataggcaggaaattcaggtcgtgctcgaaaagccaaacgggttttctcagtctcccaccgcgctgtactcctcacccccagaggtagatacctgcataaacgaggatgtggagtcactgcgcaagactgtgcaggacctcttggcaaaattacaggaagccaagcgccagcatcaaagtgattgcgttgctttcgaggtgactctttccaggtaccaacgggaggcagaacagtctaatgtcgcacttcagagagaggaggacagggtcgagcagaaagaagcagaagtgggcgaattacaacgccgactcttagggatggaaaccgagcaccaggctctcctggccaaagtcagggagggtgaggtggcattggaagagctgaggtcaaacaacgctgactgccaggccgaacgggagaaagccgccacacttgagaaggaggtggctggtcttcgggaaaaaatacaccaccttgatgatatgcttaagtcacagcagagaaaagtgcggcagatgatcgaacagctgcagaatagtaaagcggtcatccagtctaaagatgctactatccaggagcttaaagagaagattgcgtacctggaagctgagaatttggaaatgcatgacaggatggagcacttgatcgaaaagcagatcagtcacgggaactttagtacccaggccagggcaaagacggaaaatcccggctccattaggatttcaaaacccccatctcccaagcccatgccagtcattcgcgtggttgagacttag

SEQ ID NO: 4100 - DNA, 543 bp, synthetic construct
  misc_feature 1..543: note = source = /note="Description of Artificial Sequence: Synthetic coding sequence"
  source 1..543: mol_type = other DNA
atgaacggcacccggaactggtgcaccctggtggacgtgcaccccgaagaccaggcagcagctgggcgtaagacctacgcgatggtatcttcacacagcgctggccactccctcgcaagtgaactggtggaatctcacgacggtcacgaagagattatcaaagtttacctgaaaggacgttctggggataaaatgattcatgagaagaacataaaccagctgaagtcagaagtgcagtacatccaggaagccaggaattgcctccaaaagctgcgcgaggacatttcaagcaaattggacagaaacctgggtgattccctgcataggcaggagattcaggtcgtactggaaaagcctaatggcttcagccagagcccaaccgccctgaaagccggcgataccgatgtgcagtccgactggagaatgtcatggggaaatgaggtgccttccaccaacaccgcccaattcctagcgaccaactgcctatttttctacctgttgcatctacagcccacactgccatggcctcccgccgaccggtag

SEQ ID NO: 4101 - DNA, 1182 bp, synthetic construct
  misc_feature 1..1182: note = source = /note="Description of Artificial Sequence: Synthetic coding sequence"
  source 1..1182: mol_type = other DNA
atggaggagccccagagcgaccccagcgtggagccccccctgagccaggaaacattttcagacttgtggaagttactgcccgaaaataacgtcctctcaccactgccttctcaggctatggacgatttgatgctcagcccggatgatatagagcagtggtttacagaggatccaggtcctgatgaggcaccaaggatgcccgaggcagctcccccagtggcacctgcccccgctgcgcccacacctgccgctcccgcacctgctccaagttggcctttgtcaagctccgtacctagccagaaaacttatcagggctcgtacggatttcggctcgggtttttgcacagtgggacagccaaaagcgtgacctgtacatattcaccagccctcaataaaatgttctgccagctggcaaaaacttgtccagttcagctctgggtagattcaacccctccgccagggaccagagtgagagcgatggctatttacaaacaatctcagcatatgacagaggtggtgcgtaggtgtcctcatcatgaacgctgtagtgactctgatgggttggcccctccacaacatctgatccgtgtcgagggcaacctgagagtggaatatctcgacgacagaaacacctttcgtcacagcgtcgttgttccatacgaacctcccgaagtgggtagcgactgcaccacgatccactataattatatgtgcaactctagctgtatgggggggatgaacagacggcctattctcacaattattacattagaagactcaagtggtaatctgctcggaagaaattcctttgaggtgcgggtctgtgcctgccccgggagggaccggcgaaccgaggaagagaatctaagaaagaagggggaaccccaccatgaacttccacccggatcgaccaaaagagccctgcccaacaacacatccagctcccctcaacctaagaagaagcctctggatggtgaatatttcacgcttcaaattaggggacgcgaaaggttcgaaatgttccgggagctgaatgaggcgctggagttgaaggatgcccaggctgggaaagagcccggtggtagcagggctcacagcagccacctgaaaagtaagaagggacagtccaccagtcgacataagaaattgatgtttaagaccgaggggcctgactcggactag

SEQ ID NO: 4102 - DNA, 1032 bp, synthetic construct
  misc_feature 1..1032: note = source = /note="Description of Artificial Sequence: Synthetic coding sequence"
  source 1..1032: mol_type = other DNA
atggaggagccccagagcgaccccagcgtggagccccccctgagccaggagacatttagcgacctgtggaagttgctccctgaaaacaatgttctgagccccttacctagccaagctatggacgatctgatgctttcacccgacgacatagaacagtggttcacagaagaccctgggcctgatgaagctccacgcatgccggaagccgctcctccagttgccccagccccagcagcacccacccctgccgccccagcccctgcgccctcatggcctctgtcctcctcggtgccttcccaaaaaacctaccaagggagctacggttttcggctggggttcctccattccggcacagctaaaagtgtcacgtgtacttattcgcccgccttaaacaagatgttctgtcagctcgctaaaacatgccctgtacaactatgggtggattctaccccgccccctggaacgagggttcgtgcgatggctatctataaacagtcccaacatatgacggaagttgtgcggaggtgcccgcatcatgaacgctgctctgattctgacgggttggccccaccacagcatctgatccgcgtcgagggaaacctgcgagtcgagtaccttgatgaccgcaacacttttcgccacagtgtagtagtgccatatgagcctcctgaggtgggttcggactgcactactatccactacaattatatgtgtaatagctcatgtatggggggcatgaatcggagaccaatcctaacaatcatcaccctggaggattcatcaggtaatcttctcggcaggaattctttcgaggtccgcgtctgcgcttgcccaggtcgagatcgccgaactgaggaagagaacttacgcaagaagggcgaaccacaccacgagttaccacccgggtcaaccaagcgcgcactgcccaacaacacaagcagctccccacagcctaaaaagaaacctttagatggcgaatacttcacgctccagaagacttttcccgcaagacacggcggtagccacctgtag

SEQ ID NO: 4103 - DNA, 1149 bp, synthetic construct
  misc_feature 1..1149: note = source = /note="Description of Artificial Sequence: Synthetic coding sequence"
  source 1..1149: mol_type = other DNA
atggaggagccccagagcgaccccagcgtggagccccccctgagccaggaaacctttagtgacctgtggaagctgctccccgaaaacaatgttttgagccccttaccgtcccaggccatggatgaccttatgttaagccccgacgatatagagcagtggtttactgaagaccccggaccagacgaggctcctcgaatgccggaggctgcccccccagtggccccagcaccagcggctcccactcctgctgccccggcacctgcaccaagctggcccctcagctcatccgttccttcccaaaagacatatcagggatcctatggtttcagactgacatgtacatacagtcctgccctaaacaagatgttttgtcagctggccaagacctgccccgtgcagctgtgggttgatagcacccccccacctggaacccgggttcgtgcaatggcaatctataagcaaagccagcatatgaccgaggtggtcagacggtgcccacatcacgaacgttgctcagactccgacgggcttgcacctccacagcaccttatcagagtggagggcaatctcagagtcgagtatctggacgacaggaacacatttagacactcagttgtggtgccgtacgagccccctgaggtgggttcagactgcacaacaatccactacaactatatgtgtaacagcagttgcatgggaggcatgaaccgcagaccaatactgactatcatcacactggaagacagtagcgggaacttgctggggcggaattcatttgaagttagagtctgcgcttgccccggtagggaccggcggacagaagaagagaacctacgaaaaaaaggtgaaccacaccacgaactgcccccgggctcaacaaaacgggcattgcctaataacaccagcagttctccccagcctaagaagaaaccattggatggagagtactttacactccaaatccggggtcgagagaggttcgagatgttccgggagctgaacgaagcccttgagttaaaggacgcccaggcgggcaaagagcctggcgggagtagggcgcactcatcacacttgaagtcaaagaagggccagtctacaagccgacacaagaagttgatgttcaaaacggaaggacctgactccgactag

SEQ ID NO: 4104 - DNA, 858 bp, synthetic construct
  misc_feature 1..858: note = source = /note="Description of Artificial Sequence: Synthetic coding sequence"
  source 1..858: mol_type = other DNA
atggaggagccccagagcgaccccagcgtggagccccccctgagccaagaaacctttagcgatctgtggaagctcttgcccgagaataatgtcctgagcccactcccctcacaggccatggacgacctaatgttatctccagacgacatcgagcagtggtttacagaggacccagggccggatgaggccccaaggatgccggaagctgccccaccggtggctcccgcacctgccgcgcccacacccgctgcccccgcaccagccccctcgtggccactgtcatcctcggtgccgtcgcaaaagacttatcagggttcttacggcttccggctgggcttcttgcatagcgggacagccaagagcgtaacatgcacctatagccctgcccttaacaagatgttttgtcagctggcaaaaacctgcccagtgcaactatgggtggacagcacccccccccccggtacaagagtgagggccatggctatatataagcagtctcagcatatgacagaagtggtcagacgatgtccccatcatgaacggtgctcagactcagacggcctcgcccctcctcagcacttgatccgcgtggagggaaacctgagggtagagtacctggatgacaggaatacgttcaggcactctgtggtcgtcccctatgaaccacctgaagtcggcagcgactgcaccacaattcactataactatatgtgcaactcttcctgtatgggcggaatgaataggaggcctattctgaccatcatcaccttggaggacagccggcccaggcaggtcgaccatttacgctctggagtacaggacagcctggctaatattgccaagtcccacctgtactag

SEQ ID NO: 4105 - DNA, 273 bp, synthetic construct
  misc_feature 1..273: note = source = /note="Description of Artificial Sequence: Synthetic coding sequence"
  source 1..273: mol_type = other DNA
atgttctgccagctggccaagacctgccccgtgcagctgtgggtggattccacacccccacctgggaccagggtgagggctatggctatctacaaacagtctcaacatatgacagaagtggtccggaggtgcccgcatcacgaacgctgctccgattccgatggcctggcccctccacaacaccttatacgggtagaagggaatttgagggttgaatatttggatgaccgaaacacattcaggcactcagtggtgagtgggcgtagaggctag

SEQ ID NO: 4106 - DNA, 135 bp, synthetic construct
  misc_feature 1..135: note = source = /note="Description of Artificial Sequence: Synthetic coding sequence"
  source 1..135: mol_type = other DNA
cccctgcccagccagcggcggaaccactggatggagaacatcagcccattttctcacctaaagagcaagaaaggccagagcacttctaggcataagaaactcatgttcaaaacggaagggccggattccgactag

SEQ ID NO: 4107 - DNA, 1026 bp, synthetic construct
  misc_feature 1..1026: note = source = /note="Description of Artificial Sequence: Synthetic coding sequence"
  source 1..1026: mol_type = other DNA
atggaggagccccagagcgaccccagcgtggagccccccctgagccaggaaaccttctccgacctgtggaaacttctgccagagaacaacgttttgagccccttgccgagtcaggccatggacgacttgatgctgagtccggatgacatcgagcagtggttcaccgaggaccccggcccagatgaagcgccacgcatgcccgaggccgcgcccccggtcgcccccgctcccgccgcccctacacccgctgccccagctcctgcccccagttggcctctgtcttccagcgtaccatcccagaaaacttaccaggggtcatatggatttagattaggctttctgcatagcggcaccgccaaatccgttacctgtacatacagcccagctctcaataagatgttctgtcagctggcgaagacttgccctgtgcagttgtgggtggattccaccccacctcccgggacgcgggtcagagccatggccatctataaacagtcccagcatatgacagaggttgtgagaaggtgccctcaccatgaaaggtgttccgatagtgacggacttgccccccctcagcacctcatccgcgtcgaggggaaccttcgggtcgagtacttagatgatcggaatacctttagacactctgtagtggtcccgtatgagccaccagaggtggggtctgactgcaccaccatccactataattatatgtgtaacagctcatgcatgggaggcatgaatagacggcccattctgacaatcatcaccttggaagactcttccgggaatctcctgggaaggaattcttttgaagtgagagtctgtgcctgtcctggcagagatcgacgtaccgaagaagaaaacctaagaaaaaagggcgaaccccaccacgaattgccaccaggctcgaccaagcgtgctctgcctaacaataccagcagttccccccagcccaagaagaagccgctcgacggggaatacttcactctccaggatcaaactagctttcagaaagagaactgttag

SEQ ID NO: 4108 - DNA, 1182 bp, synthetic construct
  misc_feature 1..1182: note = source = /note="Description of Artificial Sequence: Synthetic coding sequence"
  source 1..1182: mol_type = other DNA
atggaggagccccagagcgaccccagcgtggagccccccctgagccaggagacatttagtgatctgtggaaactgttaccggagaacaatgtgttatcgcccctgccgtcccaggctatggacgacctcatgttgtcccctgacgatattgaacagtggttcaccgaggatcctggtccagacgaagctccccgcatgccagaagcggccccacctgtggctcccgcacccgcggccccgacaccagccgctccggcacccgcgcctagttggcctctatcatcatccgtcccaagccagaaaacctaccaaggcagctatgggttccgtctgggcttcctgcattctggaaccgccaagtccgttacctgtacgtactctccagcgttgaataaaatgttttgtcaactggctaagacatgtcctgttcagttatgggttgattcaacgccgccccccggtacacgggtccgcgctatggctatatacaagcagagtcagcatatgactgaagttgtcaggcgctgtccacaccacgagagatgttccgatagcgacgggctggcccccccccaacacctgatccgagtagaaggaaatctgcgggttgaatacctggatgatcgaaatacttttcggcattctgttgtggtgccctacgagcccccagaagtgggcagtgattgcaccaccatccattataactatatgtgtaattcatcctgtatgggggggatgaacagaagaccaattctaaccatcattacgttggaggacagtagtggaaacctattaggccgcaactcattcgaagttagggtatgcgcttgtcctgggagagatcgtcgcacagaagaggagaacctgaggaagaaaggggagccacatcacgaattgcctcctgggagcaccaagagagccttacctaataacacttcaagcagtccccaacccaaaaagaaaccccttgatggcgagtacttcactctacagattcgagggagagaaagatttgaaatgtttcgggagctaaacgaggccctggagctgaaggacgcccaggctggtaaggagccgggggggagtcgggcacactcctcacacctgaaatccaaaaaaggacagtctacttctcgacacaaaaaattaatgttcaaaacagaagggccggactctgattag

SEQ ID NO: 4109 - DNA, 1041 bp, synthetic construct
  misc_feature 1..1041: note = source = /note="Description of Artificial Sequence: Synthetic coding sequence"
  source 1..1041: mol_type = other DNA
atggaggagccccagagcgaccccagcgtggagccccccctgagccaggagacattttccgacctgtggaaattgctccctgaaaacaacgtcctgtctcccctcccatctcaagccatggacgacctcatgttgagtccagatgacatcgagcagtggttcaccgaggatcccggaccggatgaagccccaagaatgcccgaagccgcgccacccgtcgccccggcaccagctgcccctacacctgccgcgcccgcccccgccccctcatggccattatctagctccgtcccctctcagaagacgtatcaaggctcctacggtttcaggctgggcttccttcattcgggcacggctaaatctgtgacatgtacctactcacctgctctgaataagatgttctgtcagctggctaaaacctgtcccgtccagctgtgggtagacagtacccctcctccggggacgcgggtgagggctatggccatatataagcaatcacagcacatgaccgaagtcgtaaggagatgcccacaccatgaaagatgctctgattccgacggactagcacctccgcagcatttgatccgggtcgagggtaatctccgtgtggagtacctggacgacaggaacacatttagacacagcgttgtggtgccgtatgagccccctgaggtgggctcagactgtactactattcattataactatatgtgtaatagtagctgcatgggcggtatgaacagacgaccaattctgactattatcacattggaagacagcagcggaaacctgctgggacgtaattcgtttgaggtgcgagtctgtgcttgtcccggacgggaccgaagaacggaagaagaaaatctgagaaagaaaggggagcctcaccacgagctgcctcccggctctacaaagagagcgctgcccaacaacacctcttctagtccgcaaccaaaaaagaagcctctggatggggagtatttcactctccagatgctattagacctccggtggtgttactttctcataaattcttcatag

SEQ ID NO: 4110 - DNA, 387 bp, synthetic construct
  misc_feature 1..387: note = source = /note="Description of Artificial Sequence: Synthetic coding sequence"
  source 1..387: mol_type = other DNA
atggaggagccccagagcgaccccagcgtggagccccccctgagccaggaaaccttctccgacctctggaagctcctgcctgagaataacgtgctatctcccttgcccagccaagctatggacgacctgatgctgtctcccgatgatattgaacagtggtttacagaagaccctgggcccgacgaggcaccacgaatgcccgaggccgcaccaccagtggcccctgcccctgcagcaccaacacctgccgcacctgcacccgcacctagctggcccttaagttcgagtgtgccctcccaaaaaacctatcaaggaagctatggcttccggctaggctttcttcattcaggaaccgcaaaatccgttacttgtacctactccccttag

SEQ ID NO: 4111 - DNA, 498 bp, synthetic construct
  misc_feature 1..498: note = source = /note="Description of Artificial Sequence: Synthetic coding sequence"
  source 1..498: mol_type = other DNA
atggaggagccccagagcgaccccagcgtggagccccccctgagccaggaaacattttctgacctttggaagctgcttccagaaaataatgtcctgagtccgctgccctcgcaggcaatggacgacctgatgctctctccggacgacatcgagcaatggttcactgaagatccaggccccgacgaggcaccgaggatgccggaagcagcaccacctgtcgcgcccgcacccgcggcccccactcccgccgccccagcgccagccccttcttggcccctctcttcttctgtgcccagtcagaaaacctatcaggggtcttatggatttcggctaggatttctccactccggcaccgctaagagtgtcacgtgtacctactctcccgccctgaataagatgttttgccagttagcaaaaacgtgtccagtccagctctgggtggactcaacccctccccccggcacaagagtcagggcgatggccatttacaaacagtag

SEQ ID NO: 4112 - DNA, 600 bp, synthetic construct
  misc_feature 1..600: note = source = /note="Description of Artificial Sequence: Synthetic coding sequence"
  source 1..600: mol_type = other DNA
atgttctgccagctggccaagacctgccccgtgcagctgtgggtggatagcaccccaccacctgggacacgggttcgggctatggctatttataagcagtcacagcacatgaccgaagtggtgcggcggtgtccccatcacgagcggtgctccgattctgacggcctcgcccctccacagcatctcattagagtagagggcaatctacgggtggagtatcttgacgaccggaatacctttcggcactccgtggtagtcccctatgagccccccgaggtcggatcagattgtactacaatccattacaattacatgtgtaatagctcctgcatgggaggcatgaataggagaccgattctgaccataataaccctcgaagacagctctgggaatctgctggggagaaacagtttcgaagtgagagtgtgtgcatgccctgggagagaccgcagaaccgaggaagaaaatcttcgaaagaaaggtgaacctcaccacgagctccctccagggagcactaaaagagccctgcctaacaacacctcgtcttctccacagcccaaaaaaaagcccctggatggcgaatatttcaccttgcaatag

SEQ ID NO: 4113 - DNA, 468 bp, synthetic construct
  misc_feature 1..468: note = source = /note="Description of Artificial Sequence: Synthetic coding sequence"
  source 1..468: mol_type = other DNA
atggaggagccccagagcgaccccagcgtggagccccccctgagccaagaaactttcagcgatctctggaagctcctgcctgaaaacaatgtgctgtactctccggcgctgaacaagatgttctgccagctagcaaaaacatgtccagtgcaactgtgggtcgactctactccacccccggggacacgggtgcgggccatggccatctataagcagagccagcacatgacggaggttgtaaggcggtgccctcaccatgagcggtgcagcgactcagatggcctcgctcccccacaacatctaatacgggtggaaggaaatttacgggttgagtacctggatgacagaaacacatttcggcactccgtggtggtaccctatgaaccccccgaggtaggaagcgattgtactaccattcactataactatatgtgcaattcgtcttgcatggggggtatgaaccgatag

SEQ ID NO: 4114 - DNA, 468 bp, synthetic construct
  misc_feature 1..468: note = source = /note="Description of Artificial Sequence: Synthetic coding sequence"
  source 1..468: mol_type = other DNA
atggaggagccccagagcgaccccagcgtggagccccccctgagccaggagaccttcagtgacttgtggaaactgttacccgagaacaatgttctgtactcaccggccttaaacaaaatgttctgccagctcgccaagacttgtccggtgcagctgtgggtggactctaccccacctccaggaacgagagtccgagccatggctatctacaagcagtcccagcacatgactgaggtggtgaggaggtgccctcaccatgaaaggtgctccgattccgatggcctggctccacctcagcatttgatacgagtggagggcaatctccgggttgagtacctggatgaccgcaatacctttaggcatagcgttgtcgtgccctatgaacctcctgaagtaggctctgactgcacaaccatacattataactacatgtgcaacagcagctgtatgggcggaatgaaccgctag

SEQ ID NO: 4115 - DNA, 1590 bp, synthetic construct
  misc_feature 1..1590: note = source = /note="Description of Artificial Sequence: Synthetic coding sequence"
  source 1..1590: mol_type = other DNA
atgctgctggccgtgctgtactgcctgctgtggagcttccagaccagcgcgggtcacttccctcgggcctgtgtaagttctaaaaatctgatggagaaagaatgctgtccgccttggtctggggaccgaagtccctgcgggcagctctcgggccgcggttcatgccaaaacattcttctttctaatgcccccctgggaccccagttcccttttactggggttgatgaccgtgagtcctggccaagcgtcttctacaaccgcacttgtcaatgctctggcaatttcatgggtttcaactgtgggaattgcaagttcggattctgggggccaaattgcactgagcgtcggcttctggtgcgcagaaatatatttgaccttagtgcgccggagaaagataagttctttgcttatctcaccctggcaaaacatacaatcagctctgactacgtgatacctatcggcacttacgggcagatgaagaacgggtcaacccccatgtttaacgatatcaatatctacgatctattcgtgtggatgcattactacgtgtccatggatgccctgctgggggggtctgaaatttggagagacatcgatttcgcacatgaagcgccagcctttcttccctggcatcgactcttccttttgcggtgggaacaggaaatccagaagctgacaggagatgagaacttcaccattccctactgggactggcgggacgctgaaaagtgtgacatttgtactgacgagtatatgggtggtcagcaccctactaaccccaacttactcagccccgcttcttttttttcatcctggcagatcgtctgctccaggctggaagagtataatagtcatcagtcactctgcaacgggacccccgagggcccattaagacgcaaccctggcaaccacgataaatcacgcacaccacgcttgcccagctccgccgacgtggagttctgcctgtccctcactcagtatgaaagtggctcaatggataaggcagctaatttttcctttagaaatactttggaggggtttgcgtcccctcttaccggtatcgcggacgcctcccagtccagtatgcataacgcgcttcatatctacatgaatggcaccatgtctcaagtgcagggctccgcaaatgaccccatttttttattgcatcatgcctttgtggacagtatctttgagcagtggctgagacggcacaggccacttcaagaggtttacccagaagctaatgcccccattggccataatcgggaaagctacatggtgccctttattcctctgtaccgcaacggggacttcttcattagttcaaaagacttaggatatgattactcttacctccaggactccgatccagatagtttccaggattacatcaaaagctatctggaacaagcctcaagaatctggtcatggttactgggagctgccatggtgggggctgtgttaactgccttgctggctggcctcgtgagcctgctctgccgacataagcgtaaacaattgcctgaggaaaagcagcccctgctgatggaaaaagaagattaccatagcttatatcagtcccatttgtag

SEQ ID NO: 4116 - DNA, 1365 bp, synthetic construct
  misc_feature 1..1365: note = source = /note="Description of Artificial Sequence: Synthetic coding sequence"
  source 1..1365: mol_type = other DNA
atggacccctacatgatccagatgagcagcaagggcaacctgccctccatactggacgtgcacgtgaatgtgggcggacgctctagtgtaccgggaaaaatgaagggacggaaagcacgctggtctgtaaggccctctgacatggccaaaaagacatttaatcccattcgcgccattgtcgataacatgaaagtgaagcccaatcctaataaaaccatgataagcttaagtattggagacccaactgtgttcggcaacctacccaccgaccccgaggtgacccaggctatgaaggatgcattggactcagggaagtacaacggctacgcaccttctatcggcttcctgtcctctcgagaggaaatcgccagctactatcactgtcccgaagctcctctagaagccaaagacgtaatcctgacaagcggatgttcccaagcgatcgacttatgtctcgctgtgctcgccaacccaggacagaatatcctggtgccaagacctggatttagcctctataagaccctggctgagtctatgggtattgaagttaaactgtacaatctacttccggagaagagttgggaaatcgatttaaagcagctggagtatcttatcgatgagaaaactgcttgtctaattgtgaataacccttctaacccatgcggatctgtgtttagcaaaaggcatttgcagaagatactggctgtcgccgcgcggcaatgcgtgccaatcctcgctgacgaaatctacggtgacatggttttttctgattgtaagtacgaacccctagcaaccttgtccacagacgttcccatcctgagctgtggtggcctagccaagcgatggctcgtaccaggatggcggctgggatggatcctgattcacgacaggcgagacatctttggcaacgagattagagacggtttagtgaaattaagtcagcgtatcctcggcccttgcaccatcgtacagggggcactcaagtccattctctgtagaacccctggcgagttctatcacaatacattgtcttttcttaagagcaacgcagacctgtgttacggtgcgctcgctgcaatccccggactgagaccagtacggccaagcggcgccatgtacctgatggtgggcattgagatggagcatttccctgaatttgagaatgatgttgagttcacggagaggctggtcgccgaacagtccgtgcattgtctcccagcaacttgtttcgagtatccaaatttcattagggttgtgattacagtgccagaagtgatgatgctggaggcctgcagcagaattcaggagttctgcgagcagcactatcattgcgcggagggcagccaggaggagtgcgacaaatag

SEQ ID NO: 4117 - DNA, 1602 bp, synthetic construct
  misc_feature 1..1602: note = source = /note="Description of Artificial Sequence: Synthetic coding sequence"
  source 1..1602: mol_type = other DNA
atggccgtggagagccagggcggccggcccctggtgctgggcctgctcctgtgcgtgctaggaccggtcgtgtcacatgctggaaagatcctcttgattcctgttgacggatcgcactggttaagcatgctgggcgccattcagcagctgcagcagcgaggccacgaaatcgtcgtgttggctccggacgcctccctttatatccgagacggcgcattttacaccctgaagacttacccagtacccttccagagagaagacgtcaaggaatcttttgtcagtctcggacataatgtgttcgaaaacgactcatttcttcagagggtgatcaagacatataaaaagatcaagaaagactccgccatgctcctgtccggctgttcacacctgctgcataacaaggagctgatggcctcccttgccgagagcagtttcgacgtgatgctgacagacccctttctcccctgttccccaatagtggcccagtacctaagccttccaacagttttttttctccatgcgctgccttgctctctggaatttgaggcaacccagtgtcctaaccccttttcgtacgtacctcggcctctctctagccacagtgaccacatgacctttttgcagcgagtgaaaaatatgttgatcgctttttcacagaacttcctgtgcgacgtcgtttatagcccttatgcgactctggcatctgagttcctgcagcgcgaggtgaccgtccaggacttactgagttcggcctccgtttggctattcaggagcgacttcgtgaaagattacccacggccaataatgccaaacatggtattcgttggcgggatcaactgtttgcaccagaacccactctctcaggagttcgaggcttatataaacgcctccggagagcacgggatcgtcgtattctccctgggatccatggtgtccgagatcccagaaaagaaagcaatggcgatcgcagacgctctgggcaagatcccacagactgtcctgtggcgctataccggtacccgccccagtaatctcgctaataacaccatacttgtgaagtggttgccccagaacgacctgttaggccaccccatgactagagcttttattactcacgctggctcgcacggagtgtacgaaagcatatgtaatggcgtccccatggtgatgatgcctttattcggagatcagatggacaacgctaaacgtatggaaacaaagggcgctggagtgactctgaacgtcttggaaatgacaagcgaagatctagagaatgcccttaaagctgtcataaacgacaagtcttacaaggaaaatattatgcgcctcagctctctccacaaggaccggcccgtagagccgctggaccttgccgtgttttgggtcgaattcgtgatgagacataagggtgctccacaccttcgccctgctgcccacgacctgacttggtaccagtaccactctctcgacgttatcggtttcttactggctgtcgtcttgaccgtggccttcatcacgttcaagtgttgcgcctatggctaccgaaaatgtctggggaagaaagggagagtgaagaaggcacataagagcaagacacactag

SEQ ID NO: 4118 - DNA, 1335 bp, synthetic construct
  misc_feature 1..1335: note = source = /note="Description of Artificial Sequence: Synthetic coding sequence"
  source 1..1335: mol_type = other DNA
atggccgtggagagccagggcggccggcccctggtgctgggcctgctcctgtgtgtgctcggccctgtggtgtcacacgccggcaagatcttgctgattccggtggatgggtcccactggctgagcatgttgggcgccatacagcagctgcagcagagagggcatgaaatcgtggtgcttgccccggacgcaagtctgtacatccgagatggagctttctacacgctaaagacataccccgtcccctttcagcgagaagatgtgaaagagtcattcgtcagtcttggtcacaacgtgttcgagaacgactctttcctgcagagggtgataaagacgtataaaaagataaaaaaagacagtgcaatgctgctgtccggatgcagtcacttgttacataataaggaactgatggcaagcttagccgaatcttcgtttgatgtgatgcttaccgatcctttcctcccatgttcacctattgtggcccagtatctcagtttgccgaccgtgttcttcctccatgcccttccttgtagcttggaattcgaagcaactcagtgccctaaccctttttcttatgtaccccgcccattgtcttcccacagtgatcacatgaccttcttgcagcgagtaaagaatatgttaatcgcatttagccaaaactttctttgtgatgtggtctattccccctacgcgaccctggccagcgagtttttacagcgtgaagtcacggtgcaggacctccttagttccgctagcgtttggctgtttcgttctgacttcgtaaaggattacccacggccgatcatgccaaatatggtattcgtgggagggatcaattgtctgcatcaaaatcctctctcacaggaattcgaagcctatattaatgctagcggcgagcatgggattgtcgtgttctctctgggaagtatggtgagtgagattcccgaaaagaaggccatggccatcgcagacgctctcggcaaaatcccacagaccgtactttggcggtacaccggtacccggccttcaaatcttgcgaacaatacaattcttgtcaaatggttgccccagaatgatttgctcggtcatccgatgacgcgtgccttcattacccacgccggctcacatggcgtgtacgaaagtatctgtaatggtgtacccatggtaatgatgccattgttcggtgaccagatggataacgcgaaacggatggagaccaaaggtgcaggtgtgacattgaatgtgctggagatgacaagcgaggatttagagaacgccttgaaggcagtgattaatgacaagcggaagaaacagcagtcaggaagacagatgtag

SEQ ID NO: 4119 - DNA, 1593 bp, synthetic construct
  misc_feature 1..1593: note = source = /note="Description of Artificial Sequence: Synthetic coding sequence"
  source 1..1593: mol_type = other DNA
atggcccgggccggctggaccagccccgtgcccctgtgcgtgtgcctcctccttacctgcggctttgcggaggccggaaagctcctggttgtaccaatggacggatcccactggttcacaatgcagtccgttgtcgaaaagcttattctgcggggacatgaagtggtagtggtgatgccagaagtgagttggcagttggagcgaagccttaactgtaccgtgaaaacatatagcacatcttatactctggaagatcagaatcgcgaatttatggtgttcgcacacgcccagtggaaagcacaggcccagtccatattttccctgctgatgtcgagtagcagcgggttcttggacctgtttttctcccattgccgcagcctctttaacgaccgcaagttggtcgaatatttaaaagagtccagcttcgacgccgtgtttctcgacccatttgatacctgcggtctgatcgtggccaagtacttttccctgccctccgttgtctttactagaggtattttctgccaccacctagaagagggcgctcaatgtccggcgcccctatcttatgtgcccaatgatttgttgggattttccgacgccatgaccttcaaagaaagggtgtggaatcatattgtgcatttagaggatcatctgttctgccagtacctgttccgtaacgcattagagattgctagcgagattttacaaacgccggttaccgcctatgacctttacagccatacaagcatatggcttctccgaactgattttgtgctggattaccccaagccggtgatgcccaacatgatttttatcggcggaattaactgccatcagggaaaaccattgccaatggaattcgaggcatatattaacgcgagcggggaacatggtatcgttgtcttctctctcgggtcaatggtttctgaaatccctgaaaaaaaggcaatggccattgctgacgctttagggaagatcccccaaactgtcctatggagatacacggggacacgcccctccaatctcgcaaataacaccattcttgtgaaatggctgccgcaaaacgatctgctgggacatcctatgaccagggccttcatcacgcacgcagggtcccatggggtgtacgaatcgatctgcaacggtgtgcccatggtgatgatgcctctgttcggggaccagatggataacgcgaagaggatggaaactaagggagctggcgttaccctaaacgtgttagaaatgacaagcgaggacctcgaaaacgctttgaaggccgtcattaatgacaagtcctataaggagaatatcatgcggctgtcttctctccacaaagataggccggtagaacctttggatctggctgtattttgggtagaattcgtcatgcggcacaaaggggcaccacacctccgccctgcagcccatgacctcacttggtaccagtatcattccctcgatgtgatcggtttcttgttagccgtggttttaaccgtagcattcattacattcaagtgttgcgcgtatggttatcgtaagtgtttgggtaaaaagggtcgggtcaagaaggcgcataaaagcaagacccactag

SEQ ID NO: 4120 - DNA, 1605 bp, synthetic construct
  misc_feature 1..1605: note = source = /note="Description of Artificial Sequence: Synthetic coding sequence"
  source 1..1605: mol_type = other DNA
atggccaccggcctgcaggtgcccctgccctggctggccaccggccttctcctgcttctgtccgtacagccctgggctgaaagcggcaaagtgttggtggtgccaatcgatgggtcccactggctttcaatgagagaagtccttcgtgaactccacgcaaggggccaccaggcggtggtgctcacaccagaagtaaatatgcacataaaagaggagaatttttttactttgactacctatgccatttcatggacccaagacgagtttgatagacatgtcctcggtcacactcagctctactttgaaaccgagcacttccttaaaaagtttttccggagtatggccatgctcaacaacatgtcgcttgtgtaccacaggtcatgcgtggaacttcttcacaacgaagccctcattaggcacctcaacgccacatcctttgatgtggtcctgacagaccccgttaatctgtgcgccgccgtactggccaaatatctttccatccccacagtcttcttcctgagaaatattccctgcgacctagattttaagggcactcagtgccctaacccatcttcctacattccaagactgctcacaactaacagtgaccacatgacttttatgcagcgcgtgaagaacatgctgtatcctttagccctcagctacatttgtcacgctttcagtgccccctacgcctctttagcctcggaactgttccagcgcgaagtgtctgtggtggacatcctatctcatgcatctgtgtggctctttagaggggactttgtgatggactatccaaggccaattatgccgaatatggtgttcatagggggaattaattgcgctaaccgcaagccgctctcacaagaattcgaggcctatattaacgctagcggtgagcatggaatcgttgtattcagcctcggctctatggtcagcgaaatccccgagaagaaagctatggctattgccgacgccctgggaaaaatacctcagaccgtactgtggcggtatacaggaacacgcccgagcaacttagctaacaacactatcctcgtgaagtggctcccacaaaacgacctgctgggacatccgatgacgcgagcctttattacccacgcagggtcacatggggtatacgaatccatatgcaacggggtccccatggtgatgatgccgttatttggcgatcaaatggataatgctaagcgcatggagaccaagggcgccggagtcacgctgaacgttttggagatgacatccgaggacctggaaaatgcattgaaggcggtgattaatgataagtcttataaggagaatatcatgcgcctctcttccctccacaaggaccgtccagtcgagcctctagatctggcagttttctgggtcgagttcgtgatgaggcataagggtgccccccatctacggcccgctgctcatgatttaacctggtatcagtaccatagtttggatgtcatcggatttctgctagctgtcgtgctgacggtagcatttataactttcaagtgctgtgcctatggctacaggaagtgcctggggaaaaagggaagagtgaagaaggcccataagtctaagacacactag

SEQ ID NO: 4121 - DNA, 1470 bp, synthetic construct
  misc_feature 1..1470: note = source = /note="Description of Artificial Sequence: Synthetic coding sequence"
  source 1..1470: mol_type = other DNA
atggccggccagcgggtgctgctgctggtgggcttcctgctgcccggggtcctgttaagtgaagcagctaaaatcctgacaatttccaccgtcgactttaaaaaggaggagaagagctatcaggtgattagctggctcgcccccgaagaccaccagcgagagttcaagaagagtttcgatttttttctggaggagacgctgggcggacgcggcaaatttgagaatcttttgaatgtcctcgagtacctcgctctccaatgttcacattttctaaataggaaggatatcatggattcacttaagaacgaaaacttcgatatggttattgtggagaccttcgactattgccctttcttaatcgctgagaaactgggcaaacccttcgttgcaattctgtccacatcattcggctccctcgagttcggactccccatccccttgtcctatgtccctgtgtttagatccttgctgaccgatcacatggacttttgggggcgcgttaaaaacttccttatgttctttagcttctgtaggcgtcaacagcacatgcagtctacattcgataacaccattaaggagcacttcactgagggatcgagacctgttctgagccatttgttactaaaagctgagctttggtttatcaattccgatttcgcatttgactttgcccggccgttgttgcctaacacagtgtacgttggaggtctgatggaaaaacccattaaacctgtcccgcaggacctggagaacttcattgcgaagtttggagactccgggtttgtattggtgaccttggggtccatggtgaacacctgtcagaatcctgaaattttcaaagagatgaacaacgcctttgctcatttgccccagggtgtcatctggaaatgccagtgcagccactggccaaaagatgtgcacctcgccgccaatgtgaagattgtcgactggctgccccagagtgatctactggcacatccctcaatcaggctcttcgttacccatggtgggcagaacagtataatggaggctatccaacatggcgtgcctatggtcggcattcccctgtttggtgatcagcctgagaacatggtacgcgtggaggcaaaaaaatttggcgtcagtattcagcttaagaaactgaaggccgagacattagccctcaagatgaagcagatcatggaggataagcgctataagtctgccgcggtagcggctagtgtgattctccggtctcatccactctcccccacacaacggttagtcggctggatcgaccacgtgttgcagacaggtggggctacacacttaaaaccatacgttttccagcaaccttggcacgagcagtatctacttgatgtcttcgtgtttctgctgggcctaacattagggaccctctggctgtgtggaaagctgctcggaatggccgtgtggtggctccgaggcgcacgcaaggtcaaagaaacatag

SEQ ID NO: 4122 - DNA, 1572 bp, synthetic construct
  misc_feature 1..1572: note = source = /note="Description of Artificial Sequence: Synthetic coding sequence"
  source 1..1572: mol_type = other DNA
atggccggccagcgggtgctgctgctggtgggcttcctgctgcccggagtccttctgtcggaagccgccaagattctgacaatttcaaccgtgggcggatctcactatttgctcatggacagagtgtcacagattctccaggatcatgggcacaatgtgacaatgttgaaccataaaagagggccgttcatgccagacttcaagaaagaggaaaagtcataccaggtgatctcatggctcgccccggaagatcaccagcgtgagttcaagaagtcttttgacttctttttggaagagacccttggcgggcgcggaaagttcgagaatcttctgaatgttctagaataccttgcactgcaatgctctcacttcctgaatcgcaaagacattatggattcactgaaaaacgagaacttcgacatggtgattgtggaaaccttcgattattgcccatttctgatcgctgaaaagcttggcaaaccgtttgtcgccattttgagcacttctttcgggagcctggaattcggcttgcccatcccccttagctacgtaccagtgtttaggagcctcctcaccgaccatatggatttctggggtcgcgtgaaaaacttcctcatgtttttctcattctgtagacgacagcagcacatgcagtccactttcgacaatacgatcaaagaacatttcacagaggggtctaggccagttttgagccacctgctcttgaaagctgagttgtggttcataaattcagactttgcctttgactttgctcgtccactactgccaaacaccgtatacgtgggaggattgatggagaagcccataaagcctgtgccgcaggacctggagaatttcatcgcaaagtttggagattcaggatttgttcttgttacgctcggaagtatggttaatacttgccagaaccctgaaatctttaaggagatgaataacgcctttgcccacctgccccagggcgtaatctggaagtgtcagtgtagccattggcccaaggatgtgcacttggcggcaaatgtgaagattgttgattggcttccccaatccgacctgctggcacatcccagcataaggttatttgttacgcacggggggcagaattccattatggaggccattcagcacggtgttcctatggtcggaatcccactgttcggagaccagccggagaatatggtgagggttgaggcaaagaagtttggagtgtcgattcagctgaagaaactcaaagcagaaacactcgccctcaaaatgaagcagatcatggaagacaagcgatataaaagcgctgctgtagccgccagcgttatcctgcggagccatccactgtctcccacgcagaggctggtggggtggatcgatcatgtgttgcagaccggcggagccacccatctgaaaccatacgtcttccaacagccgtggcatgagcagtatctcttggacgtctttgtgtttttgcttggcctgactcttggtactctgtggctatgtggaaagctccttggcatggctgtatggtggctgcgaggagcacgcaaggtgaaagaaacctag

SEQ ID NO: 4123 - DNA, 417 bp, synthetic construct
  misc_feature 1..417: note = source = /note="Description of Artificial Sequence: Synthetic coding sequence"
  source 1..417: mol_type = other DNA
atggccggccagcgggtgctgctgctggtgggcttcctgctgcccggcgtgctactgagcgaggctgccaaaatcttgactattagcacagtgggtggttctcattatctgctgatggacagagtgtctcagattctccaggatcacggtcataatgtgacaatgctgaatcacaagagaggtcctttcatgcctgacttcaagaaagaggagaaatcataccaggtgatctcttggctcgcccccgaggaccaccaacgggaatttaaaaaatccttcgactttttcctcgaggaaacactgggtggccgggggaaatttgagaacctccttaatgtactcgagtatttggccttgcagtgctctcactttttgaatagaaaggatattatggactccctcaagaatgagaactag

SEQ ID NO: 4124 - DNA, 666 bp, synthetic construct
  misc_feature 1..666: note = source = /note="Description of Artificial Sequence: Synthetic coding sequence"
  source 1..666: mol_type = other DNA
atggtgaacacctgccagaaccccgagatcttcaaggagatgaacaacgccttcgcccaccttccacagggtgtaatctggaaatgccagtgttcacattggcccaaggatgttcacctcgctgccaatgtcaagattgtggattggctgccccagagcgaccttttagcgcacccctccatccgcttgtttgttacccacggcggacagaactccatcatggaagccatccagcacggtgtgcctatggtggggatacccctgtttggtgatcagccagagaacatggttcgggtggaagccaaaaaattcggggtgtcgatccaacttaagaagctcaaggctgaaactctcgccttgaagatgaaacagatcatggaggataagcgatacaaatcagccgctgtggcagcctcagttatccttcggtctcacccattatccccaacccagagactggtgggatggatagatcacgtgcttcagacaggcggggcaacacatttgaaaccctacgtgttccaacagccttggcacgaacagtacctgcttgacgtgtttgtgttcttgttaggattgaccctcggaactctatggttatgtggcaagctcctcggcatggccgtttggtggttaagaggcgcacggaaggtcaaagagacatag

SEQ ID NO: 4125 - DNA, 1086 bp, synthetic construct
  misc_feature 1..1086: note = source = /note="Description of Artificial Sequence: Synthetic coding sequence"
  source 1..1086: mol_type = other DNA
atggccatgaactacaacgccaaggacgaggtggacggcggccccccatgtgctcctggcggaactgcaaagacccgcagaccagacaacaccgctttcaagcaacagaggctccctgcatggcagcctatcctgactgcaggcaccgtgctcccaatcttcttcatcatcggactaatattcatccccattggaattggcatctttgtgacctcgaataacatccgggagatcgagatcgactatactggaactgaacctagcagtccatgcaataaatgcctctctcccgacgttaccccatgcttctgcaccattaacttcacactggagaaaagcttcgagggcaacgtgtttatgtactatggtttgtccaacttttatcagaatcataggcgctatgtcaaaagcagggatgactcccagcttaatggcgacagtagcgccttgttaaacccgtcaaaagaatgtgaaccttatagacgaaacgaagacaagcccatagcaccttgtggcgctatcgccaactccatgtttaatgatacacttgagttattcttgataggcaacgactcatatccgatccccattgcattaaagaaaaaggggatcgcctggtggacagacaagaacgtgaagtttcgcaatccacctgggggagataatcttgaggagcgctttaagggaaccaccaagccagttaactggttgaagccagtctatatgctggactctgaccccgacaataatggcttcataaatgaggactttattgtgtggatgcgcaccgctgctctgcccaccttccggaagttgtatcgtttaattgagaggaaatccgacttgcaccccactctccccgccggaagatatagtctgaacgtcacatacaattatccagtgcactattttgatgggcgcaagagaatgatcctgtcaacaattagttggatgggcggaaaaaacccttttctgggtatcgcatacatcgccgttgggtcaatctcatttttactgggagtagtgcttttagtcattaatcacaagtatagaaattcctcaaatacggccgatatcacaatctag

SEQ ID NO: 4126 - DNA, 954 bp, synthetic construct
  misc_feature 1..954: note = source = /note="Description of Artificial Sequence: Synthetic coding sequence"
  source 1..954: mol_type = other DNA
ctgaccgaccggcagaccgacaccgcccccagccccagctaccacctgctgccgggacgcaggcggacagtggatgcagcagcttctcggggacaggggcccgaaccagctccgggaggaggagtcgagggagttggagcccgaggcgtcgccttgaaattgtttgtgcagcttctgggctgctcacggttcggtggggcagtagtgagagccggcgaagccgagcccagcggtgcagccagaagtgcaagttccgggcgcgaggagccccaacccgaggagggtgaggaggaggaggagaaggaagaagagagggggccacagtggaggttaggagcccggaaacccggaagctggactggagaggcagccgtctgtgccgacagtgcccccgcggctcgggctcctcaggcattagcaagggcctccggccgtggagggcgtgtggcccggcggggggctgaggaatctggccctccccactcgccatctaggcgcgggagcgcctcccgagcagggcccggtagagctagcgagaccatgaatttcttactctcttgggtgcattggtctctggctctcctgttgtacctccaccacgcaaaatggagccaggctgcacccatggccgaaggcggcggtcaaaaccaccatgaagtggtaaagttcatggatgtgtatcagagaagttactgccacccaattgagactctcgtggacatctttcaggaatatccagatgagatcgaatacatattcaaaccaagctgcgttccccttatgcgctgcggcggatgttgcaatgacgaaggattggaatgtgttcccaccgaagagtctaacataaccatgcagattatgcggatcaaacctcatcaaggccaacacattggggaaatgtcctttctccagcataacaagtgtgagtgccggtgcgataaaccgcggcgttag

SEQ ID NO: 4127 - DNA, 1239 bp, synthetic construct
  misc_feature 1..1239: note = source = /note="Description of Artificial Sequence: Synthetic coding sequence"
  source 1..1239: mol_type = other DNA
ctgaccgaccggcagaccgacaccgcccccagccccagctaccacctcctaccagggcgcaggagaaccgtggatgcagctgccagtcggggacagggaccagagcctgccccgggaggaggagtggagggagtcggggccagaggcgtcgccttaaaactgtttgtacagctcttgggatgctctaggttcggaggggctgtggttagggcaggggaagccgagccttccggcgcagcaaggagtgcctccagcggccgcgaagaaccacagcctgaggaaggtgaggaggaggaagagaaggaggaagagagaggcccccagtggcggctcggcgccaggaagcccggaagttggactggggaagcagcagtctgcgcagactctgcgcctgcagcccgagcgcctcaggccctggctcgggcgtctgggagaggaggcagggtagcacgcagaggcgccgaagaaagcggccccccccactcaccctctcggagaggctctgcgagcagagcaggacccggccgtgcctctgaaacaatgaatttcctccttagttgggtgcactggagcctggctctactcctctacctgcatcacgccaaatggtctcaggctgctccaatggctgaaggaggcggccagaaccaccacgaggtggtgaaattcatggatgtataccagcggagttactgccacccaatagagactctcgtagacatatttcaggagtacccagacgagattgaatatatcttcaagcctagctgtgtgccgttaatgcggtgtggggggtgttgcaatgacgagggactggagtgcgtcccaaccgaggagagcaacataaccatgcagatcatgcgcatcaagccgcaccagggccaacacatcggtgagatgtctttcctgcagcacaacaagtgcgaatgtagacccaagaaggacagggccagacaggaaaagaaatccgtacgtggaaagggcaaaggacagaaacgtaagagaaagaagtccagatataaaagctggagcgtttatgttggagcgagatgctgtctgatgccgtggagtctgcccgggccacacccttgcggcccctgctccgagagacgaaaacacttgtttgtgcaagatcctcagacttgtaaatgtagctgtaaaaacactgacagccggtgtaaagcaaggcagctcgaactgaacgaacgcacatgtcgatgtgataagcctaggcggtag

SEQ ID NO: 4128 - DNA, 984 bp, synthetic construct
  misc_feature 1..984: note = source = /note="Description of Artificial Sequence: Synthetic coding sequence"
  source 1..984: mol_type = other DNA
ctgaccgaccggcagaccgacaccgcccccagccccagctaccacctgctgcctgggaggagaagaacggtcgatgctgcggcgtcccgggggcaaggaccggagcctgctcctggcggtggagtggagggtgttggagccaggggtgtggcactcaagctattcgttcaactgcttgggtgtagccggttcggcggagccgttgttagggctggagaggctgagccctccggcgctgcaaggagtgcctcttctggcagagaggagccgcagcctgaagagggagaggaggaagaggaaaaggaagaagaacgcgggcctcaatggcgactgggggcaaggaagccggggtcgtggactggagaggcagccgtctgcgcagactcggctccagctgcccgtgcgccccaggcactcgcccgtgcgagtggcaggggaggccgagtcgctcgccggggtgccgaagaatccgggccgccccacagcccttcacggcgcggtagtgcgagccgtgctgggccaggacgagcatcagagaccatgaactttctgctctcttgggttcactggtcccttgcgctcttactctacctgcatcacgctaagtggtctcaggctgcacccatggccgaggggggcggtcagaatcaccatgaggtggttaagttcatggacgtctaccaacgcagttactgtcatccaattgagaccttggtcgacattttccaggagtaccccgacgagatagaatacatcttcaaacccagttgcgtccctctgatgcggtgcggggggtgctgcaatgatgaaggactggagtgtgtgccgaccgaagaatcaaatattaccatgcaaattatgcgtatcaagccccaccagggacagcatattggtgagatgagcttcctccagcataacaagtgtgagtgtcgtccgaagaaagatcgggcacggcaggagaaatgtgacaaaccccggcggtag

SEQ ID NO: 4129 - DNA, 1116 bp, synthetic construct
  misc_feature 1..1116: note = source = /note="Description of Artificial Sequence: Synthetic coding sequence"
  source 1..1116: mol_type = other DNA
ctgaccgaccggcagaccgacaccgcccccagccccagctaccacctgttgccgggccgccgtagaacggtagacgcagctgccagccgcgggcaggggcccgagccagctccaggcggcggggtcgaaggagtgggagcaagaggtgttgcacttaagttgtttgtacagttgctcgggtgtagcagatttggtggggctgtggtcagagccggcgaagccgagccctcgggcgcagccaggtcagctagcagcgggagagaggagccccagccggaggagggcgaggaggaggaagagaaagaggaagaacggggcccccagtggcgcttgggagccagaaaacctgggagctggaccggcgaggcggcagtatgcgctgactcggcacctgccgccagggctcctcaggcacttgccagggcatcagggagagggggccgggtggcccgaaggggtgctgaggaatctggacctcctcactccccgagccggagagggtcagcatcccgagcaggccctggtcgcgctagcgagaccatgaacttccttctctcatgggtacactggtccctggctttacttttgtatcttcaccatgcgaagtggagccaggccgccccaatggcagagggaggaggacagaaccaccacgaagttgtcaaatttatggatgtttatcagcggagttactgtcaccccatagaaaccctggtggatatattccaggagtatccagacgagattgagtatatcttcaagccctcatgtgtgcccctcatgaggtgcggtggatgctgcaacgatgaggggctagaatgtgtgcccacggaagagtctaacataactatgcagatcatgcggatcaagcctcaccagggacagcacatcggggaaatgagctttctgcagcataacaaatgtgagtgccggcccaaaaaagacagagcaaggcaggaaaatccgtgcggaccttgtagtgagagacggaagcacctcttcgtccaggatccacagacatgtaaatgtagctgcaaaaacacagattcccgttgcaaagcccgccaactggaactgaacgagcggacatgtaggtgcgacaaacctcgcaggtag

SEQ ID NO: 4130 - DNA, 444 bp, synthetic construct
  misc_feature 1..444: note = source = /note="Description of Artificial Sequence: Synthetic coding sequence"
  source 1..444: mol_type = other DNA
atgaacttcctgctgagctgggtgcactggagcctggccctgctgctctatctccaccatgccaaatggtctcaggccgcccctatggctgagggtggagggcaaaatcaccacgaggtggttaagtttatggacgtgtaccagaggtcgtactgccaccccatagaaaccctggtcgatatctttcaggaatacccggatgaaattgagtacatttttaagccctcttgcgtgcccctaatgcgctgcggcggatgttgcaacgatgaaggccttgagtgtgtccctactgaagagtctaacatcacgatgcagataatgagaatcaagccccaccaaggacagcacattggggaaatgtccttcttacaacacaataaatgtgagtgcaggcccaagaaagaccgggcgcgtcaagaaaaatgcgataagcctaggaggtag

SEQ ID NO: 4131 - DNA, 1170 bp, synthetic construct
  misc_feature 1..1170: note = source = /note="Description of Artificial Sequence: Synthetic coding sequence"
  source 1..1170: mol_type = other DNA
ctgaccgaccggcagaccgacaccgcccccagccccagctaccaccttctgccggggagaagacgtactgtagacgcggccgctagccggggccaagggcccgaaccagccccgggcggaggggtggagggcgtgggggcaagaggggtggctttgaaacttttcgttcagctgctgggctgcagccggtttgggggagccgtcgtgcgggccggcgaggctgaacccagtggggccgcccgcagcgcgagctctggcagggaggagcctcagcccgaggagggtgaggaggaagaggagaaggaggaagagcgggggccacagtggcggctgggagcccgaaagcctggatcctggacaggggaggccgccgtgtgtgcagatagtgcacctgcagcacgagctccccaagctctggccagagcctcagggcgtggaggacgcgtagcccggaggggggccgaggagtctggacccccccactcgccatcaagacgcgggtccgcatcgagggcgggtcccggaagagcgtctgaaaccatgaatttcctcctcagctgggtgcattggtctctggctttactcctgtacctacatcacgccaagtggtcacaggccgcccccatggcggaagggggaggccagaatcaccatgaagtggtgaaattcatggatgtgtaccagagatcctactgtcacccaattgaaaccttggttgatatctttcaggagtacccagacgaaatcgagtacattttcaaaccaagttgcgtgccattaatgagatgtggaggctgctgcaatgatgaaggcctcgaatgcgtgcccacagaggagagcaacattacaatgcaaattatgagaatcaaacctcaccaaggacagcatatcggcgagatgtcctttttgcagcataacaaatgcgagtgtaggcccaagaaggatagagccaggcaggagaaaaagagtgtgagaggaaaggggaaaggacagaagcggaagcgtaaaaaatcccgaccatgtgggccttgctccgaacggagaaagcatctcttcgttcaggatccgcaaacttgcaaatgtagctgcaaaaacaccgattcccggtgtaaggctagacagctggagctgaacgagcgcacctgtcgctgtgacaagccgcggaggtag

SEQ ID NO: 4132 - DNA, 1065 bp, synthetic construct
  misc_feature 1..1065: note = source = /note="Description of Artificial Sequence: Synthetic coding sequence"
  source 1..1065: mol_type = other DNA
ctgaccgaccggcagaccgacaccgcccccagccccagctaccacctcctccctggacgcaggagaaccgtggacgctgcagccagcagaggccaggggccagagccagcgccgggcgggggagtggaaggggtgggagcaaggggggtggcactgaagctgttcgttcagcttttaggctgcagccgcttcggtggcgccgttgtgagagctggcgaagcagagccgagtggggcagcccggagtgcctcctccgggcgtgaagaacctcagccagaagagggggaagaggaagaagagaaagaggaagagcgcggacctcaatggcgcctgggcgcaagaaaacctgggagctggacaggcgaggcagccgtgtgcgctgattcagctccggcagctcgggctccccaggcactagcacgcgcatccgggcgcggtggaagagtcgcaagacgcggtgcggaggaatctggaccaccccacagtccgtcacggcgaggcagcgccagtcgcgccggccctggccgcgctagcgaaactatgaacttcctcttgtcctgggttcattggtcactggcactgctcttgtacctgcaccatgcaaagtggagccaggccgctcccatggcagagggcggagggcagaatcatcacgaggtcgtcaaattcatggatgtgtaccagcggagctactgccatcccatcgagactctggttgacatctttcaagaatacccagacgaaatcgagtatatttttaaacctagctgtgtccccctgatgagatgcggtgggtgctgtaacgatgagggtctggagtgtgtacctaccgaagaatctaatatcaccatgcagataatgcgcatcaagccgcaccaggggcagcacataggcgaaatgtcgtttctccagcataacaaatgcgagtgtagacccaagaaggatcgggccaggcaggaaaacccctgtggaccatgctcagagcgtcggaagcacctgtttgtgcaggacccacaaacatgtaaatgcagttgcaaaaatactgatagccgatgcaaaatgtag

SEQ ID NO: 4133 - DNA, 1188 bp, synthetic construct
  misc_feature 1..1188: note = source = /note="Description of Artificial Sequence: Synthetic coding sequence"
  source 1..1188: mol_type = other DNA
ctgaccgaccggcagaccgacaccgcccccagccccagctaccacctcctgcctgggcggcgcaggactgtggatgcggctgcatcaagggggcagggaccagagccggcacctggcggcggggtggaaggcgtgggggcccggggggtggccctcaagctgttcgtccagctgctgggttgctcccgcttcgggggtgccgttgttcgcgcaggggaggctgaaccatccggagcagcaaggtcagcttcgtcaggcagagaggaaccacagcctgaggagggggaagaggaggaagaaaaggaagaagagcggggtcctcagtggcgcctaggcgctagaaaacccggtagttggacaggcgaggccgcagtgtgtgctgatagcgcccctgccgcaagggccccacaggctctcgctcgtgcttcagggaggggcggaagagtcgctaggagaggtgcagaagaaagtggcccgcctcactcgccttcccggagaggatccgcatccagagctggccccggtagggccagcgaaacgatgaactttttattgagctgggtacactggtctctggcgctactgctgtaccttcaccatgctaagtggtctcaggctgcccctatggccgagggaggcggacagaaccaccatgaggtagtcaaattcatggatgtgtaccagaggagctactgccaccctatagagacgctagttgacatcttccaggaataccccgacgaaatcgagtatattttcaaaccttcgtgcgtgcccttgatgcgctgcgggggctgttgcaacgatgaggggctagagtgtgtacccaccgaggaatcaaatattaccatgcagatcatgcggatcaagcctcatcagggccagcatatcggggagatgagctttcttcagcataacaaatgtgagtgccggcctaaaaaagatagggcccgccaggagaagaaatccgtgaggggaaaagggaaggggcagaagaggaaacgaaaaaagagcaggtataagtcctggtccgtcccatgcggaccttgttcagaacggcgcaaacacttgtttgtccaggacccccagacctgtaaatgctcttgcaaaaacactgatagtcgatgtaaagctagacagctcgagttaaatgaaagaacctgcaggtgcgataagccacggaggtag

SEQ ID NO: 4134 - DNA, 414 bp, synthetic construct
  misc_feature 1..414: note = source = /note="Description of Artificial Sequence: Synthetic coding sequence"
  source 1..414: mol_type = other DNA
atgaacttcctgctgagctgggtgcactggagcctggccctgctgctgtatttacaccatgccaaatggtctcaggctgccccgatggccgaaggcgggggtcaaaatcaccacgaagttgtcaaattcatggacgtctaccagcgcagctattgccatcccattgaaactctggtggacatattccaggaataccccgacgaaatcgaatacatcttcaaacccagttgtgtcccactgatgaggtgtggggggtgctgcaacgacgaggggttagaatgcgttcctacagaagaatctaatatcaccatgcagatcatgcggataaagcctcaccaaggtcaacacatcggagagatgtctttcctccagcacaataagtgcgaatgtcgctgtgataaaccacgccgctag

SEQ ID NO: 4135 - DNA, 1116 bp, synthetic construct
  misc_feature 1..1116: note = source = /note="Description of Artificial Sequence: Synthetic coding sequence"
  source 1..1116: mol_type = other DNA
ctgaccgaccggcagaccgacaccgcccccagccccagctaccacctacttccaggccgccggcggaccgtggatgcagcggcgagccgcggtcagggcccagaacccgccccgggaggaggcgtagagggcgtgggcgccaggggggtggctcttaagctgtttgtgcagcttctgggatgcagtaggtttggcggagcggtggtcagagcaggagaggcagagcccagcggagccgcccgctcagcaagctctggcagagaggagccgcagcctgaagagggtgaagaggaggaagagaaggaggaggaaagaggaccgcagtggcgtttaggagcgcggaagcccggcagctggaccggagaggctgccgtctgtgccgattcagcgcccgcagcccgggcccctcaggctcttgctcgcgcgtccggccgaggtggcagagtcgctaggagaggagccgaagaatccgggccaccacactccccctccaggaggggttcagcctcgagagccggacctgggcgtgcatctgaaacaatgaactttctcttgagttgggtgcactggtcgctagctcttctgctgtatttgcatcatgcaaaatggagccaggcagctccgatggctgaaggcggtggacagaaccatcacgaggtcgttaagtttatggatgtctaccaaagaagctattgtcatcctatagagaccctcgtggatatttttcaagagtatcccgatgaaattgagtatatttttaagccatcttgcgtacctctgatgcgctgcggtgggtgttgtaatgacgagggcctggagtgtgtacccaccgaagaatcgaatatcactatgcagataatgcgtattaaaccacaccagggccagcacatcggagaaatgtcattcctccagcacaacaaatgcgaatgccgtcctaagaaggaccgcgcccgtcaggaaaatccctgcggaccttgctcggagcgtcgcaagcacttattcgtgcaggatccccagacctgcaaatgtagctgcaagaataccgactcccggtgtaaggcgcggcagctggaacttaatgagcgcacctgtcgcagtcttacccgaaaggactag

SEQ ID NO: 4136 - DNA, 630 bp, synthetic construct
  misc_feature 1..630: note = source = /note="Description of Artificial Sequence: Synthetic coding sequence"
  source 1..630: mol_type = other DNA
atgaacttcctgctgagctgggtgcactggagcctggccctgctgctgtatctccatcatgccaaatggagtcaggcagcccctatggcagaggggggcggccagaaccaccatgaggttgtcaagttcatggatgtgtaccagcgctcttattgccatcctattgagactctcgtcgatattttccaggagtacccagatgagattgaatacatttttaaacccagttgtgtccctttgatgcgctgcggagggtgttgcaatgacgagggtcttgaatgcgtgcccactgaggaatctaacatcacaatgcaaataatgcgaattaagcctcatcagggacagcatataggcgagatgagcttcctccaacacaacaaatgcgaatgccggccaaagaaagaccgggcccgacaggaaaagaagtctgtgcggggaaagggcaaagggcagaagagaaaacggaaaaaatcgaggccttgcggcccctgttcggagcgccggaagcacctctttgtccaggacccacagacatgtaagtgctcatgcaaaaacaccgactcaaggtgcaaggcccggcaattggaactgaacgaaaggacctgccggtgtgacaagcctcgccggtag

SEQ ID NO: 4137 - DNA, 576 bp, synthetic construct
  misc_feature 1..576: note = source = /note="Description of Artificial Sequence: Synthetic coding sequence"
  source 1..576: mol_type = other DNA
atgaacttcctgctgagctgggtgcactggagcctggccctgctgttatatctgcatcatgcgaagtggtcacaggctgcccctatggctgaagggggtggccaaaatcaccacgaggttgtgaaatttatggacgtctatcaacggtcatactgccacccgattgagacactcgtcgatatattccaggaatatcccgacgagatcgagtacatctttaagcccagctgtgttccgctcatgaggtgcggggggtgctgcaacgatgagggccttgagtgcgttcctacagaggaatctaacatcaccatgcagatcatgcgcattaagccccatcaggggcagcatataggtgaaatgagcttcctccaacacaacaagtgcgagtgtcggcctaaaaaggatagagcaaggcaggagaacccttgcggtccctgcagcgaacggaggaagcatttgttcgttcaggatcctcaaacatgtaaatgtagctgcaaaaataccgattcccggtgcaaggctcgccagttggagctgaacgaaaggacttgtaggtcgctgacccggaaggactag

SEQ ID NO: 4138 - DNA, 972 bp, synthetic construct
  misc_feature 1..972: note = source = /note="Description of Artificial Sequence: Synthetic coding sequence"
  source 1..972: mol_type = other DNA
tgacggggccagggccccgagcccgcccccggcggcggcgtggagggcgtaggtgcgcggggggtggcactgaagcttttcgtccaactcctcggctgctcaaggttcggaggagctgtggtcagggctggcgaggccgaaccttctggagccgccagatctgcttctagtggacgggaggaaccacagccagaggagggtgaggaagaggaagaaaaagaagaggaacgggggccgcaatggcgcctgggtgcacgaaagcctgggagctggacaggcgaagccgcagtgtgcgccgactctgcccctgctgcgcgcgctcctcaggcattagcaagggcctccggccggggaggacgggttgccaggcgcggcgcagaagaaagtggaccgccccactctccttccaggcggggatctgcctccagagctggccctggtagagcatcagagacaatgaactttcttctgagctgggtgcattggtccctagcgcttctgctgtatctccaccatgccaagtggtctcaggctgcacccatggccgaggggggaggccagaaccatcatgaggtcgtgaagtttatggacgtctatcagaggagctattgccacccaattgagacactggttgacattttccaggaatacccggatgagatcgagtacatctttaaaccttcttgtgttccactgatgaggtgcggtggatgttgcaacgacgaagggctcgagtgtgtgcccaccgaggagagcaacattaccatgcagatcatgcgaatcaaaccccatcaaggtcagcacattggagagatgtcatttttgcaacataataaatgcgaatgtcgacccaaaaaagatagggcacgacaggaaaagaaatcagtaagagggaagggaaaaggccaaaaaaggaagcggaagaagagccggtataagtcatggtccgtatgcgataagccgagacgctag

SEQ ID NO: 4139 - DNA, 648 bp, synthetic construct
  misc_feature 1..648: note = source = /note="Description of Artificial Sequence: Synthetic coding sequence"
  source 1..648: mol_type = other DNA
atgaacttcctgctgagctgggtgcactggagcctggccctgctgctctaccttcaccacgcgaagtggagccaggccgctcctatggcagagggaggcggccaaaatcatcatgaagtggtaaaatttatggatgtgtaccagagaagctactgccacccaatagaaaccctggtggacatttttcaggaatatcctgatgagattgaatatatcttcaagccaagctgcgtccctctgatgaggtgtggcggctgctgtaatgacgagggcttggagtgtgtgccaacagaagaatccaacatcacaatgcagatcatgagaataaagccacaccaaggccagcacattggcgagatgtctttcctgcaacacaataaatgtgaatgtcggcctaagaaggatcgcgctaggcaggaaaagaagagcgtgagaggcaagggaaagggtcaaaagagaaaaaggaaaaagagcagatataaatcctggagcgtgccttgcggcccctgttctgaacgacggaagcacctctttgtgcaggatcctcaaacttgcaaatgctcgtgcaagaatacagacagtcggtgtaaggcccgacagctagagctgaatgaaaggacctgtcgatgtgataagccccggcgctag

SEQ ID NO: 4140 - DNA, 525 bp, synthetic construct
  misc_feature 1..525: note = source = /note="Description of Artificial Sequence: Synthetic coding sequence"
  source 1..525: mol_type = other DNA
atgaacttcctgctgagctgggtgcactggagcctggccctgctgctgtatcttcaccacgccaagtggagccaggccgctcccatggcagagggaggcggccagaatcatcacgaggttgtcaaatttatggacgtataccagcggagttactgtcacccaatcgaaactctggttgacatttttcaagaatatcccgatgaaatcgaatacatttttaagccatcgtgtgtgcccttgatgcggtgtggcggatgttgcaatgacgagggcctggagtgtgttcccaccgaggagtctaatataaccatgcagatcatgcgaataaagccccaccagggccagcatataggagaaatgagtttcctgcaacacaataagtgcgagtgcagacctaagaaggaccgggccaggcaggaaaacccatgcggtccttgctccgagaggagaaaacacttgtttgtgcaggatccacagacctgcaagtgttcctgtaaaaacaccgatagtagatgcaagatgtag

SEQ ID NO: 4141 - DNA, 699 bp, synthetic construct
  misc_feature 1..699: note = source = /note="Description of Artificial Sequence: Synthetic coding sequence"
  source 1..699: mol_type = other DNA
atgaacttcctgctgagctgggtgcactggagcctggccctgctgctgtacctacaccacgcaaagtggtcccaggctgcacccatggccgagggaggcgggcagaaccatcacgaagtcgtgaaattcatggatgtatatcaaaggtcctactgccaccccatcgaaacgctggttgatatctttcaggaatatccagatgagattgagtatattttcaaaccaagctgcgtacctttgatgaggtgtggcggctgttgtaatgatgaaggactcgaatgcgtgccaacggaagagtcaaacataacgatgcaaatcatgcgcatcaaaccacaccagggccaacatatcggagaaatgtcctttctccagcacaacaagtgtgaatgtcgccccaaaaaggatcgtgcaagacaggaaaaaaagagtgtgaggggaaaggggaagggccagaagcgcaagcgaaagaaaagccggtacaaatcatggtccgtctacgttggtgcaagatgctgcctgatgccttggtctctgcctggtcctcatccttgcgggccgtgttcagagcggcgtaaacatctgttcgtgcaggacccgcaaacttgtaagtgctcttgtaaaaatacagactctcgatgcaaggcccgccaattagagttgaacgagcggacatgtcggtgcgataaaccgcgccggtag

SEQ ID NO: 4142 - DNA, 576 bp, synthetic construct
  misc_feature 1..576: note = source = /note="Description of Artificial Sequence: Synthetic coding sequence"
  source 1..576: mol_type = other DNA
atgaacttcctgctgagctgggtgcactggagcctggccctgctgctctatcttcaccacgctaagtggtcgcaggccgcccccatggcggaaggcggggggcagaatcatcacgaagtagtaaaatttatggatgtctatcagaggagctactgccaccctattgagaccttggtggacattttccaagaatacccagatgaaatagagtacatctttaagccctcttgcgtaccccttatgcggtgtggaggatgttgtaacgacgaagggttggagtgcgtaccaaccgaagagtccaatatcactatgcagatcatgagaatcaaaccccaccagggtcaacacatcggcgagatgtctttcctccagcataataaatgtgagtgcaggcccaagaaggacagggcccggcaggagaacccttgcgggccctgctcggagagacgcaaacatctgttcgtgcaagatccccaaacgtgcaaatgttcctgcaaaaatacagatagtaggtgtaaggcacgacagctggaactaaacgagcggacttgccgatgtgacaagccaaggcgctag

SEQ ID NO: 4143 - DNA, 1263 bp, synthetic construct
  misc_feature 1..1263: note = source = /note="Description of Artificial Sequence: Synthetic coding sequence"
  source 1..1263: mol_type = other DNA
atgcacctgctgggcttcttcagcgtggcctgcagcctgctggccgcggctctgctgcccggaccaagggaagctcctgctgctgctgctgctttcgagagcgggctggacttgagcgatgcggagccggatgctggggaggccaccgcttatgcctcaaaagatcttgaagagcagctgaggtccgtctcatctgttgacgagctgatgacagtcttataccccgaatactggaaaatgtataaatgtcagctccggaagggtggctggcaacataaccgagagcaggctaatttaaattcccgcaccgaggaaaccattaagtttgcggcggcacactacaatacagagattctaaagtccatagataacgagtggagaaagacccagtgcatgcctcgagaggtgtgcatcgatgttggcaaggaatttggcgtcgcgaccaatacattcttcaagccaccttgtgtgtcagtgtacaggtgcggaggctgctgcaacagcgaagggctgcagtgtatgaacacgtccacatcttacttgtctaaaacactgtttgaaattactgtacctttgagtcagggccccaagcctgtgaccatttcgtttgccaatcacacctcgtgcaggtgtatgtccaagctggatgtttatcggcaggtccacagtattattcgtagatcccttccagcaacactccctcagtgccaggcagccaataaaacatgtccaaccaattatatgtggaacaatcacatctgtcgctgtctcgcacaagaggatttcatgttttcaagcgatgccggagacgacagcaccgacggattccatgacatctgtggccctaacaaggaactagacgaagaaacatgccagtgcgtgtgccgagccgggctgcgacctgcctcttgcgggccgcacaaagaactggacagaaactcctgtcagtgcgtttgtaaaaacaagctctttccttctcagtgcggtgcaaatagagagttcgacgagaacacttgtcagtgcgtctgtaaacgcacatgccccagaaaccaacctctcaatccaggcaaatgtgcgtgtgagtgtactgagtctccgcagaaatgcctgctcaagggcaagaaattccaccaccaaacgtgtagctgctataggaggccttgcacaaacaggcaaaaagcttgtgaaccgggtttttcgtactccgaggaggtctgtcggtgtgtgccttcttattggaagagacctcagatgatgtcttag

SEQ ID NO: 4144 - DNA, 510 bp, synthetic construct
  misc_feature 1..510: note = source = /note="Description of Artificial Sequence: Synthetic coding sequence"
  source 1..510: mol_type = other DNA
atggacacccggaacaaggcccagctgctggtgctgctgaccctgttgtctgtattgttctcacagacctctgcctggccgctctatcgcgctccgagtgccctgaggctgggagatcgcattcccttcgagggcgccaatgaacccgatcaagtctctctgaaggaagatattgacatgctgcaaaatgctctggctgaaaacgacacaccttattatgacgttagcaggaacgctcgccatgcagatggggtcttcacctcagacttctctaagctccttggccagttaagcgccaaaaaatatctcgagtcactcatgggcaagagagtcagcaacatcagtgaggaccctgttcccgtcaaacggcatagtgatgccgtattcacggacaactacacaagattgaggaaacaaatggctgtgaaaaagtatctgaattccattttgaacggcaagcgatccagcgagggcgaaagtccagacttccccgaggagctcgagaagtag

SEQ ID NO: 4145 - DNA, 513 bp, synthetic construct
  misc_feature 1..513: note = source = /note="Description of Artificial Sequence: Synthetic coding sequence"
  source 1..513: mol_type = other DNA
atggacacccggaacaaggcccagctgctggtgctgctgaccctgttgagtgtcttgttttcccaaaccagcgcatggcccctttatagagcacctagcgcccttcgactgggtgacagaatcccattcgagggcgcgaacgaaccagaccaggttagcttaaaggaggatatcgatatgcttcagaacgcccttgcagaaaatgataccccctactacgatgtgtccagaaacgcacgtcatgccgatggcgtgtttacatctgatttcagtaaactgctgggccagttaagtgctaaaaaatatctcgaatctctcatggggaaaagagtcagctccaatatcagcgaggatcctgtccctgtcaagcgacacagcgacgcagtattcacagataattacaccaggctgcgcaaacaaatggcagtgaagaagtatcttaactccatcctgaatggaaaaaggtcctctgagggcgagagcccagacttcccagaggaactcgaaaagtag

SEQ ID NO: 4146 - DNA, 360 bp, synthetic construct
  misc_feature 1..360: note = source = /note="Description of Artificial Sequence: Synthetic coding sequence"
  source 1..360: mol_type = other DNA
tgagtgagcctgaaggaggacatcgacatgctgcagaacgccctggctgagaatgacacgccatactatgatgtgagccgaaatgcaaggcacgccgacggcgtttttaccagcgacttcagcaagctgttggggcagctgagtgccaagaagtacctggaatcactgatgggaaaacgggtatcatctaacatctcagaggatccagttccagtcaaaaggcattcagatgctgtctttaccgataattatacgagactgcggaaacagatggctgtgaaaaagtatcttaacagtattctgaacggaaaaagaagcgagggggaatcccccgattttccagaggaattagagaagtag

SEQ ID NO: 4147 - DNA, 774 bp, synthetic construct
  misc_feature 1..774: note = source = /note="Description of Artificial Sequence: Synthetic coding sequence"
  source 1..774: mol_type = other DNA
atgcccctgaacgtgagcttcaccaaccggaactacgacctggactacgactccgttcagccttacttctattgcgatgaggaggagaatttttatcagcagcagcagcagtccgagctccagcctcccgctccgagcgaagacatctggaagaagtttgaactcttaccgacccccccgctttccccctcaagacggtcggggctttgtagcccgagctatgtcgcagtgacccctttttctcttaggggagataatgacggcgggggaggcagcttttctaccgctgatcaacttgagatggttacagaacttctcggcggcgacatggtcaaccagtccttcatctgtgatccagatgacgaaaccttcataaaaaacatcataatccaggattgtatgtggtcaggattctctgccgccgcaaagctggtgtcagagaaacttgctagctatcaggctgccagaaaggactctgggtctccaaacccggcccgaggtcatagcgtgtgttccacaagttcactgtatctccaagatctgtccgccgcggcgagcgagtgcattgacccatcagtagtgttcccctaccctctgaacgactcctcatccccgaagagctgtgctagtcaagactcctcagcgttcagccctagttcagatagtctgctctctagtacagagtcaagcccgcagggtagtccggagcccttggtgcttcacgaggagacacccccaacaacatcctctgacagtggtggtacaagaaggtag

SEQ ID NO: 4148 - DNA, 1365 bp, synthetic construct
  misc_feature 1..1365: note = source = /note="Description of Artificial Sequence: Synthetic coding sequence"
  source 1..1365: mol_type = other DNA
ctggacttcttccgggtggtggagaaccagcagccccccgccaccatgccgctgaatgtgtccttcaccaacagaaactacgatctggactatgactccgtgcaaccctacttttactgcgatgaggaagaaaatttctaccagcaacagcaacaaagcgagctacaaccaccagccccatcagaagatatctggaagaagttcgagctgctccccaccccacctttgagcccttctaggcggtctggcttgtgctcaccaagctatgtcgcagtcacccctttttctctgcgaggagataacgatggcgggggaggctcgttcagtaccgccgaccaattagaaatggtgacagagttactggggggggatatggtcaaccagagctttatatgtgatcctgatgacgagaccttcataaagaacatcattatccaggattgtatgtggtccggcttctccgctgcagctaaactagtgtctgagaaactcgcatcttaccaggctgcccggaaggattcaggatcacctaacccagccagaggccactcagtatgcagtacatcaagcctctaccttcaggacctctctgcagccgcatctgaatgtatcgacccgagcgtggttttcccttacccacttaacgatagctccagtcctaagtcatgcgcctcgcaggactccagcgctttttccccgtcctctgacagcctcctgagtagtacagaatccagcccacaaggcagtcccgagcctctggtattacacgaggaaactcctccgactacctcaagcgattctgaggaagagcaggaagatgaagaggagattgacgtggtgagcgtggaaaagaggcaagcccctgggaagcggagcgagagcggatcaccttcagcagggggccactccaaaccaccccactctccgttggtgctgaagcgctgccacgtgagcacgcaccaacacaactatgccgccccaccctccacgcgaaaagattatccagccgccaagcgggtgaagctggactccgtaagagttctgaggcaaatctccaacaaccgtaagtgtacaagccccaggagcagcgacacagaggagaacgtgaagcgcagaactcacaatgtgctggagcgacagagaaggaacgaactgaaacgctcattcttcgcccttcgcgatcagatcccagaattagaaaacaatgaaaaggctcctaaagtagtgatcctcaaaaaggcgacagcctatatcttgagtgtgcaggccgaagagcagaaattgatatctgaggaggacctgttaaggaagcggagagagcaactgaagcacaaactggagcaattacgcaactcctgcgcatag

SEQ ID NO: 4149 - DNA, 1263 bp, synthetic construct
  misc_feature 1..1263: note = source = /note="Description of Artificial Sequence: Synthetic coding sequence"
  source 1..1263: mol_type = other DNA
atgcccctgaacgtgagcttcaccaaccggaactacgacctggactacgattctgtccagccttacttctattgtgatgaggaggatatctggaagaaattcgagctgctgcctacaccccctctctctccgtcacgccgttcagggctctgcagccccagctacgtggcagtcactcccttctctctccggggagacaatgatggagggggcggcagcttcagcaccgcggatcagctcgagatggttaccgaactcctcggaggtgatatggtgaaccagtcgttcatttgcgatcccgatgacgaaacattcattaaaaacattatcatccaggattgtatgtggagtgggttcagtgcggctgctaaattggtctctgagaaactcgcctcttaccaggcagcacgcaaggactctggaagccctaatcccgctcggggccacagtgtgtgcagcacctcttctctatatttgcaagatctgtcagctgctgccagcgagtgtattgaccctagtgtggtgttcccctacccactgaacgactccagctcccctaaatcctgtgcctcacaggacagctccgcgttctcccctagcagcgactctttgttgtcctctacagaaagcagcccccaaggcagtcctgagcccctggttctacacgaggagaccccccccacaacttcttccgacagcgaagaagaacaggaagatgaggaggagatagacgtcgtgagtgtagaaaagcggcaggcgccgggaaagaggtcagaatccgggagcccctccgcgggtggccactcaaaacctccccattctcccctggttcttaagaggtgccacgtctcgacacatcagcacaattacgctgcaccacctagtacccgcaaagattacccagccgccaaacgagttaagctggactccgtgcgagtgcttcggcagatctcgaataaccggaagtgtacttccccgagatctagtgatactgaggaaaatgtcaagagaaggacacataatgtgctcgagagacagcgtagaaatgaactgaaaagatccttctttgctttaagggaccagatcccagagctcgagaacaacgagaaggctcccaaagtggttatcctcaagaaggccaccgcttacattttgtcagtgcaggccgaagagcaaaagttgatttccgaggaagacctgctgcgtaagagaagagagcagctgaaacacaaactcgaacaacttcgaaacagttgcgcttag

SEQ ID NO: 4150 - DNA, 1362 bp, synthetic construct
  misc_feature 1..1362: note = source = /note="Description of Artificial Sequence: Synthetic coding sequence"
  source 1..1362: mol_type = other DNA
ctggacttcttccgggtggtggagaaccagccccccgccaccatgcctctgaatgtgtcctttacaaaccgcaactatgatctggattatgattcggtgcagccctacttttactgtgacgaggaggagaacttttaccagcagcagcagcagtccgaactgcagccccctgctccctctgaggacatttggaaaaaattcgaactgctcccaaccccccccctctctccttcacgaaggtctggactgtgcagtccttcttatgttgctgtaactccattttcactccgaggcgacaacgacggaggcggtggtagttttagcacagcggatcagctggaaatggtgactgaattgctgggcggcgacatggtgaaccagagttttatctgcgatccagacgatgaaacctttattaaaaatatcatcatccaagactgcatgtggtctggcttcagcgccgccgcgaaactagtttcagagaagttagcgtcttaccaagccgcgaggaaggattccgggtcaccaaaccctgcccgcggacactccgtctgtagcacaagtagtttgtacctccaggatctgtctgccgccgcgagcgagtgtatcgatccatctgtggtgtttccttaccctctcaatgatagtagtagccccaaatcctgcgccagtcaggattcaagcgcattttctccatcctcagactcactcctgagttcgacggaaagctccccgcagggaagtcctgagcctctggtcctgcacgaagagacacccccaactacgagctctgacagtgaggaagagcaagaggacgaggaagagattgatgtggtgtcagtcgagaagaggcaggccccaggcaagaggtcagagtcagggagtcctagcgcaggaggtcattccaagccaccccactctccgcttgtactcaagagatgccatgtttctacacaccagcataattacgccgcccctccctccacgcggaaagattaccccgccgcaaaacgcgtcaagctcgattcagtaagagtcctccggcagattagtaataacagaaaatgcacctcgccacgatcctctgacactgaagaaaacgtaaaaagacgcacgcacaatgtcctggaacgacagcgacgtaacgagctgaaacggtcgttttttgcattgagagaccaaatccctgagctcgagaataacgaaaaggcccccaaagtcgttattctcaagaaggctaccgcttatatcctgtccgtgcaagcagaagaacaaaagttaatttctgaggaggatctcctccgtaagaggagagaacagttgaagcacaagcttgagcagctgcggaactcatgcgcatag

SEQ ID NO: 4151 - DNA, 8442 bp, synthetic construct
  misc_feature 1..8442: note = source = /note="Description of Artificial Sequence: Synthetic coding sequence"
  source 1..8442: mol_type = other DNA
atgatccccgcccggttcgccggcgtgctgctggccctggccctgatactgcctgggaccttgtgcgccgaggggacacgggggcggagctcaaccgcacgctgcagccttttcggctcagacttcgtcaataccttcgacggcagcatgtatagcttcgctggctattgctcttacttgttggctggcggctgtcagaagcgttccttctccatcatcggagactttcagaacgggaaacgggtcagtttgtctgtgtaccttggcgagttctttgacattcatttatttgtgaacgggaccgttacacaaggagaccaacgtgtgtcgatgccgtacgcaagcaagggtctgtacctcgagacagaggcaggatattataaactcagcggagaggcatacggcttcgtagctcgcatagatggttcgggtaacttccaggttctgctatccgacaggtattttaataagacttgtggattgtgtggaaatttcaatatcttcgcggaggatgactttatgacgcaagagggcaccctgacctctgacccctacgactttgccaattcgtgggctttatcctctggtgagcagtggtgtgaacgcgccagccccccttctagctcatgtaacattagctctggagagatgcagaagggattgtgggaacagtgtcagctgttaaagtctacgtccgtctttgcaaggtgtcacccactcgtggatcccgaacctttcgtggctctgtgtgaaaaaaccctgtgcgagtgcgccgggggacttgaatgcgcctgcccagctctgctggagtacgcaaggacttgcgcccaagagggaatggtcttgtatggttggaccgatcattccgcctgttcccctgtgtgcccagctggcatggagtacaggcaatgtgtgagcccgtgtgcacgaacttgccagagtctgcacatcaacgaaatgtgtcaagagaggtgtgtcgacgggtgttcttgcccagaggggcaactccttgatgagggcctttgtgtagagagtactgagtgcccttgcgttcatagcgggaaacgctatccccctggtacttccctctcaagggactgcaacacatgcatatgtcggaactcacagtggatttgtagtaatgaggagtgccctggagaatgtctggtgacagggcagtcccactttaagagtttcgacaaccggtacttcacattctctggcatatgccagtatttactggctcgcgattgccaggaccatagtttcagtatcgtgatagaaaccgtgcaatgcgccgacgaccgggatgcggtgtgtactaggtcggttacagtcagattgcctggcctgcacaattctctggtgaaattaaagcacggtgctggggttgccatggatgggcaggacgtgcagttgcccctgctgaaaggggacctcaggatccagcacacagtgaccgcttctgtcaggctctcctatggagaggacctgcagatggactgggatggccgggggcggcttcttgttaagctttctccagtgtatgctggcaagacgtgtgggctgtgtggtaactacaatggaaaccaaggggatgacttcttaactccttcaggtttggccgagcctcgagtggaagacttcggcaacgcttggaaactgcatggagactgtcaagaccttcagaagcagcactcagatccatgcgcattgaacccgcggatgacacgcttctctgaggaggcctgtgccgtcctaaccagtcccacgtttgaggcttgccatcgggctgtcagcccgctgccttacttgcggaactgcaggtatgacgtatgctcatgcagcgatggacgagagtgcctgtgcggcgcactcgcaagttatgcagcagcttgtgcaggccggggcgtgagagtcgcctggcgcgagcctggaaggtgtgaactaaactgcccaaagggccaagtgtacctgcaatgcggaaccccctgtaatctcacttgtcggtcactctcatacccagatgaagagtgcaacgaagcctgtctggaaggatgtttctgccctcctggactgtacatggatgagcgtggcgactgcgtgcctaaagcacagtgtccctgctattacgacggtgaaattttccaacccgaggacatcttttcggaccaccataccatgtgttattgcgaagatgggttcatgcattgcacaatgtccggagtgcccggcagccttctccccgacgccgtgctttcgtcacctctcagccacagatctaagagatccctgtcctgcagacctcccatggttaagttggtatgcccggccgataacctgcgggcggaaggactcgagtgcacaaaaacttgccaaaactacgatttggaatgcatgtcaatgggatgtgtgtctggatgcctgtgcccgcccggaatggtccgccacgaaaaccgttgcgtggcactcgagcgatgcccgtgtttccaccaagggaaagagtatgcccctggtgaaacagttaagataggctgtaacacttgtgtttgtcaggatcgtaagtggaactgtacagaccatgtttgcgatgccacctgttccacgatcggtatggcccattatctcactttcgatgggctcaagtatctgtttccaggggagtgtcaatatgtgttggtccaggattattgcggatcaaaccccgggaccttccgcatattagtagggaataaggggtgcagccatccaagcgtaaagtgtaagaaacgagttaccatacttgtggaaggtggagaaatagagctcttcgacggcgaggtaaacgtaaagcggcctatgaaggatgagacacatttcgaagtggtggagagcggccgttacattattctcctgctgggaaaggccttgtccgtagtgtgggacagacatttgtctataagtgtcgttctgaagcagacctaccaggagaaggtgtgcggactgtgcggcaacttcgatgggatacagaataacgatctaacctcgtccaatctccaggtggaggaagatcccgtggattttggcaatagttggaaagtttcatcccagtgcgcagatacccgtaaagtgcctctggacagcagtcctgccacctgccataataacataatgaagcagacaatggtggacagcagctgtcgtattcttacttccgacgtgtttcaggactgtaataagcttgtggatcctgagccgtacttagatgtttgtatctacgacacatgttcttgcgagagcattggtgactgcgcctgcttttgcgacacaatcgccgcctacgcccacgtgtgtgcccaacatggtaaggtggttacctggcgtacggctacactgtgtccccagagctgcgaggagcgcaaccttagggaaaacgggtatgagtgtgaatggcgctataattcctgcgccccagcttgtcaggttacatgtcagcatcccgaacctttagcatgtcctgtgcagtgcgtggagggctgccacgcacactgcccacctggtaaaattctggacgaactcctccagacctgcgtggacccggaggactgccctgtatgtgaagtggccggaagaagattcgccagtggtaaaaaagtcactctgaatcccagcgatccagaacattgccaaatctgtcattgcgacgttgtaaatctcacttgtgaagcgtgtcaggaacctgggggcctcgtggtgccacctaccgacgctcctgtgtcgcccaccacactctatgtagaggacatctcagaaccacccctgcacgacttctactgctcccgcctactggatctggtctttctcctggacggcagtagccggcttagcgaggcagaatttgaagtactaaaggcattcgtggtcgatatgatggaacgtctcaggatctctcaaaaatgggtgcgggtggcggtcgttgagtaccatgatgggtctcacgcttatataggcttaaaagaccgaaagcgccccagtgaactgcggcgaatagcttctcaggttaagtacgctggctcccaagtagcaagtacatccgaggtgctaaagtacacgctattccagatcttctccaaaatcgatagacccgaggcaagccgaattacacttctgctcatggcttcccaggaaccccagcgcatgtccagaaactttgtgcgctatgtgcagggcttaaaaaagaagaaagtgattgtaatccctgtggggatcgggcctcacgccaacctgaaacagatccgcttgattgaaaagcaagcccctgagaataaggcatttgtgctctcatccgtggacgagctggagcagcaacgggacgaaattgtgagctacctctgcgacctggccccagaggctccaccgcctacactccccccagatatggcccaggttactgtggggcctgggcttctgggggtatctacgctgggacctaagcgaaatagcatggtcttggacgtggccttcgttctagaagggtcggacaagatcggagaggccgattttaatcgcagtaaggaatttatggaggaagttatacaacgaatggacgttgggcaggattcgattcatgtgacagtattacagtatagttacatggttaccgtagagtatccatttagtgaagctcagtcaaagggggacattctgcagcgggtaagggagatccggtaccagggaggaaataggactaatactggactggctttgcgttatctgtccgatcacagcttcctggtaagccagggagatcgcgaacaggcacctaatctggtatatatggttaccgggaatcccgcctccgacgagatcaaacgtctcccgggcgacatccaggtggtccctataggtgtcgggccaaacgcgaatgtacaagagctggagcggatcggttggcctaacgccccgattctcatccaggacttcgagacactgccacgggaagcacctgatcttgtcctccagcgctgctgtagtggcgaaggcctgcagatacctactctgtcacctgccccagattgctcccaacccctggacgtaattcttctcctggacggaagctcctccttccccgccagttacttcgatgaaatgaagtcctttgcaaaggcatttatttctaaagccaacattggcccgaggttaacccaggtgagcgtccttcaatacggatccattaccacaatcgacgtcccttggaatgtggtgccagaaaaagcgcatctgctctctctcgtcgatgtaatgcagagggagggcggcccctctcagattggcgacgctctgggatttgctgtgaggtacctgacatctgagatgcatggagccaggcccggcgcttctaaggccgtcgtgatcctcgtgacagatgtaagtgttgactctgtggatgctgccgctgatgccgctcggagcaatagagtaacagtctttccgatcggtataggagatagatacgatgctgcccagctgagaattcttgcggggcccgccggggattctaatgtggttaagctgcagcgcatcgaggatctacccactatggtgaccctgggcaacagcttcttgcataagctgtgtagcggctttgtgcgcatatgcatggacgaggatggcaacgagaagcgccctggcgatgtctggacgctgccggatcagtgccacaccgtcacatgtcaaccagacggtcaaacacttctgaaatcacatcgggtgaactgtgaccgaggactgcgtccctcctgccctaattcccagtcgccggtgaaggtggaggagacctgtggttgccgctggacatgtccctgcgtctgcaccggatcctcaactcggcatatcgtgacatttgatggtcagaacttcaaactgacagggagctgttcatacgtcctctttcaaaacaaagagcaggatctggaagtgattctccataacggtgcatgttcacctggggcccggcagggctgtatgaagagcattgaagtgaagcattccgctctatcagtcgagttgcactctgatatggaagttaccgttaacggtaggctcgtatctgtgccctacgtcggtggaaatatggaggtcaacgtttacggagctatcatgcacgaggtcaggttcaatcatctgggccacatcttcactttcactcctcaaaataacgaatttcagctacagcttagcccgaaaaccttcgcttccaaaacttatgggttgtgcgggatatgcgacgagaatggcgccaatgattttatgttgcgggatggaactgttacaaccgattggaaaacactggtccaggaatggacagtgcaaagacctggacagacttgccagcctatactggaagagcagtgcctggtgccagattcctcacattgccaggtgctgctattgcctcttttcgctgagtgtcacaaggttttggcccccgcgacgttttacgctatctgccaacaagacagttgccaccaagaacaagtctgtgaggtgatcgcctcttacgctcacctgtgtcgaacaaacggggtttgtgtggactggcgcacacctgatttctgcgctatgtcctgccctcccagcctcgtgtacaatcactgtgagcatggatgtccccgtcattgcgacggcaacgtctcatcatgtggagaccacccctcggagggatgcttttgtccgcctgacaaagtgatgctggaggggagttgtgtgccggaggaggcgtgcacccaatgtattggcgaggatggtgtgcagcaccagtttctggaggcctgggtgccagatcaccagccctgccagatctgcacatgtttgtcaggccgcaaggtcaattgcaccacccaaccctgtcccactgccaaagctcccacttgtgggctgtgcgaagtagcccggctccgccagaatgctgaccagtgctgtccagaatatgagtgcgtgtgcgatcctgtcagctgtgatctgccgccagtgcctcactgcgagaggggtctgcagcctaccctgaccaatccaggcgaatgcagaccgaactttacatgtgcctgtcgtaaggaggagtgtaaaagagtgagcccaccatcttgtccacctcatagattacccacattaaggaagacacagtgctgcgacgaatacgaatgcgcctgcaactgcgtgaacagcactgtcagctgtccactgggctacctggccagtactgcaacgaatgattgcggatgcaccacaactacttgcctccccgacaaggtgtgtgttcaccgatcaacgatctatcccgtcggacagttttgggaagaggggtgcgatgtgtgcacttgtaccgatatggaggacgccgtcatggggctcagggtagcccagtgtagccaaaaaccgtgtgaagactcttgtcggagtggattcacttacgtgcttcatgaaggcgaatgctgcggccgttgcttgccttccgcctgcgaagtggtcacgggttctcctcgtggcgattcacaatcttcttggaaaagcgtgggctcgcaatgggcctcaccggaaaacccgtgtttgattaatgaatgtgtaagagtgaaagaggaggtcttcattcaacaaaggaatgtttcctgcccccaactggaggtgcccgtgtgccctagtgggttccagctaagttgcaaaacgagtgcgtgctgcccaagctgtaggtgtgaacgcatggaggcatgtatgttgaatggaacagtgatcggccccggtaaaacagtgatgattgacgtttgcaccacctgccggtgtatggtgcaggtaggcgtgatatccggatttaagctggagtgccgtaagactacgtgcaatccttgcccgttgggatataaagaagaaaataacacaggcgagtgctgtggccgatgtctcccaacagcctgcacaatccagttaagggggggccaaattatgactttgaaacgagacgagaccctgcaagacggctgtgacacccacttctgtaaagttaatgaaagaggggagtacttttgggagaagcgtgtaacaggctgtccaccatttgatgagcacaaatgtcttgctgaaggtgggaaaataatgaagataccagggacctgttgcgacacctgcgaggagccggaatgtaatgacataaccgcgcgccttcagtatgtcaaagtgggctcttgtaaatccgaggtagaggtggatatccactattgtcagggcaaatgtgctagcaaggcgatgtacagcatcgatatcaatgatgtccaagatcagtgctcttgttgttcacccaccaggaccgagcccatgcaggtcgccctgcattgcacaaatggtagcgtcgtataccatgaggtgttaaacgctatggaatgtaagtgcagcccccgcaagtgctctaagtag

SEQ ID NO: 4152 - DNA, 816 bp, synthetic construct
  misc_feature 1..816: note = source = /note="Description of Artificial Sequence: Synthetic coding sequence"
  source 1..816: mol_type = other DNA
atgaccgagccccaggtgggctgcgtggcctgcccccgggtgcacaaggaaccagcccaggtgggtaccccgtggcctgccaaaccacgttcccatccaaggaaaagagatccaaccgcactgcttcctcggtcactgtggcccgcatgtcaggaatcagttacagcattatgtttccttcaggagaccgtcgagcgcctgggtcagtctcctgctcaggacactccagtgctgggaccctgctgggatcctatggcactcgggacccaaggtagattgctgctggacagggatagcaaggacactcagactaggatcagtcagaagggccgcaggctccagccaccagggactccctccgctccgccccagcgcagacctcgcaaacaactcaatccttgccggggaacagaaagggtggacccggggtttgagggggtcaccctaaagttccagataaaacccgacagttccctccaaataattcccacctactcactaccttgcagctcccggagccaggagtccccagcagatgcagtgggaggtcctgccgcgcacccgggaggcaccgaagcccactcggccggttcagaggccctcgaacccaggcggtgtgcttcatgccgcacacagagaaccccactttggcgtgatgctgaggatggcactccgctctgcaatgcctgcgggatcagatataagaaatacggtactagatgcagctcctgctggctcgtcccgcggaagaatgtacagcccaaacggctgtgtggcaggtgcggtgtgagtctcgatccaatccaggagggttag

SEQ ID NO: 4153 - DNA, 1182 bp, synthetic construct
  misc_feature 1..1182: note = source = /note="Description of Artificial Sequence: Synthetic coding sequence"
  source 1..1182: mol_type = other DNA
atgaccacatattctgacaaaggagccaagccagagaggggacgtttcttacacttccatagcgtcactttctgggtcggcaacgcgaagcaggcgacgtcgttctattgttctaagatgggttttgaaccactggcatacagaggcctggagacaggttcgcgtgaagtggtgtcccatgtgattaagcagggtaagattgtgtttgtgctctcaagtgccttaaatccctggaacaaggagatgggtgaccatcttgtaaagcatggggatggggttaaagatatagcgttcgaagtagaggattgcgactacatagtgcagaaggctagagagcgcggagctaaaatcatgcgcgagccatgggtggagcaggacaagttcggaaaggtgaagttcgcggtgctacaaacatacggcgatacaacacacacactggtggagaaaatgaattacattggtcagtttctgcccggatacgaggccccagcttttatggaccccctactgccaaagcttccaaaatgctccctagaaatgatcgatcacattgttggcaaccagcccgaccaggagatggtcagcgcctctgagtggtatttaaagaacctccaattccatagattttggtcggtcgatgatacgcaggtgcacactgagtacagctcactccggagcattgtcgttgctaactacgaggagtctatcaagatgccgatcaacgagccagcccctggcaagaagaagagccagatccaggaatacgtagattacaacgggggtgctggtgtgcagcacattgccctcaagactgaggacatcatcactgctataaggcacctgcgggagcgaggacttgaattcctgtccgtcccgagcacctactacaaacagctcagagaaaagctgaaaacagcaaagattaaggtaaaggagaatatcgacgccctggaagagttaaagatcttggttgactatgatgaaaaggggtatctactccagattttcactaaacctgtccaggataggcctactctgtttcttgaggtcatccagcgacataatcaccaagggttcggagctggcaacttcaactccctgttcaaggccttcgaagaggaacagaacctaagaggtaatctgaccaacatggaaaccaacggggtggtaccgggaatgtag

SEQ ID NO: 4154 - DNA, 1065 bp, synthetic construct
  misc_feature 1..1065: note = source = /note="Description of Artificial Sequence: Synthetic coding sequence"
  source 1..1065: mol_type = other DNA
atggggtttgaacccctcgcgtacaggggactggaaacaggcagtcgcgaggttgtgtcacatgtgataaagcagggtaagattgtattcgtgttaagcagcgctctcaatccctggaacaaagagatgggggatcatctggtaaagcatggtgatggtgtcaaagatattgcttttgaggtggaagactgcgactatatcgtgcaaaaagccagggagcgcggtgcaaaaataatgcgcgagccatgggttgaacaggacaaattcggaaaggtgaagtttgctgtccttcaaacctacggcgacacgacccataccctcgtagagaaaatgaactacatcggacagttcctgccagggtacgaggctccagcctttatggatcctctcctcccaaaacttcccaagtgttcgctcgagatgatcgaccatattgtggggaaccaaccagaccaggagatggtgtccgcgtccgaatggtacctgaaaaatctacagttccaccgtttttggagcgtggacgatacgcaggtccatactgagtattccagcctcagaagtatcgtagttgcaaattacgaagaatccatcaaaatgcctattaatgaacctgccccaggcaaaaaaaagagccagattcaggagtatgtggactacaatgggggagcaggggtccagcatattgcgctcaaaacagaagatataattacggccatccggcacctgcgcgagcggggactggaattcctaagcgtgccttccacctattacaagcagctgcgagaaaaacttaagactgcgaagattaaggtgaaggagaacatcgacgcattggaagaactcaagatcctagtcgactatgacgagaaaggctatcttctgcagatttttactaagccagttcaagacagaccaacactgtttttggaggtaatccagcgtcataatcatcagggattcggcgcagggaatttcaattccctgttcaaggcttttgaggaggaacaaaatctgcggggaaacttgaccaacatggaaaccaacggcgtggtgcccggtatgtag

SEQ ID NO: 4155 - DNA, 1173 bp, synthetic construct
  misc_feature 1..1173: note = source = /note="Description of Artificial Sequence: Synthetic coding sequence"
  source 1..1173: mol_type = other DNA
tactctgataaaggggcaaaaccagagcgcggaagattcctccactttcactctgttaccttctgggtgggtaacgccaaacaagccacctctttttactgctccaagatgggtttcgaacctctagcctaccgcggtctagaaacagggtcgcgcgaagtggtgtcacatgtcattaaacagggaaagatcgtatttgtgctgagcagcgcacttaatccctggaataaagagatgggcgaccatttggtgaagcatggagacggtgtcaaagatatcgccttcgaagtggaggactgcgattatatagttcagaaggcgagagagcgcggagctaaaatcatgagggagccctgggtggagcaggacaagtttgggaaagtgaagttcgctgtactgcagacctatggcgatacaacgcatactctggttgaaaaaatgaattacatcgggcaatttctgcctggctacgaggcccctgccttcatggacccactgctccccaaactacccaagtgctctctggagatgatcgaccatattgtcggtaaccagcccgaccaggagatggtgtctgcgtctgagtggtatttaaagaatcttcagttccacagattctggtctgtcgacgatacccaggtgcacaccgaatacagttctctgagatccatcgttgtagctaactacgaagaatccataaaaatgcccatcaacgagcctgctcctggcaaaaagaagagtcagatccaggaatatgtggactataatggaggagcgggagtgcagcacatagctctgaagacggaggatattattactgcaattcgacacctcagggaacggggactggagtttctttccgttccgtccacatactataagcagctgagggagaaattgaagaccgccaagatcaaggttaaggagaacattgacgccctagaagaattgaaaatcttggtggattatgatgaaaagggctacctgcttcagatattcaccaagcccgtgcaggatcgacctactttgttcttggaggttattcaacgacacaaccaccagggatttggcgctggcaacttcaattcactgttcaaggctttcgaagaagaacagaaccttagggggaacctgacaaacatggaaaccaacggtgtagttccaggcatgtag

SEQ ID NO: 4156 - DNA, 438 bp, synthetic construct
  misc_feature 1..438: note = source = /note="Description of Artificial Sequence: Synthetic coding sequence"
  source 1..438: mol_type = other DNA
atgagcaccgagggaggtggtagaagatgccaggcccaagttagccggcgaatttcctttagcgcgtcacaccgcctgtattccaaatttctcagcgacgaggaaaatctcaaattgttcggaaaatgtaataacccaaacgggcatgggcacaattataaggtggtcgtaactgtccacggagagattgaccctgcaacaggcatggtgatgaacctggccgatctgaaaaaatatatggaggaggcaatcatgcagcctttggaccacaaaaatcttgacatggatgtgccctatttcgctgatgtcgttagcaccaccgaaaacgtagccgtatacatttgggacaatctccagaaagtgttaccggtgggagttctgtacaaggtgaaggtgtatgaaactgataacaacatcgtggtatacaagggcgagtag

SEQ ID NO: 4157 - DNA, 4284 bp, synthetic construct
  misc_feature 1..4284: note = source = /note="Description of Artificial Sequence: Synthetic coding sequence"
  source 1..4284: mol_type = other DNA
atgcatcagaggcaccctcgcgcaaggtgtcctccactgtgcgtggctggcattctggcttgcggatttctcttaggatgctggggacctagccacttccaacagtcatgtctgcaggcccttgagccccaggccgtatccagctacctgtcccccggtgcaccgctgaaaggacggcctccctctcctggattccagagacagcgccaacggcagcggagagccgctggcggaatcctccatctcgagctgctggtggcagtgggtccagacgtgtttcaggcgcatcaggaagataccgagaggtatgtgttgaccaacctgaatattggcgctgagctgctcagggatccttctttgggggctcagtttcgagttcatctcgtgaagatggttattctcactgagcctgagggagcacctaatataacagccaatttgacatcttcgctgcttagcgtgtgcggctggtcacagaccattaatccggaagacgataccgatccaggccatgcagatctggtactttacatcacacggtttgacttggagctgccggatggtaacagacaagtaagaggcgtgacccaactcggcggagcgtgttctcccacctggtcctgtctgattacagaagacactggcttcgatctgggagttaccatagcacacgagatcggccattccttcggcctggaacatgatggagctccaggttctggttgcggaccctcgggacacgtaatggcttctgacggtgcggcacccagggcgggtctcgcatggtccccttgttcacggagacagctccttagcttactgagcgctggcagggccaggtgcgtgtgggatccccctcgacctcagccaggcagtgcaggtcatcctcctgacgcccagccagggctttactattctgccaatgaacagtgtcgagtggctttcgggccaaaagccgtggcttgcaccttcgccagggagcacctggacatgtgtcaagctctgtcctgccacacggatccgctggaccaatcgagctgtagccgactgctggtcccactgctcgacggcactgagtgtggcgtcgaaaagtggtgcagcaaaggaaggtgcaggagtctcgttgaactgacgccaattgctgctgttcacggcagatggtccagttggggcccacggtcgccttgctctcgttcttgcggcggaggggtcgtaactagacgtaggcagtgcaacaacccaagacccgcttttggcggacgcgcttgcgttggggctgacctgcaggcagagatgtgcaacactcaggcgtgcgagaagacccagctggagttcatgtcccagcagtgtgcgcgaacggatggtcagcctctccgtagctccccaggcggagcctcattttaccactggggtgccgctgtgccccactctcagggagatgctttgtgtaggcatatgtgtcgggctatcggtgaatcatttataatgaaaaggggtgacagtttcctggatggcacgcggtgcatgcctagtgggcctcgagaagatggcactctgtcactttgcgtaagtggctcttgccggacctttgggtgcgatggtcgcatggactctcaacaggtgtgggatagatgccaggtatgtggaggcgataattccacttgctcccctcggaaaggctccttcacagccggtagagcacgcgagtacgttactttccttacagttaccccgaatctcacttctgtgtatattgccaatcacagacctctcttcacccaccttgcggtgagaatcggcggtagatacgtcgtggcagggaaaatgtctattagccccaatacaacatacccatctttgctggaggatggcagagtggagtaccgggtggcattaacagaagaccggctgccacgactcgaggaaatacggatttgggggccactgcaggaggatgccgatatccaggtctatcggagatacggtgaggaatacgggaatctcacccgccctgatattacgtttacctattttcagcccaagccacggcaggcctgggtctgggccgcagtgagaggtccttgttctgtctcctgtggcgcaggattgaggtgggtcaactattcatgccttgatcaggccaggaaggagctcgtcgagacagtgcagtgtcaaggcagccagcagccacccgcatggccagaggcgtgcgtgcttgagccctgccccccatattgggcagtcggggactttggcccttgttccgcaagttgcggaggcggtctacgagaaagacctgtgcgatgcgttgaagcacaggggagtctgcttaaaacacttcctcctgcccgttgcagagctggagcacagcaacccgctgtagcactcgagacctgcaatccacagccatgccctgcccgatgggaggttagcgaacctagttcttgtacctcagcagggggtgcaggcctggcactggagaacgagacatgtgttcctggcgctgatggtctcgaagcccctgtcaccgaggggccagggtcagtggacgagaaactgccagcccctgagccatgtgtgggcatgtcgtgtcccccaggatggggccatcttgatgcaaccagcgccggagaaaaggcacccagtccatggggatccattaggacaggggctcaagccgctcatgtgtggacacccgcagccggaagctgctccgtcagctgcggtcgcggactcatggagctgaggttcctgtgtatggatagcgccctgagggtgccggtgcaggaagagttatgcggcttggcttcgaaacctggaagtcgcagggaggtctgccaggcagtgccttgcccagcccgttggcagtacaagctggccgcatgttcagtgtcatgtggcagaggagtagttcgaagaatcctgtattgcgccagagcccacggggaggacgatggcgaagaaatcctgctcgatacacagtgccagggacttcctagacccgagccgcaggaagcatgttccttggaaccttgtccaccacgctggaaggtgatgagtcttggcccatgcagcgccagttgtggtctgggcactgctagacgcagcgtggcttgcgttcaactggaccagggtcaggatgtggaggtcgacgaggctgcgtgtgctgctcttgtgcgcccagaggcctcggtgccatgtctgatcgccgactgtacctatcggtggcatgtcggcacttggatggaatgcagcgttagctgcggcgatggcattcaacggaggcgcgacacatgccttggccctcaagctcaggcgccagtgcctgcggacttctgccagcacctgcccaaacccgtcaccgtgcgcggatgctgggctggaccatgcgtgggtcaaggaactccttcccttgtgccccacgaggaagctgcagctcctggcagaaccacagctactcccgcaggggcaagcctcgagtggtctcaagctcgcggtctgttattttccccagcccctcagcccagacgcctactgcctggaccacaggagaattccgtgcaaagtagtgcctgcggtaggcagcacttggagcccacggggactattgacatgagggggcctggacaggcagattgcgccgttgctatcgggaggcctctgggagaagttgtaaccctgagggtgttggaatcctctttgaattgcagtgccggtgacatgcttctgctttggggccgactaacttggcggaagatgtgcaggaagttgcttgacatgacattctcttcaaagacgaacaccctggtggtgaggcaacgatgtggcaggcccggaggaggggtcctgctgcggtatgggagtcagctggcccctgagactttttatagagagtgtgatatgcaactgttcggaccttggggcgagatcgtgtctcccagcctcagtcctgccactagtaatgctggtggttgtaggctattcatcaacgtcgcccctcatgccagaattgccatccacgcactagcaacgaacatgggtgcagggaccgaaggcgctaacgcctcctatattcttatcagagatactcactctcttagaaccacagctttccatggccagcaggtactgtactgggagagcgagtcttcgcaagctgagatggagttttctgaaggtttcctcaaggcccaggctagcctgcggggacagtattggacacttcagtcttgggtcccggaaatgcaagacccgcagtcgtggaaggggaaggaagggacatag

SEQ ID NO: 4158 - DNA, 3309 bp, synthetic construct
  misc_feature 1..3309: note = source = /note="Description of Artificial Sequence: Synthetic coding sequence"
  source 1..3309: mol_type = other DNA
atgtttcaactgcccgtcaataacctgggtagccttaggaaagcacgaaaaaccgttaagaagattctctccgacattggactagagtattgtaaagaacatattgaggacttcaagcaattcgagccaaacgacttttatttaaagaacacaacatgggaagacgtgggactgtgggatcccagccttaccaagaaccaggactaccgaactaagccgttttgttgtagcgcctgtcccttctcctctaaattcttctctgcctataagtcccactttcgaaacgtccacagtgaagattttgagaatcgaattctgctcaattgcccctactgcacatttaatgccgataaaaaaaccttggaaacacacatcaaaatttttcacgcccctaacgccagcgcacccagtagttccctgagtacatttaaagataagaacaaaaatgatggactcaaacccaaacaagccgatagcgtggagcaggctgtgtactattgcaagaaatgtacctacagagatccgttgtacgagattgtcagaaagcacatctatcgcgaacacttccagcacgtagcagccccatacatcgccaaggcgggagagaagtctcttaacggtgctgtgcccctggggtccaacgcccgagaggagtccagcatccactgtaagagatgccttttcatgcccaaatcttatgaagccctggtgcagcatgtcatcgaggaccatgagcgcatcggctaccaggttaccgctatgattggacataccaacgtagtggtgccaaggtcaaagcctctgatgcttatagcacctaaaccgcaagataaaaaatccatgggcttgccccctcggattggcagtctcgccagtgggaatgtgagaagcctgccaagccagcaaatggttaataggttgtccataccgaaaccaaatctgaattctactggcgtgaacatgatgagtagcgtgcatcttcaacagaataactatggagtgaagtctgttggtcaaggctatagtgtagggcagtccatgagactgggactggggggtaatgcccctgtctcaatcccccagcagtcccaaagcgtgaagcagctgctcccgtccgggaatggcaggagctacggtctgggctccgaacaacgatcacaggctccagcgaggtactcactgcagagtgcaaatgcaagcagcctcagcagcggacagctcaagagcccaagtctgagtcagtcccaggcatcccgggtcctggggcagagttcctcgaagcctgccgctgcggctacaggccctcctccagggaacactagtagcacccagaagtggaagatttgcacaatctgcaacgagctgtttcctgagaatgtatacagcgtacactttgagaaggaacacaaggctgaaaaagttccggctgtggcaaattatattatgaaaatccacaacttcacatcaaaatgtctgtattgtaatagatatctgcccactgatactctcctaaatcacatgttgatccatggcctgagttgtccctactgtcggagcaccttcaatgatgtggaaaagatggcagctcacatgcgaatggtgcatatcgatgaggagatgggaccgaagactgactctaccctttctttcgacctgactttgcagcaagggtcccataccaatattcaccttcttgtgacaacctacaaccttcgcgacgctcccgctgagagcgtggcatatcatgcacagaacaatccaccagtgccacctaagccccagcctaaagttcaagagaaggcagacattcccgtcaagtctagcccacaggctgcggtcccttacaagaaggatgtcggaaagacgctctgccccctgtgttttagtatcctgaaagggccaattagcgatgcattagcccaccatctccgggaacgtcatcaggtgattcaaacggtccacccagtggagaaaaaactcacatataagtgtatacactgccttggagtgtatacaagcaatatgaccgctagcaccatcacactccatttggtccattgtaggggggtagggaaaacacagaacggacaggacaagaccaacgctcccagccggctcaaccagagcccttccctggcacctgtgaaacgaacatacgagcagatggaatttccactcctgaagaagcgcaaattagacgacgatagcgatagcccctcattcttcgaggagaaacctgaagaaccagtcgtgctggcgctcgacccaaaaggccacgaggacgactcctacgaagccagaaaatcatttcttaccaaatattttaataagcagccttaccccacacgacgggaaattgaaaagctcgctgcttcactatggctctggaagtcagatatcgcttcccatttctcaaacaagagaaaaaaatgtgttcgcgattgtgagaaatacaaacccggagttctgcttgggtttaacatgaaggaattgaacaaggtgaagcatgagatggacttcgatgcagagtggttgtttgagaaccatgatgaaaaagactcccgtgtgaacgcgtccaagaccgccgataaaaaattgaacctgggcaaagaagatgactcctcatccgattctttcgaaaaccttgaggaagaaagtaacgagtctggatcccctttcgatccagtgtttgaggttgagcccaaaatttcaaacgataaccctgaagagcatgtgctcaaagtaatcccagaagatgcaagcgagtccgaagaaaaactggatcaaaaagaggatggctccaagtacgagacaatccatctgacggaggaaccaaccaagctgatgcacaacgcctctgacagcgaagtagaccaggacgacgtggtggaatggaaagatggagcaagccctagcgaaagcgggccaggatcacaacaggtgtccgatttcgaagacaatacatgcgagatgaagccaggaacatggagcgatgaatcttctcaaagcgaagacgctcggagctccaagcccgcagccaaaaaaaaagcgactatgcaaggtgatagagagcagttgaagtggaagaacagctcttatggcaaggtagaagggttttggtccaaggatcaatcccagtggaaaaacgcctcagaaaatgacgaacgcctatctaaccctcagattgagtggcaaaactctaccattgacagcgaagacggagagcagttcgataacatgactgatggcgttgctgagcctatgcacgggagcttggccggagtgaagctctctagccagcaagcttag

SEQ ID NO: 4159 - DNA, 3309 bp, synthetic construct
  misc_feature 1..3309: note = source = /note="Description of Artificial Sequence: Synthetic coding sequence"
  source 1..3309: mol_type = other DNA
atgttccagctcccagtcaataacttaggcagcctgcgcaaagcacggaagaccgttaagaaaattctgagcgatataggcctggagtattgcaaagagcatattgaagatttcaaacagttcgaacccaacgatttttacctgaagaacactacttgggaagatgtggggttgtgggatccctccctcacaaaaaatcaggactataggaccaaaccattttgttgcagcgcatgtccttttagttctaagttcttctccgcttacaaaagtcactttcgcaacgtgcattcggaagatttcgaaaaccgcattttgctaaactgcccctactgtacgttcaatgccgacaagaagacgctcgaaactcatatcaaaatctttcatgccccaaatgcatccgcgccatcttcatctctgtctaccttcaaagataaaaataaaaacgatggcctgaagccaaagcaggcagacagcgtggagcaggccgtgtactactgcaaaaagtgtacttatcgtgatccgctatatgaaatcgttagaaagcatatctatcgcgaacacttccagcatgtggcagcgccttatatcgcgaaagccggagagaagtccctgaatggcgcagtgcctctggggtctaacgcacgggaggagagctctattcactgcaagagatgtctcttcatgcctaaatcctatgaagccctcgtccaacacgtaattgaggatcatgagaggatcggttaccaggtgacagccatgatcggacacactaacgtggtggtgcctcgaagtaaacccttgatgctcatcgccccaaagccacaggataagaaaagcatgggcctgcctccaagaatcggatctctcgcttctggcaatgtaagaagcctgccatcacagcagatggtgaacaggttatctatccccaagcctaacctgaactccaccggcgtcaacatgatgagcagcgtgcacttacagcagaacaattacggtgtgaaaagcgtgggacagggttactctgtgggccagtctatgcggctggggctgggaggaaacgcccctgtttccatccctcaacagtcacagtcggtcaagcagctgttgcctagcgggaacggtcgatcctacggcctggggtcagaacagcgctctcaggctccagccaggtatagccttcagagcgcaaatgcctctagtctcagttcaggacagttaaagtctccatctctaagtcagagccaggcgagccgagtgctgggtcagtcatcctctaagcccgctgccgcagctaccggcccacccccaggaaatacaagcagcacccaaaagtggaaaatctgtacaatttgtaatgaactgtttcccgagaatgtatatagcgtgcacttcgagaaggaacacaaagccgagaaagtgcccgcagtggctaactatataatgaagatacacaatttcacttcaaagtgcctctattgcaatagatatctcccaaccgacaccctgctgaaccacatgttgatacacggccttagctgcccatattgtcgatcaacctttaacgacgtggagaagatggccgcacacatgcggatggtccatatagacgaggaaatggggcctaagactgattccaccctgagcttcgaccttactcttcaacagggaagccacactaacattcatctgctagtgactacttacaacctgagggacgctccagccgaaagcgttgcctaccacgcccagaacaatccgccagtgccccctaagccccagccgaaagtccaggagaaggctgatattcctgtcaaaagtagtccccaggcagctgtgccgtataaaaaagatgttggaaagaccttgtgtccactttgcttctcgatcctcaagggcccaatttcagatgcactcgcacatcatctgagggagcggcatcaggtgatccagacagtgcaccctgtagagaagaaactgacgtataagtgtatccactgtcttggagtgtacacctcgaatatgaccgcttcaacaatcaccctgcacctggtgcactgcaggggggtcggaaagacgcagaatggacaagataagaccaatgcacccagtcggctgaatcaatcaccatccttagctcccgtcaaaaggacatatgagcagatggagttcccactgctgaagaagcgtaagcttgacgacgactccgacagtcctagttttttcgaggaaaagcctgaagaacccgtggtgctcgccctcgatcctaagggacacgaagacgactcatatgaagctaggaagagcttccttactaaatacttcaacaaacagccttatccaacgcggagagagatcgagaagttggctgcgtccctctggctgtggaagtcagatatcgcttcccacttctctaataaaaggaaaaaatgtgtgcgggactgcgagaagtataagccgggagtactcttaggattcaacatgaaagagctgaataaagtgaaacacgagatggacttcgatgctgagtggctttttgaaaatcatgatgaaaaggattctagagttaacgctagcaaaaccgccgacaagaagctcaacttgggcaaggaggatgatagcagctccgactcatttgaaaatctcgaagaggaatctaacgaaagcggctctccatttgatccggtctttgaggtggagcccaagattagtaacgataaccccgaagaacacgttttaaaagtcattccggaggacgcatcagaaagcgaagagaagcttgatcaaaaagaggatgggtcgaagtacgagaccatacatctgacggaggaaccgacaaagctgatgcataatgcctccgactccgaggtggaccaggacgatgtggtcgaatggaaggacggcgcaagcccatcagagtccgggcctggcagtcagcaggtgtctgactttgaggacaatacttgtgaaatgaagcccggtacctggagtgatgagtcatcacagtcggaagatgctcgctcttcgaaacccgctgccaaaaagaaagccaccatgcagggagacagggaacagctcaagtggaaaaattcaagttatgggaaggttgagggattttggagcaaggatcagtctcaatggaagaatgcgagcgaaaatgacgaaagactatctaacccccagattgaatggcagaacagcaccatcgactctgaggatggggagcaatttgacaacatgacagacggagtggccgagcccatgcacgggagccttgccggtgtgaaattgtcttcccagcaggcatag

SEQ ID NO: 4160 - DNA, 3309 bp, synthetic construct
  misc_feature 1..3309: note = source = /note="Description of Artificial Sequence: Synthetic coding sequence"
  source 1..3309: mol_type = other DNA
atgtttcaactccccgtgaacaacctgggatcgcttcggaaagccaggaagaccgttaagaagatcctttcagatattggactggaatactgcaaggaacacatcgaggatttcaagcaattcgagccaaatgatttttatctgaagaacaccacctgggaggacgtggggttatgggacccatcactgacaaagaaccaggactatagaacgaagcccttttgttgctctgcctgcccattttcctctaaatttttctccgcctacaagtctcactttcggaatgtccactccgaggacttcgagaacagaatcttgctaaattgcccttattgcacatttaacgcagacaagaaaactctcgagacgcacataaagatcttccacgcccctaacgcatctgcgcctagctcgtctctgtcaacctttaaggataaaaacaaaaacgacggtttaaagcctaagcaggctgattcggttgagcaggccgtgtattactgtaagaaatgcacctacagggacccgctctatgagattgtgaggaagcacatctaccgggaacatttccaacatgtcgctgctccctacattgccaaggccggagagaagagtctaaacggggctgtgcctctagggagtaatgctcgagaggagtcctccattcactgtaagcgatgtttattcatgcccaaatcgtatgaggccctggtgcagcacgtcattgaggatcatgaaagaattggttaccaagtgactgctatgattggacacactaatgttgtagtgcccaggagcaagcccttgatgctgattgcgcctaaaccccaggataaaaaatcaatgggactccctccacggatcggaagtctggcctcagggaatgttcgctccctgccctcacagcagatggtcaataggttgagcataccgaaacccaatcttaattctacaggagttaacatgatgtcaagtgtgcacctgcaacagaataactacggcgtgaagagcgtaggtcaaggctattccgttggccaatcaatgaggcttggtctgggaggcaacgcacctgtgtcgatcccgcagcagtcacagtccgtaaaacaattgctaccctctgggaatggcaggtcctatggactgggtagtgaacagaggagccaggcccctgccagatattctcttcagtcagctaatgccagctccctgtcatctggccaattaaaatcacccagccttagccagtctcaggcttctagagttttggggcaaagttccagtaaacctgcggctgccgcaacaggacctccaccgggtaatacaagcagcactcaaaaatggaagatttgcaccatctgcaatgaactctttcccgagaacgtgtactcggtgcacttcgagaaagagcacaaggctgaaaaagtaccggcagtcgccaattacatcatgaaaatccacaattttaccagcaagtgcctctactgcaaccgctatttgcctactgacacactcctcaatcacatgctaatccacgggttgtcatgcccatattgccgctccaccttcaacgatgtcgagaagatggctgctcacatgcggatggttcacatcgacgaggaaatggggcctaagaccgattccaccctgagctttgacctgactcttcagcagggatctcacactaatatacacctactggtgacgacctacaatctccgcgatgcacctgctgagagcgtcgcataccacgctcagaacaaccctcctgtccccccaaagcctcagcctaaagttcaggaaaaggctgatattcctgtgaagtcatctccccaggcagccgtgccctacaagaaagatgtgggtaagaccctgtgtcctttgtgtttttccattctgaagggcccaatctcagacgccctggcccaccacttgcgtgaacgacaccaggtaatccagaccgtgcatcctgtggagaaaaagctaacctataaatgcatccattgcttaggtgtttatacatcaaatatgactgccagcactattacccttcacttggtccattgtagaggcgtgggaaagacacagaacggacaggacaaaactaacgcaccgagcaggctcaatcaaagtccaagtctggcacccgttaagagaacctatgagcaaatggaattccctctgttgaagaaacgcaagctggacgacgacagtgactctccctccttttttgaagagaaacccgaagagcctgtagtgttggcactcgacccaaaaggtcacgaagatgactcatacgaggctaggaagtcctttctaaccaaatacttcaacaagcagccataccctactcggcgtgaaattgagaagttagctgcttccctctggctgtggaaatccgacatagcctcacatttcagcaataaaaggaagaagtgtgtgcgggattgcgaaaagtacaagccaggggttctcctcggcttcaatatgaaagagctgaataaggtgaaacatgaaatggattttgatgccgagtggttattcgagaatcatgatgaaaaagactcacgtgttaacgcttctaagaccgcagacaagaaactcaacttagggaaagaggatgatagcagctcagattcctttgaaaacttggaggaagagtcaaacgagtcaggctccccttttgaccccgtcttcgaggtggagccaaaaatttccaatgacaatcccgaggagcatgtgctcaaagtcatccccgaagacgcttcagaaagtgaggaaaagctcgatcagaaggaggacggttctaaatatgagacaatccaccttaccgaggaacccactaagctgatgcacaacgcctccgactctgaggtcgaccaagacgacgtcgtcgaatggaaggacggagcctccccctccgaaagcggtcccggatcccaacaggtgtcagactttgaagataatacctgcgagatgaagcccggtacttggtccgacgagagctcccagtccgaagacgcaaggtcctctaagcccgctgccaagaaaaaggccactatgcagggggaccgggagcagctcaagtggaagaatagctcctacgggaaagttgaaggcttctggtccaaggatcagtcccagtggaaaaacgccagtgaaaatgacgaaagactgtccaaccctcagatcgaatggcagaattctactattgacagcgaagatggtgagcaatttgataacatgacagatggcgtagctgagcccatgcacggctcactagccggtgtaaagctgtcttcgcagcaggcctag

SEQ ID NO: 4161 - DNA, 3309 bp, synthetic construct
  misc_feature 1..3309: note = source = /note="Description of Artificial Sequence: Synthetic coding sequence"
  source 1..3309: mol_type = other DNA
atgttccaattgcccgtcaacaacctgggcagcctgaggaaggcccgaaagaccgtcaagaaaattctgtcagatatcggactggagtactgcaaggagcacattgaggacttcaagcaatttgagcccaatgacttttacctgaagaacaccacttgggaagacgtgggactctgggatcccagtttgacgaagaatcaggattacagaaccaagcctttctgctgttcggcttgccccttttcctccaaattctttagtgcttacaagagtcatttcagaaatgtgcactcagaagactttgagaatcggattctgcttaactgtccatactgcacattcaacgctgacaagaagacgctggagacccacatcaaaatcttccacgcccctaatgcttcagccccatcctctagcctgtcaaccttcaaagacaagaacaaaaatgatgggctgaagcccaagcaggcagatagtgtggagcaggccgtctattattgtaaaaagtgcacttaccgcgaccctctctatgaaattgtgaggaaacatatttaccgcgaacacttccaacatgttgcagctccctatatcgcaaaagccggagaaaagagtttgaacggcgctgtccccttgggttccaatgcccgagaagagtcatccatacactgtaagaggtgtttatttatgcccaagagttatgaagcgttggtccagcacgtaattgaggaccacgagagaatcggataccaagtgacggccatgatcggacacacgaacgttgtcgtgccacgatccaagccgctgatgttgatcgcccctaaaccgcaagataagaagagcatggggttgccaccgaggatcggttcactggcgtctggaaacgtgcgttctctgccttcgcagcagatggtaaacaggctgagcatccctaaaccaaatcttaatagcactggtgtcaatatgatgtcttcagtacacctccagcagaataactacggcgtcaagtcagtgggacagggctatagcgtgggccagtcaatgcgcctgggtttgggcggtaacgctccagtgagcattccccagcagagtcaatccgtgaaacagctgttaccctcgggcaatggacggagctacggtctagggtccgagcagaggagccaagcccctgcaagatatagcctgcagagcgctaatgcaagttctttatcttccggacagctgaagtcgccatccctgtctcagagccaagcaagcagggtgcttgggcaatcatcatctaaacccgcagccgcagctaccgggcctccccctgggaacacgagcagcacccaaaagtggaaaatctgcaccatctgtaacgagttgttccccgaaaacgtgtacagtgtgcacttcgagaaagaacacaaggccgagaaagttccagccgtggcaaattatataatgaagatccacaactttacttccaagtgcctttattgcaatcgttaccttcctactgacacgctgcttaaccatatgctgatccatggtcttagctgcccatattgtagaagcacctttaacgacgttgaaaaaatggcagctcatatgcggatggtgcacatcgatgaagagatgggccctaagaccgattccaccttgagttttgatcttaccctgcaacagggatcccatacaaacatccatctgttggtgacaacgtacaacctgagggacgccccagcggaaagcgtggcctatcacgctcagaacaatcctccagtgcctccaaaacctcagccgaaggttcaggagaaagccgatatcccagtcaagagctcaccccaagccgctgtaccctacaagaaagacgttgggaagaccctatgcccactctgcttcagtatcctgaagggacccatttccgacgcactggcacaccatctccgagagcgacaccaggttatccagacagtgcaccccgttgagaagaaactcacatataagtgcattcattgtctaggcgtctatacttctaacatgacagcgtcgacaattacgctgcacctggtccactgcagaggcgtaggcaaaacccagaacggccaagacaagacaaacgcccctagccgcctgaaccagagtcccagtttagcccctgtgaagcggacttatgagcaaatggaatttcctctcttgaagaagcgcaaactagacgacgactctgattctccttccttcttcgaagaaaagcccgaggagccagtcgtgctggcgctggatcctaagggccatgaggacgactcatatgaagctagaaagtccttcctgacaaaatacttcaacaaacagccttaccccaccaggagggagatcgaaaagttggcagcatccctttggctctggaagagcgacatcgcgtcccatttctcaaataagcggaagaagtgtgtgcgggattgtgagaagtacaaacctggggtgctgcttggctttaatatgaaggagctgaacaaagttaagcacgagatggatttcgacgccgagtggttgtttgaaaaccacgacgagaaggactctagagtcaacgcttccaagactgccgataagaaactgaaccttggtaaagaggacgattcctcgagtgattctttcgagaatctggaggaggagtcaaatgagtctggcagtccattcgatcctgtgttcgaagttgaacccaaaatttccaacgacaacccggaggaacacgtgcttaaagtcatccccgaagacgcttccgagtcagaggagaaactggaccagaaggaagatgggtcgaagtatgaaaccattcacctgaccgaggagcctacaaaactcatgcataacgcgtctgattccgaagtcgaccaggacgacgtggtcgaatggaaggatggggcttctccttctgaaagtggcccaggatcccagcaggtctctgacttcgaagataacacctgcgagatgaagccgggtacctggagcgatgaaagctctcagagcgaggacgccagatcatctaaacccgcagcgaagaagaaagcaaccatgcaaggcgacagagaacagctgaagtggaaaaactcatcctatggcaaggtagagggattctggagcaaggaccagtcacagtggaagaatgcaagcgaaaatgatgaaaggctatctaacccccaaattgagtggcagaattccacaatcgactctgaggacggagagcagtttgataatatgaccgatggcgtggcagagccaatgcatggttcattggctggtgttaaattaagctcccaacaggcgtag

SEQ ID NO: 4162 - DNA, 522 bp, synthetic construct
  misc_feature 1..522: note = source = /note="Description of Artificial Sequence: Synthetic coding sequence"
  source 1..522: mol_type = other DNA
atgtttcagctgcccgttaacaaccttgggtccctcagaaaggcccgaaagactgttaagaaaattctgagcgatatcggcctggagtactgcaaggagcatatcgaggatttcaaacagttcgaaccaaacgatttctatctgaagaacactacatgggaggacgtggggctatgggatcccagtttgaccaaaaatcaggattaccgcaccaagcctttttgctgctctgcatgcccttttagtagcaaatttttcagtgcttataagtcacactttcgcaacgtccacagtgaagactttgagaacagaatccttctcaattgcccctactgcacttttaatgctgataagaagacattagaaactcatattaagattttccatgccccaaacgcatccgctccctctagttccctatctaccttcaaggacaagaataaaaacgacgggttgaaacccaagcaggcggactcagttgaacaggctgtatactattgtaaaaagtgtacatacagatag

SEQ ID NO: 4163 - DNA, 441 bp, synthetic construct
  misc_feature 1..441: note = source = /note="Description of Artificial Sequence: Synthetic coding sequence"
  source 1..441: mol_type = other DNA
atggtgatattgacagaaccagaaggggcacccaacatcacggcaaacctgacatcttccctactgagtgtttgcggttggtcgcagacgattaatcctgaggacgacactgaccctggacacgcagatctcgttctctacattacaaggtttgatctcgaactgcccgacgggaatagacaggtgcgaggcgtcactcagcttggaggtgcctgttccccaacgtggagttgcctcattaccgaggatacaggcttcgacctcggcgttactatcgcccacgaaatcggacacagaatatgtgcgcgaccatctcctgccacccaaactcgctggacaaaggccgctgctgcagcttcctcgttcctgagctggatgggccagaacgtcgcttggagaagtggcgctcctagagtcgccgctgccccatggtggtcctag

SEQ ID NO: 4164 - DNA, 4116 bp, synthetic construct
  misc_feature 1..4116: note = source = /note="Description of Artificial Sequence: Synthetic coding sequence"
  source 1..4116: mol_type = other DNA
atgcatcagaggcacccacgtgctaggtgccccccactgtgcgtggccggaatcctagcctgtgggtttctgctgggctgttgggggccatcacattttcagcagagttgtctgcaggccttggagccacaggccgtgtcttcctacttgagcccaggggcaccattgaagggtcgtcccccaagccctggctttcagcgtcagagacagcgccagaggcgggctgccggagggattctgcatctagaactgttagtcgccgtgggaccagacgttttccaggcacaccaggaggataccgaaaggtacgtgctgacaaatctgaacatcggggcagagcttctgcgcgatcccagtttgggagcccagtttagggtgcacctggtgaaaatggtgattcttaccgaacccgagggcgctccgaacatcaccgcgaacttaacatcctcactgctgtctgtctgcggctggagtcagacaatcaatcccgaagacgacacagatcccggacatgcagacttggtcctgtacatcacacggtttgacctagaactccccgatggcaatagacaagtgcggggagttactcaactgggaggcgcatgtagtcccacatggtcctgcctgatcactgaggatactggttttgatttgggcgtcaccatcgcgcacgaaattggtcacagtttcggcctggagcatgatggtgctcctgggagcggctgcgggccaagtggtcacgttatggcctccgatggagctgcccctagagcgggtcttgcgtggtccccttgttccagacgccagctgctgagcctgcttagcgccggacgggctcgctgcgtttgggacccgcctagaccacagcctggatccgctggccatcccccagacgctcaacccggactctactactctgctaatgaacagtgcagagtcgcctttggacctaaggcggtagcatgtacgttcgccagggaacatctcgacatgtgtcaggccctgagttgtcataccgaccctttggatcaatcaagctgtagtcggctgcttgtgcctttgcttgacggaacagaatgtggtgtggagaaatggtgcagcaagggtagatgccgctccttggtcgaactcactcctatcgcggctgtgcacgggaggtggagttcatggggacccagatccccttgcagccgaagctgcgggggtggagttgtaacaaggagaagacaatgcaacaaccctcgtcccgcattcgggggacgggcatgcgtgggcgctgatctgcaggccgagatgtgcaatactcaggcatgtgagaagacacaactggaattcatgtctcagcagtgcgctagaacagacggccaaccattacgatcatccccaggaggagcctctttctaccactggggtgccgcagtgcctcactcccaaggggacgccctttgtagacacatgtgtcgggcaatcggggagtccttcatcatgaagcggggtgactctttcctcgacggaacacgttgtatgccttctggccctcgagaggacggcacactgtcgctttgcgtgtccggatcctgtaggaccttcggttgtgatgggcgtatggactcccagcaggtctgggatagatgtcaagtgtgcggcggtgacaactctacctgttcccctcgcaaaggctccttcaccgccggacgcgctagggaatacgttaccttcttaacagttacaccaaacctaactagcgtttatattgcaaaccaccggcctctgttcacccacctcgcggtcagaattggcggtcgctacgtggtggccggtaagatgtctatcagtcctaacaccacttatccttctttgctagaagatggaagggtggaatacagagtggcactcactgaggataggctgcctcggctcgaagagattagaatctggggaccgcttcaggaggacgcagacattcaggtttatcgcaggtatggtgaagagtacggcaatctaacccgccctgatatcacattcacttactttcagccaaagccacgccaggcctgggtctgggcggcagtgcggggaccctgtagtgtgtcgtgtggcgcaggactccgatgggttaactactcctgtctggatcaagctcggaaggaactcgtggaaacagtgcagtgtcaaggtagccagcagcccccagcttggccagaggcctgcgtcctcgagccatgccctccttactgggcggttggagattttggcccatgctcagcttcatgcggaggagggctgcgagagagacctgtgaggtgcgtagaggcccaaggcagtttgttgaaaaccctcccccctgctagatgcagggcgggtgcgcagcagcccgctgtggccctggagacgtgtaatccacagccatgccccgctcgatgggaagtctctgagcctagctcctgcacatcagccggaggagctggcctggccctggagaacgagacctgcgtgccaggcgctgacggccttgaagcccctgtcacagagggcccagggagtgtagacgagaaactgcctgcaccagaaccttgtgtgggcatgagttgcccgccaggttggggccacctggacgccacttccgccggtgagaaagcacccagtccttggggaagtatccgcacaggcgctcaggccgctcacgtatggacccccgctgccggaagttgttcggtatcctgcgggagagggctgatggaattgcggtttctctgcatggacagcgctctccgtgtgcctgtacaagaggagctgtgcggcttggcctctaagcctggctctcgcagagaagtatgtcaagcagtgccctgcccggcacgctggcagtacaaattggcggcttgcagtgtatcctgcggtcggggtgtggttcgcagaattctgtattgtgccagagcacacggcgaagacgacggggaagagatcctgttggatactcagtgccagggcttgccccgacctgagccacaagaggcttgttccctggaaccatgcccgcctagatggaaggtaatgtccctcggaccctgctccgcaagttgcggcttgggtactgctcgtagaagcgtagcttgcgtccagttagatcagggacaggatgtggaggtcgatgaggcagcatgcgctgctttggtgaggcctgaggcatctgttccatgtctcattgcagactgtacttatcggtggcacgtgggcacttggatggagtgttccgtgagctgcggagatggcattcagcggcgaagagatacctgccttggtccccaggcacaggccccagttcctgctgacttctgccagcatctccccaagcctgtgaccgtgcgcggatgctgggcaggtccctgcgtggggcagggcgcatgtggccgtcagcacctcgaaccaactgggactatcgatatgcgtgggcctggtcaggcggactgcgcagtcgcaatcggtcgtccactcggcgaagtcgtcacattaagagtgctggaatccagcctgaactgcagcgccggagacatgctcctgctctggggcagactgacatggaggaagatgtgccgcaagctgctggacatgaccttctcttcaaagacaaacaccttggtggtgcgccagaggtgcgggaggccgggtgggggtgtcctcctgcgttacgggtctcagctggctcctgagacattctatcgagaatgcgatatgcaactctttggaccatggggggaaatcgtgagcccgtctctcagtccggctaccagcaatgcaggcggttgtaggctattcattaatgtggctccacacgcacgcattgcgattcatgcgttggccacaaatatgggtgccggaacagagggggctaatgcttcctacatcctgattcgcgatactcatagcctgaggactacagcctttcacggccaacaggtactctattgggaatcggaaagttctcaagcggagatggagttctcagaaggctttctgaaggcccaggcgtcactcagagggcagtactggacacttcagagctgggtgcctgaaatgcaagatccacagagctggaagggcaaggaaggcacttag

SEQ ID NO: 4165 - DNA, 4023 bp, synthetic construct
  misc_feature 1..4023: note = source = /note="Description of Artificial Sequence: Synthetic coding sequence"
  source 1..4023: mol_type = other DNA
atgcatcagcgtcaccctcgagctaggtgccctccactgtgcgtcgccggaatcctcgcttgcggctttctcctgggatgttggggcccaagccattttcagcagagctgtttgcaggcacttgagccgcaggcagtcagtagctacctcagccccggagctccactgaagggacgccctccatctcccggtttccaacggcagagacagcgccaacggagagccgctggcggaattctacacctagagttactcgtggctgtgggccctgatgtgttccaggcccatcaggaagacacagagagatacgtgctgactaacttgaatattggggcagagcttctaagggaccccagcctgggcgctcagtttcgggtgcacctggtgaaaatggtcattcttacagagcccgagggggctccaaatatcactgcaaatctcacatccagcctccttagcgtgtgtggctggtcacagacaatcaacccagaagacgacactgaccctggccacgccgatctggtactctatattaccaggtttgatctggagctgcctgatggaaaccggcaggttagaggcgtgactcaactaggtggcgcttgcagccctacttggagctgtttgattaccgaggacaccggctttgacttgggcgtgactatcgctcacgagattggacacagctttggactcgagcacgacggagctccgggatccggatgtggcccatcaggccacgtcatggcctccgatggcgctgcccctagggccggattggcctggtccccctgcagcagacgtcaactgcttagtcttctcagcgctaacgagcagtgcagagtggcttttggacctaaggcagtggcttgcaccttcgccagagagcatctggatatgtgtcaagccctgtcctgtcacaccgatccactggatcagagttcttgttctaggttactggttccactgctcgatgggactgaatgtggagttgaaaagtggtgcagcaaggggagatgccggagcttagtggagctgactccaatagccgctgtgcacggcagatggtcgtcgtgggggcctcgatccccatgtagcagatcttgcggcggtggcgtagttacccgtcgtcgccagtgcaataacccacggcctgcttttggaggacgagcctgcgtgggtgctgatttgcaggctgaaatgtgcaatactcaggcatgcgaaaagactcagctagagttcatgagccagcagtgtgctagaactgacggccagcctttacggagcagcccgggaggggcttctttctaccactggggtgcagctgtgcctcacagccagggagatgctctgtgccgacatatgtgcagggccattggtgagagcttcatcatgaagcggggtgatagctttctggacggcacacgttgtatgccttctgggcctcgagaggatgggaccctaagtctgtgcgtgtccggttcctgccggacattcgggtgcgatgggcgaatggactcgcaacaggtgtgggatcgatgccaagtgtgcgggggagataacagtacttgtagcccccgaaagggttcgttcaccgctgggcgtgcgagagagtatgttacgttcctgacggttactcctaacctgacctccgtgtatattgcaaatcaccgaccattgtttacgcacctggccgtgaggatcggagggaggtacgttgtggccggtaagatgtctatctctcctaatacgacctatccatctctgctcgaagacggacgggtggagtacagagttgctctcaccgaagacaggttgcccagactggaggagatccggatctggggtcccctccaagaagatgccgacatccaggtttaccggagatatggggaggagtatgggaatctgactaggcctgacatcacgttcacctactttcagccaaagccacgacaggcctgggtttgggctgcagtcaggggcccttgtagcgtttcgtgcggcgctggactccgttgggtcaattacagttgtctggaccaggctcggaaagaactagtagagacggttcagtgccaggggagtcagcagcctcccgcttggcccgaagcctgcgtcctcgaaccatgccccccatattgggccgtaggagattttggcccatgcagcgcaagctgtggcggagggctgagagagcgacctgtcagatgtgtggaggcccagggctcactgctaaagactctgccacccgcacggtgtagggccggagcccagcaacctgccgttgcacttgaaacatgcaacccccagccttgtcctgcacgctgggaggtatctgagcctagcagttgtacatcagctggtggcgctggcctggccctggaaaacgagacatgcgttcccggagcggatgggctggaagcacctgtgacagaggggcctgggtcggtcgacgagaagttgcccgctccggaaccctgtgtgggcatgagctgccctccaggatgggggcatctcgatgctacaagtgctggtgaaaaggcgccaagtccttggggctctatcaggacgggagctcaggctgcacacgtgtggacacctgctgcaggaagctgtagcgtgtcctgcggacgcggactgatggaactgcgattcttgtgcatggattctgcactcagggtgcccgtccaagaggaattgtgcgggctcgcctccaagccgggaagtagaagagaggtttgccaggctgtcccctgcccggcacgttggcagtataaactcgcagcctgttcagtgagctgcggccgtggggtggtccgccgaattctgtactgtgcccgtgcccatggcgaagatgacggtgaagagattttgctggatactcagtgtcagggcttgccaagacccgaaccacaggaggcctgcagcttagagccttgccccccacgctggaaggtgatgagcctgggtccatgcagtgcctcgtgtggcctggggaccgctagacgctccgtggcatgtgttcagctcgaccaaggacaggatgtggaagtggacgaggctgcctgcgccgcactcgtgaggcccgaagcctctgtgccgtgcctcatcgctgactgcacgtatagatggcatgtgggaacttggatggagtgctctgtgagctgtggagatgggatacaacgacgacgggacacatgtctgggaccccaagcccaggcccctgtccccgcagacttctgccagcacctccccaagccagtaaccgtccgagggtgttgggcaggcccatgtgtggggcagggtgcgtgcggtcgacagcacctggagcccaccgggaccatcgatatgaggggcccaggtcaggctgattgtgctgtggctataggcagaccactgggagaggttgtgaccctgcgggtgctggagagcagcctaaactgcagcgccggagatatgctgcttctatggggtcgcttgacatggcggaagatgtgtaggaagctactggatatgacattttcttctaagacgaacacactggtggtaagacaacgctgtggtcgacctgggggaggtgtactactacggtatggtagccagctcgcccctgaaactttctaccgagaatgcgacatgcagttatttggaccatggggcgagattgtgtcaccttccctgtcgccggcaacctccaacgccggtggttgccgcctctttattaatgtcgccccacacgccaggatcgccattcatgctttagccacgaatatgggcgcaggcaccgaaggggctaacgctagctatattctcattagagacacccatagtttgcggactaccgctttccatggacaacaggtgctgtactgggaatccgaaagctcgcaggcggaaatggagttctccgagggattcttaaaagcccaggcctccctcagggggcagtactggaccttgcagagctgggtacccgaaatgcaggatccacaatcctggaagggcaaagagggaacgtag

SEQ ID NO: 4166 - DNA, 672 bp, synthetic construct
  misc_feature 1..672: note = source = /note="Description of Artificial Sequence: Synthetic coding sequence"
  source 1..672: mol_type = other DNA
atgcggggtccagggcaggcagactgcgcggttgcaatcggacgccctctcggcgaggtcgtcacccttcgggtgctcgaatcttccctgaactgctccgctggggatatgctgctactctggggccgactgacctggcggaaaatgtgccgaaagcttctggacatgactttttcttcaaaaacaaataccttggtcgtccgtcagcgttgcggcaggccaggcggtggggtgctcctgagatatggatcacagctcgcgcctgagacattctacagagagtgcgatatgcagttatttgggccatggggggagattgtgtctccatcgctctcccccgctaccagcaacgctggcggttgtaggctcttcataaatgtggccccacatgcacggatagcgattcacgcgctggccacaaatatgggcgcaggcacagagggtgctaacgcatcgtacattctaatcagagatactcatagtcttcggacaaccgcgtttcacggtcagcaggtgctgtactgggaaagtgagtcgagccaggctgagatggaattctctgagggcttccttaaagcacaagccagccttcggggtcagtattggactctgcaaagctgggtccctgagatgcaggaccctcagtcttggaaaggaaaggagggcacatag

SEQ ID NO: 4167 - DNA, 1035 bp, synthetic construct
  misc_feature 1..1035: note = source = /note="Description of Artificial Sequence: Synthetic coding sequence"
  source 1..1035: mol_type = other DNA
atgcaccagcgccacccacgggcacggtgtccccctctgtgtgttgccggaattctagcatgcggattcttgctgggctgttgggggccttctcacttccaacagtcatgtctgcaggccttggagccccaggcggtaagtagttacctttcaccaggggctcctctgaaaggccgacccccttctccaggctttcagcgacagagacagagacagcggcgagcagcaggcggtatactccacctcgaactgttggtcgccgtgggtcctgacgtgttccaggcacaccaggaggacacggaacggtacgtactgacaaacctgaatattggagctgagttgctcagagatccctcccttggcgctcagttccgtgtccacctggtgaaaatggttattctgaccgagcccgaaggcgctcctaacataactgccaacctgacatcttccctcctctctgtttgtggatggtctcagaccatcaacccagaggatgacaccgaccctggccatgccgacctggtcctgtacattaccagattcgacctggagctccccgacgggaatcgtcaggttcgaggagtgacccaactgggcggagcctgctctcccacctggtcctgcctcattaccgaggacacaggattcgatctgggcgttaccatcgcacacgagattggccacagtttcggactggagcacgatggagccccaggcagcggatgtggccctagcgggcatgtgatggcatctgacggcgctgcacctagggctggtctggcatggtccccgtgttcgagaagacagctcctgagtctgttacgaccagttcctcccagtcccctgcccctactggcgacacatttgtgtgccggacgatccctttcccttgggccatcccaagagcccgctcctggagggggaaggggccctcgcactcccgtccctacgcataagcgcccaagattccagacactccccagtagttgtcctctgttgagacctgcgtcatcccgctgcacccctagggactag

SEQ ID NO: 4168 - DNA, 831 bp, synthetic construct
  misc_feature 1..831: note = source = /note="Description of Artificial Sequence: Synthetic coding sequence"
  source 1..831: mol_type = other DNA
atgcaccagcgacatcctcgcgctcgttgtccacctctgtgtgtggccggtatcctggcatgcggattcctcttggggtgctggggcccatctcatttccagcagtcatgccttcaggctttagaaccgcaggctgtttccagctatttatcccctggcgctcccctcaaaggacggcctccttctcctggctttcaacggcagaggcaacgccaaagaagggccgcaggtggaattctccacctagaactcctggtggccgtcggaccagacgtttttcaagctcaccaggaggacaccgagaggtacgtgttgactaatctcaacattggagccgagcttctacgggaccctagtctcggcgcacagttccgcgtgcacctcgtgaaaatggttattcttaccgaacccgaaggagctccgaacataacggctaaccttaccagctcccttctgagtgtgtgtggctggtcccagaccataaatccagaggacgatacagaccccggacacgcagacctggtgctgtatataacgaggttcgacctagagcttcctgacggcaatcgacaagtgagaggtgtgactcagctcggtggggcttgctcaccaacctggtcctgtctgatcacggaggataccggcttcgacttgggagtcaccatcgcacacgagatcggacacaggatctgtgccagaccctcaccagcgactcaaacgcgctggacaaaggctgccgcagcagcatcctcctttctgtcctggatgggacagaatgtggcttggaggtctggggctcctagagtggctgctgccccatggtggtcctag

SEQ ID NO: 4169 - DNA, 4284 bp, synthetic construct
  misc_feature 1..4284: note = source = /note="Description of Artificial Sequence: Synthetic coding sequence"
  source 1..4284: mol_type = other DNA
atgcatcagaggcaccctagggcgcgatgcccccctctatgcgtggccggaatcctcgcttgtggctttctgttggggtgttggggacccagtcatttccaacagtcctgcttgcaggcgctggagccacaggccgtgtcgtcttatctgtcccctggcgctcccctgaagggtcggccaccatctcctggtttccaaagacaaagacaacgccagaggcgtgcagcgggaggaatcctgcacctggagctgctcgtcgccgtaggcccagatgtttttcaggcccatcaagaggataccgagcgctatgtcctgactaatctgaacatcggggcagagctcctgcgggaccctagcctgggggcacaattccgtgtccatctcgtgaaaatggtcatcctgacagagccagagggggctccaaatattacagctaacttaacttcctctctcctgagcgtgtgcggatggagccagactataaaccctgaggatgataccgatcccggacacgccgatctagtgctgtacattactcggtttgacttggagctgccggacggcaataggcaagtgagaggcgtcactcagctaggcggtgcttgcagtcccacgtggtcctgcttgatcaccgaggacaccggatttgacctgggggtaacaattgcccatgagattggccactcattcggcctcgagcatgatggggcacctggcagtggctgcggtccaagcggacacgtgatggcttcagacggcgctgctcccagagccggactcgcatggtcaccatgtagccgaagacagctgctcagccttctgagcgccggtagagccagatgcgtgtgggatccccctcgaccccaaccagggtctgctggccacccccctgatgcacagcctggtctgtattattccgcaaatgagcaatgtcgagttgccttcggtcctaaggcagttgcatgtacctttgctcgcgagcacctggatatgtgccaggctctcagctgtcacaccgacccactggaccagtcttcatgttctcggctcttagtgcccctgcttgacggcaccgagtgcggcgtcgagaagtggtgttcaaaagggagatgtagaagtcttgtcgagcttacacccattgctgctgtgcatggtcgctggtccagttggggccctcgatccccgtgcagccgaagttgcggaggcggagtggtaactcgccgaaggcagtgcaataatcctcggccagccttcggcggtcgcgcatgcgtgggagctgatctgcaggccgagatgtgtaacacccaggcctgtgagaagacccagctggagttcatgagtcagcaatgtgccaggacggacggtcagcctctcagatccagccctgggggagccagtttctaccattggggggctgcagtcccccatagccaaggtgatgcattatgtcggcatatgtgtagagctattggcgaatcatttattatgaagagaggggactcatttcttgacggtactcgctgcatgccgtctggaccacgcgaggacggtacgttgagtctctgtgtgtctggctcatgccggacatttggctgtgatggcaggatggattcacagcaggtatgggaccgctgccaagtttgcggaggcgacaactcaacatgctcaccacgcaaagggagttttaccgctggacgcgcacgtgagtatgtgaccttcctgacagtgactcctaacctgacatcggtgtacatcgccaatcatcgtccactcttcacacacctggccgtgcggatcggaggcagatacgtggtggcgggaaaaatgtccatctctcccaacaccacttacccttcccttctggaggacggacgggtcgaataccgagtggccctgacagaagataggttaccccgtctagaggaaatcaggatctggggtcctttgcaggaggatgctgacatacaggtctataggcggtatggagaggagtatggcaatttaacgcggcctgacataaccttcacatacttccagccaaaacccagacaggcatgggtttgggccgcagtacgtggaccatgctccgtctcatgcggcgctggacttagatgggttaactattcctgcctggaccaggcgagaaaggagctcgtggagacggtgcagtgtcagggctcccaacagccaccggcttggccagaagcatgtgtgctggaaccatgccccccttactgggccgtcggggacttcggaccgtgctccgctagttgcgggggtggattgagagagagacctgtcagatgcgtggaagctcagggatccctgctgaagacccttccaccagctaggtgtagagctggcgctcagcaaccagccgttgctttagaaacatgtaacccccagccctgcccggcaagatgggaagtatcagaaccctctagttgcacctcagctggcggtgccggacttgccctggagaacgagacttgtgtccccggtgcagacggattagaggcaccagttaccgagggacctggttccgtcgacgagaagctgcccgctcctgagccctgcgtcggaatgtcatgccctcccggatggggccacttggacgccacatccgcaggtgaaaaagctccatctccgtggggaagcattaggacgggcgcacaggcagcccacgtctggacacccgcagcaggttcttgctcagtcagttgcggccgaggcctgatggagctccgctttctttgtatggattcagccctgagggtgccagtccaggaggaactctgcggactcgcctctaaacccggtagcaggagggaggtttgccaggcagtgccgtgtccggctagatggcagtacaagctcgctgcttgttccgtatcatgcggcaggggagtggtgcgcagaatcttgtattgtgccagggctcacggcgaagatgatggagaagagatcttacttgatactcagtgtcagggccttccccgacctgagccccaggaggcctgctccctggaaccatgtccacccagatggaaggtgatgtccctgggtccctgctctgcatcatgtggattgggtaccgctagacgtagtgtagcctgcgtgcagttagaccaggggcaggatgtggaggttgatgaggccgcatgcgccgcacttgtgcgaccagaggcttcggtcccgtgccttattgcagattgcacatacaggtggcatgtgggcacatggatggaatgttctgttagctgtggcgatgggattcaacgccgacgagatacatgcctgggccctcaggcgcaggcaccggttccagccgatttttgccaacatcttccaaagccggtgaccgtgcggggatgctgggctggcccatgcgtgggccagggcactccatcactcgtcccccacgaggaagcagccgctcccggtcgcaccactgcgacgcccgcaggggcaagcctggaatggtcacaggccaggggcctactatttagcccagccccacaacctcgtagactcctgccaggcccacaggagaatagtgtccagtccagcgcttgtggaaggcagcatttggagccgactggaacaattgacatgcgcggacccggtcaagctgattgcgcggtagcgattggtagacccctgggagaagtggtcaccctgagggtgttggaatctagcctgaattgctcagccggtgatatgctgttgctctggggcagactgacctggagaaagatgtgccggaaactgctggatatgaccttcagctcaaagacaaacaccctggtcgttagacagcggtgtggaaggcctggcggaggcgtcctcctgcggtacggctcccagctcgcgcctgagaccttctacagggagtgcgatatgcagttgttcggcccatggggcgagatagtgtctccttctctgtccccagctacttccaatgcaggagggtgcaggctgtttattaacgtggcaccacacgcaaggatcgccattcacgcactggctacgaatatgggggctgggacagagggggcaaacgccagctacatcctcatccgggatacacattccttacgcacaacagccttccacgggcagcaggtgttgtactgggaatcggagtcctctcaagccgagatggaatttagcgaaggctttctgaaggcccaggcctctctcaggggacaatattggacattgcagagctgggtgccagagatgcaagatcctcagagctggaaaggcaaggagggaacttag

SEQ ID NO: 4170 - DNA, 1095 bp, synthetic construct
  misc_feature 1..1095: note = source = /note="Description of Artificial Sequence: Synthetic coding sequence"
  source 1..1095: mol_type = other DNA
atggatatgtgtcaggctctctcctgccacaccgatcccctggaccaaagttcctgctccagactgctcgtcccattgctcgacggaacagagtgcggcgtggagaaatggtgctctaaaggacgctgtaggtcactcgtcgaactgactccaatcgccgcagtacacggcaggtggtcctcgtgggggcctagatccccctgttcacgtagctgtggcggtggcgtggtgacccgccgtcggcaatgcaataatcctcgaccagcgtttggcggtcgtgcttgcgtcggtgcagatcttcaggctgaaatgtgtaatactcaagcctgcgaaaagactcagttagagttcatgtcccagcagtgcgcccgtaccgacggccagcccctgaggagctctcccggaggcgcttctttctaccactggggtgcagcagtgcctcactcccagggggacgcactttgcaggcacatgtgcagggccatcggcgaatcttttatcatgaagaggggagattcgttccttgacggaacgcgttgcatgccgagcggaccgcgagaggacggcacgctgtcactgtgtgtcagcggtagctgccgcaccttcggctgcgatggacgaatggatagccagcaagtctgggacaggtgccaagtttgtggaggtgacaatagcacttgttcacctcggaaaggcagcttcacagcgggaagggcgcgtgagtacgtcactttcctgaccgtgacacccaatctcacttccgtctacatcgccaatcatcggcctctctttactcacttggccgtccgcattggcggacggtacgtggtcgctggtaagatgtctatctctccaaacaccacctacccttcactcctagaagacggtcgcgtggagtatagggtagcgttaactgaggatagattaccaaggctggaggagattaggatttggggcccactgcaggaggacgctgacattcaggttggaggcgtgagggctcagctcatgcacattagctggtggtcccgacccggactgggagagagggatctgtgtgctaggggtcgatggcctggaggttctagcgattag

SEQ ID NO: 4171 - DNA, 1095 bp, synthetic construct
  misc_feature 1..1095: note = source = /note="Description of Artificial Sequence: Synthetic coding sequence"
  source 1..1095: mol_type = other DNA
atgccttatcagtaccctgccctgacccctgaacagaaaaaggagctgagcgatatcgctcatcgcatagtagcccctggcaagggtattctggcagccgacgaaagtaccggcagtatcgcgaagcgtctgcagagcatcgggacagaaaacacagaggagaatcgccgtttctatagacagctgcttctaaccgccgacgaccgggtgaacccctgcataggcggtgtaatcctgttccacgaaacattataccagaaagcagatgatgggaggcctttccctcaggtgattaagtctaaggggggagtggtcgggattaaggtcgataagggcgtggtccctctggctggaactaacggcgagaccacaacacagggcctggatggcctgtccgagcggtgcgcccagtataagaaagatggtgccgatttcgccaagtggaggtgcgtattgaagatcggagagcataccccctcagccttagctatcatggagaatgccaacgtattggcacgctatgcctcaatttgccagcagaacggaattgttcccatcgtggaaccggagatactgccggatggggaccatgatctcaagagatgtcagtacgtcacggagaaagttctcgcagctgtgtacaaagctcttagcgaccatcatatctacctggaaggaactctgctgaagccaaacatggtgacacctggtcacgcttgtacgcagaagtttagtcacgaagagattgccatggcaacagttacagctctgcgccgaacagtgcccccagccgtcaccggaatcactttcttgtctggcggacagagcgaggaggaggcttctattaatcttaacgccattaataagtgtccattactgaagccctgggccttaaccttttcatacggccgagcactccaggcctctgccctcaaagcatgggggggtaagaaggagaacctgaaggccgcacaggaggaatacgtgaaacgcgctctggccaactctttggcttgccaggggaaatataccccctccggacaagctggtgccgcagcctcagaatccttgttcgtcagcaatcatgcctattag

SEQ ID NO: 4172 - DNA, 1095 bp, synthetic construct
  misc_feature 1..1095: note = source = /note="Description of Artificial Sequence: Synthetic coding sequence"
  source 1..1095: mol_type = other DNA
atgccttaccagtatcccgcactcactccagagcagaagaaagagctgagtgacatcgctcaccgtatcgtggctcccggaaaggggatactcgccgctgacgaatctacgggatcaattgcaaagcggctgcaatccatcggcaccgagaacaccgaagaaaatcggaggttttatagacagttgctgctcacagcagatgaccgggtgaatccctgcattgggggtgtgattctgttccatgagaccctgtaccagaaggctgatgacggaagaccctttcctcaagttattaagagcaagggaggcgtggtgggaataaaggtggacaagggagttgtccccttagccggaactaacggcgaaacgacaacgcaggggctcgacggcttatctgaacgatgtgcccagtacaaaaaggatggagctgattttgccaagtggcgctgcgtgctgaagattggcgagcacacgcccagtgctttggcaatcatggagaacgctaacgtgctggcaagatatgccagcatatgtcagcagaatgggattgtgccaattgtcgaacccgaaattttgccagacggcgaccacgaccttaaacgctgtcagtacgtcacagagaaggtccttgccgcagtttacaaagcactctctgaccatcacatctacctcgaggggaccctcctgaaacccaacatggttaccccgggacacgcctgcacccagaaattttctcatgaagaaattgccatggctaccgttacggccttgcgcaggaccgtgcctccagccgttacgggtatcacattcctgtctggcggtcagagtgaggaggaggcatcaattaacctgaacgcaatcaataagtgcccactgttgaagccatgggcactgacattttcatatggcagggccctgcaggcctccgctttgaaagcctggggtgggaagaaggagaatctcaaagctgcccaagaggagtatgtgaagcgagccctggccaacagccttgcctgccagggtaagtatacaccgtctggtcaagcaggggcagctgcctcagaaagccttttcgtttctaaccatgcgtattag

SEQ ID NO: 4173 - DNA, 1257 bp, synthetic construct
  misc_feature 1..1257: note = source = /note="Description of Artificial Sequence: Synthetic coding sequence"
  source 1..1257: mol_type = other DNA
atggctcgtagaaagccagagggatctagtttcaacatgacccacctgtcaatggctatggcgttcagtttcccccctgtggcctctggccagttacacccccaacttgggaacacccaacaccagacagagttggggaaggaattggccactaccagcaccatgccttaccaataccccgctcttacaccagaacaaaaaaaggagttgagcgatatcgcccacaggattgtagctccaggtaaggggattctggcagccgatgagtcgactggtagcatagctaaacgcctgcagtctatcgggacggagaatactgaagaaaatcggcgtttttacagacagctgttactcaccgctgatgatcgggtgaatccatgtatcgggggtgtgattctgtttcatgaaaccctgtatcagaaggcagatgacgggcgaccattccctcaggttattaagtcaaaggggggagtagtcggcatcaaggtggataagggcgtggtcccccttgccggaacaaatggcgaaactacaacacaaggcctggatggattgtcagagcggtgcgcacagtacaagaaggacggagccgattttgccaagtggagatgtgttctgaaaatcggagagcatactccaagtgctctggcgatcatggaaaacgctaatgtacttgcacggtacgccagcatatgccagcagaacggtattgtgccaattgtggagcccgagatcctccctgatggtgatcacgacctgaaaaggtgtcagtatgtgactgaaaaagtgcttgccgctgtgtataaggctcttagtgatcaccacatctacctagaagggacacttctcaaaccaaatatggtgacccctgggcatgcctgtacccaaaaattttcacacgaggagatagcgatggcgaccgttactgcacttcggaggaccgtgccccctgcggtcacagggattacattcctctccggaggtcagagtgaggaagaagcgtctatcaatcttaatgcaattaataaatgcccattactgaaaccatgggctctgaccttctcctacggcagggccctgcaggcatccgcacttaaagcttggggcggtaagaaagaaaatctcaaggccgcacaggaagaatatgtgaagcgcgcactcgccaattccctggcgtgtcagggaaagtacacacccagtgggcaggctggggcagcagcctctgagtccctctttgtgtccaaccatgcctattag

SEQ ID NO: 4174 - DNA, 1095 bp, synthetic construct
  misc_feature 1..1095: note = source = /note="Description of Artificial Sequence: Synthetic coding sequence"
  source 1..1095: mol_type = other DNA
atgccctaccagtacccagctttgacgccggagcagaagaaagaactttccgacattgcccaccggatcgtagccccaggtaagggcattctagctgccgacgagagcactggtagcatcgcaaagcggttacagtccattgggactgagaatactgaagagaatcgcagattttatcgacagttgctgctcaccgccgacgaccgggtaaatccttgcatcgggggtgtcattctttttcatgaaacgctgtatcagaaggcagacgatggcaggcccttcccccaggttatcaaaagcaaaggtggggtcgtaggaataaaggtggataaaggtgtggttcctctggccggaaccaacggggagaccaccacgcagggcctcgacggactaagcgagaggtgtgcgcagtataaaaaggacggcgctgactttgccaagtggaggtgtgtcctgaagattggtgaacacactccatcggccttggccattatggagaacgccaatgtcttggcaaggtatgccagcatatgccaacagaatggtatagtgcctattgtggagcccgaaatccttcccgacggcgaccacgatttaaaaaggtgccagtacgttaccgagaaggtgctggccgctgtctacaaagcactctccgaccatcacatttatttagagggaaccctgcttaaaccaaacatggtgacaccaggccatgcctgcacacagaagtttagccacgaggagatcgcgatggctaccgtcaccgcactgcgtcggacggtcccaccagctgtcacaggcataacatttctgagcgggggtcaaagcgaagaagaagcctccattaacctaaatgctatcaataagtgtcctctcttgaaaccatgggctttaaccttttcatacggcagagccctgcaagccagtgctttaaaggcttggggaggcaagaaagaaaacttgaaggcagcccaggaggaatatgtgaagcgagccctcgccaatagccttgcgtgtcaggggaagtacaccccgtccggtcaggctggcgctgccgcaagcgaatctctctttgtgagtaaccacgcctactag

SEQ ID NO: 4175 - DNA, 1095 bp, synthetic construct
  misc_feature 1..1095: note = source = /note="Description of Artificial Sequence: Synthetic coding sequence"
  source 1..1095: mol_type = other DNA
atgccttatcagtaccccgcactgaccccggagcagaaaaaagagctgtccgacatcgcccaccgaatcgtggccccaggaaaaggcatcctcgcggcagatgaatcaaccggatcaattgccaaaaggctgcagagcatcgggaccgaaaacaccgaagagaatcgcagattttacaggcagctgctgttgactgctgacgacagggttaacccttgcattggtggtgttatcttgtttcatgaaacgctgtatcaaaaagcggacgatggcaggcctttcccccaagtgatcaagagcaaaggcggtgtggtcggcattaaggttgacaagggggtagttcctctggccggaacaaatggggagactactacccagggcctggacggactctctgagagatgcgcacagtataagaaagacggcgctgatttcgcaaaatggagatgtgtattgaagatcggggagcacactccgagcgccctagctatcatggagaatgcaaacgtactggctagatacgcgtccatctgtcagcagaacgggatagtcccaatagtggagcctgaaattctccctgatggggaccacgacctgaagcggtgtcagtacgtcaccgagaaggtacttgccgcagtgtataaggctctcagcgatcatcacatctacctggagggaacacttctgaagccgaacatggtaaccccagggcacgcctgcacccagaaattttcccacgaggagattgccatggctaccgttaccgctctacggagaaccgtcccacctgccgtaactggaattacctttctgagcgggggtcagtcagaggaagaagcatctataaatctcaatgcaataaacaaatgcccgctcctgaaaccgtgggccttgacattttcttatggacgggctctgcaggcaagcgcactcaaggcttggggaggcaaaaaggagaatttgaaagccgctcaggaagagtatgtaaagagggcccttgctaacagccttgcctgccagggtaaatacactcccagcggtcaagctggcgcagcagcgagtgagagtctattcgtgtccaaccatgcctattag

SEQ ID NO: 4176 - DNA, 1257 bp, synthetic construct
  misc_feature 1..1257: note = source = /note="Description of Artificial Sequence: Synthetic coding sequence"
  source 1..1257: mol_type = other DNA
atggccaggagaaagcccgaaggttctagctttaatatgactcacttgtctatggcaatggcctttagtttcccgcctgtcgcctccggccagctacaccctcagctcggcaacacacagcaccagacggaactcggaaaggagctagctaccacctctactatgccataccagtaccccgcactcacaccggaacaaaagaaggagcttagcgatatcgcccaccgcatagtggccccaggaaagggaatcctcgccgctgacgagtccacaggaagtattgccaagcggctacaatccatagggacggaaaatactgaagagaacagacggttttatagacagctgctcctgaccgccgacgacagagtcaacccctgtattggtggtgtgatcctctttcacgaaacactataccagaaggcagacgacggtcggccatttccacaggttatcaagagcaagggtggagttgtcggcataaaagtagataaaggcgtcgtgccactcgctggcaccaacggtgagactacaacgcagggtctggatggacttagtgaacgctgcgctcagtacaagaaggacggtgcagattttgctaaatggaggtgcgtcctgaagattggcgagcacacacctagtgccttggccattatggagaatgccaacgtcctggccaggtacgcctctatatgccaacagaacggaattgtgcccattgttgaacctgagattttgcctgacggcgatcacgatctgaaacgctgccagtacgtcactgaaaaggtcctcgctgctgtgtacaaggccctcagcgaccaccatatttacttggaaggaaccctcttgaagccgaatatggtaacacccggacatgcttgcacgcaaaagttctctcatgaggaaatcgccatggcaacggttactgctttaagaaggactgtccctcccgcagtaacaggaattacctttctgagcggcggacagtccgaggaggaagctagcatcaatcttaatgcgattaacaagtgtcctcttcttaaaccatgggcgctgaccttctcctacggcagagcgctacaggccagcgctttgaaggcttgggggggaaagaaggaaaacttaaaagctgcgcaagaagagtacgttaagagagctctcgctaattcactggcttgtcaggggaaatacacaccttctggccaggcaggagctgccgcttctgaatctctcttcgttagcaatcacgcgtattag

SEQ ID NO: 4177 - DNA, 1095 bp, synthetic construct
  misc_feature 1..1095: note = source = /note="Description of Artificial Sequence: Synthetic coding sequence"
  source 1..1095: mol_type = other DNA
atgccatatcaatatccggctctgacacctgagcagaagaaagagttatccgatatcgctcatcggattgtggctccaggaaagggcattcttgccgctgacgagtcaaccggctcaatcgcaaaacgcctccagtccatcgggacagaaaataccgaggagaatcgtcgcttctatcgccaactcttacttaccgccgacgatcgcgtcaatccctgtattggtggtgtgattctgtttcacgagaccctgtatcagaaagccgacgacggcagacccttcccgcaggtgattaagtccaaagggggtgtggtcggaatcaaggtcgacaagggtgtggtgcccctagccggtaccaacggtgaaacaaccactcagggactggacggtttatcggagagatgcgcccaatacaaaaaagatggcgcagactttgcgaaatggagatgtgtgctgaagattggagagcacacaccatctgcactggccatcatggagaatgcgaacgtgctggccaggtacgctagtatctgtcagcagaatggtatcgttcccatagtcgagcccgaaatactgccagacggagatcatgacctgaaacggtgtcaatacgtgacagagaaagtattagccgcagtgtacaaagctttgtcggaccaccatatatacctggagggcacactactcaaaccgaacatggttactccagggcatgcttgcacccagaaatttagccatgaggaaattgcaatggcgaccgtcacggcattgaggcggacagtgccacctgcagtaacaggcattacatttctgagcgggggacagtccgaagaagaggcaagcatcaatcttaatgccataaacaagtgtcctctcttgaagccctgggcattaacctttagttacggtcgggcacttcaggccagtgctctgaaggcctgggggggtaaaaaagaaaacttaaaggcggcacaagaggagtacgtgaaaagagctctggccaacagcctggcctgtcagggaaagtacacccccagcggccaagctggagccgcagcaagcgaatcgcttttcgtcagcaatcatgcttactag

SEQ ID NO: 4178 - DNA, 1344 bp, synthetic construct
  misc_feature 1..1344: note = source = /note="Description of Artificial Sequence: Synthetic coding sequence"
  source 1..1344: mol_type = other DNA
atgagcgcatctaagattccattgttcaagatgaaagatctcatcttgatactgtgtttgctcgagatgtccttcgccgtgcccttcttcccacaacaaagcgggactcctggcatggccagcctctcactggagacaatgcgccaacttggatcccttcagcgtcttaacacactttctcagtactccagatatgggttcggtaagtccttcaatagtctttggatgcacggcctgctgccaccccacagtagtctcccttggatgcgaccaagagagcatgagacacaacagtacgagtacagccttcccgtgcatcccccaccacttccttcacagccttctctcaaaccccagcagcccggactgaaaccgttcctgcagagcgccgctgccacaactaatcaggccaccgcgctgaaggaggctttgcagcccccaattcacctgggtcatttaccattgcaagagggtgagctgcccctggtgcagcagcaggtcgcacccagcgacaagccacccaagcccgaactgccaggggtagattttgctgacccgcaagggccttctctgcctggcatggatttccctgatccacagggaccaagtttgccgggtttggattttgccgaccctcagggcagcaccattttccagatcgcgcgtcttatctctcacggacccatgccgcaaaataagcagtcccccctgtaccccggaatgctttatgtgccatttggggcaaatcagttaaacgctcccgcacgccttgggatcatgtcctccgaagaggttgcaggagggagagaagacccaatggcctatggggctatgttcccagggtttgggggtatgcggccaggttttgaaggtatgccccacaatcctgctatgggaggagactttacattggaatttgactcaccagtggctgctactaaaggacctgaaaacgaagaaggcggagctcagggcagccctatgcccgaagcgaatcccgataatctcgagaatcctgccttcctcaccgagctggaacctgcaccccacgccggactgctagcgctccctaaggacgatatccctggattaccccgtagccctagcggcaaaatgaaaggactcccctcagtcacgcctgccgcagctgaccctctgatgacccccgaactagcagatgtttaccggacttacgatgccgatatgactacaagcgtggactttcaggaagaagctaccatggataccaccatggcaccaaactcacttcagacctcaatgccaggaaataaggcccaagagccagagatgatgcacgatgcctggcattttcaggaaccttag

SEQ ID NO: 4179 - DNA, 1299 bp, synthetic construct
  misc_feature 1..1299: note = source = /note="Description of Artificial Sequence: Synthetic coding sequence"
  source 1..1299: mol_type = other DNA
atgtccgcttcaaagatccccctgtttaagatgaaggatctcatcctgatcctgtgccttctcgagatgtctttcgcggtgcccttcttcccccagcagtcaggcacacctggcatggctagcttgagcttggaaacaatgagacagctcggatccctgcaacgtctgaacactttatcccagtattcaaggtatggtttcggtaaatcctttaacagcttgtggatgcatggtctgctacccccacattctagcctgccatggatgcggccacgagaacatgagacccaacagccatctctgaagccccagcagccaggtttaaagcccttcctgcaatcagctgcagctaccacaaatcaggcaaccgccttaaaagaggctctgcagccacccatccatctcggacacctgccgctgcaggaaggcgaactgcctttggttcaacaacaggtggcgccatcagacaaacctcccaaacccgagttgcctggcgtggactttgcggatccccagggaccttctttgccaggaatggattttcccgaccctcagggcccatcactgcctggtttggatttcgccgatccccaagggtcaactatttttcaaatagccagactgatcagccacgggccaatgccccagaataaacaaagccccctctatcccggaatgttatacgtaccgttcggcgcaaatcaactcaacgccccagcgagactgggaataatgtcttctgaagaggttgcaggtggcagggaggacccaatggcgtacggggctatgtttcctggcttcgggggtatgcggccaggtttcgagggaatgccccataatccagccatgggaggtgactttacactggaatttgacagccctgtagcagcgacgaaaggaccggagaacgaggaaggaggagctcaaggaagccctatgcccgaagcaaatccagataacttggagaatcccgctttcttgacagagctggagcctgcaccacacgctgggttgctcgcattgcccaaagacgatataccaggtcttcctaggagccccagtgggaagatgaagggcttgccctcagtcacccccgctgctgctgacccattgatgactccagaactggccgacgtgtacagaacctacgacgccgacatgactacatctgtggacttccaagaggaggccactatggatactacgatggccccaaattctctccagacatccatgccgggaaacaaagcccaggaacctgaaatgatgcatgacgcttggcacttccaggagccttag

SEQ ID NO: 4180 - DNA, 1341 bp, synthetic construct
  misc_feature 1..1341: note = source = /note="Description of Artificial Sequence: Synthetic coding sequence"
  source 1..1341: mol_type = other DNA
atgagcgcgtccaaaatccctctgtttaagatgaaggacttgatactgatcctctgtctactcgaaatgtctttcgctgtacctttctttcctcagcaaagtgggactccaggcatggcttcattgtctctggagactatgcgacagctgggctcactccagagattaaatacactgtcccagtactctcggtacgggttcggtaagtcttttaattccttgtggatgcatggcctgctgccaccacatagcagcctgccatggatgcggccacgcgaacacgagacccagcagtacgagtactccctgcctgtgcatccccctcctctgccatctcaacctagtcttaagcctcagcaacccggactcaaaccctttctccagagcgccgcagcaaccacaaatcaggccactgccctgaaagaagccttgcagccaccgatccatctgggacatctcccattgcaggaaggggagctgccactggtgcaacagcaggtcgctccttccgacaaaccacccaagccagaacttagggttgatttcgctgatcctcagggtccttctctaccaggtatggatttccctgatccgcaaggaccttctctccctgggctggactttgctgatccacagggatctaccatattccagattgccagactgattagccacgggcctatgccccagaacaagcaaagcccactgtacccgggtatgttgtacgtcccttttggagctaatcagctgaatgccccagccagactgggaattatgtcaagcgaggaagtcgctggcggaagagaggaccccatggcatacggggctatgttccctggcttcggaggtatgcgccctggatttgagggaatgccgcataatcctgctatgggcggtgatttcaccctggagtttgatagccctgtggccgcaacaaaaggcccagaaaacgaggagggaggggcacaggggagccccatgccagaggcaaaccccgacaacctcgaaaacccagccttcctgacggagcttgagccggctccccacgccggtctgctggccttgcccaaagacgacatacctggcttaccccgatctccttctggaaagatgaagggcctgcccagtgttaccccggctgccgctgatccgctcatgactcccgagcttgccgatgtttaccgaacatacgatgctgacatgactacctcggtggacttccaagaggaggcaactatggacaccactatggcaccaaattccctccaaacatccatgccagggaataaggcacaggaacctgagatgatgcatgatgcatggcacttccaggagccctag

SEQ ID NO: 4181 - DNA, 528 bp, synthetic construct
  misc_feature 1..528: note = source = /note="Description of Artificial Sequence: Synthetic coding sequence"
  source 1..528: mol_type = other DNA
atggggacctggatattgtttgcctgcctgttgggagccgctttcgcaatgccggtcctgactccactaaagtggtaccagagcatccgcccaccgtatccatcatatggctacgagcctatgggaggttggctgcatcatcaaatcattcccgtgctgtcccaacaacacccccctactcataccttgcagccacaccatcacatccctgtggtccccgctcagcagcctgtgataccacagcagcccatgatgccagtcccaggacaacactctatgaccccgatccaacatcatcaacccaacctgccaccacccgctcagcaaccctaccagccccagcccgttcagcctcagcctcaccagccaatgcaacctcaacctcctgtgcaccccatgcagcccctacccccacagccccctttgcctcctatgtttccaatgcagccacttcccccaatgctgcctgacctcaccctcgaggcgtggccttccacggacaaaacaaagcgcgaagaggtggactag

SEQ ID NO: 4182 - DNA, 618 bp, synthetic construct
  misc_feature 1..618: note = source = /note="Description of Artificial Sequence: Synthetic coding sequence"
  source 1..618: mol_type = other DNA
atgggcacgtggatactgttcgcctgcttattgggtgctgccttcgcaatgccactgccgcctcaccctggtcatcccggttatataaacttcagttatgagaattctcattcccaggcaattaatgtcgacagaacagctctggtcctgacgcctctcaagtggtatcagagcatccgacccccttatccaagctacggttatgagccaatgggagggtggctacaccatcagattattccggtcctgtctcagcaacacccgccaacccatacactgcagccccaccatcacattccagtggtgccagcgcaacagccggtcatcccacagcagccaatgatgccagtgcctgggcagcactccatgactcctatccaacatcatcagccaaatctgccaccacccgcacagcagccctaccagcctcagcccgtccagccccaacctcaccagcctatgcagccacagccgccagtacaccccatgcaacctttgccccctcagcctccgttaccccctatgttccccatgcagcctttgccaccgatgctgcccgatttaacgttagaagcttggcccagtacagataaaaccaagagggaggaggtggactag

SEQ ID NO: 4183 - DNA, 576 bp, synthetic construct
  misc_feature 1..576: note = source = /note="Description of Artificial Sequence: Synthetic coding sequence"
  source 1..576: mol_type = other DNA
atgggcacatggatcctgttcgcatgtctgctgggggcagccttcgccatgcctctgcccccacaccccggacaccctgggtacattaatttttcttacgaagtgctcacccccctgaaatggtatcagagcatccgtcccccatatcccagttacggctacgagcctatgggcggatggctccaccatcagatcattccggtcttatctcagcagcatccacccacacacaccttgcagcctcatcaccatatacccgttgttccggcacaacagcccgtaatcccccagcaacctatgatgccagtgccaggtcagcactctatgaccccgattcagcatcatcagccaaacttacctcccccagcacagcagccgtatcagccccagcccgtgcagccccagccacaccagccgatgcagccccaacctccagtgcatcccatgcagccactccccccacaacctccactgcctcccatgttccctatgcagccactgccccctatgttgcccgacctcactctcgaggcttggccgtctactgataaaacaaaaagagaggaggtagactag

SEQ ID NO: 4184 - DNA, 4023 bp, synthetic construct
  misc_feature 1..4023: note = source = /note="Description of Artificial Sequence: Synthetic coding sequence"
  source 1..4023: mol_type = other DNA
atgttccgcgtgggatttctcatcattagtagcagttcatcgttgtctcccctcctgctagtgtcagtcgtgagggttaatacaacaaattgtcataaatgtctcctgtctggtacctatatttttgccgtcttattagtttgcgtggtgttccattctggcgctcaggaaaagaactacacaatccgagaggaaatcccagaaaatgttttgatcggcaacttgctaaaagatctgaatctctccctaattcccaataaatccctgactactaccatgcagttcaagctcgtctacaaaacaggcgatgtccccctgatacgaattgaagaggatactggcgaaatttttacgaccggcgctcgaatcgacagagaaaagttgtgcgcgggaatccccagagatgagcattgcttctatgaagtcgaagtcgccattctgccggatgaaatcttcagacttgttaaaatcaggtttcttattgaggacataaatgacaatgcccctctgttccccgctacagttatcaacatctctattccggaaaactcggcgattaacagcaaatacaccctacccgctgctgtggaccccgacgtaggcattaacggagtccagaactacgaattaattaaatctcagaacatttttggattagatgtcattgaaaccccagagggcgacaagatgccccagctcattgtccagaaggagttggatagagaagagaaggacacttatgtgatgaaagtaaaagtggaggacgggggattcccacagcgctccagcaccgccatcctccaggtcagcgtgacagataccaatgataaccaccccgtgttcaaggagactgaaatcgaggtgagcatccctgagaacgcccctgtgggcacatcggtaactcagcttcacgctactgatgccgacatcggcgagaatgcaaaaatccactttagcttctctaacttagtgtcaaatattgccaggcggctgttccatttaaatgcaaccaccggcctcataaccatcaaagagcccctggatagagaagagacccctaatcacaaattactggttttggcatctgacggaggcctgatgcccgctagagccatggttctggtaaacgtcaccgatgttaacgataacgtgccttctatcgatattagatatattgtcaatcctgtgaatgacaccgtagttctttctgaaaacatccctctgaataccaagatcgcccttatcaccgtgactgacaaggacgcggatcataacggaagagtgacttgctttacagatcacgaaattcctttccgcctacggccagtgttcagcaatcagtttctgcttgagaatgccgcatacttagactacgagtcaacaaaggaatatgctattaaattgcttgctgctgatgccggaaaacctcctttaaatcagagtgctatgttgtttatcaaagttaaggatgaaaacgataatgctccagtcttcacccagtccttcgtgactgtctcaattcctgagaacaactcccccggtattcagttaatgaaggtgtccgctacagacgccgactccgggccaaatgcggagattaattacctgctcggacccgatgcccctcctgaattctccttggatagaagaacaggcatgttgactgtcgtcaagaaacttgaccgtgagaaggaggataagtatctcttcaccatcctagctaaggataatggagtccctccccttaccagtaacgtgactgtttttgtaagcattatagatcaaaatgacaatagcccagtgtttacgcacaacgagtacaaattctacgtgcccgagaacctgccgaggcatggaacggttgggttgatcaccgttacagacccggattacggcgataattctgcagtgaccctgagcatactcgacgagaatgatgacttcaccattgactcacagactggtgtgatccggcctaatatatctttcgaccgggaaaagcaggaatcctatacgttttatgtgaaggccgaggacggcggaagagtttcgaggagttcttctgccaaagtgacgattaacgtggtggacgttaacgataataaaccagtattcatagtccctccttacaactactcctatgaactggtgttaccttctaccaaccccggtaccgttgtgttccaagtcattgctgtggataatgataccgggatgaatgccgaggtccgctactcgattgttggtggcaacactagagatctgttcgcgatcgatcaggagacaggcaatatcacactgatggaaaagtgcgacgtcacagatttggggttacaccgcgtactggtgaaagcgaacgacctcggccaacccgactcgctattctctgtggtcatcgtgaacctgtttgtgaacgagtctgtcaccaacgcgacactcattaacgaactcgtccggaagagcatagaggcaccagttacgcctaacacagaaattgccgacgtatccagccccacatctgactacgtcaaaatactggttgccgctgtggcaggcacaatcacggttgttgtagtcatctttataaccgccgtcgtgaggtgtagacaggctccacatttgaaggctgcccaaaagaatatgcagaattcagaatgggccacacctaatcccgaaaatcgccagatgattatgatgaagaagaagaaaaagaagaagaaacactcacccaagaatcttttacttaacgtggtgaccatcgaggaaacaaaagccgatgacgtggactccgacgggaaccgcgtaacccttgatcttccaattgatttggaggagcagactatggggaagtacaattgggtgactacccccaccaccttcaaacccgactctcccgacctcgcaaggcactacaaaagtgccagcccgcagcccgcttttcaaattcaaccagagacaccccttaacctcaaacatcacataatacaggagctgcctctagataatacattcgtcgcctgcgatagtatatcaaactgcagctcaagttcctctgacccctatagcgtttctgattgtgggtatcctgtgacaacctttgaagttcctgtttcagtccatacacgcccaagccagaggagagtcacatttcatctgccagagggctcccaagagagttcttctgacggcggacttggagatcatgacgccggaagccttacatctacctcccacgggctgccccttggttacccccaggaggaatacttcgacagggcaactcctagtaacaggaccgagggggatgggaactcagatcccgagtccaattttattagcggaatgcgggaaaagatcactgtgcagcctactgtagaagaggcctccgataactgcacacaagagtgtctcatatacggccattctgacgcgtgctggatgcccgctagcttagaccactcgagtagttcacaggcacaggctagcgccttatgtcacagtccaccactgtcacaggcatctacacaacaccacagcccacctgtaacgcagaccatcgtgctgtgccattccccgccagtgacacaaacaattgccctgtgtcactcgccacccccaatacaggtgtctgcactgcaccacagcccaccacttgtccaagggacggccctgcaccattctccaccgtctgcacaggcctccgctctttgctactctcccccactggcacaggccgctgccatctcacattccagttccctgccgcaggtgattgccctgcatcgatcccaggctcagagctcggtgtctttacaacagggttgggttcagggtgccaatggtctatgtagtgtggatcaaggcgttcagggatctgcgacctcccagttttacacgatgtcagaacggctccacccctcagatgactctatcaaggtcattccccttaccacattcgcgccacgccagcaggcgaggccttccaggggcgactctccgatcatggaaacacatcccctgtag

SEQ ID NO: 4185 - DNA, 621 bp, synthetic construct
  misc_feature 1..621: note = source = /note="Description of Artificial Sequence: Synthetic coding sequence"
  source 1..621: mol_type = other DNA
atggggacatggatcctgttcgcctgcctggtgggggctgccttcgcaatgcctctgccaccacacccgggtcatccgggatacattaacttcagctacgagaactcacattcccaggccattaacgtcgatagaatcgccctagtgctgacaccactcaaatggtatcagagcatgatacgacccccatacagcagctatggatacgaacccatgggaggatggctccatcaccagataattccggtagtgtcccagcaacaccctctcacccatacccttcagtctcaccatcacatacctgtggtcccagcccagcaaccacgagtcaggcagcaggcccttatgcccgtgccgggtcagcagtccatgacaccaacacagcaccaccagcccaacctccctcttccagcccagcaaccatttcagcctcagccagtacagccacagcctcaccagcctatgcaaccgcagccacccgtgcaacccatgcaacccctcctgcctcaaccaccacttccccctatgttccctcttagaccgttgccgccaatcctgcccgacctgcatctagaagcatggcccgctactgacaaaacaaaacaagaggaagtcgattag

SEQ ID NO: 4186 - DNA, 618 bp, synthetic construct
  misc_feature 1..618: note = source = /note="Description of Artificial Sequence: Synthetic coding sequence"
  source 1..618: mol_type = other DNA
atgggaacttggatcctctttgcatgcttagtaggtgccgcatttgcaatgcctttgccgccacatcctggccaccctggctacatcaatttcagttatgaaaactctcactcccaggccattaacgtggaccggatcgctctcgttctcactcccctgaaatggtaccaatctatgatcaggcccccatatagctcatatgggtacgagcccatgggcggatggctccaccaccagattattccagtagtctcacagcagcacccgctaacacacactcttcaatcgcatcaccacatacccgtggtcccagcccaacagccgcgtgtcagacagcaggccctcatgcctgtaccgggtcagcagagtatgacacctacccagcaccaccagcctaatctgccacttcccgctcaacagccgtttcagccacaacccgtgcagcctcagccacatcaaccgatgcaacctcaaccaccagtccagcccatgcagccgctgctgccacagccacctctccctcctatgttccctcttaggccactcccgccaatcctgccggatctgcacctggaggcatggccagctacggataaaacaaaacaagaggaggtctag

SEQ ID NO: 4187 - DNA, 4599 bp, synthetic construct
  misc_feature 1..4599: note = source = /note="Description of Artificial Sequence: Synthetic coding sequence"
  source 1..4599: mol_type = other DNA
atgggtcatagtaaacagatccgcattctgctcctgaatgagatggagaagttggagaagactttatttcgattagagcaggggtatgagttacagtttcgattgggtccgactctgcagggtaaggccgtgacagtctacaccaactaccctttccccggtgagacttttaacagggagaagtttcggagtctagattgggaaaatccaaccgagcgggaggacgattcggacaagtactgtaaacttaatttgcagcaatctggatccttccagtattatttcctgcaagggaacgaaaagagtgggggaggctacattgtggtagatccgatcttacgcgtaggtgccgacaaccacgtgctgccattagattgcgtgacgctccagacatttctcgcgaaatgcctaggtccttttgatgagtgggagagccgactgagggtggcaaaggagtccgggtataacatgattcattttacgcctctgcagaccctaggtctaagccgcagttgttattcgctagcaaaccagctcgagttgaacccagatttcagccgaccaaacaggaaatacacatggaatgatgtgggtcagcttgttgaaaaactgaagaaagaatggaacgtaatctgtataacagatgtcgtgtacaaccatacagcggctaactccaagtggatacaggagcacccagaatgcgcttataacctagttaactccccacacttgaagccagcctgggtgcttgatcgggcactctggagattctcatgcgacgtggcagaagggaagtacaaggagaaaggcatccctgcactcattgaaaacgaccaccacatgaacagcatacggaaaattatctgggaggacatatttccaaagctcaagctatgggaattcttccaggtggacgtaaataaggctgtggagcaattcagaagactgttaacacaggaaaaccggagagttacgaaatcagaccctaaccagcacctcacaattatacaggaccctgaataccggcgatttggatgcaccgtggatatgaacatcgccctcaccaccttcatacctcacgacaaaggcccagcggcaatcgaagagtgttgcaattggtttcataaaagaatggaagaactgaattccgagaagcatcgtttgataaactaccatcaggaacaggcagtgaactgcctcctcgggaatgtgttttacgagagactagcgggtcacgggccaaagctagggcctgttactcgtaaacatcctttggtgacccggtattttacatttccatttgaagaaatcgacttttcgatggaggagtccatgatccaccttccaaataaggcctgcttcttgatggcccacaacgggtgggtgatgggagatgacccgctaagaaatttcgcagaacccggatcagaggtgtacctgaggcgcgagttgatttgttggggcgattcagtgaagctgcggtatgggaataagccggaggactgtccatacctctgggcacatatgaagaaatatacagagattacagctacatatttccagggcgtgaggttggataattgccactcaactcctttgcatgtggctgagtacatgttggatgccgctagaaatttgcaaccgaacttatacgttgtcgccgaattatttactggatccgaggacctggacaacgtgttcgtgacaaggctggggatcagcagcttaattcgtgaagccatgtccgcgtacaacagtcatgaggagggtagactagtgtaccggtacgggggagagcccgtgggatcattcgtgcagccttgcctgcgaccactgatgcctgctatcgctcacgctctatttatggacattactcatgataacgaatgccccatcgtacaccgcagcgcatacgacgccttaccatctactacaattgttagcatggcttgctgcgccagcggctccacaagaggatacgacgagctggtgccacatcagatttcagtcgtctcagaggaaaggttctatactaagtggaatcctgaggcgctgcctagtaacaccggtgaggtgaatttccagtcaggaataattgctgccagatgtgccatcagtaagttgcatcaggagcttggggctaaaggctttatccaggtgtacgtggatcaggtcgatgaggacatagtcgctgtcacacggcattcaccgagtatacatcaatccgttgtggccgtgtcacgaactgcctttaggaacccaaagacttcgttttactccaaggaagtgcctcagatgtgtatcccaggcaaaatcgaggaggtcgtccttgaggccaggacaatcgagagaaacacaaaaccttatcggaaagacgaaaattccataaatggcactcccgacataacagtggagataagggagcacatccagcttaacgagtccaagatcgtgaaacaggcaggggtggccaccaagggccctaacgaatacatacaagaaatcgaattcgaaaatctgtctcctggttccgtcataatcttcagggtaagtttggacccccacgcccaagtggctgtaggaatcctcaggaatcacctgacccagtttagtcctcacttcaaaagcgggtcccttgctgtcgacaatgctgacccgattctgaagattcccttcgcatcactagcctctagactgaccttggccgagctcaatcagatattgtacaggtgtgaatcagaggagaaggaagacggaggcggatgttatgatatcccaaattggtcagccctgaagtacgccggactgcagggactcatgagcgtattagccgaaatcagaccgaagaatgacttgggacaccccttctgtaacaatttgaggtctggcgactggatgattgattatgtttcaaacaggttgatttctaggtcgggaactatcgcagaggtgggaaaatggctgcaggccatgttcttttatctcaagcagataccccgatacctaattccttgttattttgacgctattcttataggagcttatactacactcttggatacagcctggaaacagatgagttcctttgtgcagaacgggtctacctttgtgaagcacctgtctctaggctcggtgcagctctgcggcgtgggcaagttcccaagcctgccaatcctctcgcccgcactcatggatgttccatatagactgaacgagatcaccaaagagaaggagcagtgctgtgtaagccttgccgcaggtctgcctcacttctcttccgggattttcaggtgctggggcagagatacgttcattgccctccggggaatcttactcattaccgggagatacgtagaggctaggaacattattctcgcttttgccggtactttgaggcatggcctcatcccaaacctgctcggggaggggatatatgcccgttataactgtagggacgccgtctggtggtggcttcagtgtattcaggactattgtaaaatggtgccaaacggcctggacatattgaaatgtccggtgagccggatgtacccaacagacgacagtgctcccctgccggctggtactctggaccagcctttgttcgaagtcattcaggaggccatgcagaaacacatgcagggaatacagtttcgcgagcgaaacgctggaccacaaatcgacaggaacatgaaggacgaggggttcaacatcaccgccggtgttgatgaagaaaccggattcgtgtacggaggcaatcgtttcaactgtgggacctggatggataagatgggagaatcagatcgggctcgaaaccgtggaattccagcgacccccagggacggaagcgctgtggaaattgttggtttatctaaaagtgccgtgagatggcttctggaacttagtaagaagaatatattcccctaccatgaagtcaccgtgaagcggcacggtaaagccattaaagtatcctatgacgagtggaacagaaaaattcaggataactttgaaaaactctttcacgtttcagaggatcccagcgacctgaatgagaaacaccccaatctggtccataagaggggcatttacaaggactcatacggggctagttctccgtggtgcgactatcagctgcgacccaacttcactatcgctatggtggtggccccagagctgttcacaacggagaaggcttggaaagcccttgagattgctgagaagaagcttctgggcccactcggtatgaagactttggaccctgatgacatggtctactgcggaatctatgataatgcactcgacaacgacaattataacttggctaagggatttaactaccaccagggacccgagtggttgtggccaatcggatactttttgagagccaagctctacttttcacgcttgatgggcccagagacaactgctaaaacaattgtattggtgaagaacgtcctgtccaggcattatgtgcacctcgaacggtccccatggaaggggttgcctgaattgactaacgagaacgctcaatactgccccttttcctgtgaaacacaagcttggagcatagctacgattctcgagacgctttacgacctctag

SEQ ID NO: 4188 - DNA, 4551 bp, synthetic construct
  misc_feature 1..4551: note = source = /note="Description of Artificial Sequence: Synthetic coding sequence"
  source 1..4551: mol_type = other DNA
atggctcctatcctgtctattaacctctttattgggtacgagctgcagttcagattggggccaacgctccaggggaaggctgtaacagtctacaccaactacccctttccgggagagacatttaatagagagaagttcagatcgctggattgggagaatccaactgaaagggaagatgattcagataagtactgcaagttgaacctccagcagtccggctccttccaatactactttttgcaggggaatgagaaatccgggggtggatacattgttgtggaccccatcctgagggtgggcgctgataaccacgtgctccctctggactgcgttacactgcaaacttttctggcgaagtgcttagggccatttgacgagtgggagtctagattgcgtgtggccaaagagtcaggatataacatgatccacttcacacctctgcaaacccttggcctaagccgcagctgttacagcttggccaaccagttggagctgaatcctgacttcagtaggcctaacaggaagtatacctggaatgatgttggacagcttgtagaaaaactgaaaaaagaatggaacgtgatttgtattacagatgtcgtctataaccacacagccgcaaactcaaaatggatccaggagcatcccgagtgtgcttacaacttagtgaacagccctcacctgaaaccagcgtgggttctcgaccgggcactttggcgcttttcctgtgacgtcgcagaaggcaaatataaggaaaaaggtatccctgcgctgatagaaaatgaccatcatatgaatagcatcagaaaaattatctgggaagacatttttccaaagctgaagctctgggagttttttcaggtggacgtgaacaaggccgtcgagcaattcagaagattattaacccaagaaaacagacgtgtgaccaaaagcgacccaaatcagcacttgacaatcatccaggatcctgagtatcgcaggtttgggtgcacagtcgacatgaatatcgccttgacaactttcattccgcacgataaagggcctgccgctatcgaggaatgttgtaactggttccacaagaggatggaggagctcaatagcgaaaagcaccgtcttattaactatcaccaggagcaggccgtgaattgcctcctggggaatgtgttctacgagcgacttgcgggtcatggccctaagctgggccctgtgacccgcaagcatcctctggtgacgcgatacttcactttcccttttgaagagatcgacttctctatggaggaatccatgattcacttgccaaacaaagcttgttttctcatggcacacaacggctgggtcatgggagacgatcccctccgtaacttcgcagaaccagggtcagaggtatacctgcgaagggagttgatttgctggggagattctgtgaagttgagatacggaaataagcccgaggactgcccgtacctttgggctcacatgaaaaagtacactgagataaccgcgacctatttccaaggagtgagactggacaattgccactcgactccacttcatgtcgctgagtacatgcttgacgcggctaggaacttgcaaccaaacctctacgtagtggcagagctgtttaccggaagtgaggatctcgacaacgtgttcgtgacacgtctgggcatttcgagcctgatacgcgaagccatgtcggcctacaatagccacgaggagggcaggctggtctatcgctatgggggtgaaccggtgggaagtttcgtgcagccatgcctgcgccctctaatgccagccattgctcatgctctttttatggatatcacccacgacaatgaatgtcctatcgtccaccgctctgcctacgatgctctaccttccaccaccatagtttctatggcttgttgcgcttctgggagcacacggggatacgatgaactggtgccacaccagatttctgtggtatccgaggaacggttctacacaaaatggaaccctgaggcgctgccgagtaataccggggaggtgaatttccaaagtggaattattgctgcaaggtgcgccatctccaaattgcaccaagaattgggggcaaagggttttatccaagtgtatgtagaccaggtggatgaggatatcgtagctgttaccaggcacagcccctccattcatcaaagcgtggtcgctgtatctagaaccgccttcaggaaccctaaaacctctttctactctaaagaggtgccccaaatgtgcatcccgggaaagatcgaggaggtggtcctagaggcacgcaccattgaaaggaataccaaaccgtaccgaaaggacgagaattccattaatggcacacctgatatcaccgtcgagatccgagaacatatccagctcaatgagtctaaaattgtcaaacaggccggtgtcgccactaagggacctaatgagtacatccaagaaatcgaatttgaaaacctttcccccggatcagtgattatttttagagtttccttagaccctcacgcccaagtggctgtggggatcctgcgaaatcatctcacccagtttagtccgcactttaagagcggttctttagccgtagacaatgccgacccgatccttaaaattcccttcgcaagcctcgcctcccgcttgaccctggctgagctcaatcagatcctttacagatgtgagtcagaggagaaagaagacgggggaggctgctacgatatacccaactggtcagctctcaagtacgcaggtttacagggcttaatgagtgtgttagctgagatccgtccaaaaaatgatctcggccaccctttttgtaataacctgagaagcggcgattggatgatcgattacgtcagcaacagattgatctcaaggtcagggacaattgcagaagtgggcaagtggctccaggcaatgtttttttaccttaagcagatcccaagatacctcatcccatgctacttcgacgccatcttaattggagcctatactactctgctggacaccgcatggaaacagatgtcctctttcgtccagaatggatcgacattcgtgaagcacttgtcacttggatccgtccagctctgcggagtggggaaatttccctccctccccattctgtcccccgcacttatggacgtgccctatcgactgaacgagataactaaggaaaaagagcagtgctgcgtcagtctcgcagccggactgccacacttttctagcggaatcttcagatgctggggtcgggatacttttatagcattgcgcggtatccttcttattaccggtagatatgtggaggccagaaacatcattctggcgttcgccggaaccttgagacacggcctgatcccaaaccttctaggcgaggggatttatgccaggtataattgtagagatgcagtgtggtggtggcttcagtgcattcaggactactgtaagatggttcctaatggcctggatatcctgaaatgccctgtatcgagaatgtaccctaccgatgacagcgcccctctgcccgctggcactcttgatcaacccttgtttgaggtaatccaagaggctatgcagaaacatatgcaggggatccagtttagggaacgaaacgctggtccacagattgataggaacatgaaagatgaagggttcaacatcaccgcaggagtcgacgaagagaccggcttcgtttatggtggcaatcgttttaactgtggaacctggatggataagatgggagaaagcgacagggctagaaatagagggatacctgcaacccccagggacggatctgccgtggaaatcgtgggcctgagcaaatccgccgtacgctggctcctggagttatctaagaagaatatcttcccgtaccacgaagtaaccgtgaaaaggcatggcaaagcaatcaaagtgtcatacgacgagtggaacaggaaaatccaagataacttcgaaaaactttttcatgtttctgaggacccctccgatctgaatgaaaaacatcctaacttagtccacaagcgcggtatctataaagattcctacggcgctagttctccctggtgtgattaccagcttcgacctaattttaccattgccatggtggtagctccagagctgtttaccacagagaaagcctggaaggccctcgagattgccgagaaaaagttactggggcctcttggaatgaagacactggatcccgacgatatggtatattgcggtatatacgataacgcactagacaacgacaattacaatctggcgaaaggcttcaactaccaccagggccctgagtggttgtggcctatcgggtactttctgagggccaaattgtatttttcacggctgatgggcccagaaactacagcgaaaacaatagtgcttgtgaagaatgtgctcagccggcactacgtccatcttgagaggtctccgtggaagggattgcctgagctgaccaacgagaatgcacagtattgccctttcagctgtgaaacgcaggcctggagcatcgctacaattcttgagacactgtacgatctgtag

SEQ ID NO: 4189 - DNA, 4548 bp, synthetic construct
  misc_feature 1..4548: note = source = /note="Description of Artificial Sequence: Synthetic coding sequence"
  source 1..4548: mol_type = other DNA
atgtcgctgctcacgtgcgccttctatctcgggtacgagctccagttccgactcgggcctactcttcaggggaaagctgtgacagtttacactaactacccgttccccggagagacctttaacagggagaaatttcgttcattagactgggagaacccgacagagcgggaggacgattcggataaatattgtaagctaaacctgcagcagtccgggtctttccaatactacttcctgcagggcaatgagaaaagcggcggtggatacatagtggttgatccaatcttgcgggtgggagccgataaccacgtattaccgctcgattgtgtgactttacagactttcctggctaagtgcttgggtccatttgatgagtgggagtccaggctccgcgttgctaaggagtctggatacaatatgattcactttacccctctgcagacccttggcctgagtcgaagctgttacagcctggccaaccaactggagctcaatccagacttcagccgccctaaccggaagtatacgtggaacgacgtgggccaactggtggagaagcttaagaaggagtggaatgtgatttgtatcactgatgtggtatacaaccacaccgccgctaacagcaaatggatacaggagcatccagaatgcgcttataatctagtgaacagtccgcatctcaaaccagcctgggtgctggaccgggctctatggaggtttagttgtgatgtggccgagggaaaatataaagagaagggaatacccgctctcatcgagaacgaccaccacatgaatagcatcagaaaaataatctgggaagatatctttccgaaattaaaattgtgggagtttttccaggtggatgtgaataaggctgtggagcagtttagaagactgttaactcaggaaaacaggagagtcaccaaaagtgaccctaaccagcatctgacaattatccaagaccctgagtacaggcggtttggttgtaccgtggacatgaacatagcgttaaccactttcattccccacgacaagggtccagctgcgatagaggagtgttgtaattggtttcacaagaggatggaggagctgaattctgaaaaacaccgccttattaattaccatcaggaacaggctgtcaactgcctgctgggcaatgtgttttacgagcggttggccggtcacgggcctaagctgggtcctgtgacacgcaaacacccccttgtgacccgttattttacatttcctttcgaggaaattgatttttccatggaggaatccatgattcacctgccaaacaaggcctgctttctcatggcccataatggctgggtgatgggagatgaccccctgagaaattttgcagaacccggaagcgaagtttacttgcgccgtgagctgatctgttggggggacagcgttaagcttaggtacggcaataagccagaagattgcccctacctgtgggctcatatgaagaaatatacggaaattaccgccacatactttcagggagttcgtcttgacaattgccatagcactccactacatgttgcagagtatatgctggatgcggcacgcaatttgcaaccaaacctgtacgtggtggccgaattgtttacggggtcggaagaccttgacaatgtttttgtcacgcgtctaggaatcagctccttaattcgggaagctatgagtgcttacaactcacatgaggagggcaggttggtctaccgctacggcggtgagccggtgggctcattcgtgcagccttgtctgagaccactgatgccggcaatagcacatgcactgttcatggacatcactcacgataatgagtgccccatcgtgcataggtctgcttacgatgcactaccttccacaactatcgtgagcatggcctgttgcgcgtccggcagtaccagaggatacgatgaactggtccctcatcagatctctgtcgtaagcgaggagcggttctacacgaagtggaatccagaagccctgccatccaatactggtgaggtaaactttcagtccggaatcatcgccgctcggtgtgcaattagcaagcttcaccaggagctgggagcgaaaggatttatccaggtttacgtggaccaggttgatgaggatattgtcgctgtaactagacacagccccagcatccaccagagcgtggtggcagtctctagaactgcatttagaaaccctaagactagtttttactccaaagaggtccctcagatgtgtatccctggtaaaattgaagaagtagttctggaggctcgcactatcgaacgtaatacgaagccttatcgcaaagacgaaaatagcatcaacgggaccccagacattactgtggagattcgcgagcatatccaattaaatgaaagcaaaattgtgaagcaggctggggtcgcaacgaaggggccaaatgaatacattcaagagatagagtttgaaaacttgtctcctggatcagtgattatctttagggtgtcactggacccccatgctcaggttgcagtgggtattctgagaaaccacctcacgcagttctcgcctcatttcaaaagcggaagcctggccgtggacaacgccgaccccattctgaagatcccgttcgcatcattggccagtcgtctgactctcgcagaactcaatcagatcctctatagatgcgaaagcgaggaaaaagaggacggtgggggttgctacgatatcccaaactggagcgccctgaaatatgctggtcttcagggactcatgtcagtcctcgccgaaattcggcctaaaaacgatctcggacatcccttttgcaacaatctaagatccggtgactggatgattgactacgttagcaatcggctgatcagtcggtcaggcacaatagccgaagtaggcaagtggctgcaggccatgttcttctacctgaaacaaattcctcgctacctaatcccgtgttactttgacgccattttgattggagcctacactacactgctggatactgcttggaagcaaatgagcagcttcgtgcagaacggtagcacattcgtaaagcacctgagtctggggtccgtgcagctttgcggggtaggtaagtttcccagtctgcctattttgagccccgcactgatggatgtaccctaccgcctcaacgaaatcactaaagagaaagaacagtgctgcgtgtccctcgccgctggtctccctcacttctcctccggtattttcagatgctggggtagagatacctttatcgcactgcggggtatattgttgataaccgggaggtacgttgaagctaggaatataattctggcttttgctgggacattgaggcatggactgatccccaacctgctgggcgagggaatttatgcaagatacaactgccgggatgcagtctggtggtggcttcagtgtatccaggactattgtaaaatggtacccaacggcctcgacattctgaagtgtccagtcagtagaatgtaccccaccgacgactcagctcctttgcctgccggaactctggatcagccccttttcgaagtgattcaggaggcaatgcagaaacatatgcaggggatacaattccgcgagcgcaatgccggtccccagatagataggaacatgaaagacgagggatttaatattacagccggagtggacgaggaaaccggtttcgtgtatggtggcaataggtttaactgcgggacttggatggacaaaatgggcgagtcagaccgcgctagaaaccggggaattcccgcaactcctcgcgacgggagcgccgtggaaattgtaggactatccaagagtgccgtccgttggctgctggaactgtccaagaaaaacatcttcccgtaccatgaggttacagtgaaaagacacgggaaggcaataaaggtcagctacgacgaatggaaccgcaagattcaggataactttgagaagcttttccatgtatcagaagatccatcagacctaaacgaaaaacatcccaatctggtccacaagcgcggaatctacaaagactcttacggagcgtcctctccctggtgcgactaccaacttcgcccaaacttcaccatcgctatggtggtggccccagagttatttactaccgagaaagcctggaaagcactggagatcgcggagaaaaaactgttggggcctttaggtatgaagacactcgatccggatgatatggtgtattgtggcatctacgacaatgcacttgataatgacaactataatctggctaaggggttcaactatcaccagggacccgagtggctgtggcccatcggatatttcctcagagctaaactgtacttctcaagactcatgggacccgaaactacggcgaagaccatcgtattggttaaaaatgtcttgagcagacattatgttcacctggagcgctctccatggaagggtttaccagaattaacaaacgagaacgcccagtactgtcccttttcttgcgagacgcaagcttggtccattgccactatcctggagacactctatgatctgtag

SEQ ID NO: 4190 - DNA, 4599 bp, synthetic construct
  misc_feature 1..4599: note = source = /note="Description of Artificial Sequence: Synthetic coding sequence"
  source 1..4599: mol_type = other DNA
atggggcactccaagcagattcggatccttctgctgaatgagatggagaaattggagaagacgctgttcagactggaacaggggtacgaactgcaattcagactcggtcccactttacagggcaaagcagtgacagtgtacaccaactacccgtttcccggagagacgtttaatagggagaaatttcgttccctcgactgggagaaccccaccgaaagagaggacgacagcgacaagtattgcaagctgaatctccagcagtccggctcctttcagtactactttctccaaggcaatgaaaaaagcggaggtgggtacatcgtggtagatccgattttgcgagtcggcgctgacaatcatgtgttgcccctcgattgtgtcaccctgcaaacttttcttgctaagtgcctgggaccattcgatgagtgggaatctcgtttgagggtcgctaaggagagcggatacaatatgattcattttacaccgctccagacacttggactcagcagatcttgttactcccttgccaatcagctggagctgaatcctgatttttcaagacctaaccggaagtatacgtggaacgacgtggggcagctcgttgagaaactgaaaaaagagtggaacgttatctgcattacagatgtcgtgtacaaccatacagcagccaactccaagtggatccaagagcacccggagtgcgcttataatctggttaattctccacatctgaagcccgcatgggtccttgacagggctctctggaggttctcatgcgatgtggctgaggggaaatataaagagaagggtatccctgccctgatagagaacgaccatcatatgaactctattaggaaaattatctgggaggacatttttccaaaactaaagttgtgggagttttttcaggtcgacgtaaataaagctgtggaacaattccgaaggctgctgacacaggagaacaggagagtcaccaagagcgatccgaatcagcacctgactattatacaagatcccgagtataggcgatttggatgcacagtggatatgaatattgctctcacaacctttatcccccatgataaaggacctgctgccatagaggaatgttgtaactggttccacaaacgtatggaggaactgaattcagagaagcatcgtctcatcaattatcatcaggagcaggccgtaaactgcttgctgggcaatgtcttttacgagagactcgcgggacacggacccaagcttggaccagttactagaaaacatccactagtcacacgctacttcacgtttccattcgaggagattgatttctcaatggaagaaagcatgatacacctgccaaataaggcctgcttcctgatggctcataacggatgggttatgggagacgaccccttacgtaacttcgcagaaccgggttctgaagtgtacctgagaagagagcttatatgttggggtgactcagtcaagctgaggtatggaaacaaacctgaggactgtccttacctctgggcccacatgaagaaatacacagagatcacggctacatacttccaaggtgtgcgactggataattgccactctacccccctacacgtggccgagtacatgctagatgctgctagaaatctgcagcctaatctatatgtggttgccgaactatttacaggcagcgaggacttagataatgtcttcgtgactcggctgggcatctcatccttaatacgcgaagccatgagcgcctacaattctcatgaggaagggaggctggtataccgctatggaggggaacccgtggggtctttcgtacagccctgcctacgaccgttaatgccagcaatcgcccatgctctcttcatggacataactcatgataatgagtgtccgatcgtccaccgatcggcctatgatgctcttccctccacgactattgtgtcgatggcctgttgtgcgtccgggtccacaagagggtatgacgaacttgtccctcatcaaatttcagtagtctctgaggagcggttttacacaaaatggaaccccgaagccttaccaagcaatactggagaagtaaactttcagtctggcattatagccgcaagatgtgccatctctaagcttcaccaggagctgggcgcaaaagggtttattcaagtctatgttgatcaggtggacgaggacatcgtggcggtaacgcgacacagcccttccatccaccagagtgtagtggcagtatcccggaccgcttttcgcaatcctaagaccagtttctactcgaaagaggtaccccagatgtgcatccctggaaagattgaagaggttgttttagaagctagaaccattgaacggaatacgaagccctataggaaggatgagaacagtattaatggaactccggacataaccgtggagattagggagcatatccagcttaatgagtcgaagatcgtgaagcaggctggagtggcaaccaaaggccctaacgaatacattcaagagatcgagttcgagaacctcagccccggttctgtgattattttccgggtatccctggatcctcatgcacaggtcgcggtgggcatcctccggaaccatctcacccagttcagcccgcattttaagtccggtagcctggcggtggataacgccgatcccatcctgaagattccattcgcgtcgctcgcatcacgcttgacactggccgagctgaatcagattctctacagatgcgagtcggaggagaaggaggacggaggcggatgctatgatattcccaactggtccgctcttaagtacgctggacttcagggcttgatgtctgttctggctgagatccggcctaagaatgacctaggtcatcctttttgtaacaatcttaggagcggcgattggatgattgattatgtgtcaaataggctgatttcccgctcaggaactatcgccgaggtcgggaaatggcttcaggccatgttcttttacctgaagcagatcccacgttatctgattccttgttatttcgacgcgattcttattggggcttacacgactctcctggataccgcatggaaacagatgagtagttttgtgcagaacggttcaacattcgttaagcacttgagcctcggcagcgtccagctgtgtggcgtgggcaagttcccaagtctccctattctgtcccccgctctgatggatgttccatacaggcttaatgagattactaaggagaaagaacagtgctgtgtgagtttggccgcaggtctgccacacttctcctcggggatttttagatgctggggcagagacacattcatcgcactgcggggtattttactgataacagggaggtacgttgaggctcgaaacataattctcgcattcgccggtacactgaggcatgggctcatacctaacctgctgggagagggcatttatgcacggtataattgccgggacgccgtttggtggtggctccagtgcattcaggactactgtaagatggttcctaatggtctggacattctcaagtgtccagttagccgcatgtaccctaccgatgattcggcaccgcttccagcagggaccctcgatcagcccctcttcgaggtaatccaggaagcgatgcagaaacatatgcagggtattcagtttcgggaaaggaatgccggacctcagatcgatcggaacatgaaagatgaggggttcaatataacggcgggagtggatgaggagaccggattcgtctacgggggtaacagattcaattgcgggacttggatggacaagatgggcgaatccgaccgcgctcggaaccgcggaatacctgctactccccgtgatggaagcgccgtggagattgttgggcttagtaaaagcgcagtccggtggctgcttgaattgagtaaaaagaacattttcccttaccacgaagtgacagtcaagcgacatgggaaagctattaaagtgtcttacgatgagtggaaccggaagatacaggataacttcgaaaagctttttcacgtatccgaagatccgtcagatctcaacgagaaacaccctaacctcgtgcataagcggggaatttataaggacagctacggtgcatcctctccgtggtgcgattatcaactcagacccaactttactattgccatggtggtggctccagagctattcactacggagaaggcctggaaagctctggagatcgcagaaaagaaactcttgggcccactgggcatgaaaactctggacccagacgacatggtgtactgtggaatctatgacaacgctttagataatgacaactacaatctggccaaagggttcaactaccaccagggcccagaatggctgtggccaatcggatatttcctgcgggctaagttgtacttctcccggctgatgggtccggaaactaccgctaaaaccatcgtcctcgttaagaacgtgctatcaaggcactacgttcatcttgagagatcaccatggaagggcctgccggaactgactaatgagaacgctcagtattgtccattcagttgtgagacccaggcctggtcaattgctacaatcctggagactctctacgatttgtag

SEQ ID NO: 4191 - DNA, 4551 bp, synthetic construct
  misc_feature 1..4551: note = source = /note="Description of Artificial Sequence: Synthetic coding sequence"
  source 1..4551: mol_type = other DNA
atggctccaatactctccattaacctgtttataggttatgaattgcagttccgactggggccaacactccaagggaaggcagtgacggtatataccaattaccccttccctggggaaacattcaaccgcgagaaattcagaagtctagattgggaaaaccctacagaacgcgaagacgattcggataaatactgcaagctcaacttacagcaatctggctcatttcaatactactttctccaagggaacgaaaagagcgggggtggatacatcgtcgtcgatccaatcctgcgggtcggagccgataatcacgtgttgcctctcgactgtgtgacccttcagacgtttctggccaagtgtttaggacctttcgacgaatgggaatctagactcagggtcgctaaggagagtgggtacaacatgatccactttaccccgctgcagaccctgggtttatcacggtcttgctactccctggctaatcagctggagctcaaccccgatttcagcaggccaaatcggaagtacacctggaacgatgtcggccagcttgtggagaagttgaaaaaagaatggaacgtgatttgcattacagatgtggtctacaatcacacggctgctaactccaagtggatacaggagcaccccgaatgcgcttacaacctggtgaatagtccacacctgaaaccagcctgggtgctcgacagggccttgtggagattctcctgtgacgtcgcagagggtaagtacaaagagaagggcataccggcactaatcgaaaatgaccaccacatgaatagcatcaggaaaatcatttgggaggacatcttccctaagttgaagttatgggagtttttccaggtcgacgtgaataaggctgtcgagcagtttaggcggctcttaacacaggagaaccgccgtgtgacaaagtcagatcccaatcaacatttaaccattatccaggatcccgaataccgcagatttgggtgcacggtggatatgaacatcgctcttactacctttatacctcatgataaaggaccagctgccattgaagaatgctgcaattggtttcataagagaatggaagagcttaattccgaaaaacaccggctgattaattaccaccaggagcaggcagtgaactgccttctgggcaatgttttttatgaacgcttggcgggacatggcccaaaattgggcccagtgaccagaaagcacccattagtaacccgctatttcacctttccttttgaggaaatagattttagcatggaggagtccatgattcacctcccaaataaggcttgtttcttgatggcccataatggctgggtgatgggcgatgacccgctgcgaaattttgcggagcctggctccgaggtctatctgcgccgtgaactaatttgctggggagactctgtcaagctcagatacggcaacaaacccgaggattgtccctacctgtgggcccacatgaaaaagtataccgagattacagcgacttatttccagggtgtccggctcgacaattgccactctaccccactgcatgtcgccgaatacatgttggatgccgcacggaacctgcagcctaatctctatgtcgtggctgagctgtttacaggcagcgaggacttagacaacgtgtttgtcacacgtcttggaattagcagcctgattcgagaggccatgagcgcatataattcgcacgaggagggcagacttgtctatcgctacggaggcgaaccagtaggctccttcgtgcaaccatgcctccgcccactaatgcctgccatcgcacacgctttgttcatggatatcacacacgataatgaatgccccatcgtgcatagatcagcatatgatgcactcccgtccaccaccattgtctcaatggcatgctgcgcttcaggctctacgagaggttatgacgagctggtcccccatcaaatcagcgtggtgtctgaagaaaggttctacacaaaatggaatccagaagcccttcccagtaacaccggggaagtcaacttccagagtggcatcatagctgcacggtgtgcgatatcaaagctgcaccaggagcttggcgcaaagggttttattcaggtttacgtcgaccaagtcgatgaggatatcgtggctgtgacacggcactctccctcgattcaccagtctgtcgtggccgtctccagaacagcctttcgcaatcccaagacaagcttttactctaaggaggtgccacagatgtgtattccgggtaagatagaggaggtggtactcgaggccaggacgattgaaagaaacaccaagccatataggaaggacgaaaactccattaatggaacacctgacatcacagtcgagatccgcgaacatattcagcttaacgaaagcaaaatcgttaaacaggcaggagtggcaacaaagggcccaaacgagtacatccaggagatagaatttgaaaacctctcacccggttcagtcattatctttagagtgtctctggacccgcatgcccaagtagccgtgggaatcctgaggaaccacctgactcagtttagcccacatttcaagtcaggaagtctggccgtagataatgcagatcctatcttaaagatccccttcgcatcactggctagccggctgaccttagccgagctaaaccagatcttatacagatgtgagagcgaggaaaaggaggacggaggaggttgttacgacattcctaattggagtgcactcaaatacgctggcctccagggactgatgtcggtactggccgagataaggcctaaaaacgatctgggacatcctttctgtaacaacctcaggtctggcgactggatgatcgactatgtgagcaatcgactaatctcaaggtcgggaactatcgcagaggtgggaaagtggctgcaggcaatgttcttctacctcaagcagattcctaggtatcttatcccctgctactttgacgccatattaatcggagcctatactacactactcgacacagcctggaaacaaatgtcttcctttgtccagaacgggtccacgttcgtgaagcacctgagtctgggtagcgtgcaactgtgtggagtcggaaaattcccctctcttccaattctgtcaccagcgctaatggatgtgccgtatcggcttaacgaaattactaaggagaaggaacagtgttgcgtgtcactcgcggctggcctgccacacttctccagtgggatcttccgctgctggggtcgggacacatttatcgccctgaggggcattcttctgattactggaaggtacgtggaggcgagaaatatcatcttggcattcgcaggaaccctccgtcacggcctcatccctaatctactgggagaaggcatctatgcaagatataattgcagggacgccgtttggtggtggctgcagtgcatacaggactattgcaagatggtgcccaacggtcttgacatattaaaatgtcctgtgagtaggatgtatcctactgatgattccgcaccactgccagcaggcacgctggaccagcctctcttcgaggttatccaggaagcaatgcagaaacatatgcagggaatccagttccgagagaggaacgctggccctcagatagacaggaatatgaaggatgagggctttaatataactgccggtgtggatgaagaaaccgggtttgtttacggtgggaacaggtttaattgcggaacctggatggacaagatgggtgagagtgaccgtgcacgaaacaggggaatacccgctacccccagagatggatccgccgtcgaaatagtgggcctgtccaagagcgccgtgaggtggctcctggaactttctaaaaagaatatatttccttatcacgaagtgaccgtcaaacgccatggaaaagccatcaaggtgtcctacgacgagtggaataggaaaatccaggacaattttgagaaactgttccacgtatcagaggaccccagtgatcttaacgaaaaacaccctaacttggtccacaagagggggatctataaggatagctacggcgcaagctcaccgtggtgcgactatcagctgaggcctaatttcactatagccatggtggtggccccagagctcttcacaaccgaaaaggcgtggaaagctctggagatcgctgaaaaaaagcttcttggtcctttgggaatgaaaacgctggatccggatgacatggtctactgtgggatctacgataacgccctagataatgataactataacctggcaaaggggttcaattaccatcagggaccagaatggttgtggccaattgggtacttcctgagggccaaactttattttagccgcttgatgggcccagagacgaccgctaagaccatcgtgctggtgaagaatgtgttgagccgccattatgttcacttggagaggtccccctggaaagggttacctgaactcactaatgaaaacgctcagtattgtcctttttcgtgtgagacccaggcatggagcatcgccaccatcctggagactctgtacgatctatag

SEQ ID NO: 4192 - DNA, 4599 bp, synthetic construct
  misc_feature 1..4599: note = source = /note="Description of Artificial Sequence: Synthetic coding sequence"
  source 1..4599: mol_type = other DNA
atgggccacagcaaacagataagaattctgctgctaaatgaaatggagaaactggaaaaaactttgtttcgccttgagcagggctacgaattgcaatttcggctgggacccacactccaaggaaaggctgtgaccgtctacactaattacccattcccaggagagactttcaatcgggagaagtttcgatccctggattgggaaaacccaactgaaagggaggatgattcagataagtattgcaagctaaatctccagcagtccgggagttttcagtattatttcctgcaggggaacgaaaagagtggagggggttacattgtcgtcgatcctattctgcgagtgggcgcagataaccacgtgctcccccttgactgtgtgaccctacagaccttcttagcaaagtgcctcgggccattcgacgagtgggaaagccgcctgcgcgtagccaaggaatccggttataacatgatccactttactcctttgcagaccctgggactgagtcggagctgctatagccttgctaaccagctcgaattgaacccagacttctcgcggcctaacaggaagtacacttggaacgatgtgggccagcttgtagaaaagttgaaaaaagagtggaatgtaatttgcatcaccgatgttgtctacaatcatacagccgcaaacagcaaatggatacaggagcatcccgaatgtgcctacaatctggtcaattcgccccatttaaaacccgcatgggtcctcgatagagccttatggaggttttcatgtgacgtggctgaggggaagtataaagaaaaagggattccagccctcattgaaaatgatcatcatatgaatagtatcagaaaaattatctgggaggacatttttcctaaattgaaattgtgggaattttttcaagttgacgtgaacaaagccgtggagcagttccgtagacttctaacccaggaaaaccgccgagtgacaaagagcgatcccaaccagcacttgacgatcattcaggaccctgaatatagacggttcggctgcactgtggatatgaacattgcccttaccacatttatcccacatgacaaaggccctgccgcaatcgaggagtgctgcaactggtttcacaaacggatggaagaactgaatagcgagaagcaccggttaatcaattaccaccaggagcaggccgtgaattgtttactgggtaacgtattttacgaaagattggcaggacacggcccaaagctgggccctgtcaccagaaaacacccgctggttacgagatattttacgttcccgttcgaggagattgacttcagcatggaggagtccatgatccacctccctaataaggcatgcttcctaatggcgcacaatgggtgggtgatgggcgacgacccactgaggaatttcgctgaaccaggctcagaagtttatctcaggcgtgaactcatttgctggggagactcagtgaaactgcgatacggaaataaaccagaggattgtccttacctgtgggcccatatgaagaaatataccgagataactgctacatacttccagggcgtgcggttggacaattgtcactctactcccttgcacgtggcagagtatatgctggacgctgccagaaatttgcagcccaacctgtatgtggtggccgagctgttcactggcagcgaggacctggacaacgtgttcgtgacaagactgggcatttcttcactgattagggaggctatgagcgcctacaactcccatgaggagggacgactggtgtataggtatggcggagagccagtgggatcgtttgttcagccctgcctcaggcctttaatgcccgcaattgcgcacgctctctttatggatattactcacgataatgaatgtccgatagtgcaccggtctgcctacgacgctctgccatcgaccaccattgtctctatggcttgctgcgcctcgggcagtactcgtgggtatgacgagcttgtccctcaccagatctccgtcgtgtccgaagagcggttctataccaagtggaatcccgaggcattgccaagcaacactggggaagtgaatttccaatcagggataatcgccgcaaggtgcgccatttcaaaactccatcaggaattgggggcaaaaggcttcattcaggtatatgttgaccaggtagatgaagacatcgtcgccgtgacgaggcactcgccatctatccaccagtcagtggtggcggtttccagaactgccttccggaaccccaagacatctttctatagcaaggaggtgcctcagatgtgcattccaggaaagattgaagaggtggtcttagaagcacggaccatcgagcggaatacaaagccctacagaaaagacgaaaattccatcaacggtacacccgacatcacagtagagatcagggagcatatacaactgaatgagtccaaaatcgtaaaacaagccggagtggcaactaaaggtcctaatgagtatatacaggaaatcgaattcgaaaacttgagtcccggtagcgtgattatcttcagggtctcgctggacccccatgctcaggtggcggtggggatcttgcgaaatcatctgacccagttcagtccccacttcaagagtgggtctttggcagtggacaacgccgatccaatccttaaaatacccttcgcctccctcgcatccaggcttactcttgccgagctgaaccagatcctttacagatgtgaaagcgaggagaaggaagacggaggcggatgttatgacatcccaaattggtccgcccttaaatacgccggtctccagggactcatgagtgttctggcagagatcaggcctaagaacgatcttggacaccctttctgtaataatttgcgcagtggagattggatgatcgactacgtcagcaaccgccttattagcagaagcggaaccatcgctgaggtggggaaatggctccaggccatgttcttctatctgaaacagatccctcggtacttaataccttgttattttgacgccattctgatcggtgcctacacgacactccttgatactgcttggaagcagatgagtagctttgtgcaaaacggctccacatttgtcaaacacttgagtctgggctccgtgcaactatgcggcgtggggaagttcccatccctgcccatcttgagccctgctttgatggacgtgccatacaggctgaacgaaatcactaaagaaaaggaacagtgttgtgtaagccttgccgctggcttaccacatttttcttccggcattttcagatgttggggccgagacacgtttatcgccctaaggggaattttgttgattactggacgctacgtcgaggctcgcaacatcattctcgcctttgctgggaccctgaggcatgggctgattcccaatctgcttggcgagggcatttacgctagatacaattgccgggatgcagtgtggtggtggttacagtgcatccaggactactgcaagatggttcctaatggtttagatattctgaagtgcccagtgagtcgcatgtacccaacagacgacagtgccccattgcctgctgggactttggatcagcctctcttcgaagtgattcaggaagcgatgcagaaacatatgcagggtatccaattccgtgagaggaatgccggaccgcagattgatagaaacatgaaagatgaaggcttcaatatcacggctggggtggatgaggaaaccggattcgtctacggtggtaacaggttcaattgtggcacatggatggacaaaatgggagaatcggatcgagcacgtaatcgcggtatcccagctactccacgggacggatctgctgtagaaattgtaggactgtcaaaaagcgcggtgaggtggctcctcgaactctccaagaaaaacatttttccgtaccacgaggttacagtgaagcggcatggaaaggccatcaaagtctcgtatgatgagtggaataggaagatccaggataactttgaaaagctgttccacgtctcagaagacccgtcagacctcaacgaaaagcatccaaatctcgttcataagagaggaatatacaaggattcttacggtgcatcaagcccatggtgcgactaccagctgagaccgaattttactattgcgatggttgtggcgccagagctgttcaccacggaaaaagcctggaaggcactcgagatcgcggagaaaaagttgctagggcctttagggatgaagaccttagatcctgacgacatggtttactgtggcatctacgataatgcgctagacaacgacaactacaacctggcgaagggctttaactatcaccagggaccagaatggctttggccgattgggtattttctaagggctaagctgtatttctcacgtctgatgggaccagagacaacggccaagacaatcgttttggtgaagaatgtgctgtccaggcattatgtgcatctagagaggtctccttggaaaggactgcctgagcttactaacgagaacgcacagtactgcccattcagttgtgagacacaagcttggagcattgcaactattttagaaactctctatgatctctag

SEQ ID NO: 4193 - DNA, 4599 bp, synthetic construct
  misc_feature 1..4599: note = source = /note="Description of Artificial Sequence: Synthetic coding sequence"
  source 1..4599: mol_type = other DNA
atggggcattctaagcagatccggatcttgttactaaatgaaatggaaaaactggaaaagactctcttcaggctcgagcaaggttacgagcttcagtttcgcctaggtccaacccttcagggcaaggcggttacagtgtataccaattatccattccctggggagacatttaatcgtgagaagtttcgctctttggattgggagaacccaaccgagagagaagacgactctgacaagtattgtaagctgaatctccagcagagcggctcctttcagtactattttctccaggggaatgagaagtctggcggtggatatatagtcgtggaccctattttgcgggtgggggcagacaatcatgttctgccccttgactgcgtgactttacaaacttttctggctaagtgcctcggaccgtttgacgagtgggagagccgccttcgcgttgctaaggaaagcggatacaatatgatacatttcacaccccttcagacgctgggactgtccagatcatgctacagcctcgcaaatcagctggaattgaaccctgatttctccagaccaaatagaaaatacacatggaatgatgtgggccagctggtcgaaaagctgaagaaggagtggaatgtcatttgcataactgatgttgtctacaaccacaccgctgctaactcaaagtggatccaggaacatccagaatgtgcctacaaccttgtgaactctcctcacttgaagcctgcctgggtccttgaccgtgcgctctggcgattctcttgtgacgtggcagagggcaagtacaaggaaaagggaattcctgcgctgatcgagaatgaccaccatatgaacagtattcggaagatcatatgggaagacatcttccctaagctgaagctgtgggaattcttccaagtcgacgtgaacaaggccgttgaacagtttcgacggttgttgacacaggaaaatagacgggttactaaatctgaccccaatcaacacctgacgataattcaggatcccgaatatcggcgtttcggctgtacagtcgacatgaatattgctctgaccacattcattcctcatgacaagggtcctgctgccattgaggaatgttgtaattggtttcacaagcggatggaggaattaaattccgagaagcacagattgatcaactaccaccaggagcaggccgtgaactgcttactgggaaacgtcttttacgaaagattggcgggacatggccctaagcttggcccagtgacgcggaaacaccccttggtgacacggtatttcacatttccctttgaggaaattgatttctccatggaagaatcaatgatccatctgcctaataaggcttgcttcctgatggctcacaatggctgggtcatgggggacgatccactccgtaacttcgccgaacccggttccgaggtttatctaagacgggagttaatatgttggggggacagcgtcaagctcagatatgggaataagcctgaagattgcccgtatctgtgggctcatatgaaaaaatataccgagataacagcaacctactttcagggagtacgattagataattgtcacagcactccactgcacgtagctgagtatatgctggacgcagccaggaacttgcagcccaatttgtatgtcgtagctgagttattcaccgggtccgaggaccttgataacgtgttcgtcaccagactggggatcagttccctgatcagagaagctatgtctgcttacaactctcatgaggagggccgacttgtgtatcgctatggcggagaacccgtaggttcttttgtccagccctgcctgaggccattgatgcccgctatagcgcatgctctgtttatggatataacccacgacaatgaatgtcccatagtgcacagaagcgcatatgacgccctgccttcgactaccatagtttcgatggcctgctgtgctagcggctccacacgaggatacgatgagttagtacctcaccagatttcagtcgtctcggaagaacgcttttatactaagtggaatcctgaggcgcttccatctaatactggagaggtgaattttcagtccgggatcatcgctgccaggtgtgcgatcagtaaactgcaccaggagctgggtgctaaaggctttatccaagtctacgtggaccaggtcgacgaggatattgtagcagttacccgacattcaccgtctatacaccagtcagtggtagctgtctccagaaccgcgtttagaaatcctaaaacatcattttacagcaaggaggtgccgcaaatgtgcatccctggcaagatcgaagaggtggtgctggaggccaggacgatcgagaggaacacaaagccctatcgcaaggatgaaaattcaattaatggaaccccagatataaccgttgagatcagagaacacatccagctgaacgaatcaaagatcgtgaaacaagccggtgtggccactaaaggtcctaacgagtacattcaggagatcgagttcgagaatctaagccccggttccgtgattattttccgagtgtctctggatccccatgcgcaggtggcagtcggaatcctgcgcaaccaccttactcagttctccccgcactttaagtctggatccctagccgtagacaacgctgatccaatccttaaaatccccttcgcttccctggcctcccgcctaacccttgcagaactcaaccagattttatacagatgtgagtctgaagagaaggaagatggaggcggttgttatgacattcccaattggtcagcgctgaagtacgcaggactgcagggtctgatgtctgtcctggcagaaattcggcctaagaacgacctcggccaccccttttgtaacaacctgagatctggcgattggatgatagactacgtctccaatcgcctcatatctcgctccggtacgatcgcggaggtgggtaaatggctgcaggccatgtttttttatctgaagcagattccgcgttacttgatcccctgttactttgatgcaattctgatcggtgcatacactacccttctggataccgcctggaagcagatgagttcattcgtccagaacggctccaccttcgtaaagcacttgtccctgggatcggtgcaactgtgtggagtgggcaaatttccatccctgccaatcctatctcccgcactgatggatgtgccctaccgattaaatgagatcaccaaagaaaaagaacagtgttgcgtgtctcttgctgctggcctgcctcatttttcctcagggatcttccgctgttggggcagagatacatttatcgctctcagaggaattcttctgattacgggtcggtacgtagaggccagaaacataatccttgcgttcgccggaacattgcgacacggactgatacccaacctgctgggcgaaggaatttacgccaggtacaactgtagagatgccgtgtggtggtggctccagtgtatccaggactactgtaaaatggtgcccaacggactcgatattttgaaatgtcccgtgagtcgcatgtatcctacggatgacagtgcccctttgccggcaggcaccctcgaccagccgttgttcgaggtcatccaggaggccatgcagaaacatatgcagggcattcaattccgggaacgcaacgccggtccacagattgatcggaacatgaaggatgagggttttaatatcacggccggtgttgacgaggagacagggttcgtgtacgggggaaataggtttaactgtgggacctggatggacaagatgggagaaagcgatagggcacgcaacagggggatccccgcaacacctagggacggttctgccgtggagatcgtcgggctctcaaaatcggctgttcgttggctgctggagttatccaaaaagaatatcttcccatatcatgaagtgactgtaaagaggcacggtaaagcaattaaggtctcatacgatgaatggaatcgcaagatccaagataacttcgagaaactctttcacgtgtctgaagatccaagtgacctgaacgagaaacaccctaacctagtccataagcgtggcatctataaggattcatatggagcctcgagcccttggtgtgactatcaactgcggcctaacttcacaattgctatggtggtagctcctgaactgttcactactgaaaaggcctggaaggcgctagagattgccgagaagaaactgctggggcctttaggtatgaagaccctcgaccccgatgacatggtttactgcggtatctatgacaacgctctggacaacgacaattataacctcgcaaaagggtttaactatcatcagggccctgaatggctctggccaattggatacttcctgagggccaagctctacttcagtaggttgatgggaccagaaactaccgccaagacaatcgtgctggtgaagaacgtcctgagccgtcactatgtgcatctggagcgaagtccatggaaggggctgccagaacttactaacgagaatgcgcagtattgtcccttctcttgcgaaactcaggcgtggtcaatagcgaccattctagagactctctatgacctgtag

SEQ ID NO: 4194 - DNA, 672 bp, synthetic construct
  misc_feature 1..672: note = source = /note="Description of Artificial Sequence: Synthetic coding sequence"
  source 1..672: mol_type = other DNA
atgaacaaacccctgctgtggatctcagtgctgactagcttgttggaggcttttgctcatacggatctgagtggcaaagtcttcgtcttcccgcgtgagtcggtcactgaccacgttaaccttataacccccctggaaaagcctctccagaactttacgctgtgcttccgggcttactctgacctcagccgagcgtattccctcttttcttataatacacagggacgggataacgagctgttggtgtacaaagagcgcgtcggagagtactccttatatatcggacggcacaaggtcacatcaaaggtgatagaaaagttccctgctcccgttcacatctgcgtgtcttgggaatcatcatcaggcattgctgagttttggattaatggcacccccctggtaaagaaaggcctccgacaaggctactttgtcgaggctcagccgaaaatcgtgctcgggcaggagcaggattcttacggaggcaaattcgatcgtagccagagttttgtgggagagattggagatctgtatatgtgggactctgtgttgccccctgaaaacatcctatccgcgtatcaggggacccccctcccagccaacatcctcgattggcaagcactcaactacgagatcagagggtatgttattattaagcctctggtatgggtgtag

SEQ ID NO: 4195 - DNA, 2418 bp, synthetic construct
  misc_feature 1..2418: note = source = /note="Description of Artificial Sequence: Synthetic coding sequence"
  source 1..2418: mol_type = other DNA
atgtcgagcagctcctggctgctgctgagcctggtggccgtcaccgccgctcaatccacaatcgaggaacaggcgaagacctttttggacaagttcaatcacgaagctgaagacctgttctatcagtcctccctcgcgtcttggaattataatacgaatattacagaagaaaacgtccagaatatgaacaatgccggagataaatggtcagcctttctcaaggagcagtctacgctggctcagatgtaccccctccaggaaatccaaaatctgacagtgaagctgcagttgcaagctctgcagcagaatggttctagtgttctttccgaagataagagcaagcgcctgaacaccattctgaacaccatgtccactatttactcgaccggcaaggtctgtaatcctgacaacccacaggaatgcctcttactcgagccaggcctaaatgaaatcatggcaaattccttagactacaatgagcggctatgggcatgggaatcttggcgtagcgaagtgggaaagcaactgcggcctttatatgaggaatacgtcgtgttaaagaatgagatggccagggccaaccactacgaggactacggcgactactggcgtggggactacgaagtgaatggagtcgacggatacgattactctcgaggccaactgatagaggacgttgaacatacatttgaagaaattaaaccgctgtatgaacatcttcacgcatatgtgcgggctaagttaatgaatgcctacccatcctacatttctcctattggctgccttccagcccatctgctaggagacatgtggggaagattttggactaatctctatagcctgaccgttcctttcggacagaaacccaatatcgatgtcacagacgccatggtcgatcaagcctgggacgctcagagaatcttcaaagaagccgaaaaatttttcgtgtcagtcggcctgcccaacatgacgcaggggttctgggagaattctatgctgacggacccaggaaacgtgcagaaagcagtgtgtcaccctacggcctgggaccttggcaagggcgattttcggatcctgatgtgcaccaaagtgaccatggacgactttcttactgctcaccacgagatgggacatatccagtacgacatggcatatgcggcacagccatttcttctgcggaatggagcaaatgaagggttccacgaggccgtcggggagatcatgtccctgtcagccgctacaccaaaacatcttaagtctattgggctcctgtcccccgattttcaagaggacaacgagacggagataaatttcttactcaagcaggcacttactatcgttggaaccctccctttcacctatatgctggagaaatggagatggatggtgtttaagggcgaaatccccaaggaccaatggatgaagaagtggtgggaaatgaaacgggagatcgttggtgtggtggaacccgtcccacacgacgaaacctactgcgacccagcgtctctgttccatgttagtaatgactactcctttattcggtattacacaaggactctgtaccaatttcagtttcaggaggccctctgtcaggctgcaaagcacgagggccctctacataaatgtgacattagtaactccaccgaggcgggacagaaactgttcaacatgctgagattggggaagtcggaaccctggacactcgctttagagaacgtggtcggcgcaaagaacatgaacgttcgtcctctgctcaactacttcgagcccctgttcacctggttaaaggaccagaacaagaattctttcgtcggctggagcactgattggtccccatatgccgatcagtcgatcaaggtgaggatctctctgaaaagcgctctaggagacaaggcctatgagtggaacgacaacgagatgtatctctttaggtcctctgtggcttacgctatgcggcagtatttcctgaaggttaagaatcagatgatactcttcggcgaagaggatgttcgggtcgccaaccttaaaccacggatctctttcaatttctttgttacagcaccaaaaaacgtctcagacatcatacctcgaacagaggttgagaaggcaatacggatgagcaggtctcgcatcaatgacgcctttagattaaacgataacagcctcgagtttcttggcatccaacctaccttaggccctcccaatcaaccgcctgtgtccatctggctgattgtttttggcgtagtgatgggcgtaattgtggttggcatcgtgattttgatctttacggggatccgcgatcgcaagaaaaagaacaaggctcgctcaggcgaaaatccttacgcctccatagatatttcaaagggtgagaacaatccagggttccaaaataccgatgacgtccagacctccttttag

SEQ ID NO: 4196 - DNA, 2418 bp, synthetic construct
  misc_feature 1..2418: note = source = /note="Description of Artificial Sequence: Synthetic coding sequence"
  source 1..2418: mol_type = other DNA
atgagctcctcctcttggctgttgctttcactggtggcagtaaccgccgcacagtccaccattgaagagcaggctaagaccttccttgataaatttaatcacgaggccgaagatctgttttatcagagctccctagcctcgtggaactataacaccaacattacagaggagaacgtacagaacatgaacaatgccggtgacaagtggtctgcttttttgaaagaacagtcaaccctcgctcagatgtatccacttcaggagattcagaacctgacagtgaagctgcagctgcaggccctgcaacagaatgggtcatcagttttgtccgaagataaaagcaaacggcttaacaccatactgaatacgatgagcacaatttatagcactggcaaggtctgtaatcccgacaatccccaggagtgtctgctgttggaacccggattaaatgagatcatggccaactctctcgactataacgaacgcttatgggcatgggaatcctggcgttcagaagtgggcaaacaacttaggccactatacgaagaatacgttgtactgaagaatgagatggctcgagctaatcactacgaagattatggagactactggcgcggagattatgaggtcaatggtgtggacgggtatgactattcccgaggacagttaatcgaggatgtcgaacacacgtttgaagagatcaaacccctctacgaacacctgcatgcttatgtgagggctaagttgatgaacgcataccccagttatatctctccaatcgggtgtctgccggctcatctgctcggcgatatgtggggacggttctggacaaatctatactctctaacggtccctttcggccagaagcccaacatcgatgtgacagacgctatggtggatcaggcgtgggacgcccaacgcatcttcaaggaggcagaaaaatttttcgtcagcgtgggactgcccaacatgacacagggcttctgggagaattcaatgctgacagaccccggtaatgtgcagaaagcggtgtgccacccaaccgcctgggatctgggaaaaggggactttcgcatcctgatgtgcaccaaggtgaccatggacgatttcctcactgcccaccatgaaatgggccacatccagtacgatatggcgtacgccgctcagccctttcttttgcgaaacggggctaacgagggctttcatgaggccgtcggcgaaattatgtccctttcggccgcaactccgaagcaccttaaatccataggcctccttagccccgacttccaggaagacaacgaaacagaaattaatttcctgctgaaacaggccttaaccattgtgggaaccctgccttttacgtatatgctagaaaaatggcgctggatggttttcaagggtgagattcctaaggatcagtggatgaagaagtggtgggagatgaagcgcgagatagtgggagttgtggaacccgtcccccacgacgaaacgtattgcgatcccgctagtttattccacgtatccaatgattactcattcatccgctattacactaggaccctctaccagtttcagttccaggaggcgctatgccaggccgctaaacatgaaggccctcttcataagtgcgacattagcaattctacggaggcgggacagaaactgtttaatatgttgagactcggcaagtcggaaccatggactctggcacttgaaaacgtggtgggggcaaagaacatgaacgtgaggccactgctcaattactttgaacctctgtttacttggctcaaagatcagaataaaaatagcttcgtggggtggtccactgactggtccccatatgcagatcagagtattaaagtgagaatttctttgaagagtgcacttggagacaaagcttacgaatggaacgataacgaaatgtacctgttccggtcaagcgtcgcttatgccatgaggcagtatttcctgaaagttaaaaatcaaatgattctctttggcgaggaggacgtcagagtggcgaatctgaagcccagaatttcattcaattttttcgtgactgctcctaagaatgttagtgatatcatccccagaaccgaggtggaaaaagcgattcggatgagtcggagtcggattaatgatgcattcaggttaaatgacaacagcctggaatttttgggcattcaacccactctcggccctcctaatcaaccacctgtgagcatctggttgatcgtgttcggcgtcgttatgggcgtcattgtggtggggatcgtgatcctgatcttcactggaattagggatagaaagaagaaaaacaaggccaggagtggggaaaatccctatgcctctatagatatcagcaagggcgaaaataaccctggatttcagaatacagatgatgtgcagactagcttttag

SEQ ID NO: 4197 - DNA, 804 bp, synthetic construct
  misc_feature 1..804: note = source = /note="Description of Artificial Sequence: Synthetic coding sequence"
  source 1..804: mol_type = other DNA
atgaaggcagcagtgctcacacttgctgtgctgtttctgaccggttcacaggctcgacatttttggcagcaggacgaaccgcctcaatcaccgtgggatcgcgtcaaagatctggccacagtatacgtcgatgtcctgaaagacagtgggagagactacgtgagccagtttgaaggcagtgctcttggtaaacagctgaatctgaaactgctggacaactgggatagcgtgacttccacatttagcaaactccgcgaacagttaggcccagtcacacaggagttctgggacaacctcgaaaaagaaactgaggggttgcgccaagaaatgagcaaggatttggaggaggtgaaagcgaaggtgcagccatatctagacgattttcagaagaaatggcaagaagagatggagctctataggcagaaagtagagccccttcgcgctgagcttcaggagggggctagacaaaaattgcatgagttacaagagaagctgtcgccactgggtgaggagatgagggacagagctcgagctcatgtcgatgccctgcggactcacctcgcaccttattccgatgaacttcggcagtgtctcgctgcccgactcgaagccctgaaagaaaacggaggagcacgactcgctgagtaccacgccaaagccacggagcacttatccactctgtccgaaaaagctaagcccgcattggaagatctgaggcaggggctcctccctgtactggagtcttttaaggtgtcttttttgagcgctctggaggagtacaccaagaagctgaacacacagtag

SEQ ID NO: 4198 - DNA, 804 bp, synthetic construct
  misc_feature 1..804: note = source = /note="Description of Artificial Sequence: Synthetic coding sequence"
  source 1..804: mol_type = other DNA
atgaaagcagccgtactcacgttggccgtgttgttcctgacagggagtcaggctcggcatttttggcagcaggacgagcccccacagtctccctgggatagagtaaaagacctagccaccgtgtacgttgatgtcctgaaggacagcggtagagattatgtatcccaatttgaaggaagtgccctgggcaagcagctcaatctcaaactgttggacaattgggatagtgttacgtcaaccttcagcaagctcagggagcagctgggccctgtgacccaggagttctgggacaacctagagaaggagaccgaaggattgcgccaggaaatgagtaaagatctggaggaagtgaaagctaaagtgcagccatacctggatgattttcagaaaaaatggcaggaggagatggaactgtatagacagaaagtcgagcctctacgggcagagcttcaggagggagctcgacagaagcttcatgagctgcaggaaaagctgagccctctgggggaggaaatgagggactgtgcgagggctcatgtggacgcgctcagaacacatttagcaccctacagtgatgaacttaggcagagattggccgcaagactcgaagctcttaaggagaatggcggtgccagattggctgagtaccatgcaaaagccaccgaacacctgtccacactgagcgagaaagctaagcccgcacttgaggatctgcgccagggcctgctgcccgtgctagaaagctttaaggtttcattcctaagtgccctggaggaatacactaagaagctgaatactcaatag

SEQ ID NO: 4199 - DNA, 804 bp, synthetic construct
  misc_feature 1..804: note = source = /note="Description of Artificial Sequence: Synthetic coding sequence"
  source 1..804: mol_type = other DNA
atgaaggctgcggtgctgaccctggccgtcctcttcctgaccggctcccaggcacggcatttctggcagcaggacgagccccctcagtcaccctgggacagggttaaggatctggctaccgtctacgtggacgttcttaaagatagcggcagggattacgtgtcccagttcgagggatctgcactggggaaacaacttaacttgaagctgctcgataattgggactcagtgaccagcactttctccaagctccgggaacaactaggacccgtaactcaggagttttgggacaatcttgaaaaggagactgagggactcaggcaggaaatgtccaaggacctcgaagaagtcaaagcaaaagttcaaccctacctggacgattttcaaaaaaagtggcaggaggagatggagctgtaccgacagaaagtcgagccactaagagccgagctgcaagaaggtgcgcgtcagaagctccatgagctccaggagaagctgtcaccgctgggagaagagatgagagacagggccagagcccacgtggacgccctcagaacccatctggcgccatacagcgacgaactgcggcagcggctggcagccagactcgaagctctcaaggaaaatgggggagcaaggcttgctgagtaccacgctaaagctaccgaacacttaagtactcttagcgagaaagcaaaacctgcgttagaagacctaagacaggggttgttgccggtactggagagctttaaagtatctttcctgtctgccctggaggaatacacaaaaaagcttaatactcagtag

SEQ ID NO: 4200 - DNA, 804 bp, synthetic construct
  misc_feature 1..804: note = source = /note="Description of Artificial Sequence: Synthetic coding sequence"
  source 1..804: mol_type = other DNA
atgaaggctgcagtcctcacacttgcagtgctgttcctgacgggctcacaggctcgccacttctggcagcaggatgagcctccccaaagcccatgggaccgggtcaaagatcttgctaccgtgtacgtagatgtcctgaaggattcaggtagggactacgtgtctcaattcgaaggcagtgccctgggcaagcaattgaacctcaaattgttggacaactgggactctgtcacctctacattttccaagttacgggagcagcttgggcctgtcacccaggaattttgggataatctcgaaaaagagactgaaggtctacgacaggagatgagcaaagatctagaggaagtaaaagctaaagtgcaaccctatctggacgactttcaaaagaaatggcaagaggagatggagctctacagacagaaggtcgagccactgcgggctgaactgcaagaaggggcaagacagaagctccacgagttgcaagaaaaactctccccactaggcgaagaaatgagggatcgcgctcgcgctcatgtggatgccctacgcacccacttagcaccttattccgatgaactgcggcaacggttagctgcaagattggaggcgctcaaagaaaacggaggtgcaaggcttgcggagtaccacgcaaaggccactgaacacctgagtacactgtccgagaaagcaaaacctgccctagaggacctcagacaaggcctactgcctgtcttggaatcctttaaggttagcttcctgagtgcccttgaggagtataccaagaagcttaatacacagtag

SEQ ID NO: 4201 - DNA, 804 bp, synthetic construct
  misc_feature 1..804: note = source = /note="Description of Artificial Sequence: Synthetic coding sequence"
  source 1..804: mol_type = other DNA
atgaaagctgctgtgctgacccttgcagtgctgttcctgacaggcagtcaagccagacacttctggcaacaggatgagccccctcagagcccctgggatcgtgttaaagatctcgccacagtttatgttgacgtgctaaaggactccggccgtgactatgtctctcagtttgagggctcggcattgggcaaacagcttaatctcaagttgctcgacaactgggactctgttacgtcaaccttttccaaattaagagaacagctcggccctgtcacacaagagttttgggataatctggagaaggaaaccgagggcttacgacaggagatgtctaaggacttagaggaggtgaaagctaaagtgcaaccgtacctagatgatttccaaaagaagtggcaggaggagatggaactgtaccgacagaaagtggaacctctccgagctgaattgcaggagggcgctcgccaaaaactccacgagttacaggagaagctttctcctctcggcgaggaaatgcgcgaccgcgcaagggctcatgtggacgccctgcggactcaccttgctccctatagtgacgaactcaggcagcgcttagcagcgagattggaggccttaaaggagaacggaggggctaggctggcagagtatcacgccaaggcaactgaacatctgtccaccctgtctgaaaaagcaaaacctgcgctcgaggatttgcgtcagggattgcttccagtgctggagagtttcaaagtctcatttctctccgccctggaagagtataccaagaagctcaacacccagtag

SEQ ID NO: 4202 - DNA, 804 bp, synthetic construct
  misc_feature 1..804: note = source = /note="Description of Artificial Sequence: Synthetic coding sequence"
  source 1..804: mol_type = other DNA
atgaaagccgctgttctgaccctggctgtcctgttcctgaccgggagccaggctcgacatttctggcagcaggacgagccaccgcaaagcccgtgggaccgcgtgaaggatcttgctacagtgtacgtggatgttcttaaagactcgggacgtgattacgtgtcccagtttgaggggtccgccctgggcaaacaattgaacctcaagctgctggataattgggactccgtgacctccactttttccaagctgagagagcagcttggtccagtcacgcaagaattttgggacaatcttgagaaggagacagaggggcttaggcaggagatgagtaaagatttggaggaagtcaaagccaaagtacaaccctacctggatgacttccagaaaaaatggcaggaggagatggaactctaccggcagaaagtggaacccttacgtgcagagctgcaagagggcgcacggcaaaagctccacgaattgcaggagaaattgtctcccctaggcgaagaaatgcgagaccgggcacgagctcatgtcgatgcgctgcggacccacttagcaccttattctgacgaactcaggcagcgcctcgcagccagattagaagcccttaaggaaaacgggggagctcgcctggccgagtatcatgcaaaagcaactgagcatctgagtacgctgagcgaaaaggccaagcctgcactcgaggacctgcggcaggggttgcttcccgtgttagaaagtttcaaggtgtcgttcctgagcgcattggaggagtatactaaaaaacttaacacacaatag

SEQ ID NO: 4203 - DNA, 1653 bp, synthetic construct
  misc_feature 1..1653: note = source = /note="Description of Artificial Sequence: Synthetic coding sequence"
  source 1..1653: mol_type = other DNA
atgacaggagacaaggggcctcaacgtctcagcggctcttcctacggatccatatctagccctaccagcccaactagtccgggaccacagcaagcgccaccacgggagacatacctcagcgagaaaattccaattccggataccaagcccggaacgttttctctccgcaagttatgggcgtttacaggtcccggattccttatgagtattgcttttttagatccaggtaatatagagtcggatctccaggccggagctgtagcagggtttaagttactctgggtgctgttgtgggccacagtccttgggctgttgtgtcagcggctggcggctaggctcggggtggttacagggaaggacctgggagaggtgtgccacctctattatcccaaggtacctagaactgtactgtggctgactattgagctggccattgtgggttccgacatgcaagaagtgatcggaacggctattgctttcaatctcttgagtgctggcaggatacccctctggggcggagttttaattactatcgttgacacatttttttttttattcctggacaactatggcctacgaaaacttgaggcctttttcggtttgcttataaccattatggcactcacgttcggatatgaatatgtggttgctcgcccagagcagggcgctctgctgagaggactctttctcccgtcctgcccagggtgtgggcacccagaactgctgcaagcggtcgggatcgttggagccataatcatgcctcataacatctacctccacagtgcacttgtcaagtcacgcgagatcgatagggctcgccgtgccgacatcagagaagctaatatgtactttctcatcgaagctaccattgccctgagcgtgtctttcataatcaacctgtttgtgatggctgtctttggtcaagccttttaccagaagactaaccaggcagctttcaatatttgtgctaacagctctctgcacgattatgcaaagatatttcctatgaacaatgcgacagtcgcggttgacatttaccaaggtggcgtcattctggggtgcctatttggccctgccgcactgtatatttgggctatcggactattggcagcaggccaatcgtccacgatgactggcacctatgcaggccagttcgtcatggagggctttctcagattacgatggtcgcggtttgccagggtgcttctgaccaggtcttgcgccattttgccaactgtcctagtagctgtattccgcgacctcagggaccttagcgggctgaacgacctccttaatgtcctccagagtcttctgttaccttttgctgtccttccaatccttacttttactagcatgccaacactcatgcaggagttcgctaatggtcttcttaataaggtagtcacctcttccatcatggttctcgtgtgtgcgatcaacttgtatttcgttgttagttatttgccctccctacctcatcccgcttactttggcctcgccgctttactggcagctgcataccttggactgagcacatatctcgtctggacatgctgcctagcacacggcgctaccttcctggcccacagtagccaccatcattttctgtacgggttactggaggaggaccagaaaggagagacctcaggatag

SEQ ID NO: 4204 - DNA, 13035 bp, synthetic construct
  misc_feature 1..13035: note = source = /note="Description of Artificial Sequence: Synthetic coding sequence"
  source 1..13035: mol_type = other DNA
atggacccccctagaccagccctgctcgccctgttggcactcccagctctgctgttactgctcttggccggtgctcgggctgaggaagagatgctcgagaatgtttcccttgtgtgcccaaaagatgccaccaggtttaaacacctccgcaagtacacctacaattacgaagcggagagcagctccggagtcccgggaaccgccgactctagatcggcaactagaatcaactgcaaagtggaactggaggttcctcaactttgctcattcattctgaagacatctcagtgcacactgaaagaagtgtacggatttaacccggaaggtaaggccctgttaaaaaagactaaaaactccgaggagtttgcggcagcgatgagcagatatgaactcaaattagccattcctgaaggaaagcaagtgttcctgtaccccgagaaagatgaaccgacctacatcctgaatattaaaagaggaattatttccgccctgttggtgccaccggagaccgaggaggctaagcaggtgctttttcttgatacagtctacggcaattgctctactcatttcaccgtcaaaaccaggaaaggaaacgtggctaccgagatctcgactgaaagggatctgggccagtgtgataggttcaagcccatcaggacagggattagccccctggcattgatcaaggggatgaccaggcctcttagcacccttatctcttctagccaatcctgtcagtatacactggacgcaaaaaggaagcacgtggccgaagccatctgcaaggagcagcatctttttctgcccttcagttataagaacaagtacggtatggtggctcaggtcactcaaacgcttaagctggaggacacaccgaaaatcaactcacggttcttcggcgaggggacaaagaagatgggccttgcctttgagagcactaagtctacatcacccccaaaacaagccgaagcagtgcttaaaactctgcaagaacttaagaagttgacaatctctgagcagaacattcagagagccaatttgttcaacaagctggtaactgagctgaggggtctatcagacgaggcagtgaccagtctgttacctcaactgatcgaggtgagttcacctattacgctccaggctcttgtacagtgcggacaaccacaatgcagcacccacatcctccagtggcttaaaagagttcacgccaacccactcctgatcgatgtggtgacgtaccttgttgccctaatacccgagccttctgctcagcagttgcgggaaatattcaacatggcccgagaccagcgaagccgggcaactctttacgcgctctctcatgccgtcaataactatcataagactaaccctacagggacacaggagctgttggatatcgccaattatctgatggaacagatccaggacgactgtaccggtgacgaggattacacctatctgatcctgagggtaataggtaacatggggcagaccatggagcagctgacgcccgaattgaagagctctatactgaagtgtgtacaatctactaagccaagccttatgatccagaaggccgcaatccaggctctccgtaaaatggagccgaaagataaggaccaagaggtcctgctgcagacttttcttgatgatgcctcgccaggcgataagcgcctggctgcttacctcatgcttatgcgctccccttcccaggctgatatcaacaagattgttcaaatcctgccatgggagcagaatgagcaagtcaaaaactttgtcgccagtcacatcgccaacattctgaatagcgaggagctggatattcaggacctgaaaaagctcgttaaggaagcattgaaagagtcgcagctgccgactgtgatggactttcggaagtttagtaggaactaccagctgtataaatccgtgtcgctcccctccctcgaccctgcatcagccaagatcgaaggtaacctcatttttgaccctaataattaccttccaaaggaaagcatgctgaaaactactctgaccgccttcgggtttgctagcgccgatctcattgaaatcggtttggaaggcaagggcttcgaacctacgctagaggcgctcttcgggaaacaagggttctttcccgactctgtgaacaaggccctgtactgggtgaacggtcaggtgcctgacggcgtgagcaaggttctcgtggatcacttcgggtacaccaaggacgataagcacgaacaggatatggtgaacggtatcatgctgagcgtggaaaagctgatcaaggacctcaagtctaaggaagtccccgaagctcgcgcttacttaagaatcctgggcgaagagctgggatttgcctctctacatgacctccagctgttaggaaagctgttgttgatgggcgctagaacactacaaggaattcctcagatgattggcgaagtcattcggaaagggagtaagaacgatttttttttacattatatatttatggagaatgcctttgaactgcctacaggagctggtctccagctgcagatctcatcatcaggagtgattgcgcctggcgctaaggccggagtgaagttggaggtcgccaacatgcaggctgaattggtggcgaagccttccgtgagcgtggaatttgtgactaatatgggcattattattcccgacttcgccaggagcggcgttcagatgaacacaaactttttccacgagtccggtctggaagcacacgttgccctgaaggctggtaaactgaaatttatcatcccaagcccaaaaagaccagtgaaactgctgtccgggggaaatacgctgcacctggtttccaccacgaagactgaggttatcccacctctcattgaaaacagacagagttggtccgtgtgcaagcaggtgtttcccggattgaactactgtacatcaggcgcttactccaatgcgtcaagtaccgatagcgcttcctactaccctctgaccggggataccaggctagaattggagttgagaccaaccggtgaaatcgagcagtatagcgtctcagcaacatatgagcttcagcgggaagatcgcgcactggtggacacactcaaattcgtcacccaggccgaaggtgcaaaacaaaccgaggcaactatgacatttaagtacaatagacagtcaatgacattgagttctgaggtgcagattccagacttcgatgtcgacctcggcacaattttgcgggtgaatgatgaaagcactgagggaaaaaccagctataggctaactcttgacatacaaaataaaaagatcactgaagtcgcccttatgggacacttgtcctgtgacaccaaggaagaacggaaaatcaaaggggtcatttccattcccagactccaggcggaggctcggtcggaaatcctcgcgcattggtcccctgcaaaactgctgctccagatggatagctctgctacagcttatggcagcactgtgtccaaaagagtggcgtggcactacgacgaggagaaaatcgaattcgaatggaatacagggactaatgtggataccaagaagatgacaagcaacttcccagtcgacctcagcgactacccaaagtctctccatatgtacgccaatcgtctattggatcacagggtcccgcagacggacatgacctttagacatgtaggatctaaacttatcgtagcaatgtccagctggttacagaaggcttccgggagcctcccttacacacagacattacaagatcacctcaacagtcttaaagaattcaacctccagaatatgggcctcccagatttccatattccggagaacttgtttctgaagagcgatggacgcgtgaagtacacgctgaataagaactcgctgaagattgagattccactgcccttcggcggaaaaagtagtcgggatcttaaaatgctagagacagtaagaactcccgctctccatttcaaatctgtggggtttcaccttccttctcgggaattccaagtgcccacatttactatccccaagctgtatcaacttcaggtgccactcttgggcgtgctggacctttcaacaaatgtgtactcaaatttgtacaactggagcgcaagctacagcggagggaacacctcaaccgatcacttcagcttgagggcccgttatcatatgaaagcagatagcgtggtcgacttgttatcgtacaatgtccagggctcaggggagaccacatacgaccataaaaacacgtttaccctgtcgtacgatggctctctgaggcataagtttctcgattccaatatcaaattcagccacgttgagaagttgggcaacaatcccgtgtccaagggtttgctgatcttcgatgcctccagttcctgggggccacagatgtcggcttcagtacacctcgatagcaagaagaaacagcatctattcgtcaaagaggttaaaatcgacggccagtttagagttagctccttctatgccaaaggaacatatggcctatcatgccagcgggatccaaataccggcaggctgaacggggagagtaacctgcgattcaactcttcatacttgcagggaacaaatcagataactggaagatacgaggatggcacgctcagtctgacgtccaccagtgacctgcagtcaggcattattaagaatacggcatcgctcaaatatgagaactacgagttaaccctcaaatctgacactaacggtaagtataagaacttcgcaacctcaaacaaaatggatatgaccttctctaaacagaacgctctgttgagatccgaatatcaggcagactacgaatcactaaggtttttcagtctgttgtccggctctctgaacagccatggtctggaactcaacgctgatatcttgggtacagacaagatcaactccggggctcacaaggccactctgcgtattggccaagatggaatcagtacctctgctaccacgaacctcaaatgttctctgctagtactggagaacgagctcaacgctgagcttggcctttctggggctagcatgaaactgactactaatggccgtttcagagaacacaatgccaagtttagtctggatggcaaggcagccctcacagaattgtcgctcggcagcgcctaccaggcgatgatcctaggagtggactcaaagaacattttcaacttcaaagtgtctcaggagggcctgaaactgtcaaacgacatgatggggagctacgccgagatgaaattcgaccacacaaacagcctcaatattgccggactctctctggacttttcttcaaagctcgacaacatatattcaagcgacaagttttacaagcagacagtgaacttacagctacagccctactcactggtaaccaccctgaattctgatttgaaatacaacgcactggacctgaccaacaatgggaaactccggctggagccgctgaaactgcacgtcgccggaaatctcaaaggcgcatatcagaacaacgagatcaaacacatctacgccatatcatctgctgccctgtctgcttcttacaaagccgacaccgtggccaaagtacaaggcgtggagtttagtcaccgactgaatactgacatcgcagggcttgctagtgcaattgatatgagcacgaactacaattccgattcattgcacttttcaaatgtattccggtctgttatggctccattcactatgaccatagatgcccacaccaatggcaatggtaagctggccctgtggggcgagcacactggccagctgtactcgaagttcttattaaaagcagaacccctcgctttcaccttttcccacgattacaaagggagtactagtcaccacctcgtctctagaaaaagcatctctgcagcattagagcacaaagtctccgctctgcttacccccgctgagcagacaggtacgtggaagttgaagacacagttcaataacaacgagtattctcaggatctggatgcctacaataccaaggacaaaataggcgtggagctgaccggcaggacactggcagacctgacactcctggattctcctattaaggtgcctctgctgctgtctgaaccaattaatatcatagatgctcttgagatgagagacgccgtggagaaaccacaggaatttacaatcgtggcctttgtgaagtatgataaaaaccaggacgtccactctatcaatctgccattcttcgaaaccttacaagagtacttcgagagaaaccgccagacgataattgttgtgcttgaaaatgtacagaggaacctaaagcacattaacatcgatcagtttgtaagaaaatacagggccgcattggggaagctcccccagcaggccaatgactacctgaacagcttcaactgggagcgccaagtttcacacgccaaggagaaacttacagcactcactaaaaagtacaggataactgagaatgatattcagatagcgctcgatgatgctaagatcaacttcaatgaaaaacttagccaacttcagacatatatgatccagttcgatcagtacatcaaggatagctatgacctgcatgatctcaaaatagcaattgccaatattattgacgagattatcgagaagcttaagtcactcgatgagcactaccatatccgcgtgaacttggtcaaaacgatccacgatttgcacctttttatcgaaaacattgacttcaataagtctggctccagtaccgctagttggattcagaacgtggacacaaagtaccagataaggatccagatccaggagaagttacaacagttgaaaaggcacattcagaacatagatatccagcatctggccggtaagctgaagcaacacatcgaggccatcgatgtacgggtattgctagatcaactgggaactaccatcagcttcgagcgcatcaatgatatcctggaacacgtgaagcactttgtgatcaatctgattggggattttgaggttgcggaaaaaattaatgcttttcgtgctaaggtgcacgagttaatcgagcgctatgaggtggatcaacagatccaggtactcatggataagcttgttgaactggcacaccagtataagcttaaggagacaattcaaaagctttccaatgtcttgcaacaagttaagattaaggattattttgagaagctagtgggcttcatagacgatgcggtcaagaagcttaatgagctgagctttaagacgtttattgaggatgtgaataaatttttagacatgctgataaagaaactaaagagttttgactaccatcagttcgttgatgaaacaaatgacaagattagagaggtgacccaaagactgaacggcgagatacaggccttggagctcccgcagaaagcagaggcccttaaactgtttctcgaggagactaaagccaccgtcgccgtgtacctggagagtctgcaggacacaaagattacactgattattaattggctgcaagaggctctctcgagcgctagtctggcgcatatgaaagccaagttccgagagacattggaagatacgcgcgaccgaatgtaccagatggacatccagcaggaattgcaaaggtatctgagtctggttggacaggtgtactccacgcttgttacgtacatttccgattggtggacactcgccgcaaagaatttgaccgacttcgctgagcagtactcgatccaggattgggctaaacgaatgaaggctctggtggagcagggatttacggtgccggaaattaaaaccatccttgggacaatgccagcatttgaggtgtctcttcaagccctgcaaaaagccactttccagactccggacttcattgtgcccctgacagaccttcggatcccttccgtacagataaacttcaaggatctcaaaaatataaaaatccccagccgcttctcaactcccgagtttaccatactgaatacgtttcacatcccaagcttcaccattgatttcgtcgagatgaaggtcaaaatcatccggactatcgatcagatgctgaactcagaactccagtggcctgtgcccgacatctacttaagagacctgaaggtggaggacatccctctggcacggattaccctacccgactttagattacctgaaatcgccattcctgaattcataatcccaacactgaacctgaatgattttcaggtgccggacctccacattcccgagtttcaactgccccatatatcgcacaccattgaggtccctacattcggcaagctctacagtatcctcaaaattcagtcacccctgttcacgctggatgccaatgcagatatcggaaacgggaccaccagtgcaaacgaagccggaatagccgcatcaattacagccaagggtgagagcaagctcgaagtgctcaatttcgactttcaagcaaatgctcaactatcaaatccaaaaattaacccgctggccctcaaagaatctgtcaaattttcgagtaagtacctgcgcactgagcatggctccgagatgttattttttgggaacgccattgaagggaaatctaacacagtggctagtctacacactgagaagaatacactagagctctccaatggagtgatagtaaagatcaataaccagctaacgctggactcgaacaccaagtattttcataagctcaacataccgaagctggattttagctctcaagctgacctacgtaacgagatcaaaaccttgctcaaggctgggcacatcgcctggacgagctccgggaagggtagttggaaatgggcctgccccaggttctccgacgagggtacccacgaatcacagatcagtttcaccatcgagggcccactgacaagttttggcctatctaataaaatcaactcaaagcacctgcgcgttaatcagaatttggtgtacgagtctggcagtttgaacttcagtaaattggagatccagtcacaggtggacagtcaacacgtggggcattcggtgttgacagcgaaagggatggcgttgtttggggaaggcaaggctgaatttaccgggaggcacgacgcgcaccttaacggtaaggtgataggaactctgaagaacagcctttttttcagtgctcagcccttcgaaattacggcatccacaaataacgaggggaacctgaaagtgcgttttccccttcgtctgacgggcaaaatagacttcctgaacaattatgccctatttttgagccccagcgctcaacaggccagctggcaagtgtcagctaggttcaatcaatataaatataatcagaactttagcgccggaaataatgagaacatcatggaggcccatgtcggaatcaacggagaagccaacctggactttctcaatattccccttacaattccagagatgcgcctgccctataccatcatcactactccacctctgaaagacttttccctctgggaaaagaccggtcttaaggagttcctgaagacgacaaaacaaagtttcgatctgtccgtgaaggcccagtataaaaagaataagcaccggcatagtataacgaacccactggctgttctgtgtgaatttatatcccagagcatcaagagcttcgatcggcactttgaaaagaatcgaaacaatgcgttggactttgtgaccaagtcctacaacgagaccaaaattaaattcgataagtataaggcagaaaaatctcacgatgaactccccaggacgtttcaaattcccggatacactgtcccagtcgtgaatgtggaggttagcccctttaccattgaaatgtcagcatttggttacgtgttcccaaaggctgtgtctatgcctagctttagcatcttgggaagcgacgtcagggtgccttcgtacaccctgattctgccgagtctcgaactgcccgtactgcatgtgccaagaaatttgaagctaagtctaccagacttcaaggagctatgtaccatatcacacattttcattcctgctatgggtaatatcacatatgatttttctttcaaatcatccgtaataaccttaaatacaaacgctgaactgtttaatcaaagcgacatagtcgcccatctgctgagcagttccagtagtgtgatagacgctttgcaatacaagctggaggggaccactaggcttactcgcaagagaggtcttaagttggctactgctctgagtctttccaataaatttgttgagggatctcataactctaccgtttcactgacgaccaaaaacatggaggtatctgtcgccaccaccaccaaggcgcaaattcctatcctgcggatgaactttaagcaggaactcaatgggaacaccaagtctaagcctacagtgtccagctccatggagtttaaatacgactttaattctagtatgctctatagtacagccaaaggggcagtggaccacaagttgtccctcgagagtctgactagttacttttcaatcgagtcatcaacaaagggggacgtgaaagggtccgtgttgtcccgcgaatacagtggtactatagcctctgaggccaacacctacttgaactcaaaatcaacaaggtctagcgtgaagctgcagggaacctctaaaattgacgatatatggaacctggaagtgaaggaaaactttgccggagaggctactctccagcgcatctactctctctgggagcattcaacaaaaaatcacctccaactggaaggactattcttcactaatggagagcataccagtaaagcgactttggaattatccccctggcagatgagtgcacttgtgcaagtccatgcatcgcagccttccagtttccacgattttccggacctgggacaagaagtcgctcttaatgctaatacaaagaaccaaaaaatcaggtggaaaaatgaggtacgtatacattccggttcatttcagagccaagtcgaattgtcaaacgatcaagaaaaggcgcacctagacatcgccggatctctggaaggacatctgaggtttctgaaaaatataattctgccagtgtacgacaagtctctgtgggattttcttaagttggacgtaaccacttctattggccgtaggcagcatcttagagtgtccaccgctttcgtgtatactaagaacccaaatggatattctttttctattccagtcaaagtccttgcggataagttcatcattccgggactgaagctcaacgacttgaactccgttctggtaatgcctaccttccatgtccctttcaccgatcttcaggttcctagttgcaagctggattttcgggaaattcagatctacaagaagttacggacttcatcgttcgcccttaaccttcctacactgcctgaggtgaaatttccggaagtggacgttcttactaaatattcccaacctgaagactctctgatcccattttttgagatcaccgtacccgagtcacaactgactgtttcacagttcaccttgccaaagagtgtcagcgatggtatcgcagcccttgatctgaatgccgtagccaataaaattgccgatttcgaactgcccactatcattgtgcctgaacaaaccatcgagattcccagcattaagttcagcgtgcccgctgggattgtgatcccctccttccaagccttgacagctcggtttgaggttgacagcccagtttataatgcaacatggtcagcctcattgaaaaacaaagcagactatgtagaaacggtgctggatagtacttgttctagtacggtgcagttccttgagtatgaattgaatgtgctaggcacccataaaattgaggatgggactcttgcttcaaaaacaaagggtacctttgcacaccgggacttcagcgccgagtacgaagaggatggcaagtatgaaggactccaggaatgggaaggcaaagcccacttaaatattaagtcacccgcattcacagatctgcatctccggtatcagaaagacaagaagggaatctcaacatcagccgcatctcctgccgtgggtaccgtggggatggatatggacgaggatgatgacttcagcaaatggaacttctactacagcccgcaaagttcgccagacaagaagcttacaatatttaaaaccgaactgcgggtacgggagtctgatgaagagactcagatcaaggtgaattgggaggaggaagctgcctcaggcctgcttacaagccttaaggacaacgtgcccaaagccaccggagtgttgtacgactacgtaaacaagtaccactgggagcacacagggttgactctgagggaggtatcttcaaaacttcgaaggaacttacagaataacgcagagtgggtataccagggagctatcagacagatagatgacatcgatgtgagatttcagaaagcagcaagcggcactacaggaacgtaccaggaatggaaagacaaagctcagaacttgtatcaggaactgttgacccaagagggacaagccagctttcagggcctcaaggacaatgtgttcgacggtctggtgcgcgtaactcaggaattccatatgaaggtcaagcatcttatcgattctctgattgactttctgaattttccgaggttccagttcccaggaaaacctgggatctatacacgggaggaactatgtaccatgttcatcagagaggtggggaccgtcttatcccaggtttactccaaggtccataacggcagcgagatcctgttctcctacttccaagacctcgtcattacattacccttcgaactgcggaagcataagctgatagatgtaatcagcatgtatagagaattgcttaaagacttatctaaagaggcccaggaggtgtttaaagctatacaatcgctaaaaaccacagaagtactgcgaaacctccaggatcttttgcagtttatctttcaactgatcgaagacaatatcaagcagttgaaggaaatgaaattcacctacctgataaattatatccaagatgagatcaacaccattttctctgattatatcccatgcttctac

SEQ ID NO: 4205 - DNA, 798 bp, synthetic construct
  misc_feature 1..798: note = source = /note="Description of Artificial Sequence: Synthetic coding sequence"
  source 1..798: mol_type = other DNA
atgaaaaaggaggtctgctcggtggccttcctcaaagccgtgtttgctgaatttcttgccaccctcatcttcgtcttcttcggcttagggtcggcgctgaagtggccctctgctctgcctacgattctccagatcgccctcgcctttgggctggccatcggaacactagcacaggcactggggccagtcagtggagggcacatcaaccctgccattacactagcgctgctggttgggaatcagatctcactgctgcgcgcatttttctatgttgccgctcagcttgtaggagccatcgccggtgctggaattctgtacggggtggccccactgaacgcacgcggaaacctggccgtgaacgctctgaataacaacaccacacagggccaggcgatggtggtcgaacttatcctgactttccagctggctctatgtatcttcgcaagcacagacagtagaagaacgtctcctgttggctctcctgcattgtcaataggccttagtgtgacactcggtcaccttgtggggatttacttcaccggatgtagcatgaatccagcccgtagctttggacctgctgtggttatgaaccgattttctcccgcacactgggtgttctgggttggcccaattgtgggcgctgttttagcagccattctgtacttttacctcctgttccccaacagcttatcactgagcgagcgggtggctattataaaggggacctatgaacccgacgaagattgggaggagcagagagaggaacgcaaaaagactatggaattaacaacccggtag

SEQ ID NO: 4206 - DNA, 993 bp, synthetic construct
  misc_feature 1..993: note = source = /note="Description of Artificial Sequence: Synthetic coding sequence"
  source 1..993: mol_type = other DNA
atgtcggccaaatccagaactattggaatcattggggctccttttagcaaaggccaaccaagagggggtgtcgaagagggcccaacagttttacggaaggcaggacttctcgagaaattgaaagagcaggtgacgcagaacttcctcattctcgagtgcgacgtcaaggactacggggaccttccattcgcggatatccccaacgactctccctttcaaattgtgaagaaccccagaagtgtgggcaaggccagtgagcagctcgctggcaaagtggcagaagtgaaaaagaacggtcgtattagcctggtgctcggcggagatcattcattagcgattgggagcataagtgggcacgctagggtccatccggatttgggcgttatctgggtggacgcacataccgatatcaatacaccgctaacaactaccagtgggaatctgcacgggcagccggtgtctttcctattgaaggaactgaaggggaaaattccggacgttccgggattttcttgggtgacgccgtgcatttctgcaaaggacattgtctacattggactgagggatgtagatcctggtgaacactacattttgaaaacccttggaattaagtacttctctatgaccgaggtggacaggctgggcattggtaaggtgatggaagagaccctatcttacctgctcggacgtaagaagcgacccatccacctcagctttgacgtggacgggctggatcccagttttacaccagccaccgggacccccgtggtgggcggtctgacctacagggaagggttatatatcaccgaagaaatatataagactgggctgttgtcaggccttgacatcatggaggtcaatccttccctcgggaagacccctgaagaagttaccagaacggtaaatactgctgtggcgatcacactggcctgctttggcctggctcgggaaggtaaccacaagcctatagactatctcaatccccctaaatag

SEQ ID NO: 4207 - DNA, 969 bp, synthetic construct
  misc_feature 1..969: note = source = /note="Description of Artificial Sequence: Synthetic coding sequence"
  source 1..969: mol_type = other DNA
atgtcagctaagagtaggaccatcggtattattggagccccattctctaagggtcaaccgaggggtggcgtcgaagaaggcccaactgtgttacgcaaggccggattgctggagaagctgaaggagcaggaatgtgacgtgaaagattatggggatctcccgtttgccgacatccctaacgattctcctttccagatcgtcaagaatcctagaagtgtgggtaaagcctctgaacagctcgcaggcaaggtcgctgaagttaagaagaatgggaggatttctctggtgctgggaggcgaccattctctggctatcggctctatcagcggacatgcgagagtgcatcctgatttgggtgtcatttgggtggacgcccacacggatatcaatacacccttgaccacaacctcagggaacctgcacggtcaaccagtctcatttctgttaaaggagctcaaggggaagatccctgatgtgcccggattttcctgggtcacaccatgtatatccgccaaggacatcgtttacatcggcctccgcgacgttgacccaggggaacactatatcttgaaaaccctcggcattaaatatttttccatgactgaggtggacagactgggcattggaaaagtcatggaggaaaccctgtcctacctgttaggcagaaagaagaggcctatccacctctctttcgatgtagatggacttgatccctcctttacccccgctaccggcacgccggttgtgggcggattaacatatcgggaggggctgtatattaccgaagagatatataagacgggcttactgtctggcctggacatcatggaagtgaatccctccctgggcaaaacacctgaagaagtgactaggactgtcaacaccgccgtggccataacactggcatgtttcggtttggctagggagggaaaccacaagcccatcgattacctgaacccgcctaaatag

SEQ ID NO: 4208 - DNA, 711 bp, synthetic construct
  misc_feature 1..711: note = source = /note="Description of Artificial Sequence: Synthetic coding sequence"
  source 1..711: mol_type = other DNA
atgtcagcgaagtcacgaacaatcggcattatcggcgctcctttttccaagggccagcccagaggaggcgtggaagagggccctaccgtcttgaggaaggcaggactcctcgaaaagctgaaggaacaggagtgcgatgttaaggattacggggacctcccttttgcggacattccaaatgatagtccctttcagattgtaaagaaccccaggagtgtgggtaaggcctctgagcagttggcaggtaaggtggctgaagtgaaaaagaacggcagaatttctctggtcctgggcggtgaccactctctcgccatcggatctatttctgggcatgccagggtgcaccccgatctgggagtcatttgggtggatgcccacaccgatatcaatacaccactcactacaacatccggtaatctgcacggacagccagtgagttttttactaaaagaactgaagggaaaaatccccgatgttcccggttttagctgggtgacaccatgtatatccgcaaaggatattgtgtatataggcttgagagatgtagatcccggtgagcattacatcttaaaaaccttgggcatcaagtattttagtatgactgaagtgacgcggactgtcaataccgcagtcgccatcacacttgcctgttttggacttgccagagaaggtaatcataagccaattgattatttgaacccacctaaatag

SEQ ID NO: 4209 - DNA, 1395 bp, synthetic construct
  misc_feature 1..1395: note = source = /note="Description of Artificial Sequence: Synthetic coding sequence"
  source 1..1395: mol_type = other DNA
atggcctccgagtctggaaaactgtggggcggacgttttgtaggcgctgtggatcccatcatggagaagttcaatgcttcaattgcttacgataggcatctgtgggaagtcgatgtgcaaggatccaaagcctactcaagaggcctagaaaaggctggccttctgacaaaagccgaaatggatcagatcctgcatggcttggacaaggtcgcggaggagtgggctcagggtacttttaagctgaacagcaatgatgaggatattcatacagcaaacgaaagacggctcaaagagttgatcggcgctacagcaggcaagctgcataccggtaggtccagaaatgatcaggtggtcactgatctccgtctttggatgcgccaaacttgctctaccttgtccggtctcttatgggagctgatacgcacgatggttgaccgcgctgaggctgagagagacgtcctttttcctggatatactcatctgcagcgcgctcagcctattcgctggagtcattggatcctgtcacatgcggtcgcgctgacaagggattccgagaggctgttggaagtgcgcaaacgtatcaatgttttaccattaggcagtggcgcaatcgccggaaaccccctcggcgttgatagagaactgctgcgggctgagcttaactttggtgctatcactttgaactcaatggacgcaacctcagaacgcgacttcgttgctgaatttctgttttgggcatcactctgcatgacacacttgagtaggatggctgaggacctgattctgtactgcacgaaggagttttcctttgtgcagctgagcgacgcctactcaacaggctcctccctcatgcctcagaaaaagaatcctgacagtctggagctgatccgctccaaggccggacgcgtgttcggtaggtgcgccggtcttttgatgaccctaaagggtctgccttctacatacaataaggaccttcaggaggacaaggaagcagtcttcgaggtgagtgatacaatgagcgcagtgcttcaggtcgccaccggagttatctcaactctgcagattcatcaggaaaacatgggccaggcactcagcccagacatgttggctacagacctcgcttattatctggttcggaagggaatgccatttcggcaggcgcacgaggcatctggtaaagccgtgttcatggcagaaactaagggcgtcgccctaaaccagctgagcctccaggaattgcaaacaataagcccgctattttccggagatgtgatctgtgtttgggactacgggcattccgttgaacagtatggcgctctgggagggactgcaagaagcagtgtggattggcagattagacaggtgcgggcactcctgcaagcgcaacaggcatag

SEQ ID NO: 4210 - DNA, 1317 bp, synthetic construct
  misc_feature 1..1317: note = source = /note="Description of Artificial Sequence: Synthetic coding sequence"
  source 1..1317: mol_type = other DNA
atggctagtgagtcaggtaagctgtgggggggacgatttgtaggggctgtagatcccattatggagaagtttaacgcgtcaattgcttatgaccgtcatctatgggaggtggatgtgcagggctccaaagcgtacagtcggggtttagagaaagcgggtctgctgacgaaagcggagatggatcaaattctgcatggccttgacaaggtagcggaggagtgggcccaggggacctttaagttgaatagtaacgatgaagatatacataccgctaacgaaagacgactgaaagagctgatcggggcaaccgccggaaaactccacacagggcgtagtagaaatgatcaggtggtgaccgatctccgcctgtggatgcgtcagacatgcagcaccctgtctggcctgttatgggagttaatcagaaccatggtcgatcgagccgaagccgagcgtgatgtactgtttcccggatatacgcatctacagagggcccagccaattcgatggtcacactggattctgtccggcgcaattgcgggaaatcccttgggcgtggatcgggagctgttacgggcagaacttaatttcggagcaatcaccttaaacagcatggatgccactagcgagcgcgacttcgttgcagagttcttgttttgggcctccttgtgtatgacccacctgtcgagaatggcagaagacctgattctgtactgtactaaagaattcagttttgtacaactatccgacgcttactctacaggctcgtctttgatgcctcagaagaaaaaccctgacagcttggaattgatcagaagcaaggccggaagggtgttcgggagatgcgcaggattactgatgaccctgaagggcctcccttccacgtacaataaagacttgcaggaagacaaggaagccgtctttgaggtgagtgacactatgagtgccgtcttgcaagtggcgacaggtgtgatctccactttacagatccatcaggaaaatatggggcaggccttgtcgcccgatatgctagctacggaccttgcttactacctggtacgcaaaggcatgcccttcagacaggctcacgaggcctcgggaaaggctgtgttcatggctgaaactaaaggggtcgccctcaaccaattgagcctgcaggaattgcagaccatttctccgctgttcagcggggacgttatatgcgtttgggactacggccatagcgtcgagcagtacggcgcactgggagggacagcaagatctagtgtggactggcagattcgacaggtgagggctctgttacaggcacagcaggcttag

SEQ ID NO: 4211 - DNA, 1335 bp, synthetic construct
  misc_feature 1..1335: note = source = /note="Description of Artificial Sequence: Synthetic coding sequence"
  source 1..1335: mol_type = other DNA
atggcttctgagtcgggcaaattgtgggggggaaggtttgtgggggctgttgacccaattatggagaagtttaacgccagtatcgcatacgataggcacctgtgggaggtggacgttcaaggatcgaaggcatactcgcgcggtctggagaaagccggactattgacgaaggcagaaatggaccagatattacatggcctggataaggtggccgaagaatgggcacagggtaccttcaaacttaacagtaacgatgaggatattcatactgccaacgagagacgcttgaaggaacttatcggggctaccgctggaaaattgcataccggacgttcaaggaatgaccaggtcgtgaccgatctccgactgtggatgcgacaaacatgctcaactctctcagggctattgtgggagctcatccggactatggtggacagggcagaagcagagagggacgtgctgttccccggatatacacacctacagcgagcacaacccatcaggtggagccactggatcctgtcacacgccgtggccctaacccgtgactccgagaggctccttgaagtcaggaaacggattaacgtacttccattagggagcggtgcgatcgctgggaatccactaggggtggacagagaattgttgcgggctgagctgaatttcggcgcaatcacactgaactctatggacgctacttctgaaagagattttgtcgccgaattcctgttttgggcatccctgtgcatgacccatctcagcagaatggctgaagatttaattttgtattgcactaaggaattttcatttgtgcagctgagcgatgcctacagcaccggaagtagtttgatgccccagaagaagaatcctgattccttggagttaataagaagcaaagccggtcgggtctttggcagggaagacaaggaggcagttttcgaagttagtgacacaatgtcagccgtactgcaggttgccaccggggtgatttccacactgcagatccatcaggaaaacatgggacaggctctgagccctgatatgctggctaccgaccttgcctactatttagtgaggaaaggaatgccatttaggcaggcccacgaagcatcgggtaaagctgtgttcatggccgaaacaaagggggtcgcactgaaccagctttctctgcaggagttgcagacaatcagccccctctttagcggagatgttatatgtgtttgggactacggacactcagtcgaacagtacggagccctcggaggaaccgcgcgatctagcgttgactggcaaatacggcaggtgcgtgccctgctacaggcacagcaggcctag

SEQ ID NO: 4212 - DNA, 1395 bp, synthetic construct
  misc_feature 1..1395: note = source = /note="Description of Artificial Sequence: Synthetic coding sequence"
  source 1..1395: mol_type = other DNA
atggcatccgagtccggcaagttgtggggcggtcggttcgtgggcgcagtggaccccatcatggagaaatttaatgcctcaattgcatacgatcgacacctctgggaagtggacgtacaaggctcgaaagcttacagccgcggtttagaaaaggctggcctgcttacaaaggccgagatggaccagatcttacatggtttggacaaagtggcagaagaatgggcccagggtaccttcaaacttaactccaacgacgaggatatccacaccgcgaacgagcgcagactgaaggaactcatcggagcaaccgctggaaaattgcacaccggcagaagccgcaacgaccaagttgttacagatctgcggctgtggatgcggcagacctgtagcaccctcagcggactactgtgggaactgatacgaacaatggtggatcgggcagaggccgagcgagacgtgttatttccaggctatactcatctgcagcgggctcagcctattcggtggtcgcactggatcctgagccatgctgttgcattgacgcgtgactccgaacgtttgctggaagtccggaagaggattaatgttctgcccttgggtagcggagcaattgcaggcaaccctctgggggttgatagagaactcctgcgtgccgagctcaatttcggtgccatcacactgaacagtatggacgcgactagcgagagagactttgttgcggagttccttttctgggcaagcctgtgcatgacgcacctgtcaaggatggctgaggaccttatcctgtactgtacaaaagaattctctttcgtacaactctctgatgcttattcgacaggtagttcactgatgcctcagaaaaagaatcccgactccctggagctgatccgttcaaaagctgggagggtgtttggtaggtgcgctgggctcctcatgactctcaaaggcctgcctagcacatacaacaaagacctgcaggaggataaggaagctgtctttgaggtaagtgacactatgtctgccgtgctgcaggttgccacaggagttatcagcacgcttcagatccaccaggagaatatgggtcaggccctgtctcccgacatgctcgcaacagacctggcctattatctcgtgaggaagggaatgcctttcagacaggcgcatgaggcttctggcaaggctgtcttcatggctgagaccaaaggagtggccttgaatcaactgagcctgcaggagcttcaaactatttcacccctcttcagcggggatgtgatatgcgtgtgggactacgggcacagcgtcgagcagtacggtgcactgggtggcacggcacgctcttcagtggactggcagatccgccaagttcgggcactgctgcaggcccagcaggcgtag

SEQ ID NO: 4213 - DNA, 297 bp, synthetic construct
  misc_feature 1..297: note = source = /note="Description of Artificial Sequence: Synthetic coding sequence"
  source 1..297: mol_type = other DNA
atggaaaaatttaatgctagcatagcgtacgaccgccacctctgggaagtcgacgtgcagggctcaaaggcgtactccagaggcctagagaaagccggactgctaacgaaagcggagatggaccagattctccatgggctcgataaggtggcagaagaatgggcccagggaacttttaagctgaacagcaatgacgaggacatccacaccgcaaatgaaagaagactgaaagaactgattggcgcaaccgctgggaagctccatacaggaaggtcccgaaacgatcaagtgctgtag

SEQ ID NO: 4214 - DNA, 1239 bp, synthetic construct
  misc_feature 1..1239: note = source = /note="Description of Artificial Sequence: Synthetic coding sequence"
  source 1..1239: mol_type = other DNA
atgtcttccaagggaagtgtagtgcttgcctacagtggaggcctggatacatcctgcatcctcgtatggctgaaggagcagggatacgacgtgatcgcttaccttgctaacatcggccagaaggaggacttcgaggaggccaggaagaaagcacttaagctgggagccaagaaggtattcatcgaagacgtttcacgtgagtttgtggaagaatttatttggccagcgattcagagctccgccttgtatgaagataggtatctcctggggacatctttggctcggccatgcattgccaggaaacaagtagaaattgctcagcgcgaaggagctaagtatgtgtcgcatggtgctacgggcaagggcaacgatcaggtgcggtttgaactgtcatgctattctcttgctccacagatcaaggtaatagctccctggagaatgccggaattttataatcgctttaagggacgcaacgacttgatggaatatgctaaacagcatggaattccaataccggtaaccccaaaaaatccctggtctatggatgaaaatctgatgcacatttcttatgaagccggaattctggagaatccgaaaaatcaggcacccccaggcctgtataccaagacccaggaccctgcaaaagctccaaacacacctgatattcttgagatcgaatttaagaaaggcgtgccggtcaaagtgactaatgtgaaggatggaaccacccaccagacatcactggagttgtttatgtacctcaacgaagttgccggtaagcacggagtcggcaggattgacatcgttgaaaacaggtttatcggtatgaagtcccggggtatctatgaaacacctgctgggactattctctaccacgctcacttggatatagaagctttcaccatggaccgggaagttcgcaagatcaagcaggggctgggtttgaaatttgccgagctcgtgtacacggggttttggcactcgcccgagtgcgagtttgtgcgacattgcatcgctaagtcacaggagcgggtggagggaaaggttcaggtctctgtgctcaagggacaagtgtacattctggggcgtgagagccccctgagtctttataacgaggaacttgtgagcatgaacgtgcaaggggactacgagcccacagacgcaactgggtttatcaatatcaattcactgcggcttaaagagtaccatcggcttcagtccaaggtgactgctaagtag

SEQ ID NO: 4215 - DNA, 1239 bp, synthetic construct
  misc_feature 1..1239: note = source = /note="Description of Artificial Sequence: Synthetic coding sequence"
  source 1..1239: mol_type = other DNA
atgagcagtaaaggatctgtggtgctcgcttactccggagggctggacacgtcgtgtatcttggtatggttgaaggagcagggttacgacgtgatcgcatacctggcaaacatcggccagaaagaggacttcgaggaggcccgaaagaaggccctgaaactgggcgctaaaaaagttttcattgaggacgtatctagagagttcgttgaggagtttatatggccggcaattcaaagtagcgccctttatgaagaccgataccttttgggaacatccctggcccgaccatgtattgctcgcaagcaagtggagatcgcacagcgagagggagcgaagtacgtcagccacggcgctacagggaagggcaacgatcaggtgcgcttcgagttgagttgctactcacttgcgcctcaaatcaaggtaatcgctccgtggcgtatgcctgaattttacaaccggttcaagggcaggaacgaccttatggaatacgcaaagcagcacggtatacccataccagtaacaccgaaaaacccctggagcatggacgagaacttaatgcatatctcttacgaggcgggaatcctggagaacccgaagaaccaggcccctccgggactgtacacgaaaacgcaggacccagctaaggcaccaaacactccggacatccttgaaatagaattcaagaagggcgtgccagtgaaggtcaccaatgtaaaggatgggactacccaccagacttcactggaattatttatgtacttgaatgaggtggctggaaagcatggagtaggcaggattgatatagtggaaaataggtttattgggatgaagtctcgcggaatctatgaaacacccgctgggactattctctatcatgcccacctcgacatagaggcatttaccatggaccgggaggtgcgtaaaattaagcaagggctcggactcaaattcgcggagcttgtgtacaccgggttctggcatagtcccgaatgtgagtttgtgaggcattgtatcgcgaaaagccaagagcgggtggagggcaaggtgcaggtgtcagtcctcaagggccaagtgtacatcctgggcagggaatcgccgctgtcactctacaacgaggaattggtttccatgaacgttcagggagactacgagcccaccgacgcgactgggtttataaacattaacagcttgcgacttaaagagtaccacagactccagagcaaggtgactgctaagtag

SEQ ID NO: 4216 - DNA, 510 bp, synthetic construct
  misc_feature 1..510: note = source = /note="Description of Artificial Sequence: Synthetic coding sequence"
  source 1..510: mol_type = other DNA
gaacccggacctttgcagctaatggtggttgcggaggcccagggagggaagcatggagtcgggagaattgatattgtggaaaacagattcattgggatgaaatcgcgtggcatttacgaaacaccagcaggtacaatcttgtaccacgcacacctggacattgaagccttcacaatggatcgggaagtgcgcaaaataaaacagggcctggggctaaaattcgctgagctggtgtataccggattttggcatagccccgagtgtgaatttgtcagacactgcatcgcaaaatcacaggagagggttgagggcaaggtccaagtgtccgtgctgaagggacaagtctacattctgggaagagaatctcccttgtcattgtacaacgaggagcttgtctcgatgaatgtgcagggtgattatgaaccgactgatgctactgggtttatcaatatcaacagtcttaggctcaaagaataccatcgcttgcaatcaaaagtgactgcaaagtag

SEQ ID NO: 4217 - DNA, 1239 bp, synthetic construct
  misc_feature 1..1239: note = source = /note="Description of Artificial Sequence: Synthetic coding sequence"
  source 1..1239: mol_type = other DNA
atgtctagcaaggggtcagtggtcttggcctattccgggggattggatacaagttgcattctcgtgtggctgaaagaacagggatacgacgtgatcgcatacctggctaacatcggccagaaggaggattttgaagaggcacgtaagaaggccctgaaacttggcgcaaaaaaggtttttatcgaagacgtttctcgtgagttcgtggaagaatttatctggccagccattcagtcctctgcactgtatgaggacaggtatttactgggcacctctctggcacgcccatgtatcgccaggaagcaggtcgagattgcccagagagagggcgctaaatatgtcagccatggtgcgaccggtaaaggaaacgatcaggtgcgcttcgagctgagctgctactccctagcaccacagatcaaggtcattgccccttggcgaatgcccgagttttataacaggtttaagggcagaaacgatttgatggagtatgcgaaacaacatggtatccctatcccggttacaccaaagaacccttggagcatggacgaaaacctgatgcatattagctatgaggccggaattcttgaaaaccccaaaaatcaagcccctcccggactttatacaaagacacaggacccagctaaagccccaaacaccccagacattctcgagatcgaattcaagaaaggggtgcccgtgaaagtgacaaatgtgaaggacggcacaactcaccagacatcgctcgagttattcatgtatctaaacgaggtggctggcaaacatggggtgggtcgaatcgatatcgtggagaaccgatttattggcatgaagtcccgcggaatctatgagacaccagcagggacaatcctctaccatgcacatcttgatatagaggcttttactatggatcgcgaggtgcgtaagataaagcaaggcctaggcttgaaatttgcggagctggtttacactgggttctggcactctccagagtgtgaattcgtgaggcattgcatagccaagagtcaggagcgggtggaaggaaaagtgcaagtgagtgtcttaaaggggcaagtatatattttaggcagggaaagtccgctgtctctatacaatgaggaactggtgtctatgaacgtgcaaggggattatgagccaactgacgcaaccggcttcatcaacattaatagcctgcggctgaaggaataccatcgtctccagagcaaagtcactgcaaagtag

SEQ ID NO: 4218 - DNA, 1239 bp, synthetic construct
  misc_feature 1..1239: note = source = /note="Description of Artificial Sequence: Synthetic coding sequence"
  source 1..1239: mol_type = other DNA
atgagcagcaagggaagcgtggttttagcgtattctggagggctggacacttcctgcatattggtctggctgaaagagcagggatatgacgtgatcgcctacttagccaacattggccagaaggaggattttgaggaggccagaaagaaggctcttaagctgggagccaaaaaggtcttcatagaggatgtatcccgtgagtttgtcgaggaattcatttggccagctatccagtcgtctgccctctacgaagacagatacctcctgggcacaagcctggccagaccctgcatagcaagaaaacaggttgaaatcgcccagcgggagggcgcaaaatatgtctcccacggtgctacgggcaagggtaatgatcaggttcgtttcgaactgagctgttattctctggcccctcagataaaggtaatcgccccatggcggatgcctgagttctacaaccggttcaagggccgaaacgacctgatggagtatgccaagcagcacggaatcccaatcccagtgacgcccaagaatccatggtcaatggatgaaaacctaatgcacatcagttacgaggcagggatcttggaaaacccaaaaaaccaggccccaccaggtttgtacactaagacacaggacccagcaaaagctcctaacaccccagacatcctagagattgaattcaagaaaggagttccagtcaaggtgaccaacgtgaaggatgggacaactcaccagaccagtctggagctgtttatgtatttgaacgaagtcgcaggcaaacacggggtgggcagaatcgacattgttgagaatcggtttataggcatgaaaagcaggggcatctacgagactcctgcgggaactatcttataccatgcccacctggacatcgaagcattcacgatggatcgagaggtccgcaagatcaagcagggacttggacttaagttcgcagagctggtgtataccggcttttggcacagtccggagtgtgaattcgtccgtcactgcatagccaagtcccaagaacgcgtggaagggaaagtccaggtgagtgtactgaagggacaagtctacattctgggtcgcgaatcaccactgtctctgtacaatgaggagttggtctcgatgaacgtgcaaggcgactatgagcccaccgacgccacaggatttatcaatatcaactctctgaggctcaaggagtatcatcgcctgcagagcaaagtcaccgcgaaatag

SEQ ID NO: 4219 - DNA, 597 bp, synthetic construct
  misc_feature 1..597: note = source = /note="Description of Artificial Sequence: Synthetic coding sequence"
  source 1..597: mol_type = other DNA
atgagcagtaaagggtctgtggtgctggcatactccggtggactcgacacctcatgcatcctcgtctggttaaaggaacaaggatatgacgtgatcgcctacttggctaacataggccagaaagaagactttgaggaggccagaaagaaagccttaaagcttggggcaaagaaggttttcatcgaggacgtgtcaagagaattcgtcgaggagtttatttggcccgcaattcaatccagcgctctgtacgaggacaggtacctcttgggcaccagcctcgccaggccatgtatcgcaaggaagcaagtcgagatcgcccagagggagggtgccaagtatgtgtctcacggggctaccggtaagggcaatgaccaagtccggtttgaactttcttgctacagcctggcccctcagataaaagttatcgccccttggaggatgcccgaattctacaaccgcttcaaggggagaaacgacttaatggagtatgcaaaacagcatgggattcccatacctgtgactccaaaaaacccgtggagcatggacgagaatcttatgcatatcagctacgaggctggcatcctagaaaacccttag

SEQ ID NO: 4220 - DNA, 540 bp, synthetic construct
  misc_feature 1..540: note = source = /note="Description of Artificial Sequence: Synthetic coding sequence"
  source 1..540: mol_type = other DNA
atgagcagcaagggatccgtggtgctggcttactccgggggacttgacacatcatgcattctcgtgtggttgaaagagcaggggtatgacgtaatagcatatctcgctaacattggccagaaggaggatttcgaagaggctcgcaaaaaagccctgaagttaggggctaagaaggtcttcatagaggatgtgtcgcgggagttcgtggaagagtttatctggcctgccatccaaagttccgcactgtacgaggatcggtacttactcggcacaagcttggctcgaccttgcattgcgaggaagcaagtggagatcgcccagagggagggggctaaatatgtgtcacacggcgcaaccggcaaggtaattgcgccatggcgcatgcctgagttctataacaggtttaagggtaggaatgatctaatggagtatgccaagcagcatggcatcccaatccccgtcactcccaagaacccctggtccatggacgagaacctgatgcacatcagctacgaggctgggattcttgaaaacccgtag

SEQ ID NO: 4221 - DNA, 663 bp, synthetic construct
  misc_feature 1..663: note = source = /note="Description of Artificial Sequence: Synthetic coding sequence"
  source 1..663: mol_type = other DNA
atggagctggggctgggtggcctctctaccttgtcccactgtccatggccacgccagcagcccgcactctggcccaccctggctgcgctggcactcttgagttcggtggccgaagcctcccttggctcagccccacggtcccctgctcctagggaaggaccgccaccggtgctggctagtcctgccggacacttgcccggtggacggacagcgaggtggtgctctggaagagccagaaggccaccaccgcaacctagccgtccagcaccccctccgccagccccaccgagcgcgctccccagggggggaagggctgcgagagctgggggtcccggaagtcgcgcaagggccgcaggagctagaggttgtagactacgctctcaattggttcctgttagagctctgggtttaggacataggtcagatgaattggtcagattcagattttgttccgggtcgtgccgcagagccagatctcctcacgacctgtcactggcctcactgcttggagccggagctctgaggcccccacccggttccagacctgtttcccagccgtgttgccgaccaacccgctacgaggcagtgagtttcatggacgttaatagcacctggcggactgtggatcgattgtctgccaccgcttgcggatgcctcggttag

SEQ ID NO: 4222 - DNA, 663 bp, synthetic construct
  misc_feature 1..663: note = source = /note="Description of Artificial Sequence: Synthetic coding sequence"
  source 1..663: mol_type = other DNA
atggagctgggcctcggcggattgagtactctttctcactgtccctggcctcgacaacagcctgctctgtggccgaccctggctgctctggcacttctctcaagcgttgccgaagcttctctgggttctgctccccgatctcctgcccctagggagggccctcccccagttcttgcgagccccgcaggacaccttccaggagggaggacagctcggtggtgcagtggcagagccaggcgccctccccctcaaccaagtagaccagcaccacccccacctgccccaccgagtgcacttccacggggaggcagagccgctagggctgggggtcccggatcccgagcccgagccgctggggcaaggggctgccgccttaggagtcaattggtccccgtaagagccctaggactgggccatagaagcgatgagctggttcgcttcaggttttgtagcggctcgtgcagacgtgccaggtcacctcacgacttgtcgctggctagcctgctcggagccggagcacttaggcccccacctgggagcagaccggtgtcacaaccatgttgccggcctacacggtacgaggctgtgtcattcatggacgtgaactcaacgtggagaactgtcgacaggctcagtgcaaccgcttgcggctgcctagggtag

SEQ ID NO: 4223 - DNA, 687 bp, synthetic construct
  misc_feature 1..687: note = source = /note="Description of Artificial Sequence: Synthetic coding sequence"
  source 1..687: mol_type = other DNA
atggaactgggcctcgggggattatctactctttcacactgcccttggcctaggcagcaggccccactgggattaagcgctcagcccgcactttggcctacactggcagctctggctctcctgagttccgtagcagaggcttcccttgggtccgcccctagatcgccagccccacgcgaaggacctccacccgtgctcgcatcaccggcaggccacctccctggaggcagaactgcccgttggtgctccggtagagccagaaggccccctcctcagcccagtagaccagccccaccccctccagcccctcctagcgcgcttcccaggggagggagagcagcacgcgctggtggccctgggagcagagcaagagcggcaggcgctcgcggttgtcgactacgctctcagctggtcccagtcagagccttggggctgggacatcgctccgatgagcttgtgaggttccgcttctgtagcgggtcttgtcgcagagccaggtctccgcatgatcttagcctggcaagtcttctcggcgcaggagcactgaggcctcccccaggctcccgccctgtctcacagccgtgctgcagacctactcgctatgaagctgtgtctttcatggacgtgaactcaacgtggagaacagtggaccgattgtccgcaacggcatgcgggtgtctcggttag

SEQ ID NO: 4224 - DNA, 201 bp, synthetic construct
  misc_feature 1..201: note = source = /note="Description of Artificial Sequence: Synthetic coding sequence"
  source 1..201: mol_type = other DNA
atggaactgggcctgggtggtctgtcaactctatcccactgcccttggccaaggcagcagccggctctgtggcctacattggctgccctggcgctgttaagcagtgtggctgaggccagtctcggaagcgcgccacggagtccagcccctcgggagggcccacctcccgtcttagcctcacctgcaggccacctgccttag

SEQ ID NO: 4225 - DNA, 270 bp, synthetic construct
  misc_feature 1..270: note = source = /note="Description of Artificial Sequence: Synthetic coding sequence"
  source 1..270: mol_type = other DNA
atggaactcggtttgggcggtctgtccaccctgtcgcactgtccatggccaaggcagcaggccccactcggcctctctgcccaaccagctctttggccaactcttgctgccctggcgcttttgagcagcgtggctgaggctagcctgggctcagctccacggagccctgccccaagagaaggccctcctccagttttggccagtcctgccggacacttaccgggaggacgaacagcccgttggtgcagtggaagagcacgcagaccttag

SEQ ID NO: 4226 - DNA, 201 bp, synthetic construct
  misc_feature 1..201: note = source = /note="Description of Artificial Sequence: Synthetic coding sequence"
  source 1..201: mol_type = other DNA
atggaattgggtctgggcggactgtccaccctgtctcactgcccatggcctagacagcagccagccctctggcctaccttggccgctctggccctgctgagtagcgtcgccgaagctagcctcggctctgctcctaggtcacccgcaccaagagaaggcccacctcccgtgctggcctcccccgcagggcatcttccctag

SEQ ID NO: 4227 - DNA, 270 bp, synthetic construct
  misc_feature 1..270: note = source = /note="Description of Artificial Sequence: Synthetic coding sequence"
  source 1..270: mol_type = other DNA
atggagctgggtctgggcggactctctacactttctcattgcccttggccaagacagcaagctcccctaggactgtcagctcagcccgcattatggcccactctagctgctcttgccctgctaagcagcgtcgcggaagcctctttgggcagcgccccaagatcccctgccccacgggagggccctcccccagtactggcctctcctgccggacacctacctggtgggaggacagcgaggtggtgctcaggaagagccagacgaccttag

SEQ ID NO: 4228 - DNA, 687 bp, synthetic construct
  misc_feature 1..687: note = source = /note="Description of Artificial Sequence: Synthetic coding sequence"
  source 1..687: mol_type = other DNA
atggagctgggcttaggaggcttgtctacgctatcccattgcccctggcctcggcagcaggctccactgggcctgtccgcccaaccagccctttggcccacactagcggcattggcccttctaagcagcgtcgcagaggcttcgcttggatccgccccacgttccccggctcccagagaggggccacctccagttctcgccagtcctgctggccacctgccaggcggacgcaccgccaggtggtgcagcggcagagccaggcgacccccaccgcaaccaagtagaccggcaccccctccacccgctcctcccagcgcgctgccacgtggagggagggccgctagggctggaggcccaggcagcagggcgcgagcagcaggggctagaggatgtagactgcgttcccaactggtcccagttcgcgctctgggacttggacaccgtagcgatgagctcgtcagattcagattctgcagtggctcctgccgtcgggctcggagcccccacgacctctccctggcatctcttctgggtgccggtgccttgcggccaccaccagggagtagacctgtttcccaaccatgctgtcgcccaacacgttatgaggcagtgagctttatggacgtcaacagcacctggaggactgtcgatagattgtccgcgactgcctgtggctgcctgggttag

SEQ ID NO: 4229 - DNA, 1602 bp, synthetic construct
  misc_feature 1..1602: note = source = /note="Description of Artificial Sequence: Synthetic coding sequence"
  source 1..1602: mol_type = other DNA
atggggcctagaggcgctgcttcactgcctaggggcccagggcctcggcgactgctgctgccagttgtacttcccctgctgttactgttgttactggcaccgccaggctccggggctggggcatctcggccaccccaccttgtcttcctcctagccgatgatttgggatggaatgacgtgggctttcatggatcgcgcattcggacacctcatttggatgccctggccgctggcggagtactgctagataattattacacacagccgctctgcactccctcgcggtcacagctactgaccggaagataccagatccggaccggcttgcagcaccagatcatctggccatgccagcccagctgcgtgcctctggacgaaaagcttttgccacagctcctgaaagaagcagggtacactacacatatggtcggcaaatggcatctgggcatgtacaggaaggagtgtctgcccaccagaaggggctttgacacgtatttcgggtacctccttggaagcgaggattattacagccacgagagatgcacattgatcgacgccctgaacgtcacgcgctgtgctctagatttccgcgacggggaagaggtcgccacaggctacaaaaacatgtactccactaacatttttaccaagagggctattgccttaattactaaccatccccctgaaaaaccattattcctgtatttagccctgcagagcgtgcatgagccactccaggtcccagaggagtacctgaagccctatgattttattcaggacaagaatagacatcattacgcgggaatggtgtctctcatggacgaggctgttgggaatgtgacagcagcgctgaagagctcaggtctgtggaacaacactgtgttcattttttcaaccgacaatgggggacagacattggcgggaggcaacaactggcctctcaggggcagaaaatggtctctctgggagggtggggtgagaggagtggggttcgtcgccagtcccctgctgaagcagaaaggtgtcaagaatcgagagctgatccacatctccgattggctcccaactctagtcaaactggcacgaggtcacacaaatggcacaaagcctctggacggctttgacgtatggaaaaccatctccgaaggatccccaagccctcgaattgagttattgcataacatcgatccaaatttcgtggattcctctccttgtcctagaaatagcatggcaccggctaaagatgacagttcgctgcccgagtactccgctttcaacactagcgtacacgcagccatacgccacggaaattggaagctgctgacagggtaccctgggtgtgggtactggtttccaccgccatctcagtacaatgtcagtgagatcccctcttctgatcctcctacaaagacgttgtggctgttcgacattgacagggaccccgaggagcggcatgatctttctagagagtaccctcacattgtgacgaagcttctcagcaggctgcagttttaccataagcattccgtcccggtttatttcccagcccaggatcctaggtgcgatccgaaggctactggagtgtggggtccatggatgtag

SEQ ID NO: 4230 - DNA, 1602 bp, synthetic construct
  misc_feature 1..1602: note = source = /note="Description of Artificial Sequence: Synthetic coding sequence"
  source 1..1602: mol_type = other DNA
atggggccacgcggagctgcttcgctgccccgtgggcctgggccaaggcggctgttactgccagtggttttacctcttcttctcctgctgctgctcgcccctcccggatctggagctggcgctagcaggccaccacacctggtcttcttactagcagatgacctgggctggaatgatgtgggctttcatggaagtcgtattcgaacccctcatctcgacgccctggccgcaggcggagttctgctggacaactactacacacagcccctttgtaccccctccaggtcacagttactgaccggaaggtaccagatcagaacaggtcttcagcatcagattatatggccatgtcagccatcatgtgttcctctggacgaaaagctgttgccgcaactcctaaaagaggcaggatacaccacccacatggtcggtaaatggcatctgggcatgtaccgaaaggagtgcctgccaactaggaggggcttcgacacttatttcgggtaccttctcggtagcgaagactattactcgcatgaacgctgtacattgattgatgccctaaatgtaactcggtgtgctttggattttagggacggcgaggaagtggcaactggctacaaaaatatgtatagcacaaatatcttcaccaagagggccattgccctgatcaccaaccaccctcccgagaaaccactgttcctttacctggccctgcagagtgtgcacgaacccctgcaggtccctgaggaatatctgaagccttatgacttcattcaagacaagaatagacatcactatgccggaatggtctctttgatggacgaagccgtcgggaacgtcactgctgctttgaagagcagcggtctgtggaacaacacagttttcatttttagtaccgacaatggcggacagaccttggctgggggaaacaattggcctctcagagggcgaaaatggtctctgtgggagggcggtgtgaggggcgtggggtttgtggcatcccccctcctgaaacagaagggagttaaaaatcgagagttaattcacatatcagactggctgcctacgctcgtgaaactggctcgtggtcacacaaacggaacaaagcctctggatggttttgacgtgtggaagacaatatcagaggggtccccaagtccaaggatagagctgctgcataacatcgaccctaattttgtcgacagttccccgtgccctagaaactctatggctcccgcaaaggacgacagctctctgccagagtacagtgcattcaacacatccgtgcacgctgctattcgccacgggaattggaaactcctaactggctacccaggctgtgggtattggtttccaccccctagtcaatataacgtgagtgaaatccctagcagtgatcccccaacgaagacattgtggctgttcgatatcgaccgcgatcccgaagaaagacacgacctctcccgggagtacccccatattgtcactaaactcttaagcaggctgcagttctaccacaagcactctgtgcccgtgtactttcccgcacaagatccgaggtgcgatcctaaggccacaggagtgtggggcccatggatgtag

SEQ ID NO: 4231 - DNA, 1242 bp, synthetic construct
  misc_feature 1..1242: note = source = /note="Description of Artificial Sequence: Synthetic coding sequence"
  source 1..1242: mol_type = other DNA
atgggacctaggggggctgcctccctgccgcgaggcccaggccctcggagactattacttcccgtggtgctccccttactgcttctgctgctgcttgcacctccgggaagtggagctggcgcatcccggccaccccacctcgtttttttgttagccgatgatctaggttggaacgatgtgggtttccacgggtcgcgtattaggaccccccacctcgacgccttagccgctggtggtgtgctgctggataattactatacccagcctctgtgcacaccaagccgcagccagctgttaaccggtagatatcaaattcgtaccgggcttcagcaccagataatctggccatgccagccctcttgtgtaccgctggacgaaaagctcctgccacaactgctcaaagaggccggatatactactcacatggttggcaaatggcatctcggcatgtaccggaaggagtgcctgccaacccgcagagggtttgacacttactttggctacctgctgggctccgaagattactacagtcacgaaaggtgcactctcatcgacgccttaaacgtaactcgctgcgccctcgacttcagagacggagaggaagtggcgacaggatataagaacatgtactctactaatatttttacgaagcgagccatcgcactaatcactaaccaccctcctgagaaacctctcttcttatacctcgcgcttcagtccgtgcatgaaccactacaagttcccgaagaatacctgaagccatacgacttcatccaggataaaaacagacaccattatgccggaatggttagtctaatggacgaagccgtaggcaacgttacagcagcattgaaatcgagcggcctttggaataacacagtgttcatcttttccaccgacaacggtggacagacgctggcgggaggaaataattggcctctgcggggacgaaaatggagcctgtgggaaggcggtgttcggggagtcggattcgtagcgtctcctctgctcaagcaaaaaggggtgaagaatcgcgagctgatccatatttcagattggctgccaaccctggtgaaactggctcgcggacacaccaacggcacaaaacctctggacggtttcgatgtgtggaagaccatttcagaggggtccccatctccgagaatcgaactgctgcacaatatcgatccaaattttgtagatagcagcccctactggccagagtgctcactgttgctctag

SEQ ID NO: 4232 - DNA, 138 bp, synthetic construct
  misc_feature 1..138: note = source = /note="Description of Artificial Sequence: Synthetic coding sequence"
  source 1..138: mol_type = other DNA
atgggtccgagaggtgcggcttcactccccaggggacccggtcctaggaggttattgttaccggtggtcctcccacttcttctgttgctcctgctagcaccacctggcagtggcgctggggcttcccgcccaccatag

SEQ ID NO: 4233 - DNA, 1788 bp, synthetic construct
  misc_feature 1..1788: note = source = /note="Description of Artificial Sequence: Synthetic coding sequence"
  source 1..1788: mol_type = other DNA
atggccggacccagcccgcctctccgcgcaggggtgggaaggcgcctgctgggcgtcgcccaccctgatttgaggccctgcctgtgcggggagttacaggttgagggaggacctggcccagtgcctggaatgctgcggacatgttatgtgaggagcccctggcgaagggggccttcctccgcccgaggcgagcagtcaggctcgggacacttagagcaagaagaagtgcaaagtgggagcctgttgttcaggttgctcttattcctgagtaggagccctgcttccaggaatcaaagaatcctctacacagttctcgagtgccagccacttttcgattcctcagatatgacaatcgccgaatgggtgtgtctggctcagaccataaaacgccattacgagcaataccatggctttgttgtgattcatgggaccgacactatggcctttgcagcatctatgctgtctttcatgctggaaaatctgcagaaaactgttatcctgacgggagcccaggtccccatccatgctctgtggtccgacggacgggaaaatttgctgggcgctctccttatggcaggccagtacgtgattccagaagtgtgtctgttcttccagaatcagctgttccgaggaaatcgtgccaccaaagtggacgcccgacgatttgcagcattctgtagccccaacctcctcccccttgcgacggtcggggcagatattacaataaaccgagagctcgtccgcaaagtcgacggcaaagctggcctggtggtgcattccagcatggagcaggatgtgggacttctccgactgtaccccggtatccccgctgctctggtccgcgcattcctccaaccaccactcaagggcgtggtgatggagaccttcggctcagggaatggaccgacaaagcctgacctgctgcaggagctgcgcgtggctactgaacgtggcctagtgatagtgaactgcacccattgccttcagggagcagtgactaccgactacgcagccggaatggcgatggcaggggcaggtgtcattagtgggttcgatatgacttccgaagccgcactggcaaaattatcctatgtcctgggccagcccggacttagtctggatgtgaggaaggaactcctgacgaaggatctcagaggcgaaatgacccctcccagcgttgaggaaaggaggccttctctgcagggcaacaccctgggaggcggagtttcctggttgctctcacttagcggcagccaggaggccgatgcgttgcgcaatgctctggtgcccagcttggcctgcgcagccgctcacgccggtgacgtggaagccctgcaagcgctcgtggaactgggttccgacctcgggctggttgacttcaacggtcagacccctctccacgctgcggctcgtgggggacacaccgaagccgtaactatgctgctgcaacgtggggtggatgtcaacacaagagataccgacggcttctccccacttttgctggccgtcagaggcagacatcccggagttattgggctgttacgggaagccggtgcatcattgtccactcaggagcttgaggaggccggaacggagctttgtagactggcatacagggccgacctggagggtctgcaggtatggtggcaggcaggagcggacctcggccagcccggatacgacggtcacagtgctctgcacgtcgctgaggccgcaggtaatttggccgtcgtcgccttcttgcagagtctcgagggagccgtgggcgcacaggccccatgcccttag

SEQ ID NO: 4234 - DNA, 1740 bp, synthetic construct
  misc_feature 1..1740: note = source = /note="Description of Artificial Sequence: Synthetic coding sequence"
  source 1..1740: mol_type = other DNA
atggcacgggcagttggtcccgagcgcagactgctggcagtgtacaccggcggtaccataggcatgcgtagcgagttgggcgtcttagttccgggaaccggccttgccgcaatactccgaactttgccgatgtttcatgatgaggaacacgccagggcaagaggcttaagtgaagatactttagtcctgccacctgccagtcgaaaccagcgcatcctgtataccgtgctggaatgtcagcctctgtttgactcatccgatatgaccatcgccgagtgggtctgcctagcccagaccataaagcggcattacgaacagtaccacggcttcgttgtgattcacggaacagatactatggcatttgcggcatccatgctgagttttatgttagaaaacctccagaaaacagtgatcctgaccggtgcccaagtgccgatacacgcactgtggagcgacgggagagaaaatctgctgggcgctctcctgatggcaggtcaatatgtgatccctgaagtatgcctttttttccagaatcagttattccggggaaacagggcaaccaaggttgatgcacgcaggtttgctgccttctgttcaccgaaccttcttcctctggcaacggtgggagccgatatcaccatcaaccgcgagctggtgcggaaagtggatggcaaagctggcctggtggttcattcatccatggagcaggacgtggggctgctgcgattgtacccagggatacccgcagcgcttgttagagcatttctgcaacccccacttaagggcgttgtgatggagacctttggcagcgggaacgggccaaccaaacctgacctgctccaggagctgagagtagccactgaaagagggctggtaatcgtgaactgcacacattgccttcaaggcgctgtcaccactgactatgcagccggaatggctatggcaggcgctggggtcatcagcggatttgatatgacttccgaagccgctcttgccaaactgagctacgtgctgggccagcctggcctaagtttggacgtcagaaaggaactgctgacgaaagatcttcgcggtgagatgacaccaccctctgtcgaggagagaaggccgagtctccaaggcaacacactaggagggggtgtgtcctggctacttagcctgtctggctcacaagaggcggatgccctaaggaatgccctggtgccttcactcgcctgcgccgctgctcacgcaggcgatgtcgaggcactacaggccctcgtggagttaggaagtgatcttgggctcgtggacttcaatgggcagacacccctgcatgctgcggcaaggggcggacatactgaggcggtgacaatgctgttgcagcggggagtggatgtcaacacgcgagatactgatggattttcgccccttctgctggccgtgcgcggacggcacccaggtgtgatcggtcttttgcgagaagccggagcttctctgtcaacgcaagagcttgaggaggctggaacagaattatgcagactggcctaccgggctgacctggaaggcttacaagtgtggtggcaagccggagcagacctgggtcagcctgggtatgacggccattccgcgcttcacgtggccgaggctgctggcaatttggctgtggtcgcgttcctccagtccttggaaggcgctgtaggcgctcaggccccttgcccagagccaagctgtttccaggaagtgttacctggcgtttag

SEQ ID NO: 4235 - DNA, 423 bp, synthetic construct
  misc_feature 1..423: note = source = /note="Description of Artificial Sequence: Synthetic coding sequence"
  source 1..423: mol_type = other DNA
gctgcggctcgcggtggacacacagaagccgtgacaatgctcctgcagcggggtgtggacgtaaatacccgggacaccgatggcttctcaccactgctcctggccgttagagggcgacacccaggtgtcattggactgctgagagaagcgggagccagtctgtccactcaggagctggaggaagcaggcactgagttgtgtaggctggcatatcgcgcagatctggaagggttgcaggtgtggtggcaagccggtgccgatttggggcaacctggctacgatggccacagtgcactccatgtggctgaggccgctggaaacctggcagtcgtcgccttccttcaatctctggaaggagctgtgggcgctcaagccccatgcccagagccatcctgtttccaagaggtgctgcccggagtgtag

SEQ ID NO: 4236 - DNA, 1722 bp, synthetic construct
  misc_feature 1..1722: note = source = /note="Description of Artificial Sequence: Synthetic coding sequence"
  source 1..1722: mol_type = other DNA
atggctcgagcagtgggtcctgaacgcagactgctggctgtttataccggcggaaccatcggcatgcgctcggagctgggcgtccttgtgcccggaacaggattggcagccatcctgaggaccctgccgatgttccacgacgaggagcacgctcgggcacggggtctgtccgaggacacattggtgctgccccctgcttctagaaaccagcggattctctataccgtgctggaatgccaacccttatttgactcttcggatatgacaattgccgagtgggtgtgcctggcgcaaaccataaagcgtcattacgagcaataccatggattcgttgttatccacggcaccgacactatggcgtttgccgcttccatgttatcattcatgctcgagaacctgcagaaaactgtgatcctaactggtgcacaggtccctatccacgccctttggtccgacggacgggaaaacctccttggtgctcttttgatggccggacagtacgtgatcccggaggtgtgtttatttttccagaatcaactgtttcggggaaatcgtgcaaccaaagttgacgcaaggcggttcgcagccttttgcagccccaatctgctccctctcgcaaccgtaggagccgatattacgattaacagggagctagtgcggaaagtggacggtaaggccggtttggtggtacactcaagtatggagcaggatgttggattactgaggctgtatcctggtatcccagctgccctggttagggccttcctgcagccaccactcaagggggtggtcatggagacttttggtagcggcaatggccctaccaagccggatcttttgcaggaactgcgtgtggccacagaacgcggactggtgatcgtcaactgcacccactgtcttcagggcgctgtgacgacagattatgcggcagggatggctatggctggcgcaggcgtgatttctggtttcgatatgacatcagaggccgctctcgccaagctgtcttacgtactgggacaacctggcctgagccttgacgtgcggaaagaacttctgactaaagatctccgtggtgaaatgaccccgccttccgtggaagagcgtaggccttctctccagggcaatacgctgggaggcggtgtcagctggctgctctccttgagtggctcacaggaagcagacgccctgcgcaacgctttggtgccatccctagcatgcgcagccgcacatgctggggacgtggaggccctgcaggcccttgtagaactgggctcggacctaggtttggtggactttaatggtcagacacccctgcatgcagcagcacgtggcggacacacagaggccgtaaccatgctcctccagcgcggagtcgacgtgaacacaagagacacggacggtttttcaccgctactgctcgctgtgagaggccgtcacccgggtgtcatcggactgctgagggaggctggtgcctctctgagcacacaggagcttgaggaggctgggaccgaactgtgtcgcctcgcttacagagccgacctggaaggactccaagtttggtggcaggctggggcagacttgggacaaccgggatatgatggtcatagtgctctgcacgttgctgaggccgcaggtaacctcgccgtcgtagcttttctccagtccctggaaggggctgtcggggcacaggccccttgtcctgaggtactcccaggcgtgtag

SEQ ID NO: 4237 - DNA, 942 bp, synthetic construct
  misc_feature 1..942: note = source = /note="Description of Artificial Sequence: Synthetic coding sequence"
  source 1..942: mol_type = other DNA
atgacgtcctgccacatagctgaggagcacatccagaaggtggcaatctttggcggtacacacggcaatgagctgacaggggtgttcctagtgaagcactggctcgaaaacggggcagaaatccagcggactggacttgaagtgaagcctttcatcactaaccccagggccgttaaaaaatgtacgcggtatatcgactgtgacctgaaccgcatttttgaccttgaaaacctcggaaaaaagatgagcgaggacctcccctacgaggtgcgcagagcccaggagatcaatcacctgtttgggccaaaggattcggaggattcatatgatatcatttttgacctccacaacaccacctctaatatgggatgcacacttatcctggaggactcccgcaataattttttgattcagatgtttcattacatcaagacctctctggcacccttaccttgctatgtgtacctcattgagcacccttcccttaaatacgcaacaactaggtcaatagcaaagtaccctgtgggcatcgaggtcggtcctcagccacaaggcgtcctgcgcgctgacatacttgatcagatgagaaaaatgataaagcacgcattggatttcatccatcacttcaatgaaggaaaagaattcccgccatgtgctattgaggtgtataagatcattgagaaagtggactaccctagagacgagaacggtgagatcgcagccataatccacccaaatctccaagaccaggattggaaaccactgcaccctggggaccctatgttcctgacgctggacgggaaaacaattccccttggcggagattgcaccgtgtatccagtattcgttaatgaagccgcttactacgagaagaaggaggcgttcgccaagacaactaagctcacactgaatgctaaaagtatccgttgctgcttgcactag

SEQ ID NO: 4238 - DNA, 942 bp, synthetic construct
  misc_feature 1..942: note = source = /note="Description of Artificial Sequence: Synthetic coding sequence"
  source 1..942: mol_type = other DNA
atgacaagttgccatatcgccgaggagcacattcagaaggtggcaatttttggtggaacacatgggaacgagctgaccggcgtgttcctagtgaaacattggctggagaacggcgctgagatccagcggaccggcctggaggtgaagccttttatcactaatcctagagccgtgaagaagtgcacccggtatatcgattgcgatctgaacaggatcttcgaccttgagaacttagggaaaaagatgtcagaggatctgccttacgaggtgagacgtgcccaggagatcaatcacctgttcgggccaaaagactctgaggactcatacgatataattttcgatctgcataacactacgagcaatatgggttgtaccttaattctggaggacagccggaacaatttcctcattcagatgttccattatatcaaaaccagcctagcccctttaccgtgttacgtctacttaatagagcacccgtccctgaagtatgccaccactagatccatagccaaataccccgtgggaattgaagtgggccctcagccgcagggggtattgcgcgcagacattctggaccaaatgcggaagatgattaaacatgctcttgacttcatccaccactttaatgaggggaaggagtttcccccttgtgccatcgaggtatataaaatcatagagaaggtcgattacccgcgtgatgagaatggtgaaattgctgccatcatccacccaaaccttcaggaccaagattggaaaccgttgcatccgggtgaccctatgttcctcactctagatggtaaaacaattccactcggaggggattgcaccgtgtacccagtgtttgtgaatgaggccgcttattatgagaagaaggaggcttttgccaaaacgactaagctcacactgaacgctaaaagcattcgctgttgcctgcattag

SEQ ID NO: 4239 - DNA, 3756 bp, synthetic construct
  misc_feature 1..3756: note = source = /note="Description of Artificial Sequence: Synthetic coding sequence"
  source 1..3756: mol_type = other DNA
atgtccactgaaagggactcggagaccacctttgacgaagattcacagccgaatgacgaagtggttccttacagcgatgacgagactgaggatgagctcgacgaccaaggttctgccgtggagccggaacaaaacagggtcaacagagaggctgaagaaaaccgggagccgtttcgaaaggaatgtacgtggcaggtgaaggctaacgacagaaagtaccacgagcagccacactttatgaacactaaattcttatgcattaaggaatccaagtacgcaaacaacgccatcaagacatataagtacaacgcgtttacctttattccgatgaaccttttcgagcagttcaaacgcgctgccaacctgtacttcctcgctcttctgattcttcaagctgttccacagatatccactttggcttggtatactactctggtgcccctactggtggttcttggcgtaactgccattaaggatctggtggatgatgtagcacgacacaagatggacaaggagatcaacaaccggacttgtgaagtaatcaaggatggcaggtttaaagtagcgaagtggaaagagatacaagtgggtgacgtcatcagactgaaaaaaaacgacttcgtgccagctgatatactgctgctctctagtagcgaacccaatagtctgtgttatgtggagacagcagagttggatggcgaaactaatcttaagttcaaaatgagtctcgaaattacagaccagtatttacagcgggaggatacactggctacattcgacggttttatagaatgcgaggaaccaaataacaggctagacaagttcacaggaaccttattctggaggaatacatcattcccactggacgctgataagattctgctgagaggatgtgtgatcaggaatactgacttttgccacggtctggtgatcttcgccggagcagatacaaaaattatgaagaacagcggtaaaacaagatttaagcgcactaaaattgattacctgatgaattacatggtgtacactatttttgtcgtcctgattctgctttcagcgggacttgctattgggcatgcttattgggaggcacaagtgggaaactcaagttggtacctatatgacggcgaagatgatacacccagttatagaggctttctgatcttctgggggtacatcatcgtcttaaataccatggtccccatcagcctgtacgtgagcgtcgaggtgatccgtttgggccagtcccacttcattaactgggacttgcagatgtactacgcagagaaggatacacctgccaaagcgaggacgacaacgctcaatgaacagttaggccaaatccactatatctttagcgataagacaggaacacttacacagaatattatgacctttaagaagtgttgcataaacgggcaaatttacggagatcaccgggacgctagtcagcataaccacaacaaaattgaacaggtggacttttcatggaatacatacgctgacgggaagctcgctttttacgatcactatttgatcgaacagatacagtcaggtaaggagcctgaggtgaggcaattttttttcctgctggcagtatgtcataccgtgatggtcgatcgaactgacgggcagctcaactaccaggcagcttcccccgatgagggagctctcgtgaatgctgcacgcaacttcggcttcgcattcctcgctaggactcaaaatacaatcacaatcagcgagttaggcacggagcggacttacaacgtcctggcaatcctggactttaactccgacagaaagcggatgtccattatcgttaggacccccgagggcaacatcaagctgtattgtaagggcgcagacaccgttatctatgaaaggcttcatcgcatgaatcccacaaagcaggagacccaggatgcactggacatcttcgctaacgagacactaagaacactgtgtttatgctataaggaaatcgaagagaaagagtttacagaatggaataagaaatttatggctgcctctgtcgctagtactaatcgcgacgaggccctggacaaggtttatgaagagatcgagaaagatttgatcttattaggggcaactgcgatcgaggataaactgcaagatggggtacccgaaacaatcagcaagctggccaaagcagatattaagatttgggtactgacaggagataaaaaggaaactgccgagaatattggatttgcctgcgagctacttactgaagacactacgatttgctacggcgaggacataaactctttgctgcacgcacggatggagaaccagaggaatagaggaggcgtgtatgctaagttcgcgccacctgtgcaggaaagtttcttcccacccggaggcaatcgtgctttgatcatcacgggcagttggcttaacgagatcttacttgaaaagaaaacaaaacggaacaaaattctgaagctcaagttccctaggaccgaagaagaacgcaggatgagaacgcagtcgaaacgaagacttgaagccaagaaagagcagcggcagaaaaattttgtagacctcgcctgcgagtgctctgccgtgatttgttgcagggtaacacctaagcagaaagccatggtagtggatctcgtcaaacggtacaagaaagctatcaccttggcaattggtgacggtgcaaatgatgtgaatatgattaaaactgctcatattggcgtggggatttccggccaggaagggatgcaggctgtaatgagttcggactactccttcgcacagtttaggtaccttcagaggttgctgctggtccatggcagatggtcctacatccggatgtgcaaatttctgcgttacttcttttacaaaaactttgcattcactctggttcatttttggtactcattcttcaatggttattctgcacaaaccgcttacgaagactggtttattaccctgtataacgtgttgtacacgagtctgcccgtgctgttgatggggttgcttgatcaagacgtcagcgacaagctgtcgctgcggttcccagggctatacatagtgggccaacgcgatctgctgtttaattacaagcgttttttcgtatctctgctgcatggagtccttaccagtatgatcctcttcttcatccctttgggtgcatacctgcagaccgtgggccaggatggggaagcaccatctgattaccagtcttttgctgttacaattgcttcggccctggttataacagtgaactttcagattgggctggatacctcctactggacttttgtcaacgctttttctatctttggctcaattgccctgtattttgggatcatgttcgacttccattctgccggaattcatgttcttttccccagcgctttccagtttaccggcaccgcatcaaacgccctgaggcagccgtacatctggctgaccattattctcgctgtggccgtttgtctgttacctgtcgtcgcgatccgtttcctgagtatgactatttggccaagtgagagtgacaagatccaaaaacaccgaaagagactgaaggccgaggagcaatggcagaggcggcagcaggtatttcgccgaggggtcagtacacggcgttccgcttacgccttttctcaccagagagggtacgcggacctcatcagttctggaaggagtatccgtaagaagcgcagtcctcttgatgccatcgtggccgacggtacagctgagtacaggagaactggagatagctag

SEQ ID NO: 4240 - DNA, 3756 bp, synthetic construct
  misc_feature 1..3756: note = source = /note="Description of Artificial Sequence: Synthetic coding sequence"
  source 1..3756: mol_type = other DNA
atgagtaccgagcgcgattcagaaaccacttttgatgaagacagccagcctaatgacgaagtcgtcccgtactccgatgatgagacggaagatgagctggatgaccagggcagtgctgtggagccggaacaaaacagagtaaatcgcgaagccgaggagaatcgcgagccttttcggaaagagtgcacgtggcaggtaaaggccaatgaccgcaagtaccatgaacagcctcactttatgaacactaaattcctgtgtatcaaggagagcaagtacgccaataatgcgataaaaacttataaatacaacgcattcacttttatccctatgaatctttttgagcagttcaaacgcgcagccaatctctattttctggccctgttaattctacaggccgtgcctcagatatctactcttgcctggtatacgacattggtccccctgctggttgtgctaggtgtgaccgccattaaggatcttgtagatgacgtggcgcgacacaaaatggacaaagagattaacaaccgtacctgcgaagtcatcaaggatggcaggtttaaggtggctaaatggaaagaaatacaagttggtgatgtgatcagactcaagaagaacgactttgtaccggcagatattttactgctgagttcatctgagcccaatagcttgtgttatgtggagacagctgagctggacggggagacaaatcttaaatttaagatgagcctcgaaattacggatcagtatctgcagcgcgaagacacccttgctacatttgacggcttcatcgagtgcgaggaacctaataaccggctcgacaagtttacaggcaccctcttttggcggaataccagttttcctcttgacgctgacaaaattctgctgcgtggctgtgtcatccggaacaccgacttttgccacggtttggtgatattcgcaggcgctgatacaaagattatgaagaatagcgggaagacaaggtttaagagaacaaagatcgattacctgatgaactatatggtctacactatctttgtcgtgctgatcctgctgagtgccggactcgccataggtcatgcctactgggaggctcaggtgggtaattctagctggtatttgtacgacggggaggacgatacaccctcctatcgtggttttctcattttctggggatatataatcgtgctcaacacaatggttccaattagcctctacgtctccgtcgaagtcatcagactggggcagtcacatttcatcaattgggatttgcaaatgtattacgccgaaaaggatacccctgccaaagcccgaactacgactttgaacgagcagctcggccagattcattatatcttttccgacaagaccggaactttgactcagaacatcatgacgtttaaaaaatgttgtattaatggccaaatttatggcgaccaccgggatgcatcacagcataatcataataagatagagcaggttgacttctcatggaatacttacgccgacggaaagctggccttctatgatcactacctgatcgagcagattcagtctggaaaggaacctgaggttcggcagttcttctttctgcttgccgtgtgccataccgtcatggtggataggacagacgggcagttgaactaccaagctgcttcccccgacgagggagcccttgtgaacgctgcaagaaactttggcttcgccttcctcgcaaggactcagaacacaatcacaattagcgaactggggactgagaggacatacaatgtgcttgcaatcttagactttaattcagaccggaagcgaatgagcataattgttagaactcctgagggcaatatcaaattatactgtaaaggggcagatactgtgatttatgaaagactccacaggatgaaccctacaaagcaagagacgcaggacgccctcgatatctttgctaacgagacccttcggacactctgcttatgctacaaggagattgaagaaaaggagtttacggaatggaacaagaagttcatggccgctagcgtggcctccactaatcgcgacgaggctctagataaggtctacgaggagattgagaaagacctgattctcctcggcgctaccgccattgaggacaaactccaggacggcgtgccagagacgatctccaagctggctaaggcagacataaagatatgggtcctcaccggcgacaaaaaggagacagctgaaaacattggcttcgcttgtgaactgctcacggaagacactactatctgctacggggaggacattaattccctactgcatgccagaatggagaaccaacggaaccgcggaggcgtctatgcaaaatttgccccaccagtgcaagagtccttctttcctcctggcggaaacagggcgcttatcatcacaggaagttggctgaacgagattctcctagagaagaagaccaagaggaacaaaattctgaaacttaagtttccacgtaccgaagaagagaggcgcatgcgcacccagtctaagaggcgactggaagcgaagaaagaacagagacaaaaaaatttcgtggatctcgcctgtgagtgttctgcagttatttgttgccgcgtgacccccaaacagaaagctatggtggtggacctcgttaagaggtataaaaaggcgattacattggcaattggagacggggcaaatgacgtgaatatgattaagactgctcacattggggtgggcatatctggacaggagggtatgcaggctgtgatgagctcggactacagcttcgctcagtttagatatctgcaacgcctattgctggttcacggccgatggagttacataagaatgtgtaaatttctgcgatattttttctacaagaacttcgcatttaccttggtccatttttggtattccttcttcaatggctattctgcccaaaccgcatatgaggattggttcatcaccctgtacaacgtgttgtatacttcattaccagttctcttaatgggactcttagaccaggacgtgagcgacaaactctcattgaggtttcctggcctgtatattgtcgggcagcgcgatctgctgtttaattacaagagattctttgtctctctgctgcacggggttttgaccagcatgattctgttcttcatcccccttggcgcttacctccaaacagtcgggcaagacggagaagccccttctgattaccaaagcttcgccgttactatcgcttccgctctggtgatcactgttaatttccaaataggactggacactagctactggacttttgtgaatgcctttagtatttttggctctatcgccttatatttcgggattatgtttgactttcacagcgccggtattcatgtgctctttccctcagcctttcagttcactggaaccgctagcaacgcattgaggcaaccttatatttggctcacaatcatcctcgcggtggctgtttgcctcttacccgtcgtggccatccggttcctgtccatgacaatatggccatctgagtccgacaagattcagaagcacagaaagaggctcaaggcagaggaacaatggcagagacgacagcaagtgttcagaagaggagtgagcaccagaagatcagcatacgctttttcacatcagcggggatatgcagacctgatctcttcagggcgatccattagaaagaaacggtccccgctggatgctatagtggctgatgggacagctgaataccggaggaccggtgattcatag

SEQ ID NO: 4241 - DNA, 4398 bp, synthetic construct
  misc_feature 1..4398: note = source = /note="Description of Artificial Sequence: Synthetic coding sequence"
  source 1..4398: mol_type = other DNA
atgcccgaacaggagcgacagatcaccgcgcgagaaggggcatcacggaagattctctctaagctgagcctgcctacaagggcctgggaacctgctatgaagaaaagcttcgccttcgataatgttggatatgagggcggactcgatggcttggggccatcaagtcaggttgccactagcacggttaggatattaggaatgacttgccagtcttgtgttaaaagtattgaggaccggattagcaacttgaaaggaatcatctcaatgaaggtgtctctggaacagggttctgctaccgtaaagtatgtgccatcagtcgtctgtctacaacaggtctgccaccagattggggacatgggattcgaagcatctatagcagagggaaaagccgcatcctggcctagtagatcattgccagcccaggaggccgttgttaagttgagggtcgagggcatgacctgccagagctgtgtgtcctccatcgaaggcaaagtgcgcaagctccaaggagtggtaagagtcaaggtgtcactgtccaatcaggaggccgtgataacctaccagccctacctgatccagccagaagatctgcgagaccacgttaatgacatgggcttcgaggccgcaattaaaagtaaggtcgcccctttgtcgcttggtcctatcgacatagaaagactgcagtccacaaacccaaagcggcctctgtccagcgccaatcaaaacttcaacaacagtgaaactttgggccatcaggggtcacatgtggtaaccctgcagctgcgtattgatggaatgcattgcaagtcttgtgtgcttaacatagaggagaatatcgggcaactcctcggggtgcaaagcatccaggtcagtcttgagaataaaacggcacaagttaagtacgatccatcctgtacctctcccgtggccctccagagggctatagaagcattgccacccggaaactttaaggtgagtctgcctgacggcgcagagggtagcgggacagaccaccgtagctcatcgtcacactctccgggtagcccaccccgtaaccaggttcaggggacttgttcaacaaccctgattgccatcgcagggatgacctgcgctagctgtgtgcatagtatagaggggatgatttcacagttagagggggttcagcagatctccgtctcactggccgagggcacagcaaccgtgttatacaatccatccgtgattagtcccgaggagctccgggcagccatagaggacatgggatttgaggcgtccgtggtgtcagaatcatgtagcaccaatcccctgggaaaccacagcgccggtaatagtatggtccagacgaccgacggcacccccactagcgtgcaggaagtggcaccccacactggccgattgccagccaatcacgccccagacatattggctaagagcccccagtcgacaagagccgtggcgccacagaaatgcttcctgcaaatcaagggaatgacatgtgcatcctgcgtgtcaaacatcgagcggaacctccagaaggaggctggtgtcttgtcggtactggtggccttaatggcaggcaaagctgagatcaaatacgaccccgaggtcattcagcctttagagatagcccagttcatccaggacctgggattcgaagctgcggtgatggaagattacgccggtagtgatgggaacattgagttgactatcacaggaatgacctgtgcatcgtgcgtgcacaatatcgaaagcaagctgacccgaactaacgggataacttacgcaagtgttgctttagccacatcaaaggcactggtcaagttcgatcccgaaattattggcccacgtgatataattaagatcatcgaagaaatcggctttcatgccagcctggctcagcgcaaccctaatgcccatcacctggaccataaaatggaaattaagcagtggaaaaaatccttcctgtgtagtctcgtgttcgggatccccgtcatggccctgatgatctacatgttaatcccttccaacgaacctcaccaaagcatggtgctggaccacaatatcatccccggtctctcaatcttaaatctcatcttcttcatcctatgtactttcgtgcaactgttagggggatggtatttttatgtgcaggcatacaagtcgctaaggcatcgttcagcaaatatggatgtcctcattgttctagctacaagtattgcctatgtttacagcttggtgattctggtagtagctgttgcagagaaggcggagaggtcacctgtcacgttttttgatactcccccaatgctgtttgtgttcatcgctctcggacgctggctggagcacttggccaaatccaagaccagcgaagcccttgccaagctaatgagcctgcaggccacggaggccacagtggtcaccttgggagaggacaatctgatcatccgtgaggagcaggtgcctatggaactggtgcagaggggcgacatagtgaaggtggtcccgggaggcaaatttccagttgatggcaaggtcctggaaggtaacaccatggctgacgagagtctgatcacaggcgaagctatgcctgtgacaaaaaaaccagggagtaccgttatcgctggctccattaatgcccatgggtccgtgttgataaaagccacacatgtggggaatgacactacactggcccagattgtgaaacttgttgaagaggcacaaatgtcaaaggcacctatccagcaactcgccgaccgcttttctggatactttgtgcccttcattatcataatgtcgacgttaacgctcgtcgtgtggattgttataggtttcatcgactttggggtcgttcaaagatactttcccaaccccaacaagcacattagccagaccgaggttatcatcagatttgccttccagacaagcattacggtgctatgcatcgcctgtccttgctctctggggttagcaacccccaccgccgtcatggtgggaacaggagtcgccgcacagaatggcatactgattaagggtggaaagcctttagaaatggcccacaaaatcaaaacggtcatgtttgataaaaccggcactatcactcatggcgtgccgagggtgatgcgcgtgttgctgttgggagacgtggctactcttcctttacggaaagtcctcgcggtcgttggtactgccgaagcctcctcagagcacccactgggcgtggcggtgactaagtattgcaaggaagaactagggacggagaccctcgggtactgcacagattttcaggccgtgcccggatgtggaatcggatgtaaggtctcaaacgtggagggaatattggcccacagcgagcgaccactctcagcccctgccagccatctgaacgaagccggatccctgcctgccgaaaaagacgctgtgccccagacgttctccgtgctgattggaaaccgtgaatggctcagaaggaacggactcacaatcagttctgacgtctctgatgccatgaccgaccacgagatgaaggggcaaacagctatcttagtggctatcgatggcgttttatgtggcatgatcgcaatagcagacgccgtcaagcaagaggccgctctggccgtacacacacttcagtcaatgggcgtagacgttgtgctgatcaccggcgacaatcgcaaaacagcacgagctatagccacccaagttggaattaataaggtgttcgccgaggtactgccctctcacaaggttgcgaaagttcaggaactgcagaataagggcaagaaagtggcaatggtcggggacggggttaatgactcgccagcactcgcacaggccgatatgggggtagcaatcggtacaggaaccgacgtggcaatagaggctgctgatgtagtgttaattaggaacgacttgttagacgtggtggctagcattcatctgtctaaacgcacagtgagaaggatcaggatcaatctggtcctcgcactgatatacaatttagtgggcatccccatcgcagccggtgtattcatgccaataggaatcgttctccagccctggatgggcagtgccgcaatggcagcttctagtgtcagcgtggtgcttagtagcctgcaactgaagtgttataagaaacctgatctggagcgttacgaagcccaagcccacgggcacatgaaacctctgactgctagccaagtgagtgttcatattgggatggacgaccggtggagggattctcctcgcgcaacaccttgggatcaggtctcgtacgttagtcaagtgagcttgagttcactgacctcagataagccctctcggcattcagctgccgcagatgacgacggcgataagtggtccttactcttgaatgggagggatgaggagcagtacatctag

SEQ ID NO: 4242 - DNA, 3777 bp, synthetic construct
  misc_feature 1..3777: note = source = /note="Description of Artificial Sequence: Synthetic coding sequence"
  source 1..3777: mol_type = other DNA
atgccagaacaggaacgacagataacagctagggaaggggcttcccgaaagattttgtcgaaattaagtttacctacacgagcctgggaacccgctatgaaaaagagcttcgcctttgacaacgttggatatgaaggcggactggacggactgggccctagctctcaggtcgctacctcgaccgtgagaatccttgggatgacatgccagtcatgtgtaaaaagtatcgaggatcgcatctcaaacctaaagggcataatttcaatgaaggtctcccttgagcaggggagcgcaactgttaaatatgtgcccagcgtagtttgcttgcagcaggtgtgccaccagataggcgatatgggctttgaggcatctatagctgagggcaaagcggcttcatggccgtcacgttcacttcccgcacaagaggccgtggtgaaactccgcgtggagggaatgacatgccagagctgtgtgtccagcattgaggggaaggtacgaaagttacagggggtggtgagggtgaaggtatccttatccaaccaagaggccgtcatcacctaccagccctacctgattcagcctgaggacttgagagatcacgtcaacgacatgggcttcgaagccgctattaaatctaaggtggctccactgtccctcggacccatcgacattgaacgacttcagtcaactaaccctaagcgcccattaagttctgccaatcagaactttaacaattccgaaaccctgggacaccaggggtcccacgtcgtaacactgcagctgcgcatcgatggaatgcactgtaagagctgcgttctgaatattgaggagaacattggccagttgctgggcgtgcagagcatccaagtctctctggagaacaagaccgcccaggtaaaatatgaccccagctgcacctcgcctgtggcgttgcagagagcaattgaggctctcccccctggcaatttcaaagtttcattgccagatggggctgaggggtccggcactgatcatcgctctagcagctctcactcacccggatcccctcccaggaaccaagttcagggaacatgttctacaacactgattgcaatcgccggaatgacatgtgcatcctgcgtgcactctattgaaggtatgatctcacagctggagggcgtgcagcagatctcagtgtcactagccgaaggaaccgcaaccgtactgtacaatccctccgtcattagcccagaagaactccgggcagccatcgaagatatgggattcgaggcatctgtggtcagcgagagctgttctaccaaccctctgggaaaccattctgccggtaatagcatggtgcagacaaccgatggtacgcccacttccgttcaggaagtagcaccccataccggtcgacttcctgctaatcacgcaccagatatactggctaaatcaccacagtctacccgagctgtagccccacagaaatgtttccttcaaattaagggaatgacatgtgctagttgcgtatcaaatatcgagagaaatctacagaaagaggccggtgttctctcagtgttggttgcactgatggctggtaaagcagagattaagtatgaccccgaggtgattcagcccctggagatagctcaatttatccaggacttggggtttgaggccgcagtgatggaggattacgctggttctgatgggaacatcgagcttactataaccggaatgacttgtgcctcttgcgtccataatattgagagcaagttgacacggactaatggtattacatacgcatcagtggccctggccacctccaaggccctggtcaagtttgacccagagattatcgggccacgtgatatcattaagatcatcgagagtaaaacatcagaagctttagcaaaacttatgtccctgcaggccactgaagccacagtggttacactgggggaagacaacttgattatccgagaggagcaggtgccaatggaactggttcagcgcggagacatcgttaaagtggtgccgggtgggaaattcccagttgatggtaaagtcctcgaaggcaatacaatggctgatgagagcctgattaccggagaagcaatgccggttaccaagaaacctggctccactgtgatcgctggttctattaacgcacacggatctgtcctgatcaaagccacgcatgtcgggaacgataccacattggcgcagattgtgaagctagtcgaagaagcacagatgtcaaagaatccgaacaagcatatttcacagactgaggtaatcatccgcttcgccttccaaacatccataaccgtcttgtgcatcgcatgtccctgtagcctgggcctggccacacccacagctgtgatggtcgggacaggagtggcagcgcagaatggcatcctgatcaagggcggaaagcctctggagatggctcataagatcaaaacagtgatgttcgataaaactggaactatcactcatggagtccccagagtgatgcgggtgctgttgctcggagacgttgccaccctccccctgcgtaaagtgttggccgtcgtgggcactgccgaagctagctctgagcatcccctcggggtggcagttacaaaatactgtaaagaagaactgggtacagaaaccttaggatactgtaccgatttccaggctgttccaggatgtggcatcggatgcaaagtgtcaaacgtggaaggaatccttgcgcactcggaacggcctctcagtgcccctgcctctcacctgaatgaagcaggaagcctgcctgccgaaaaggatgctgtgccccagacattttcagtgctcatcggaaatagggagtggctgaggcgcaatggcctgactattagctctgatgtcagcgatgctatgactgaccatgagatgaaaggccagaccgccatattagtggccattgatggcgtgctttgtggcatgatcgcaatagccgatgcagtgaaacaggaggccgcacttgccgttcacacgctgcagagcatgggtgtcgacgtggtcttaataaccggcgataacaggaagactgccagagctatcgccacccaagttggtataaataaagtgttcgccgaagtgctgccgtctcacaaggtcgccaaggtacaggaactccagaataaaggcaagaaagtcgctatggtgggagatggcgtcaacgattcacctgcacttgcccaagccgacatgggggtcgccattgggactggaactgatgtggcaattgaagcagccgatgtggtccttattaggaacgaccttctggatgtcgtcgctagcatccacctgagcaaaagaacggtgagacggattagaatcaatctggttctcgcattaatttacaatctggtgggtatccccatcgccgctggggttttcatgcccatagggatcgtccttcaaccctggatgggcagtgccgctatggccgctagcagtgtgagcgtggtgctgtcctcactgcagcttaaatgctacaagaaaccggacttagagaggtacgaggcccaagcgcacgggcatatgaagccactgacagcatcccaggtgtctgtgcacatagggatggacgatcggtggcgcgacagtccgagagccacgccctgggatcaggtgagctacgtctcacaggtcagccttagttcactaacaagcgacaaaccttcaaggcacagtgcagccgctgatgacgatggtgacaagtggagcttacttctgaacggaagagacgaagaacaatacatttag

SEQ ID NO: 4243 - DNA, 4065 bp, synthetic construct
  misc_feature 1..4065: note = source = /note="Description of Artificial Sequence: Synthetic coding sequence"
  source 1..4065: mol_type = other DNA
atgccggagcaagaacgtcaaattacggcacgagaaggagcctcgagaaaaatcttgagcaaactctcccttccaactagggcatgggagccagccatgaagaagagtttcgcctttgataacgtgggttacgaaggcggtcttgatggtctgggaccttcaagccaggtggcaacctctacagttcgcattcttggcatgacctgtcagagctgcgttaagagcatcgaggacaggatctcaaacttaaaaggaattatttcaatgaaagttagcctcgagcagggaagtgctaccgtcaagtatgttccatctgtggtgtgtcttcagcaggtctgtcatcagattggagacatgggcttcgaggctagcatagcagaagggaaggcggctagctggccaagccgcagtttacccgctcaggaggcagtggtgaaactcagggtcgagggaatgacttgtcagagctgcgtgtcttccatcgaagggaaggtgagaaaactgcagggtgtcgtgcgagttaaagtgagcctctccaaccaagaggccgttattacctatcagccttacctgatacagccagaagacctgcgggaccacgtgaacgacatgggtttcgaggctgctatcaaaagcaaggtggccccactgtctctgggaccaattgacatcgagaggctgcagagtactaacccaaaaaggcccctgtcaagtgcaaaccagaactttaacaactcggagaccctcggccatcaggggtcccatgttgttacactgcaactgagaattgacggcatgcactgcatgatatcccagctggaaggagtgcaacaaatcagcgtctcactcgcagagggaacagctaccgttctgtataatccgagcgtgatcagtcctgaagaattgagagctgctatcgaagacatgggctttgaagcttccgtggtgagcgagtcatgttcaaccaatccgctcggcaaccacagcgcaggcaactcgatggtccagaccacagacggaacacccacaagtgtgcaggaggtggccccacataccgggagactgcccgctaatcatgctcccgatatcttggccaagtcacctcagagcactagggccgtggctccccagaagtgttttttacagattaaagggatgacttgcgcatcctgtgtctccaatatagagaggaacttgcagaaggaggctggagtcctgagcgtgctggttgccctgatggcgggaaaggccgagatcaaatatgacccagaagtcatccaacccttagagatcgcccagttcatccaagacttaggctttgaggccgctgtaatggaggactatgcgggttccgatggcaacattgagctgaccataacaggcatgacctgcgcgtcttgcgtgcacaacattgagagcaagctgacgagaactaatggaataacatacgctagcgtcgcgctggccacctctaaagctctggtgaaatttgatcccgaaatcattggccctcgagatatcattaagattatcgaggagattggctttcacgctagtctcgcccagagaaaccctaatgcacaccacctcgaccacaaaatggagatcaaacagtggaagaagtcattcctttgcagtttggtgtttggcatccctgtcatggcacttatgatctacatgctgatacccagcaacgagcctcaccaatccatggtgctggatcataacatcataccaggcctttctattctgaacctgattttttttatattatgcacgtttgtccaattgctcggtggctggtacttctacgtccaggcttataaaagcctgcgccacaggtccgcgaatatggacgtgcttatagttctggccacttcgatcgcttacgtatactctctggtgattctggtagttgctgtggcagagaaggcagagcgatcccctgtgaccttctttgatacgcctcccatgctgtttgtgttcattgcgctgggacgatggctggaacatctggccaagtcgaaaaccagcgaggcactggctaagctgatgtcactgcaggccactgaagccaccgtggtgactctgggtgaggataatctcattatacgtgaagagcaagtcccgatggagcttgtgcagcgaggcgacatcgtcaaagtagtccccggagggaaatttccagttgacggaaaggtgctggagggaaacactatggcggatgaaagcctcattaccggagaggcaatgccggtgacaaagaaacctggttctacagtgatcgccggaagcattaatgcacacggctcagttctgattaaggccacacatgtggggaatgacaccacactggcgcagatcgtgaagctagtggaggaggcacagatgagcaaagctccaatccagcagttagcggatcgcttcagtggttatttcgtaccttttattattattatgtccaccttgacattggtggtgtggattgtaatcggctttatagactttggagtagtacagaggtattttccaaaccccaacaagcacatcagccaaaccgaggtaattatccgtttcgcttttcaaacctcaatcactgtgctttgtatcgcttgtccatgctccctgggactagctactcctacagcagtcatggtcggtaccggagtagcagcgcaaaacggcatactgatcaaaggcggaaagccgctggagatggctcacaaaattaaaacagtaatgttcgataaaactgggaccataactcatggggtgccacgcgtgatgagggttctgttactgggagacgtggcaactctgccgctgagaaaggttctcgcagtggtgggcactgcagaagcatcttccgaacatccactgggtgtggcagtcacgaagtactgtaaagaagagcttggcacagagaccttgggctactgtacggatttccaggccgttccgggttgcggaatcggatgcaaggtgtccaatgttgaaggaatcttggcacactccgaacgcccactgtcagcaccagcctcacatctaaacgaggccggatctttacctgctgagaaggacgccgtgcctcaaacattctctgtgttgatcggcaacagggagtggctgcgacgcaacgggctcacgatatccagcgatgttagcgatgccatgaccgaccacgaaatgaaaggccaaaccgctatcctggtcgctattgatggagttctgtgtggaatgatcgccatcgccgatgccgtgaagcaagaggccgctctagccgtccacaccttgcagagcatgggagtggacgtggtcctgatcacgggcgataataggaaaactgcacgcgctatcgctacacaggtgggtattaataaggttttcgcagaggtcctcccatctcataaggtagctaaagtgcaggaactccaaaacaagggaaagaaagttgccatggttggagatggagtcaatgactcgcctgccctggctcaagctgatatgggggtcgccatcggtactggaacggatgtggcaattgaggcagccgacgtggtgcttatcagaaacgacctgttggacgtggtggcctcaatccatctgtctaaacgcactgtgcgtcgaatcaggatcaatctagtgctggctctgatttataatcttgtcgggatcccaatcgccgctggagtatttatgccaatcggcatcgttttacagccctggatggggtccgctgccatggctgcatcctccgtttctgttgtgctatccagcctgcagctgaagtgctacaaaaagcctgatcttgagcgatacgaagctcaggcacatggccatatgaaacccctcactgcttctcaagtgtctgtgcacatcggcatggacgacagatggcgtgattcaccccgtgcaaccccatgggaccaagtgagctatgttagtcaggtctccctatcgtccttaaccagtgacaaacccagcagacactccgcagccgctgacgatgacggagataagtggtctttactgttaaacggaagggacgaagagcagtatatttag

SEQ ID NO: 4244 - DNA, 3108 bp, synthetic construct
  misc_feature 1..3108: note = source = /note="Description of Artificial Sequence: Synthetic coding sequence"
  source 1..3108: mol_type = other DNA
atgcctgagcaggagcgacagatcaccgcacgcgaaggtgcgagtaggaaaattctgtcaaaattgagcctgcccacccgggcttgggagcccgcaatgaagaagtccttcgcctttgataatgtgggttacgaagggggtctggacggccttggcccatcatcccaggtggctacaagcaccgttaggattctgggaatgacctgtcagagctgtgtcaagtccatcgaggatcgaattagtaatctgaagggcattatctccatgaaagtctctctggaacaggggagtgccactgtcaagtacgtaccctctgttgtgtgtctccagcaagtgtgccatcagattggagacatgggatttgaggcgagcattgctgagggaaaggcagccagctggccatcccgatcactccctgctcaggaggcagtagttaaactgcgagtagaggggatgacttgccagtcctgcgtgtcctcaatcgagggaaaagtgcgaaaattgcagggagtggtcagagttaaggtgagcctttcgaaccaggaggctgttatcacctaccagccatacctcatccagccggaagacctgcgtgaccatgtgaacgatatgggcttcgaagctgctattaaaagtaaggtggcccctctgagtctcgggccaatcgacattgaacgtctgcaatccacaaaccctaagagacctctgtctagtgcaaaccagaattttaataactcagagactttggggcaccagggtagccatgtggtgacactccagctacgaatcgacggcatgcactgcaagtcctgcgtcctcaacattgaagaaaacattggccagctccttggcgtgcagagcatccaggtctctctggagaataaaacagcacaagttaagtatgacccctcttgcactagcccagttgctctgcaaagagccattgaagcactacctcctggtaacttcaaggtgagtcttcccgacggagcggaagggtccgggaccgatcacaggtctagtagctctcactctcctggatctcccccacggaaccaggttcagggtacctgctctacaaccttgatcgccattgcaggcatgacttgcgcctcctgcgtgcacagtatcgaggggatgatcagccaacttgaaggcgtacagcagatcagtgtgtcattggccgagggaactgctacagtactgtacaatcctagtgtgatatcccccgaggagctgcgcgcagctatcgaagacatgggctttgaagcctcagtggtgtctggtgaggccatgccagtcactaagaagccaggatctaccgtcattgcaggatctatcaatgcccacggaagtgtgctcatcaaggcaacacacgtgggtaatgacacaaccttggcccaaattgtcaagctggtggaagaggctcagatgtccaaggccccaatccagcagctggctgatcggtttagtgggtacttcgtgccttttatcatcattatgtctacccttacacttgttgtttggattgtcatcggctttatagatttcggcgtggtacagaggtattttccaaaccccaacaaacatattagccagactgaggtgatcatcagattcgccttccagaccagtatcaccgtattgtgcatagcctgcccatgcagtttgggacttgctacaccaactgctgtaatggtaggtacaggtgtggccgcacagaatggaatactcattaaaggagggaaacccctggaaatggctcacaagattaagaccgttatgttcgataagaccggtaccattacccacggcgtcccaagggtaatgagagtgttgctcttaggagatgtggctactctccccttgagaaaggtcctggccgtggtgggaaccgcagaagcttcttctgagcaccccctaggcgtggctgtgactaagtactgtaaggaggaactgggaactgagaccctagggtattgcaccgacttccaggcagtgcctggatgcgggatcggctgtaaagtgtcgaatgtggaggggatcctagcacattccgagcgccctctgagcgctccagccagtcacttgaatgaggccggtagcctgccagccgaaaaagacgctgttccacagacattttctgtgttaatcggcaacagagaatggctccgcagaaacggactaacaatttcttccgatgtgagtgacgcaatgactgatcatgaaatgaaggggcaaacggccatcctcgttgcgatagacggcgttctgtgcggcatgattgctatcgcggatgccgtcaaacaagaagctgccctggccgtccacacactgcagagtatgggcgtcgatgtggtacttattacgggtgataaccggaaaacagcgagggccatagccacacaggtgggaatcaataaggtgtttgcggaggtgttgccttctcacaaagtggccaaggtgcaggaactacagaataaaggtaaaaaagtcgctatggtaggcgatggtgtaaatgattccccagccctggcccaggcagatatgggcgtggctatcggaactgggaccgacgtggccatagaagctgccgatgtagttctgattcggaatgacctgctggatgtggtggcatccatccacctgtctaagagaactgttagacggatccgaatcaatttggttttggctctgatctataacctagtcggcatcccaatcgctgctggtgtcttcatgcctattggcattgttctccagccatggatgggaagcgcagccatggccgcttcttccgtaagtgtggtcctgtcaagcctgcagctgaagtgttataaaaagcccgacctggagcggtacgaagcccaggctcacggtcatatgaaaccgctgacagcgtcccaggtgtcagtccacatcggaatggacgatcggtggcgggactcaccacgagcgacaccttgggaccaggtttcctatgtgagtcaggtatctctctcctccctcactagcgacaagccttcccgtcacagtgctgcagctgacgatgacggggataaatggtcattgctgctcaatgggagggatgaggagcagtacatttag

SEQ ID NO: 4245 - DNA, 2031 bp, synthetic construct
  misc_feature 1..2031: note = source = /note="Description of Artificial Sequence: Synthetic coding sequence"
  source 1..2031: mol_type = other DNA
atggatgtactgattgtcttggcgacgtcgatcgcatatgtgtatagcctagtgatcctcgtcgtggcggtggccgagaaggctgagcgtagcccggtgacgttcttcgacacgccacctatgttgttcgtctttatcgccttaggtaggtggcttgagcatcttgctaagtccaagacttctgaggccctagcaaagctgatgagcctgcaggcgactgaggccacagtcgtgaccctgggtgaagataatctaatcatccgcgaggagcaggtgccaatggaactggtacaacggggagacatcgtcaaagtcgtgcccggaggcaaattcccggtggatgggaaggtcctggagggtaataccatggccgacgaaagcctgatcacaggggaagccatgccggtcacaaaaaaaccaggaagtacagtgattgctgggtcaattaacgctcacggatctgttctcatcaaggctacacacgttggtaatgacactaccttagcacagattgtcaaactcgtcgaagaagcgcagatgtccaaggctcccattcagcaactcgcggacagattcagtggatacttcgtgccattcattataatcatgtcaactttgacccttgtagtgtggatcgtgatcgggttcattgatttcggagtcgtccaaagatactttccaaaccctaacaagcacatatcccagacagaagtcataatccgcttcgcatttcagacgtctataactgttctctgtattgcatgtccctgttcccttgggcttgctactcccaccgccgttatggttggtaccggggtggccgcacagaatggcatacttatcaaagggggaaagccactggaaatggcacacaaggagttaggtaccgagactctgggatactgcacagatttccaagccgtgccgggatgcggcattgggtgcaaggtaagcaacgtggagggtatcctagcccacagtgagcggccattgagcgctcctgccagccatctcaatgaagccggatctcttcccgcagagaaagatgcagtgccccagacattctctgtactcattggtaaccgtgaatggttgaggcgtaacgggctcaccatcagctcagacgtttcagacgcaatgacggaccacgagatgaaaggccaaaccgcgattctggtggccattgacggtgttctttgtgggatgatcgccattgccgatgctgtgaagcaggaggccgcacttgccgtgcacactctgcaaagtatgggcgtcgacgtcgtcctcatcacgggggacaatcgcaaaaccgccagagcgattgccacacaggtcggcataaacaaggtcttcgctgaagtgttgccttcgcataaggtcgccaaagtgcaggaactccagaacaaaggcaaaaaagtagcaatggtcggagacggtgtgaatgattctccagccctggctcaggctgatatgggagtcgccattggcacaggcacggacgtggcaatagaggcggctgacgttgtactgataagaaatgacctgctggatgttgtggcaagcatccatttgtctaagagaacggtgaggcgcattcggattaatctggtgctggccctgatttataacctagtggggatcccaattgccgcaggagtgttcatgccaatcggaattgttctgcagccatggatgggaagtgccgcaatggctgctagttcagtgagtgttgtgcttagcagtctccagctaaagtgctataagaaacctgatctcgaaagatacgaggcccaggcccacgggcacatgaagcctctaaccgcttcccaggtgagcgttcatatcggcatggacgatcgctggagggattctccccgagctacaccatgggaccaggtttcttacgtgtctcaggtgagtctctcctccctgacatcagacaagccttcacgacattccgctgctgctgatgacgatggcgataaatggtctctattgttgaatgggagggacgaggagcagtacatttag

SEQ ID NO: 4246 - DNA, 4203 bp, synthetic construct
  misc_feature 1..4203: note = source = /note="Description of Artificial Sequence: Synthetic coding sequence"
  source 1..4203: mol_type = other DNA
atgcctgagcaggagaggcagatcactgcacgcgaaggagcctccaggaaaattctgtccaagctgagtctccctactcgtgcctgggagcctgctatgaagaaatcctttgcctttgacaacgtggggtacgaaggtgggcttgatggcttgggacctagctctcaggtcgcaaccagtaccgtacggatcctcggtatgacatgccaatcctgcgttaagtccatcgaggacagaatctctaatctgaaaggcatcatctccatgaaagtttccctagaacaggggagcgcaactgtgaagtatgtaccatctgtcgtctgcctgcagcaggtttgccaccagataggcgatatggggttcgaggcaagcattgccgaggggaaagctgcgagctggccatcacgatccctacctgctcaggaagctgttgtgaaactgcgggtcgaagggatgacctgccagtcgtgtgtctccagtatcgagggtaaggtgaggaaactgcagggagtggtccgggtgaaggtttccctgtctaaccaggaggccgttatcacctaccagccctacctcatccagcccgaggatctgagagatcatgttaacgatatggggtttgaggccgctattaaatccaaagtcgccccactgagtctcgggccaattgatattgagaggctacagtctaccaaccccaaacggccactgagctctgccaaccaaaactttaataattcggagacattaggccaccaggggtctcacgtagtgactcttcagttacgaattgacggaatgcactgtaagtcatgtgtccttaacatcgaggagaatatcggtcaactgctaggcgtccagagtattcaagtttccttggagaacaagactgcccaagtgaagtatgatccatcctgtacaagtcctgtggcactgcaaagggcaatagaggcactgccacccggaaattttaaggtcagcttgcccgacggcgctgaaggcagcggcaccgatcatagaagttctagttctcactcccccggaagtcccccaaggaaccaagtacaggggacctgctccacaacactaatcgctattgccggaatgacttgcgcctcttgtgtgcatagtatcgagggaatgatctcacagctggaaggggtccagcaaatatcagtcagcttggcggagggcacagctacggttctgtacaatccttcagttatcagtcccgaagaactgcgggcagcaatcgaggacatgggcttcgaagctagcgtagtatctgagtcctgctcaacaaatcccctgggtaatcattcggccggtaacagtatggtacaaaccacagatggtacccccacatcggtacaggaggtcgccccacatacggggagactgccggctaatcatgcaccagatatactggctaaaagcccacagtcgacgcgggctgtcgcaccgcaaaagtgtttcctacagatcaaaggtatgacctgcgcatcctgcgtttcgaacatcgagcggaacctccagaaggaagcaggcgtgttatctgtgctcgtggcactgatggcgggtaaggccgagataaagtatgaccccgaagtgatccagcccctggaaattgcccagttcattcaggatcttggattcgaggccgctgtgatggaggactatgcgggtagtgatggcaacattgaactgacaattaccggcatgacctgtgcatcatgtgttcataatattgagagcaagctcacccgtacgaatgggatcacatatgccagcgtggccttggccacttccaaggccctggttaagtttgatcctgaaatcattgggcctagagatatcatcaaaatcatcgaagagatcggttttcacgcctcactggctcagaggaatccaaacgcacatcacctggaccacaagatggaaatcaaacagtggaagaaatcctttctgtgttctttagtcttcggtatacctgttatggcattgatgatctatatgctgatcccgtctaatgaaccccaccaaagcatggtgctggatcacaatattattccgggattatccatactcaacctcattttttttattttatgcacgttcgtgcaactcctggggggatggtatttctacgtccaagcctacaagagtttaaggcatcggagtgctaatatggacgtcttgatcgtccttgccacgtctatagcctatgtctatagtctggtcattctggttgttgctgttgccgagaaagcagaaagaagtcctgtaacattctttgatacccccccaatgctgtttgtgttcatagccttgggccgatggctagaacacctggcaaagtccaagactagcgaggccttggcgaaattaatgtctttacaggctaccgaagccactgtcgtgactctcggagaagataacctcataatccgggaagagcaggtaccaatggagctggtgcagcggggagatatagttaaggtggtgcccggaggcaaattcccagtagacggaaaagttttagaaggaaacacgatggccgacgaaagcctcataaccggagaagcaatgccagtgaccaagaagccagggtccacagtcatcgccggaagtatcaatgctcacgggtcagtcctgatcaaagcgacccatgtagggaacgacacaaccctggcccagatcgtaaaattagtcgaggaagcacagatgagcaaagctcccattcagcagctggccgacagattctcagggtactttgtgcctttcattattatcatgagcaccctgaccctggtggtctggatcgtcattgggtttattgacttcggggtagtgcaacgctatttccccattaaaacagtaatgtttgacaaaaccggcaccatcactcatggcgtgccaagagtcatgcgggtcctcctcctgggtgacgtggctactctgcccctgagaaaggtgttagccgtggtgggaaccgccgaagcaagcagcgaacacccactgggggtggccgtcactaagtactgtaaagaagaattgggcaccgagaccctgggctactgtactgactttcaggcagtgccagggtgcggtattgggtgtaaagtgtcgaatgtcgagggtatactggcacattctgagcgccctcttagcgccccagcgtcccatctaaatgaggcgggatctttacccgctgaaaaagacgcagtgccccagaccttctctgtgctcatagggaatagagaatggctgagaagaaatggtctgacaattagctccgatgtgtcagacgcaatgacagaccacgaaatgaagggacagacagccatcctagttgccatcgacggagtgctgtgtgggatgatagctatcgctgacgccgtgaagcaggaggctgccctcgcagttcacaccctacagtctatgggcgtggacgtggtgctgattactggcgacaatcgcaagactgcccgagccattgcgacccaggtcggaattaacaaggtgttcgcagaggttctgcctagtcacaaagtggcgaaggtacaagaattgcaaaacaaaggaaagaaggtagcaatggtcggggacggagtgaatgattccccagctctggcccaggcagacatgggagtagccatcggaacgggtaccgacgtagctattgaggccgctgacgtggtgctgataaggaacgatctcctcgatgtggtggcatctattcacctgtctaaacggacagtccgcagaattaggatcaatctcgtactggctctcatatacaatttggtgggaattcccatcgcagcaggagtgttcatgccaataggcattgtcctacagccctggatgggatccgctgccatggctgcttcatctgtgagcgtggtgctttccagcctgcagctgaagtgctataagaagcccgacctcgaaaggtacgaagcccaggcgcatgggcatatgaagcccttgactgcatcccaagtgagcgtgcatattggtatggacgatcgctggcgggatagtcccagggccactccatgggaccaagtgtcttacgtgagccaggtttcattgtcttctttaacctccgataagccttctcgccacagcgccgctgccgacgatgatggtgataagtggtctttgttgctgaacggcagagacgaggagcagtatatctag

SEQ ID NO: 4247 - DNA, 4164 bp, synthetic construct
  misc_feature 1..4164: note = source = /note="Description of Artificial Sequence: Synthetic coding sequence"
  source 1..4164: mol_type = other DNA
atgcccgaacaagagagacagataacagcaagggaaggcgcatccagaaagatcctgtcaaaactgagcttgcccactcgcgcatgggaaccggcaatgaaaaaatcttttgcattcgataatgttggctatgagggtggactcgacgggctcggaccaagctcacaagtcgctaccagtacagtgcggatcctgggcatgacttgtcagtcctgtgtcaaaagcatagaggaccgcatcagcaacctgaaaggaatcatttccatgaaagtgtcacttgagcaggggtcagctacggtgaaatacgttccctctgtggtctgtcttcagcaagtctgccatcagatcggtgacatgggctttgaggcaagcatcgcggagggcaaagctgcctcttggcccagtcgctcactccccgcacaggaagccgtggtgaagttgagggtagagggcatgacctgccaaagctgtgtgtcttccatcgagggcaaagttcgcaaactgcagggggtggtaagagttaaagttagtctttccaaccaagaggctgtgattacttatcagccctacctgattcaaccggaggatttacgggaccatgttaatgacatgggctttgaggcagcaattaagtccaaggtagcaccactgagtcttggcccaatcgatattgagagactgcagagcacaaatcccaagcgacccctgagctctgccaatcaaaattttaataactctgaaacccttgggcatcaagggagtcatgtagttacattacaactgagaattgatggaatgcactgcaaatcctgtgtactcaatatcgaggaaaacattgggcagctactaggcgtgcagagcatccaggtcagtctggaaaacaagacggcccaggtaaagtacgatcccagttgtacgtccccagtcgccctccaaagagctattgaagccctgccacctggcaactttaaggtgtccttgccagacggggcagagggcagcgggacggaccataggtcctcatcaagtcactcccccggatcgccccctaggaatcaagtgcaggggacctgtagcacgacattaatcgcgatcgctgggatgacatgtgcttcatgtgtgcattcaatagaaggcatgatctctcaactcgagggcgtccaacagatcagtgtgagtcttgccgagggcacagccacagtcctctacaatccttccgtgatttcacctgaggaacttcgggcagctattgaggacatggggttcgaggctagcgtggtcagcgaaagctgttcgactaacccactggggaatcatagcgcagggaactctatggtccagaccacggacggtactcctacatcagtgcaagaagtggctccccatacagggagactgcctgctaaccacgctccagacatcctggccaaaagtcctcagtcaacccgggcagttgcccctcagaaatgctttctgcagatcaaggggatgacctgcgcgtcctgcgtgtctaacatcgagagaaatctgcagaaagaggcaggcgtcttatcggtcctcgtggccctcatggccggaaaggccgaaataaaatacgatcccgaggtgatacagcccttagagattgctcagtttatacaggacctgggattcgaagctgcggttatggaggattatgccggaagcgatgggaacattgagttaacgatcactggcatgacatgcgcctcgtgcgttcataacatagaatctaaattgacccgcactaatggcatcacgtacgcatccgtcgcgcttgctacatcaaaggcactggtaaagtttgaccctgaaatcatcggacctcgggacattatcaagattatcgaagagataggctttcatgcctcattggcccagcgtaaccccaacgcccatcacctggaccacaaaatggaaatcaaacaatggaaaaagtcattcctctgctcactagtcttcggtattcctgtgatggcgttaatgatttatatgctcatcccgtcaaacgagccgcaccagtcaatggtgttggatcataacatcatcccaggtctttctatccttaatcttatttttttcattctctgtaccttcgtacagagtaaaacttccgaggccctggctaagctcatgagcctccaggcaacagaggccacggtcgtgactttgggggaggacaatttaattatcagggaggagcaggtacccatggagctggtgcagcggggagacattgttaaagttgtgcctggtggcaagttccccgtcgatgggaaggtcctggagggcaacaccatggctgatgaatctctcatcacaggggaagccatgcctgtgactaagaagccgggatccaccgtgatcgctgggtctataaacgctcatggctcagtcctgatcaaagctacacatgtcggcaacgacaccacgcttgcccaaatcgtcaagctggtggaggaagcacagatgtctaaggcccctattcagcagctcgctgacaggttctcgggatactttgttccattcattatcatcatgtccacgctcacactggtggtatggatcgttataggctttatagactttggtgttgtccaacgctacttccctaaccccaacaaacatatttcacagacagaggtgatcatcaggttcgccttccaaacttctattacggtgctgtgtatcgcctgcccttgttcgctgggactggcgacacccaccgccgttatggttgggacaggtgtggccgcacaaaacggcatccttatcaagggtgggaaacctcttgagatggcccacaagataaagacggtgatgttcgataagactgggactattacccacggggtgccccgtgtgatgcgagtcctgctgctcggggatgtcgctacactgcctcttcgaaaggtcttggctgttgttgggactgccgaagcatctagcgaacacccactcggagtggcagttacgaagtactgtaaggaggagctggggactgaaactctgggatactgcaccgactttcaagctgtgcccggttgcggcatcggatgcaaggtctctaatgtggaaggcatcctggcccatagcgagcgtcccttgtccgctcctgccagtcacttgaacgaggccggatccctgccagcggaaaaggacgccgtgcctcaaacattcagtgttcttatcggtaatcgcgagtggctgcgcaggaacggccttactattagcagcgatgtttcagatgccatgactgatcatgagatgaagggccagacagccatcctcgtggccatcgacggtgtgctttgtggcatgattgcgattgccgacgctgtcaaacaggaggctgctttagctgtgcataccctgcagtcaatgggtgtggatgtggtcctgataactggggataatagaaaaacggccagggccatcgccacccaggtgggcattaataaggtcttcgcagaggttttgccaagccacaaggtggcgaaagtgcaggaactccaaaataagggtaaaaaggtggcgatggtcggcgacggagtaaacgactctccagcgctcgcgcaggccgacatgggagtcgccatcggtaccggtacagacgtcgccattgaggcagccgacgtggtgttgattagaaacgacctgctggatgtggtggcttccattcacctgagcaaacgaactgtcagaagaatccgcattaatcttgtgctagcattaatctacaatctggtcggcatcccgatagctgcaggcgtgttcatgccaatagggatcgtacttcagccttggatgggatctgcagcaatggcagcatcttctgtctccgtggtgctgtcttccttgcagctgaagtgttataagaaaccggacctggaacgctatgaggcacaggcacacgggcacatgaaaccacttaccgcgtctcaagtatccgtacatatcggcatggacgataggtggagagactcacctcgcgcaactccttgggatcaagtgtcgtacgttagtcaggtttctctgagtagcttaacaagcgacaagccgagccgccattctgctgctgcagatgatgatggagacaaatggtctctgctcctgaacggaagggatgaggagcagtatatttag

SEQ ID NO: 4248 - DNA, 1587 bp, synthetic construct
  misc_feature 1..1587: note = source = /note="Description of Artificial Sequence: Synthetic coding sequence"
  source 1..1587: mol_type = other DNA
atgaagaagtctttcgcatttgataatgtcggatacgagggagggcttgacggcttagggccttcgagtcaagtcgcaacttccaccgtgcgcatcctcggcatgacctgccagagttgtgttaaaagtattgaagatcggattagtaatctgaaaggcatcattagcatgaaggtgagtttagagcaaggctctgccacggtgaagtatgtgccctcagtggtgtgtttacagcaggtgtgccaccagataggcgatatgggtttcgaagcctccatcgcggagggtaaggccgcaagttggccatccagatccctcccagcacaggaggccgtggtcaaactgcgggtggaaggtatgacatgtcagagttgtgtctccagtatcgagggtaaggtgagaaaactgcagggcgtcgtgagggtcaaggtgagtttgagcaatcaggaggctgtgatcacttaccaaccttacctgatccagcccgaagacctcagggaccatgtcaatgacatgggctttgaagccgcaatcaaatctaaggtggctccccttagcctcggacccattgatatcgagcggctccagagtaccaaccctaagagacccctgtcatcagctaatcagaacttcaacaactctgaaaccttgggccaccagggatcacacgtagtcactcttcagctgcgcattgacggcatgcattgcaagtcttgcgtgctgaacattgaggagaacatcggacaattgcttggagtacagtcaattcaggtgtccctggaaaacaaaaccgcccaggtgaaatatgaccctagctgcacctcaccagtcgccctccaaagggctatcgaggcattgcccccaggcaattttaaggtgtctcttcccgatggcgcagaggggtctggaacagaccatagatccagctcttcgcacagtcctgggagcccgccacggaatcaggtgcaaggcacctgttcaaccaccttgatagcaatcgccggtatgacctgcgcaagctgcgtgcattctatagagggaatgatatcacaactggagggcgtacaacagatcagcgtcagcctggcagagggaactgccacagttctatataacccatccgtgatctcccccgaggaactgcgggcagctattgaagacatgggctttgaagcttctgtagtgtctgagtcttgcagtacgaaccccctggggaaccacagcgcaggtaattccatggttcagacaactgatggaaccccaactagcgtacaagaggtagcaccacatacagggaggctgcccgcaaaccacgctcccgatatacttgctaagagcccacagtcaacccgcgcagtggccccacaaaagtgctttctgcagataaaggggatgacctgtgcttcctgtgtgtccaacattgagcgtaacctacagaaagaagccgctcctcgatgggtggtcctgttaagatccggcctgcaaattagtgagacgcaggtgagccagcacggacgggctcaccggcctggacacaagcattgtctctgcctgtttagtggacaccccggaggctgttgtggatag

SEQ ID NO: 4249 - DNA, 3966 bp, synthetic construct
  misc_feature 1..3966: note = source = /note="Description of Artificial Sequence: Synthetic coding sequence"
  source 1..3966: mol_type = other DNA
atgtctgacagcgtgatcctgcggagcatcaaaaagtttggcgaggagaatgacgggtttgagtcagataaaagctataacaatgataaaaagagtcgattgcaggatgagaagaagggggacggagtccgtgtgggcttcttccaattgttccgtttttcaagttctacagacatttggctcatgtttgtgggctctctgtgtgccttcttgcacggcatcgcacaaccgggagtcctcctcatcttcggaaccatgacagacgtttttatagattatgatgtggagctccaggagttgcagattccgggaaaagcgtgcgtcaacaacacaatagtttggactaattccagtttaaaccagaatatgactaacggaactcgatgcggtctcctgaatattgagagcgagatgattaagttcgccagttattatgctggtattgcagttgccgttctcatcactggctatattcagatctgcttttgggttatcgccgctgccaggcaaatccagaaaatgaggaaattttatttcagacggatcatgagaatggaaatcggctggtttgattgcaactccgtgggtgagttgaatacacgattctccgacgatataaacaaaataaacgatgccatcgctgaccagatggccttattcattcaacgaatgacaagcaccatctgcggatttctgcttgggttttttcgtggatggaaactcactctcgttatcatttcagttagtccactgatcggtataggcgcagctacaatcgggctctccgtcagcaagttcacagattacgagcttaaagcctacgctaaagcgggagtggttgcggacgaggtgatcagtagtatgagaactgttgccgcatttggtggcgaaaagcgcgaggtggagagatacgagaaaaatctcgtgtttgctcaacggtgggggatccggaagggaatagttatgggcttctttaccgggtttgtttggtgcctgatctttctgtgctacgctctcgctttctggtatgggtctactctggtgctggacgagggcgaatatacccccggaaccctggtacaaatctttcttagtgtaattgttggtgccctgaacctcggtaacgcctctccttgtctggaggccttcgctaccggaagagcagccgctacgtctatctttgaaaccatagacagaaagcccatcatagattgcatgagcgaggacgggtacaagctggataggattaaaggtgagattgaattccataacgtaactttccactaccctagcaggccagaggtgaagatcttaaatgacctgaacatggtgatcaagcccggagagatgacagccctagttggtcctagcggcgcaggcaagagtacagccctgcaattgatccaacggttttacgatccctgtgagggtatggtgaccgtggacggtcacgacattcggtcactcaacatccagtggcttcgcgatcaaattgggatcgtggaacaggagcccgtgctgttcagcacaacgatcgctgaaaatatccgatacggcagagaggatgccaccatggaagatatcgtgcaggccgcaaaggaggccaacgcttataacttcatcatggatctgcctcaacagtttgacacgttagtcggtgagggcggaggccaaatgtctggaggccaaaaacagcgtgtggccattgccagggccctcattagaaatccaaaaatcttactactcgacatggctacatctgccctcgacaatgagtcagaggcaatggtgcaagaagtgttgtctaaaattcagcatggccataccattatttcagtagctcacagattgtccacagtgcgtgcagcggatactataattggcttcgagcatgggactgccgtggagcgcggaacccacgaggagctgctggagcgaaaaggagtttactttacactggtgactctgcaaagtcagggaaaccaagccctgaatgaggaagacatcaaagacgcaactgaggacgatatgctggccagaacattttcgaggggttcttaccaagactctctgcgggctagtataagacagagatcaaaaagccagttgtcctatttagtgcacgaaccgccactcgccgtcgtggaccacaagtctacttatgaagaggataggaaggataaggatattcctgtgcaggaagaggttgaacctgcgcctgtaagacgaattctgaaattcagcgccccagaatggccatacatgcttgtggggtccgtaggcgcagctgtgaacggcactgtcacacctctgtacgcatttttgtttagtcagatcctcggaaccttttcaatcccagacaaggaggagcagaggtcccagattaatggcgtgtgcttgcttttcgtcgccatgggctgtgtcagcctttttacgcagttcttacaaggatacgcgttcgccaaatccggcgaactgctgaccaagcgattgcgtaagttcggttttagggcaatgttgggccaggacatcgcttggtttgatgacctgcggaattctcctggagcacttaccactcggttggcaaccgatgcctcccaggtgcaaggcgctgccggtagtcagatcggcatgatcgtcaacagcttcacaaatgtcaccgttgcaatgattattgcctttagcttttcctggaaattgagtctcgtaatcctgtgtttttttccttttctggccctctcaggcgcaacccaaacccggatgttaacaggatttgctagcagagacaaacaggcactcgagatggtggggcagataacgaacgaagcgttatcaaatatccggaccgtcgccggtatcggcaaagagcggcgattcatagaagcacttgaaaccgaattggaaaaaccttttaagacagctattcaaaaagctaatatttacgggttctgctttgccttcgcccagtgcataatgttcatcgccaacagcgctagttaccgctacggaggctacttgatcagcaatgaaggtcttcacttctcatacgtgtttagagtcatctccgccgttgtgctatccgcaacggcgctgggacgcgctttcagctacaccccatcgtatgctaaggctaaaatctctgctgcacggttttttcagctgctcgacagacagcccccaatttccgtgtacaataccgcaggagagaaatgggacaacttccagggtaagatcgattttgtggactgtaagtttacgtacccttcccgacctgacagtcaggtacttaacggtctgtcagtgagtatttcacccggacagacattagcctttgtgggtagctccggatgcgggaagtccacatccatccaactccttgagcggttttacgatccggaccagggaaaggtgatgatcgatgggcacgacagcaaaaaggtgaatgtgcagtttctgcgaagcaacatcggcatcgtgtcgcaggaacctgtgcttttcgcgtgcagcatcatggacaacataaaatacggagataatacaaaggagatccccatggagagagttatagccgctgctaagcaggctcagttgcacgacttcgtgatgtcactgcccgagaagtacgagaccaacgtcgggtctcaagggagccagctttcccgtggtgagaagcagagaatcgcaatcgccagggccatcgttagagatcccaagatattgcttctcgatgaagccacttctgccctcgataccgaatcggagaagacagtgcaggtagcattggataaggccagagaagggcgtacgtgtatcgtcatcgcccacaggctctcaacaatccagaatgctgatattatagctgttatggcacagggagtcgtgatagaaaaggggactcacgaagagctcatggctcaaaagggtgcctactataagctggtgacaactggctcaccaatctcttag

SEQ ID NO: 4250 - DNA, 3861 bp, synthetic construct
  misc_feature 1..3861: note = source = /note="Description of Artificial Sequence: Synthetic coding sequence"
  source 1..3861: mol_type = other DNA
atggaccttgaggccgcaaaaaatggaactgcatggcgcccaaccagtgctgagggagactttgagcttgggatcagctctaaacagaagcgtaaaaaaaccaaaaccgtgaagatgatcggggtgctgacactcttccggtattctgactggcaagacaaactttttatgtccctgggcaccataatggcaatcgcacacgggtccgggctgcctttgatgatgattgtgttcggagaaatgacggacaaattcgtcgacactgccggaaacttctcattcccggttaacttctccctgtctttgttaaacccaggtaagatacttgaagaagagatgacaaggtacgcttattactactcaggtctcggtgctggcgtgctggtcgcggcttatatccaagtgtcattttggaccttggcggcagggaggcaaatcagaaagattcgtcagaaattcttccacgccatcctgcggcaagagataggatggtttgatataaacgacaccactgaacttaatactcgactgacagatgacatctcaaaaatatccgagggcattggtgataaagtcggcatgttcttccaagctgtcgcgacattttttgctggttttatcgttggctttataagggggtggaaactaactctcgttatcatggcaatatctcctattctcggcctgagcgctgctgtgtgggcaaaaattttatctgcatttagcgataaagaacttgcagcgtacgccaaagccggtgcagtcgctgaggaagctctcggggcaattcggacagtgattgcatttgggggacagaataaggaactggagcgatatcagaaacatctggagaacgccaaagaaatcggaatcaagaaagcaataagcgccaacatcagcatgggtatcgcgtttctcttgatttacgccagttatgccctggccttttggtacggctctactctggtaatttcaaaggaatatacgatagggaacgccatgacggtttttttttccatcctgattggtgccttttctgtggggcaggcggctccatgtatcgacgcctttgctaatgctaggggagccgcatatgtgattttcgacatcatcgacaataacccaaaaattgactccttctcggagagaggtcataagccagacagcattaaggggaacttagagttcaacgatgtccacttctcataccctagcagagccaacgtcaaaatcttgaaaggcttgaacctgaaggtgcagagcgggcagaccgtggcactcgtgggctcatcagggtgcggcaaaagtacaacagtgcaattaatccagagactgtatgatcccgatgaaggaacaataaatatagatgggcaagacattcgtaatttcaacgtcaattatttgcgggagatcatcggcgttgtgtcccaagaaccggtgcttttcagcactaccattgcggagaatatttgttatggacgagggaacgtgaccatggacgagatcaagaaagccgtcaaggaggcaaacgcatacgagttcatcatgaagctaccccagaagttcgataccctggtgggagagcggggagcccagcttagcggagggcagaaacagaggattgcaatcgccagagcactcgtaaggaatcctaagatcctcctgttagatgaggccaccagcgctttggacactgaatccgaagctgaggtgcaggccgcattggataaggccagggaagggcgtacaacgatagtgattgcacaccgcctgtctaccgtccgcaatgccgatgtgatagccggattcgaggacggcgtgatcgtggaacaggggtcccacagtgagctgatgaaaaaggagggagtttattttaagctagtaaatatgcaaacgagtggctcccagattcagagcgaagagttcgaactgaacgacgagaaagccgcaaccagaatggctcccaacggctggaagtcccgtctattcaggcatagtacacaaaagaatctcaaaaacagccaaatgtgtcagaaatcccttgacgtggaaaccgatggcttagaggccaatgtcccccctgtctcatttttgaaggtgctgaagttaaataagactgagtggccctacttcgtggtcggcactgtgtgtgccattgcgaacgggggtcttcagcccgcatttagcgtgatcttttctgaaattatcgccatcttcggcccaggcgacgacgctgtgaagcagcagaagtgcaatatcttcagcttaattttcttgtttctaggcatcattagtttctttaccttcttcctgcagggcttcacctttgggaaagcgggagaaatcctcacccgcagactgaggagtatggccttcaaagcaatgcttaggcaggacatgtcttggtttgacgatcataaaaatagcacaggtgcgttgtctactcgcctcgcaacggatgccgctcaggtgcaaggggcaactggaactaggctggctttaatcgctcagaatattgctaacctggggacaggcattatcattagctttatctatggctggcagctgactctgttactcttggcggtggtgcccattattgccgtgagcgggatcgttgaaatgaagttgctcgctggcaatgccaagcgggacaagaaggaactcgaagccgcagggaagattgccacggaagcaattgaaaatatccgaacggttgtcagtttaactcaggagagaaagtttgaatctatgtacgtggagaagctctacggcccttataggaattccgttcagaaggcccacatttatggcatcacttttagtataagtcaagcctttatgtatttcagctacgctggatgttttcgctttggggcttacctaatcgtgaatggccatatgcgttttagggacgtcatcctagtgttcagcgctattgtgtttggcgcagttgcccttggacatgctagttcctttgctcccgactatgccaaggcaaagctatcggccgcacacctgttcatgctgttcgaacgccaacctcttattgatagctactcagaggagggactaaaaccagataagtttgaggggaacattacttttaacgaggttgtgtttaactatcctaccagggccaatgtgccggtactgcaaggcctcagcctcgaagtgaagaagggccaaacgctcgccttggtgggctcatcggggtgcgggaaatctaccgtggtgcaactcctcgagcggttttacgatcccttggcgggaacagtctttgtggacttcgggttccagctcctcgacggccaggaagcaaaaaaactgaatgtccagtggcttcgggctcagctcggtatagtgtcccaggaaccgatcttatttgattgtagtatcgccgagaatatcgcttatggcgataattccagagtggtgtctcaggatgaaatcgtctctgccgctaaagctgccaatatacaccctttcattgaaacactcccccataagtacgagactcgcgttggcgataagggcacacaactgtctgggggacagaagcaacgcatcgccattgcaagagcactgattcgccagcctcagatcctcctcttagacgaggctacgagcgccctagataccgagagtgaaaaagttgtccaggaggcacttgataaagccagagagggccgaacatgtatcgtcattgcccacaggctttcaacgatacagaatgctgatcttattgtggtgtttcagaatggaagggtgaaggagcacggtacccaccaacagctgctagcccagaaaggtatctatttctctatggtatccgtgcaggcagggacccagaacctctag

SEQ ID NO: 4251 - DNA, 3699 bp, synthetic construct
  misc_feature 1..3699: note = source = /note="Description of Artificial Sequence: Synthetic coding sequence"
  source 1..3699: mol_type = other DNA
atggacctagaggctgcgaagaatggcactgcttggcgccctacatctgcggaaggggattttgaactcggcataagctcaaagcagaagcggaagaaaaccaaaacagtaaaaatgatcggagttctgacactctttagatacagcgattggcaggataaattattcatgtctttaggtacaattatggcgatagcacatgggtccggcctgccacttatgatgattgtgttcggtgagatgaccgacaaatttgtggacactgccggtaacttcagcttcccggtgaacttttcactttccctgctgaatcccggaaaaatcttggaggaagagatgacacggtacgcctattactactcggggctgggggcaggagtgcttgtagcagcctacatccaggtgtccttttggacactggctgccggtaggcagatccgaaagattcgccaaaagttcttccatgccatattgagacaagaaattggctggttcgacataaacgatactactgagttgaacacacggcttactgacgatatctccaagatctcagaagggattggcgataaagtgggaatgttcttccaggccgtcgcgacattcttcgcagggttcatagtgggattcatcagggggtggaagctgaccctggtgataatggcgatttcccctatcttaggtctatctgctgccgtttgggctaagattctgtcagcctttagtgataaagagttggccgcatatgccaaagccggagctgtggcagaagaggctcttggtgccatcagaaccgtaatagctttcggcggacagaacaaggagctggaacgctatcagaaacatcttgaaaacgccaaggagatcgggatcaaaaaggctatttccgctaatatctccatgggaattgcctttctgctgatctatgcctcctacgctctcgcattctggtatggaagtactctggtcatcagtaaggagtacacaatcggaaatgccatgacggtgttctttagtatcctgatcggagccttttccgtgggacaagctgcaccatgcattgatgctttcgccaacgctaggggcgcagcttacgtgattttcgacattatagacaataatccaaagatcgattcattttccgagagagggcacaagcccgattcgattaagggaaacctggagttcaacgatgtccacttttcgtacccaagcagagcaaatgtgaaaattctgaaaggattaaatcttaaagtgcagagtggccagactgtggcccttgtgggttcttctggatgcgggaaatctacaaccgtgcagctaattcaacgcctgtacgaccccgacgaggggactatcaatatcgatggccaggatattcgtaactttaacgtcaactacctgagagagatcatcggcgttgtgagtcaagagcctgtactcttctccaccactatcgcagaaaatatctgttatggacggggtaacgtgactatggatgaaatcaagaaggctgtcaaggaagccaatgcatacgaattcattatgaaactgcctcaaaagtttgatacactggtgggggaacggggagctcagttgtccgggggacagaaacagcgaatcgcgattgcacgggctttagttcggaaccccaagattttgcttctggatgaggcaacatccgctctcgatactgagtcggaggcagaggtgcaggccgcacttgataaagcgagggaaggccgtaccaccatcgtgatcgcccatagactctcaacggtgcgcaacgcagatgttattgccggttttgaagacggggtgattgtggagcaggggtcacacagcgagctcatgaaaaaggagggagtatactttaagcttgtgaacatgcagaccagcggatcccagatacagtccgaggaatttgaacttaatgacgagaaagccgctactaggatggctccaaacgggtggaaatctcgactttttcggcacagtacccaaaagaacctcaaaaattcacagatgtgtcagaagtcccttgatgttgagacagatgggctggaagccaacgtccccccagtttcatttctgaaggtgttgaagctcaacaaaactgagtggccttatttcgtcgtagggacagtttgcgccatcgcaaacgggggattgcaaccagcattttccgtgatcttttctgaaatcatcgcaatctttgggcctggtgatgacgctgtgaaacaacaaaagtgcaacattttttcactgatctttctattcttgggcatcatttccttttttacttttttcctgcagggcttcacgttcgggaaagccggagagatcctgaccaggcggttgaggtccatggcattcaaggctatgcttagacaagatatgtcctggttcgatgaccataaaaacagcaccggcgctttaagcacccgactcgccacagatgctgcacaggttcagggagcaactgggactcggctcgccttaattgctcaaaacatcgccaatctagggaccggcataatcatctctttcatctacggctggcaacttacgttgctgttgttagccgtagtacccataatagctgtctctggtattgtggagatgaagctgctggcgggaaacgcgaagcgagacaagaaggagcttgaagccgctggaaagatcgccactgaagcaatcgaaaacatccgtaccgtggtgtccttaacacaggaacgcaaattcgaaagcatgtacgttgaaaagctgtatgggccttacagggtgtttagcgctatagtattcggcgctgttgcacttggccacgcctcaagctttgcgcctgactacgctaaggccaaactgtcagccgcacatctttttatgttattcgaacggcagccactaattgatagctactctgaggagggactaaagcccgacaaatttgagggtaatataaccttcaacgaggtcgtgttcaactaccctacccgtgctaatgtacctgtgctgcaaggattgagcttggaagttaagaaaggacagactctggcccttgtaggttcgagcggttgcggcaagtccacagttgtgcagttactagaaaggttttatgatcccctggctggtactgtccttcttgatggacaggaagccaaaaagcttaatgtccagtggctcagggctcagcttgggatcgtgagccaggagcccattctctttgactgcagcattgccgaaaatatcgcatacggcgataactcccgggtcgtgagccaggacgagatcgtaagcgccgcaaaagctgcaaacattcaccccttcattgaaacacttccccacaagtacgagactagggtgggtgacaagggtacccaactgagtggtgggcagaaacaacgcatcgctatcgccagggctctgattcgccagcctcagatcctgctgctagacgaggccacctccgccctggacaccgagtccgaaaaggttgtgcaggaggctttggacaaggccagagaaggaaggacgtgcattgtcatcgcacatcgattatcaaccattcaaaatgccgatctgattgtcgtttttcagaatggcagagtaaaggaacacggtactcaccagcagctgctagctcaaaagggaatatacttctcaatggtaagtgtccaggccggaacgcagaatctctag

SEQ ID NO: 4252 - DNA, 3840 bp, synthetic construct
  misc_feature 1..3840: note = source = /note="Description of Artificial Sequence: Synthetic coding sequence"
  source 1..3840: mol_type = other DNA
atggacttggaggcagcgaagaatggaaccgcgtggagacctacttcagctgaaggggatttcgagctgggcatctcttcaaagcagaagagaaagaagactaaaacagtgaaaatgataggcgttttaacccttttccgttattcagactggcaggataaactcttcatgtccctgggtaccatcatggccattgcacatgggtcaggcctcccattgatgatgatcgtatttggagaaatgaccgacaagtttgttgatacagcaggcaacttttctttccctgttaacttcagcctcagtctgttgaacccagggaaaatccttgaggaggaaatgactagatatgcctattactactcagggttgggagctggggtgttggttgccgcatatatccaggtgagcttttggactttagccgctggaagacagatccggaagattcgccagaaattcttccacgccattctgcgacaagaaattggctggtttgatatcaatgatactaccgaacttaacacccgtttaaccgacgacatctctaaaataagtgaggggattggagataaggtgggcatgttttttcaagcggtcgccactttcttcgctgggtttatcgtgggcttcattcgcggttggaaactgacccttgtgattatggccatttcgccaattttggggctttctgcggcagtttgggctaaaatcctttcagccttcagcgataaggaactggcggcttatgcaaaggcaggagccgtcgcagaggaggccctaggggctatcagaacagtgatagcctttggaggccaaaacaaggagttagaaaggtaccagaagcacttggaaaacgctaaggagatagggatcaaaaaggctattagtgccaatatttcaatgggcattgctttcctcctcatctacgcctcctacgctctggccttctggtatggttccacccttgtgatttccaaagaatacactataggtaacgccatgacagtgttctttagtatcctgatcggggcattttccgtgggccaggcagccccttgtattgatgcattcgccaatgcacgtggagctgcctacgtcatttttgatatcattgataacaaccccaaaatcgattcttttagcgaacggggacataaacctgatagcattaaaggcaaccttgaatttaacgacgtccatttttcctatccatcacgagctaatgttaaaatcctgaaggggcttaacctgaaagttcagagcggtcagaccgtggcgctagttgggagcagcgggtgtggaaagagtactaccgtgcagctgatacagagactttatgaccccgacgaaggcaccattaacattgacggccaggacatccggaattttaacgtcaattacttgcgagaaattatcggggtggtcagccaggaacctgttcttttttcgacaactatcgccgaaaatatttgctatggacggggtaacgtgactatggacgagatcaagaaggctgtcaaggaagccaatgcatacgagtttatcatgaagcttcctcagaagtttgacactctggtgggagagcggggagcccagctcagtggagggcagaagcagcggattgctatcgccagagcactggtgcgtaatccaaagatattactcctggatgaggccacctccgctctggatacagaatctgaagcggaagtccaggcggcattagacaaagctagagagggaagaactaccatcgttatagctcaccggctcagcacggtgcgtaatgctgacgtgatagctggcttcgaggacggcgtgatagttgagcagggtagccattctgaactaatgaagaaggagggagtctatttcaaacttgttaatatgcaaacttccggctcgcaaattcaatcagaggagttcgagctgaatgacgagaaggccgctactcgcatggcgcctaacgggtggaaatcacgcttgtttaggcactccacacagaaaaatctgaagaactcgcaaatgtgtcagaagtctctggatgttgagactgacggtctggaggccaatgtgcccccagtgtcttttctgaaagtgctcaagcttaacaaaactgagtggccctatttcgtcgtgggtacggtgtgtgcaattgccaatgggggactgcagcccgctttcagtgtcattttctcagaaataattgccatcttcggccctggcgatgatgccgtgaagcagcagaaatgcaatatattctcactcatcttcctgtttctcggcataatcagcttctttacattcttcctgcagggctttacttttggaaaggcaggagaaattctgacgcggcgtctgcggtccatggcatttaaggcgatgttgaggcaggatatgtcctggtttgatgaccataagaactcaactggcgcattgtcgactagattggccaccgatgccgcacaggtgcagggggctaccggtactcggctggcccttatcgcacaaaatattgcaaatttgggaaccggaattatcatatcctttatttatggctggcagttaacactgctgctacttgctgttgtccccatcatcgctgtctcaggcattgtagaaatgaagctgctggccggtaatgccaagcgggacaaaaaggagttggaggccgcaggcaagatcgcgactgaggcaatcgaaaacattcggactgtagtctcccttacacaagagcgcaaatttgagtctatgtacgttgaaaaactgtatggaccttaccgtaattctgtgcagaaggctcacatatatggtattaccttctccattagccaggcattcatgtatttcagttacgctgggtgcttccgctttggcgcatacttaatcgtgaatggacacatgcgattccgcgatgttatcttagtgttctcagcaattgtgttcggtgcagttgctttgggtcatgcttcaagctttgccccagactatgctaaggctaaactttccgccgcacacctctttatgctcttcgaacgacaaccactaatcgactcttattccgaggaggggctgaagcctgataagtttgaaggcaatataacgtttaacgaagtcgtgtttaattaccctactcgggctaacgttcctgtcctgcaaggactctctctggaggtcaaaaagggccaaactctcgccctcgtaggttcttcaggatgtggaaagagcactgttgtgcagcttctggagcgattctatgacccgttggcgggtacagtgctcctggatggacaggaggctaagaagcttaacgtgcagtggctccgagctcaactgggcatcgtgagccaggagcccatcctcttcgactgctccatcgcggagaacatcgcttacggcgacaactcgcgggtggtcagccaggatgaaatcgtgtcagcagccaaagcagccaatatccacccgttcattgaaactctgccacataagtacgagacccgcgtgggagacaaggggacccaactctccggaggtcagaaacagcgaatagcaattgcacgtgcactgatcaggcagccgcaaatcttactgctggacgaggccacttccgccctggacaccgagtccgaaaaagttgtgcaggaagcgctggacaaggccagagagggcagaacgtgtattgtgatcgcccacagactaagcacaatccaaaacgccgatttaatcgttgtcttccagaacgggcgagtcaaggaacacgggactcatcagcagctcctggctcagaaaggcatttattttagcatggtgtccgtgcaggctggtacacaaaatctatag

SEQ ID NO: 4253 - DNA, 186 bp, synthetic construct
  misc_feature 1..186: note = source = /note="Description of Artificial Sequence: Synthetic coding sequence"
  source 1..186: mol_type = other DNA
atggatctggaagctgccaagaatggcaccgcttggcgtccaacttccgcagaaggagattttgagttaggaattagctccaagcagaagaggaaaaaaacaaagacagtgaagatgatcggcgtactgaccctgtttcgatattccgactggcaagacaagctctttatgagtcttgggacatag

SEQ ID NO: 4254 - DNA, 3699 bp, synthetic construct
  misc_feature 1..3699: note = source = /note="Description of Artificial Sequence: Synthetic coding sequence"
  source 1..3699: mol_type = other DNA
atggacttggaagccgcaaaaaatggtaccgcgtggagacccacatcggctgagggcgattttgagttaggaattagctcaaaacagaagaggaagaaaacaaagaccgtaaaaatgattggggtcttgacgctgtttcgctactccgattggcaagacaaacttttcatgtccctgggaacaataatggccattgcacacggttccgggctgccgctcatgatgattgtatttggagaaatgacggacaaatttgtggacaccgcagggaacttttcctttccagtcaatttctcactctccctgctcaatccaggcaaaattttggaagaagagatgacacgatacgcctattattactccgggctgggggctggagtcctagtggctgcatatatccaggtctcattctggaccctggccgctggtcggcagatccgcaagatcagacaaaagttcttccatgcaatattaagacaagagatcggttggtttgatattaatgataccaccgagctgaatactcggctgacggatgacatttccaagatatcagagggcatcggggataaggttggaatgtttttccaggccgtagcaacatttttcgccggtttcatagttggtttcatccgcggttggaagcttacgctagtgataatggccatctcaccaatattaggattaagtgcagcagtctgggccaagatcttgtccgcattctccgataaggaactggctgcctatgcaaaagcaggtgcagtggccgaggaggccttaggtgcaattagaactgtcattgctttcggaggacagaataaggaactggagcgatatcagaagcacctagaaaacgcaaaagagatagggattaaaaaagccatttccgctaacattagcatgggaatcgcgttcctgctgatttacgcaagctacgctctggcattctggtatggcagcacgttagttatttctaaggaatatacaattggaaacgccatgacagtgtttttttccatcctgatcggggcattctctgtcggtcaggctgccccttgcatcgatgccttcgcaaatgctcgtggggctgcttacgtgatcttcgatattattgacaacaaccctaagatcgattctttcagcgagcgcggacacaagcctgattctataaagggcaatttggagttcaatgatgtgcatttctcctacccttctcgcgctaacgtgaaaatactgaaggggctgaacttgaaggtgcagagcgggcaaacagttgccctggtggggagcagtggctgcgggaaaagcactaccgttcagctgatccaacgcttatacgaccccgacgagggcaccatcaatatcgacggacaagatattcgaaacttcaacgtgaattatctgcgggagatcattggagtggtatctcaggaaccggtgcttttctcaactaccattgccgaaaacatctgctacggcagagggaacgtgacaatggatgagatcaagaaagcagtgaaagaggcaaacgcgtatgagtttattatgaagttgcctcaaaaattcgacaccctagtgggtgagagaggggctcaactgtcagggggacagaaacagagaatcgcgatcgcacgcgcactcgtacggaatcccaaaatactcctgctggacgaggctacgtccgccctcgatacagaaagcgaagccgaggtgcaggcagccctggacaaggcgcgtgagggcaggactacaatcgttattgctcatcgactgtccaccgtacgaaacgccgatgtaatcgctgggttcgaagatggggttattgttgagcagggctcacactccgaacttatgaagaaggaaggcgtgtacttcaaactagttaatatgcaaacaagtggatcacagatccagagcgaggagtttgagttgaatgacgaaaaggctgcaaccaggatggctcctaatggatggaaatcacgacttttcaggcactctacccaaaagaatctcaagaattcccagatgtgtcagaaaagcctggatgtggaaacggacggactagaggcgaatgtgccacctgtgtcttttctcaaggtccttaagctgaataaaacagaatggccctactttgtggtgggcactgtgtgcgccattgccaacggtggccttcagccagcgttctccgtgatcttctctgaaatcattgcaatttttggcccaggcgacgacgccgtgaaacaacagaaatgcaatatatttagtctgatcttcctattcctgggcattatctcattttttacattctttctgcagggatttactttcggcaaagccggtgaaattctgacaaggaggctgaggagtatggctttcaaggcgatgcttcgtcaggacatgtcctggttcgacgaccacaaaaatagcaccggcgcattgagcacccgccttgcaacagacgcagctcaagtgcagggagctacaggcactcggctggcattaatcgctcagaatatcgccaatctgggcactggcattataatttcattcatctacggttggcaactcaccctcctgctcttggcagtggttcccattatcgccgtatctggcatagtggagatgaagctcctagcaggaaacgccaagagggacaagaaagaactcgaggccgcaggcaaaattgccacggaagccattgagaacatcaggacggtcgtcagcttgactcaagagaggaagttcgaaagcatgtatgtagaaaagctgtatggcccatacagggtgttctctgccattgtgttcggagctgtggcccttggacatgcctcttcttttgcacctgactacgctaaagcaaagctaagtgccgctcatttgttcatgctgtttgagcggcaaccccttatcgatagctactcagaggaagggttgaagccagataaattcgagggcaatatcaccttcaacgaggtcgtgttcaactatccgacgagagctaatgtgcctgtcttgcaggggctgagcctggaggtaaagaagggtcagactctggcacttgttggatccagtggctgtgggaaatcaacagttgtgcagcttctcgagcggttttacgatcccctggctgggaccgtgctgctggatggacaggaagcaaaaaagcttaatgttcagtggctcagagcccagttgggaattgtgtcccaggagcctatcctgttcgattgcagcatcgctgagaatattgcctacggagacaatagcagggtcgtgtcccaggacgagatcgttagtgctgccaaagcggcaaatatccacccattcatcgaaaccttgccccacaagtatgagaccagagtcggggataaaggcacacagttatcaggaggacagaagcagcgcattgctatagcgagagcgctcattaggcagccccaaatactgctcttagacgaggccacttcagctctggacacagaatcagagaaggtggtgcaggaggcactggacaaagctcgagaaggtaggacatgcatcgttatcgcccataggttaagtactatacagaatgcagatctgatcgttgtctttcaaaatggaagggtgaaggagcacggtacacaccagcagcttctggctcagaaagggatatacttcagcatggtgtctgtccaagccggaacccagaacctgtag

SEQ ID NO: 4255 - DNA, 3840 bp, synthetic construct
  misc_feature 1..3840: note = source = /note="Description of Artificial Sequence: Synthetic coding sequence"
  source 1..3840: mol_type = other DNA
atggatcttgaggccgcaaaaaatggaactgcttggcgtccgactagtgcagaaggcgacttcgaactcggaattagctccaaacagaagaggaaaaagacaaagaccgtaaaaatgatcggagtactcaccctgttcaggtactcagattggcaggacaagctgttcatgagcctcgggacaataatggccatagcacatgggtcaggcctccccctcatgatgatagtgttcggggagatgaccgataagtttgttgacaccgccggaaattttagctttccggtcaacttctctctgtccctcttaaatcccggtaagatcctggaagaagaaatgactaggtacgcttactattacagtggccttggagcaggagtgctcgttgctgcatatatacaggtcagcttctggacactcgcagcaggaagacaaatcagaaaaattagacagaagttcttccacgccattttacgacaagagatcggatggttcgacatcaatgacaccactgagcttaacacgcggttgactgacgacattagcaaaatctccgaaggcataggagacaaggtgggcatgtttttccaagccgtggccaccttctttgctgggttcatcgtgggttttatccggggttggaaactgacgctcgttattatggccatcagccccatcctgggtctgtccgccgcagtatgggcaaaaatcttgagcgcgttctctgacaaagaattagctgcatatgccaaggcaggcgctgtcgctgaagaggcactgggagctatcagaacggtgattgcgttcgggggacagaataaggaactggaacggtaccagaaacacctggagaatgctaaagagatcggcatcaagaaagccatctctgcaaacatatccatggggatcgctttcctcctgatctacgcaagctatgcactggctttttggtatggcagcaccttggtcatttccaaagagtacaccattggaaacgccatgaccgtttttttcagcatcctgatcggagccttttccgttgggcaggcggctccctgcattgatgcctttgccaatgcaagaggggctgcatacgtgatcttcgatatcatcgataacaaccctaagatagactcatttagcgaaaggggccataaaccagactccattaagggaaatctggagttcaacgatgtgcacttcagctatccttcgcgcgctaatgtaaaaatcctgaaaggtctcaacctgaaggtccagtccggccagaccgtggccctcgtgggaagcagcggctgtggcaaaagcaccactgtacagctgattcagagattgtacgaccccgacgagggcaccatcaatatagatggccaggacatcagaaatttcaatgtgaactaccttagagagatcataggtgtggtctctcaggaaccagtcctcttcagcacaactatcgccgaaaacatttgctacggacggggaaatgtcactatggatgagattaagaaggcagtgaaggaagcgaatgcttacgagttcatcatgaaactgccgcaaaaatttgatacacttgttggagaacggggagcacagctttcggggggacaaaaacagcgtattgcaattgccagggctctagttcggaacccaaagatccttctgctggacgaggccactagtgctctggatacagaatcggaggccgaggtgcaggccgctctggataaggcgagggagggcagaacaactatcgtgatagctcaccggctctccactgtccgaaatgccgacgtgattgcgggtttcgaggacggcgttattgttgaacagggcagccacagcgaactgatgaagaaggagggagtttacttcaagttggtcaacatgcagactagcggttcccaaatccagagcgaggagttcgaattgaacgacgagaaggcagcaacacggatggccccaaatggatggaaatctcgcctgttcaggcactccactcagaaaaatctgaagaatagccaaatgtgtcagaaaagcttggacgttgaaactgacggcctcgaagctaacgtccccccagtgtctttcttaaaagttctcaagttgaacaagacggagtggccatattttgtggtggggactgtttgtgccatagcaaacgggggattacagccggctttttccgttatcttctcagaaataatcgccatcttcggccctggcgacgatgccgtgaagcagcaaaaatgtaacatcttttccttgatattcctgttcctaggcattatatctttcttcacgttcttcctgcaagggttcactttcggcaaggccggtgaaattttgaccagaaggctgcgatctatggcgttcaaagccatgcttaggcaagatatgtcatggtttgatgatcacaagaacagtaccggagccctgtcaactagactggcaactgacgccgctcaggttcagggggcaactggtactagactcgctctcattgcccagaatatagcaaatctgggcactggtattattatctccttcatctatgggtggcagctaacccttctgctgctggcagttgtgcccatcatcgcagtatcgggcatcgttgaaatgaagctgctcgctgggaacgccaagcgtgataagaaggagttagaagctgctggcaagatcgccactgaagcaatcgagaacatccgaactgtcgtatcactgacacaggagaggaaattcgaaagtatgtatgtggagaagctgtatggcccatacaggaactctgtacaaaaagctcatatttatgggattacgttttcgatttctcaggccttcatgtattttagttatgcaggctgtttccgtttcggagcttacctaatcgtgaatggacatatgcggttcagggacgtcattctcgttttctcagcgatcgtgtttggagcagtggctcttggacacgctagttcctttgctcctgactatgctaaggctaagctgtccgcagcccacctgtttatgttgtttgagaggcagccactcattgactcatattcagaagaaggcctgaagcctgacaagtttgagggcaacatcacattcaacgaagtagtgttcaattatccgactagagctaatgtgcctgtgctgcagggcctatccctggaggttaaaaaggggcagactctggctctcgtaggctcctctgggtgtggaaagagtactgtggtgcagttgctcgagagattctacgatccactggcaggcacggtactgttggatgggcaggaggccaaaaaattaaatgtgcagtggctcagggcccagctgggcatagtaagtcaggaacccatcctctttgactgtagtatagcggaaaacattgcatacggggataattccagagtggtgagccaggacgagatcgtgtcagctgccaaggctgccaacattcacccctttattgagaccctgccacacaagtatgagacaagggtcggtgacaagggaacacagctctctggcggacagaaacagaggatagccattgccagagccctgattagacagccccagattctactgttggacgaggccaccagcgccctcgacacggagtccgagaaggttgtgcaagaagccttagataaggctcgggaaggcaggacctgtattgtcattgctcatcggctgagcacaatccagaacgctgatctgatcgtggtgtttcagaatggcagagtgaaagagcatggcacccaccaacaactcttggcacagaagggcatatactttagcatggtgagtgtgcaggccggaacccaaaacctgtag

SEQ ID NO: 4256 - DNA, 1464 bp, synthetic construct
  misc_feature 1..1464: note = source = /note="Description of Artificial Sequence: Synthetic coding sequence"
  source 1..1464: mol_type = other DNA
atgcgcgagaatatggccagggggccatgtaatgctcctaggtgggcctcactcatggtcctcgtggctattggcaccgcggttacggcggctgtgaaccctggtgttgtggtacgcatttcacagaaaggtctggattatgcctcccagcaggggactgctgccctccaaaaagaattaaaaagaatcaagataccggattactcagatagttttaagatcaaacacctcggcaaaggccactacagcttttactccatggatattagggaatttcagctgccctcaagccagatatcaatggtacctaatgttggactgaagtttagtatttctaacgccaacattaagatttcgggcaagtggaaagcccaaaagcggttccttaaaatgtccggaaatttcgacttatcaatcgagggcatgagtatcagcgctgaccttaaattaggctcgaatccaacctcagggaagcccaccattacctgcagcagttgttcatctcatattaattctgtccacgtgcatatctcaaaatctaaggtcggctggctcattcaactgtttcataagaagatcgaatctgccttgcgtaacaaaatgaattcacaggtgtgtgaaaaggtcacaaactccgtctcaagcgaactgcaaccttacttccagacgctgcccgtcatgaccaaaattgactccgtggccggtatcaactacggcctggtggcccctcccgcaacaaccgctgaaactctagatgtccagatgaaaggagaattctactctgaaaatcaccataatccccctcctttcgctccaccagttatggagttcccagccgctcatgatcgcatggtgtacctaggcctcagtgattatttttttaacaccgctgggctcgtgtatcaggaggcaggcgtgttaaaaatgacccttagagatgacatgatcccaaaagagtctaaatttagactcacaactaagttttttggaacattcttacctgaagtggctaaaaagttcccaaatatgaagatccagatccatgtgagcgcgtccacaccaccccacctgtccgtgcagcccacaggactgacattttacccagctgtcgacgtgcaagcattcgccgttctccctaactcaagcctggcttcactgttcctaatcggaatgcacacgacagggtccatggaagtgtcagccgagtcaaatcgactggtcggtgagttaaaattggacagactgctgttggagctcaagcactctaacatcggccctttcccggtggagctcctgcaggacatcatgaactacattgtccccatccttgtgctgcctcgggtcaatgagaaactccagaaaggattcccgctaccgactccggctagagttcaactctacaacgtcgtcctccaaccccaccagaacttcctcctctttggcgctgacgtcgtgtacaaatag

SEQ ID NO: 4257 - DNA, 1449 bp, synthetic construct
  misc_feature 1..1449: note = source = /note="Description of Artificial Sequence: Synthetic coding sequence"
  source 1..1449: mol_type = other DNA
atggacgagggaatcccacacctgcaagagcggcagcttttggaacaccgagactttatcggattggattattcaagcttgtatatgtgcaagcctaaacgaagtatgaagcgtgacgatacaaaggatacatacaagcttccacacagattgatcgagaagaagcgtcgagaccgtataaacgagtgtattgcccagctgaaggacctactgccagaacacctgaagctcacaactcttggccatttagaaaaggctgtcgttctggagttgacattaaagcacctgaaggccctgaccgctttgactgagcaacagcatcagaagattatcgcactgcagaacggggagcgttccctgaaaagccccatacagtctgatctggacgcatttcattctgggtttcagacttgtgccaaggaggttctgcagtaccttagccgcttcgagagttggacaccgagggagcctcgctgtgtacagcttatcaatcacctccacgccgtcgctacccagttcttacccacgcctcaactacttacacagcaagtgcctctctctaagggtacgggcgctccttccgcagcgggtagcgctgccgctccttgtcttgagcgggcagggcagaagctggaaccgctggcatactgcgtccccgtaatccagcggacccagccctccgctgaactcgcagcagaaaacgatacggatacggactccggctacggaggggaggcagaagccagacctgaccgcgagaaaggtaaaggcgctggagcaagtagagtgacaatcaagcaggaacctcccggagaagatagtccggcaccaaaacgcatgaaattggacagcaggggtggtgggtcaggaggcggtccaggcggtggcgcagcagctgccgctgcggcactactcggccctgatccagccgcagcagctgctctgcttagaccagatgccgctctgttatcctcacttgtggctttcggaggcggtggtggagccccttttccccagccggctgcagccgctgcaccattctgcctcccattttgctttttaagccccagtgccgctgcagcatacgtgcaaccattcctggacaagtcaggcctcgaaaaatatctctacccagccgctgcagccgctccattccccctgctgtatcccggaatcccagcccctgccgctgccgcagctgccgctgcagcggctgctgccgcagcggcagcttttccttgcctgagctctgtactgtcaccacccccagaaaaggcgggagccgcagccgctacactcctacctcacgaggtggcgccactgggcgctcctcatcctcagcatccccacggtagaacacatttgcccttcgctggccctagagaaccaggaaaccctgagtcatccgcacaggaggaccccagccagccaggaaaggaagcaccatag

SEQ ID NO: 4258 - DNA, 1113 bp, synthetic construct
  misc_feature 1..1113: note = source = /note="Description of Artificial Sequence: Synthetic coding sequence"
  source 1..1113: mol_type = other DNA
atggatgaggggatacctcacctacaagaaaggcaactgctcgaacatcgcgacttcatcggccttgattattcttccctttacatgtgcaaaccaaaacggagcatgaaaagagatgacacaaaggacacttacaaactgccccacaggctcatcgagaagaagagaagagatagaatcaacgagtgcattgctcaactgaaggatctcctgcctgaacacctgaaactaacaaccttggggcacctggagaaagctgtggtgcttgagctgaccctaaaacacctgaaagccttgaccgcactgaccgaacaacaacaccaaaaaatcattgcgcttcagaacggagagcgctcccttaaaagtcctattcaatcagacctggacgcattccactccggttttcaaacttgtgctaaggaggtgctacaatatctatctaggtttgaaagctggacccctcgcgaaccaagatgtgtccagctgattaaccatcttcacgctgtcgctacacagttcctcccaacaccccagctcctaactcagcaggtgcccctgtccaagggtacgggagccccttcagccgcagggtccgctgctgctccttgtctggagcgcgctggacagaaactggaaccattggcttattgcgttcccgtgattcagaggacccaacccagtgccgaactggcggctgaaaatgataccgacaccgactccggctatgggggagaggcagaggcccgtccggatcgggagaaggggaagggcgcaggggcaagccgagtcacgattaaacaagagccacctggcgaagacagtccaccacctccacctcgtagcccggcatgccccagatgttgcagaccattacccagaagacgggcaccccctcctcgacctagttgccgaactcgttggcggccattgggacgccgaacccccagcactcggacggcggcaccaacatgcccctccccgggacccgcttcaagaggtacaagaagggctctgttacggaagattcccagaagccaggaaagaaaactgcctgaaagcctgcgccctgagggtcgacgattcaaacagagtgagaagctgaaatatccttag

SEQ ID NO: 4259 - DNA, 1191 bp, synthetic construct
  misc_feature 1..1191: note = source = /note="Description of Artificial Sequence: Synthetic coding sequence"
  source 1..1191: mol_type = other DNA
atggtggccggtactcgctgcctgctggctctactactgcctcaagtacttctcggtggagcggcaggtctggtgcctgaattaggacgcagaaagttcgctgccgctagcagcgggaggccctcctctcagccgtccgacgaggtcctgagcgagttcgagctaaggcttctctcaatgtttgggttaaaacagcgccctacaccgtctcgggacgctgtggtgcccccatacatgctggatctgtatcgacgccactccggtcagcccggatccccagcacctgatcaccgactcgagcgagcggcttcgcgtgctaacaccgtcaggagtttccaccacgaggaatccttggaggaacttcccgagactagcgggaaaacaacacgtcgtttcttctttaacctgtcatcaattccaacagaagaattcattacctcagcagaattacaggtgttccgggaacaaatgcaggatgccctgggcaacaatagttcattccaccatcggatcaacatatacgaaattatcaagcccgctaccgctaactcaaaatttcctgttacgcggctcctggatacacgcctcgttaatcagaatgcttcgcggtgggagtcctttgacgtgaccccagccgtgatgagatggactgctcaaggtcacgctaaccacggtttcgtggttgaagttgcccaccttgaggaaaaacagggggtttcaaagcggcacgtgagaatcagccgctctctccaccaggacgagcacagctggagtcagattaggccactgctagtaactttcgggcatgatggtaaaggccatcccctgcacaagcgggagaagcgacaggcgaaacacaagcaacgcaagcgacttaagagttcctgtaaacggcacccactgtatgtggatttctccgacgtcggctggaacgattggattgtggccccacccggataccacgcattctattgccatggcgagtgtcctttccccctcgccgatcacttgaattctaccaaccacgccattgtgcagacactggtgaactccgtcaattctaaaatccctaaagcttgttgtgtgcccacggagctttcagctattagcatgctctacctggatgagaacgagaaagtggtccttaagaattaccaggatatggtggtggaaggttgtggctgtcggtag

SEQ ID NO: 4260 - DNA, 1296 bp, synthetic construct
  misc_feature 1..1296: note = source = /note="Description of Artificial Sequence: Synthetic coding sequence"
  source 1..1296: mol_type = other DNA
atgcatgttcgtagcctgagagccgcagcaccccactcctttgtggcactatgggcgcctctgtttctgctcaggagcgcactggccgacttctccctcgataatgaggtgcactcatccttcattcaccgccgactccggagccaagaacgccgtgagatgcagagagaaatcctgtccatcctcgggctgccacaccgacctaggccgcatctacagggaaaacacaacagcgccccaatgtttatgctggacctatataatgctatggctgtggaggagggcggaggtcccggaggccaggggttctcatacccatataaagctgtgttctccacacaagggccaccattagcttccttgcaagattcacacttccttactgatgctgacatggttatgtcatttgtcaatttggtggaacacgataaggagtttttccatccacggtatcatcatagagagttccggttcgacctgagcaagattccagagggagaagctgtcactgccgcagagttcagaatttataaagactatatcagagaacgcttcgacaatgaaacatttcgtatcagtgtctaccaggtgttacaggagcatctgggaagggagtccgacctgttcctactcgacagtagaacactctgggccagcgaagaaggttggctcgttttcgacatcaccgcaacttccaatcactgggtggtgaacccaagacacaatctaggtttacaactgagcgtggagacactggacggtcagagcatcaatcccaaattggccggactgattggacgacatggacctcagaataaacagccatttatggtcgccttttttaaggcaactgaggtccactttaggtccattcggtccaccggctctaaacagagatcgcaaaaccgcagcaaaacgcctaagaatcaggaggctcttcgtatggctaatgtggccgaaaattcatcttctgatcaacgtcaagcttgcaagaaacatgaactctatgtgtcttttagggacttgggttggcaggattggatcatagctcccgaaggatacgctgcctattactgcgagggcgaatgcgcttttccgctgaatagttacatgaacgctaccaaccatgctattgtacagaccttagtgcatttcatcaatccagaaacggtcccaaagccatgctgtgcgccaacccagctgaacgccatctccgtgctgtactttgacgacagcagtaacgttattcttaagaaataccgcaacatggttgtgcgagcatgtggctgccattag

SEQ ID NO: 4261 - DNA, 1098 bp, synthetic construct
  misc_feature 1..1098: note = source = /note="Description of Artificial Sequence: Synthetic coding sequence"
  source 1..1098: mol_type = other DNA
atgcacgtgaggagccttagggcggctgcgcctcacagtttcgtagctttatgggctcctctgttcctgctgcgatcagcactcgccgacttctctttagataacgaagtgcactcttcctttattcacaggaggctccgctcccaagagcgtagagaaatgcagagagaaatactgtcgatcttgggacttcctcaccggcctcggccacacttgcaggggaagcacaattcagcaccaatgttcatgttagacctctacaacgcaatggcggtggaagagggaggcggtcctggagggcagggcttcagctatccctataaggccgttttttcaactcagggcccaccactggcatcacttcaggactctcacttcctcacggatgccgacatggtgatgagcttcgttaacctcgttgagcacgacaaggaattcttccatcctcgttaccaccatcgagaatttcggtttgacctgtcaaaaatccccgagggagaagccgttacggccgcagagtttagaatctataaggattacatcagagaaaggttcgataatgaaacattccggataagcgtttaccaagtgctccaggagcacctcggtagagaaagtgacttgtttcttttggattctcgcactctgtgggcgagcgaggagggatggttggtgttcgacattaccgccacaagcaatcactgggtagtcaaccctaggcacaacttagggcttcagctcagcgttgagaccttagatgagaatagcagttccgaccagcgacaggcctgtaagaagcacgaactttatgtaagctttagagatctcgggtggcaagattggattatcgccccagaagggtatgcggcttactactgcgagggagaatgcgcatttccattgaactcttacatgaatgctactaatcatgccattgtgcaaaccctggtgcacttcattaacccggagacggttcccaagccatgctgcgccccaactcagctcaatgccatttcagttctttacttcgacgacagcagtaatgtgatcctgaagaaatacagaaatatggttgtgagggcatgtggctgtcactag

SEQ ID NO: 4262 - DNA, 1656 bp, synthetic construct
  misc_feature 1..1656: note = source = /note="Description of Artificial Sequence: Synthetic coding sequence"
  source 1..1656: mol_type = other DNA
atggcaggcgacctgagtgccggttttttcatggaagagctgaatacataccgacagaagcagggagttgtgcttaaataccaggaactcccaaattccgggccaccccacgataggaggttcacattccaagtaatcattgacggccgagaattccctgaaggggaggggagatctaagaaagaggctaagaacgccgcagccaagctggctgtggagatcttgaataaggagaaaaaagctgtgtctcccctgctcctgactacaactaattcatcagagggcctcagtatgggtaactacatcggactcataaatcgcattgcacaaaaaaagcgcttgacggtgaattatgaacagtgtgcctctggcgttcacggacccgaggggttccactataagtgtaagatgggtcagaaagagtatagcatcggaaccggaagcacaaagcaggaggccaaacaactggcagctaagcttgcttatctgcagattctatctgaggagacctccgtcaaatctgactacctgtcatccggatcctttgccaccacctgtgagtctcagagcaactccttagtgacgagcacattagcaagcgagtcgagttctgagggggacttttctgccgatacatccgaaataaactcgaattcagacagcctcaatagttcttccctcctgatgaatgggctaaggaacaaccaacggaaggcaaagaggtccctggctcctagatttgacctgcctgacatgaaagagactaagtacaccgtggataagcgctttggcatggacttcaaagagattgagctgatcggctctggtggcttcggtcaggtgttcaaagccaagcaccggatcgacggtaaaacctacgttatcaaaagagttaaatataacaacgagaaggcggaacgcgaggtaaaagccctcgccaaactggaccacgtgaacatcgttcactacaacggctgttgggatggatttgactacgatcccgagactagcgacgactccctagaaagttccgactatgacccagagaattccaaaaattctagcagatccaaaactaaatgtctattcatccagatggaattttgtgataagggtaccctagagcagtggatcgagaaaagaagaggagaaaagctcgacaaagttctggctcttgaattgtttgaacagattacaaagggagttgactacatccacagcaaaaagttgatccatcgggatctaaaacccagcaacattttcctagtggatacaaagcaggtaaaaattggcgatttcggcctggtgactagcctgaagaatgatggaaagagaactagaagtaagggcaccctgcgttacatgtcaccggagcaaatttcttcccaggactacggaaaggaggtggacttgtacgcattgggacttattctggcagagctacttcacgtgtgtgacactgcttttgagacaagcaaattcttcaccgacttacgggatggaataattagtgatatattcgataaaaaagagaagacgctgttgcagaagctccttagcaagaagcctgaggataggcctaacacttctgaaatactgagaacactgaccgtgtggaagaagagcccagaaaagaacgaaagacatacttgctag

SEQ ID NO: 4263 - DNA, 366 bp, synthetic construct
  misc_feature 1..366: note = source = /note="Description of Artificial Sequence: Synthetic coding sequence"
  source 1..366: mol_type = other DNA
atgacacggatcctcactgcctttaaggtcgtgcgcacactgaaaacggggttcggctttaccaatgttacagcccatcaaaagtggaagttcagccgccctggcataaggctgctgtccgtgaaagcgcaaaccgcacacattgtgctggaggatggaactaagatgaaaggttattcgttcggacatcctagttctgtagcaggcgaggtcgtgttcaatacgggtctgggtgggtatcccgaggccataaccgatccagcttacaaaggtcagatcctgaccatggccaatccaatcattggcaatggaggagcgccagatactaccgccctcgatgaacttgggctgtccaaatacttgtag

SEQ ID NO: 4264 - DNA, 4521 bp, synthetic construct
  misc_feature 1..4521: note = source = /note="Description of Artificial Sequence: Synthetic coding sequence"
  source 1..4521: mol_type = other DNA
atgccacagatcattaaaatgactagaattctgactgccttcaaagtagtccggacccttaagaccgggtttggtttcactaatgtaacagcacatcaaaaatggaaattttctcgacccggaatccggctgctctctgttaaggcccagacagcccacattgtgttggaagacggaaccaagatgaaaggatactctttcgggcacccatcaagtgttgccggagaggtcgtattcaatacaggactgggagggtaccccgaagccattactgatcccgcatataaaggccagattctgaccatggcaaatccaatcataggaaatggcggagctccagatactacggcactagatgaattgggacttagtaagtaccttgagtcaaacggtattaaggtgtcaggattactggtcctcgattattcaaaagattataatcactggctcgcgaccaagagtcttgggcagtggctgcaggaagaaaaagtgcctgccatttacggagtggacactagaatgctgacaaaaataattagagacaaaggcaccatgcttggtaagattgaatttgagggacagcccgtcgatttcgtcgatcccaacaaacagaatctcatcgctgaggtcagcaccaaggacgtaaaggtgtacgggaaaggaaaccctacaaaggtggtcgctgtggactgcggaattaaaaacaatgtcattcgcctactggtgaaaagaggcgctgaggtccatttggtaccatggaaccatgacttcactaaaatggagtacgatggcatcttaattgccggaggtcctggtaaccccgctttagccgagcctctgatccaaaacgtgaggaagatcctagaatccgatcgaaaagaacccctctttggcatctctacaggcaacttgataactgggttggcagcgggagctaagacctacaagatgagcatggctaaccgtgggcaaaatcaacccgtgctgaacataaccaataaacaggccttcataaccgcacagaaccacggctacgcattggacaacaccttaccggctggatggaaacctctgttcgtgaatgtgaacgatcagaccaatgaaggaatcatgcacgagagtaaaccctttttcgctgttcagttccatcctgaagtcacccctggcccaattgatacagagtacttgtttgacagcttcttttccctaatcaaaaagggtaaggcaaccactataacctcagttctccccaagccggcattggtggcatcccgcgtagaagtttcgaaagtgctgattcttggcagcggaggcctgtctatcggccaggcgggtgagtttgattactccggatcacaggccgtgaaggctatgaaggaggaaaacgtcaagacagtcctgatgaatccaaacatcgcgtccgtgcagaccaatgaggtcggactgaagcaagccgatacagtatacttccttcccatcaccccacagtttgtcactgaagtgattaaggccgagcagcccgatggcttgatattaggaatgggcggacagaccgcacttaattgcggggtcgagctgttcaagaggggtgtcttgaaagagtatggagtcaaagtcctaggaacgtccgtggaatccatcatggcaacagaggatcgacagttgtttagcgacaaactcaacgaaatcaacgaaaagattgcaccatcattcgctgtggagagcatcgaggatgcccttaaagcagccgacacgatcggctatcctgtgatgatcagaagcgcttacgccctgggcggtctgggctctgggatttgtcccaaccgggaaacattgatggacctcagcacaaaagcctttgccatgaccaatcaaattcttgtcgaaaaatccgtcactggttggaaggaaatcgaatacgaagtcgtgagggacgccgacgacaactgcgtcacagtctgcaatatggaaaacgtggacgcaatgggggttcataccggggactctgtggtagtggcccctgcccagacactttcaaacgctgagtttcagatgctccggagaacttcaatcaatgtcgtcagacatctggggatcgtgggcgaatgtaacatacagttcgccttgcacccaacctctatggagtactgtattattgaagtgaatgccagactgtcccgatctagcgcccttgcttcaaaagcaacagggtatcccttggccttcatcgctgcaaagatcgccctgggtattcctctgcctgagatcaagaatgtggtgtccggaaagacatcggcgtgtttcgagccatcactggattacatggtgactaagatcccacgctgggacctggatcgctttcacgggactagctcacggatcggtagcagcatgaagtctgtcggcgaagttatggctatcggacgcacattcgaggaatcctttcagaaagcgctgaggatgtgtcatcccagcattgaggggttcacaccacgactgcccatgaataaggagtggccaagtaatttggacctgagaaaggaactgagcgagcctagctctaccagaatctacgctatcgcaaaggccatagacgataacatgtctctggatgagattgagaagctaacttatatagataagtggtttctgtataagatgagagatatcctgaatatggaaaaaactctcaaggggctcaacagcgagtccatgacagaggagacattaaaacgcgctaaggagatcggattctcagacaaacaaatctccaagtgtttgggcctcacagaggctcaaacgcgggagctgcgcctgaagaagaacatccacccatgggtgaaacaaatagacacactggctgccgagtacccttcggtgactaactatctttacgtgacctacaacggccaggagcatgatgtcaactttgatgaccacggtatgatggtactcggttgcggaccatatcacattggatcaagtgtagaatttgattggtgtgctgtgagctctatcaggactcttcgccaactcggaaagaagacagtggtggtcaattgtaatcctgaaacagtgagtacggacttcgacgaatgtgacaaattgtattttgaggaactgagcctggaacggattctggacatttatcaccaggaagcttgcggtgggtgtatcatatctgtgggaggccagatccctaacaacctcgccgtgcctctctacaagaacggtgtaaagattatgggtacctcaccgctccagatcgatcgtgccgaagaccggtctatcttctccgccgtgctcgacgaactaaaagtggcccaggctccctggaaagcagttaatactctcaatgaagcgctggaattcgccaagtctgtggactatccttgcctgctgaggcccagctacgtcttaagcggttcagctatgaatgttgtgttctcagaggacgaaatgaaaaagttcttggaggaggcgaccagggtttcacaggagcaccccgttgtgttgacaaagttcgttgagggtgccagagaagtcgaaatggacgcagtgggtaaggatggacgggtcatatcacacgccatcagcgaacatgtagaggacgcaggagtgcacagtggggatgctacactgatgctgccaacacagaccatctctcaaggagccattgaaaaggtgaaggacgccactcgcaaaattgctaaagccttcgccatttcaggcccatttaatgtccagtttctagtgaagggaaacgacgttttggtaatcgagtgcaatttacgagcctcccggtccttccccttcgtaagcaaaaccctcggtgtcgacttcatagacgttgccacaaaagtaatgattggtgaaaacgtcgacgaaaagcatctcccgaccctggaccatccaattatacctgccgattacgtagcaatcaaggcgccaatgttctcctggcccagattaagggatgctgatcctatccttcgatgtgagatggcctctacaggggaagtagcctgctttggcgaagggatccacactgcatttctcaaggccatgcttagcactggatttaaaatcccacagaagggcattctcatcggtattcagcagtcattccgtccgcgattcctcggtgttgctgaacagctgcacaacgagggatttaagctcttcgcaacagaagctacctccgattggctcaacgcaaacaatgtgcctgccactcctgttgcttggccttcccaggaaggacaaaatccatccctgagttccattagaaaactgattcgcgatggctctattgacctggtgattaacctgccaaacaacaatactaagtttgtacatgacaactatgtgatcagacgcacagcagttgactcagggattcccctcctgacaaattttcaggtgaccaagctgttcgctgaggcagtacaaaagtctaggaaagtagattccaaaagcctgttccactatcggcaatatagcgcgggtaaggctgcttag

SEQ ID NO: 4265 - DNA, 3150 bp, synthetic construct
  misc_feature 1..3150: note = source = /note="Description of Artificial Sequence: Synthetic coding sequence"
  source 1..3150: mol_type = other DNA
atgaaggaggagaatgtaaaaacagtgctgatgaaccccaacatcgcgagcgtccagacaaatgaggtgggattgaaacaggctgacaccgtgtactttctgccgataaccccccagtttgtgacagaggttatcaaggccgagcagcctgacgggctgattctgggtatgggtgggcagacagccttgaattgtggagtcgagctgtttaagcgcggagtcctcaaagagtacggggtgaaagtactaggtacttctgtcgaaagcataatggccacggaagaccggcagctgtttagtgataagctgaacgagatcaacgagaagatcgctcccagtttcgctgtcgagtccattgaggacgcgctaaaagcagcggacactatcggttaccccgtcatgatacgatcagcatatgctttgggcggactcgggtcaggcatttgtcccaatagggagacactcatggacctcagtaccaaggcgttcgctatgaccaatcaaattctggttgaaaagagtgtgacgggatggaaggaaattgaatatgaggtcgtcagggacgccgacgacaactgcgtgaccgtgtgcaatatggaaaacgtggacgctatgggagtacacacaggagactccgtcgtggtagcacctgcccagaccctttcgaatgctgagtttcagatgctgcgtaggactagcatcaatgtggttagacatttaggaatcgtgggagaatgtaatattcagtttgcgctgcacccgacatccatggagtattgtattatcgaggtcaatgcccgtcttagccgcagtagcgctttggcaagcaaagccacaggttacccactcgctttcatagcagccaaaatcgctctgggaatacccctgcctgagattaaaaatgtcgtgagcgggaagacctctgcctgctttgagccctccctggattacatggtcaccaagataccacggtgggatttggacaggttccacggtacttcctctaggattggatccagtatgaaaagtgttggcgaagttatggcaatcgggagaacctttgaagagagctttcagaaagcgttaaggatgtgtcacccaagtatcgagggtttcacccccagacttcccatgaacaaggaatggcccagtaacctggacctaagaaaagaactgagcgagccatcaagcacgcgcatttatgccatagcgaaagccatagacgacaacatgtctttggacgagattgagaaactgacatatattgacaagtggttcctgtacaaaatgcgtgacatattaaacatggagaaaaccttaaaggggcttaactccgaatctatgactgaagaaactttaaaaagggcgaaagaaatcggtttttctgacaagcagatctcgaagtgccttggcctcaccgaggcacaaactcgagaacttcggctgaagaagaatatccatccatgggtcaagcagatcgatacgcttgctgccgaatacccctccgtcacaaactacttgtacgtcacctacaatggccaggagcatgatgtgaatttcgacgaccatggaatgatggttctaggctgtggcccataccacatcggaagcagtgttgagtttgactggtgcgcagtgtcttccatccggacactgagacagctcgggaaaaaaactgtggtggtcaattgcaaccccgaaactgtctccactgattttgacgaatgcgacaagctgtactttgaagaactgagtctggaacggatcctggatatttatcatcaggaagcatgtggagggtgcattatctcagtgggcggacagattcctaacaatttggcagtgccactgtataaaaatggcgtgaagatcatgggtacatcccctctgcaaatcgaccgcgctgaggatagaagtattttttcggcagtcttagacgaattgaaggtggctcaagccccatggaaagctgtgaataccctgaatgaggctctagagtttgctaagagcgtcgattatccatgtctcctgcgaccttcatacgtactgagcggatcagctatgaatgtcgtattcagcgaagatgaaatgaaaaagttcctggaagaggccactcgcgtgtctcaggagcaccctgtcgtgctgacaaagttcgtggagggagccagagaagtggagatggatgcagtcggcaaggatggccgtgtgataagtcacgcgataagtgagcacgtcgaagacgcgggtgttcattctggagacgctacccttatgcttcctacacagaccatatcccagggagcaatagagaaggtcaaagacgccactcgcaaaattgccaaggcctttgcgatctcaggaccgtttaatgtccagtttctcgtcaaggggaatgacgtgttagtgatagagtgcaatctccgagcctcccgatcattcccctttgtctctaagacccttggagtggattttatagacgtggccacaaaggtgatgatcggcgagaacgtggacgaaaaacatctgccaactcttgaccatcccatcattccggctgactacgtggctataaaagctccaatgttctcgtggcctaggctgagggatgccgatccgattctcagatgcgaaatggcatccacaggcgaagtggcctgctttggcgaaggaatacatacggcattcctgaaagcaatgctgagtacaggtttcaaaatccctcagaagggaatcctcataggcatccaacagagtttccgcccaaggttcttgggcgtagcagagcagttacataacgaggggtttaagctctttgctaccgaggctacatccgattggctcaatgctaacaatgtgcctgcgacaccagtggcctggccctcccaagagggccagaacccttccctgagttctatcagaaagcttatcagagacggcagcatagaccttgtcattaacctgcctaataacaatacaaaatttgtgcacgacaattatgtcatccgcagaacagcggtggattctggcatcccattgctcaccaacttccaagtgactaagctttttgcagaagccgtgcagaagtctcgcaaggtggattccaaaagccttttccattaccggcagtactcggccggaaaggcggcttag

SEQ ID NO: 4266 - DNA, 366 bp, synthetic construct
  misc_feature 1..366: note = source = /note="Description of Artificial Sequence: Synthetic coding sequence"
  source 1..366: mol_type = other DNA
atgacacggatcctaacagctttcaaagtcgttcgaactttgaaaacagggttcggtttcacgaacgtcacggcacaccagaaatggaagttctcccgtccagggattcgcctgctgtccgtcaaagcccagaccgcccatatcgtgctggaggatggcactaaaatgaagggctattcctttggacatccttcaagcgtggctggcgaagtggtgttcaataccggattgggaggataccccgaagcaatcacagatccagcctacaagggacaaatactgaccatggccaacccgattatcggtaacggcggagcccctgacacaactgccctagacgaactaggcttgtccaaatacctttag

SEQ ID NO: 4267 - DNA, 1542 bp, synthetic construct
  misc_feature 1..1542: note = source = /note="Description of Artificial Sequence: Synthetic coding sequence"
  source 1..1542: mol_type = other DNA
atgacaaggattctcacagcctttaaagtcgtccgaaccctcaaaacagggttcggcttcaccaatgtaacagcacaccagaagtggaagttcagtagaccaggaatccgcctcctttccgtgaaagcccaaactgcccatatcgtacttgaagacggcaccaagatgaagggttactcatttgggcatccttcgtccgtcgccggagaggtcgttttcaacacaggtctgggaggatatcctgaagccataacggaccccgcttacaagggccagattcttaccatggcgaatccaattatcggtaacggcggagctcccgatactaccgctttagacgaactgggactgagcaaatatcttgaatcaaacggaatcaaagtcagcggactgttggtgttggattatagcaaggactacaatcactggctagccaccaaaagcctggggcagtggctgcaggaggaaaaggtcccagcaatctatggcgttgacacccgcatgctcactaagatcattcgtgacaaaggcactatgcttgggaaaatagagtttgagggtcagcctgtggatttcgtcgacccaaacaagcagaacctcattgctgaggtgtcaacaaaggatgtaaaagtctatggaaaaggaaatcccacaaaagtggtggcagtggattgtggcatcaagaacaacgtgatccgtctgcttgtcaaacgaggcgcagaggtgcatctggtaccctggaatcacgacttcacaaaaatggaatacgatgggatactgatcgccggtggacctgggaatcccgcactggccgaaccactgatccagaatgtcagaaaaatcctcgagtccgatcgcaaggaaccactgtttggcatttccaccggaaatctgatcaccggcctggctgccggtgcgaagacatacaagatgtctatggcaaaccgcggacagaaccagcctgtcctgaatatcacaaacaagcaggctttcattaccgctcaaaaccacggatacgctctagataacacactgccagcaggctggaaaccactctttgtgaatgtcaacgatcagactaatgagggcattatgcatgagtccaaacctttctttgctgtgcaattccatcctgaggttacccctggaccgatcgacacagagtacctgttcgactccttcttctcactcattaaaaagggcaaggcgaccaccatcacgtctgtgctgccaaagcccgctctggtcgcttcaagggtggaggtctccaaagtactgattttgggcagtggcggtctgagcatcggccaggctggcgagtttgactattcgggctcccaggccgtgaaggcaatgaaggaggagaatgtcaaaacggtgctgatgaacccaaacattgcttctgttcaaacaaacgaggtgggcctcaagcaagctgataccgtgtatttccttcctatcacccctcagtttgtcactgaagtcattaaagcagaacaaccggatggactcatcctaggcatgggcgctaggcaactttag

SEQ ID NO: 4268 - DNA, 4527 bp, synthetic construct
  misc_feature 1..4527: note = source = /note="Description of Artificial Sequence: Synthetic coding sequence"
  source 1..4527: mol_type = other DNA
cgtcctcggccacagatcatcaagatgactcgcattctgactgcgtttaaagtcgtccggacgctgaaaacgggatttgggttcacaaacgtaactgcgcaccagaaatggaaattttctaggccaggcataaggcttttgtccgtgaaggcgcagaccgcacacatagtgctggaggatggcaccaagatgaagggctactctttcggacatccttcgtccgtcgctggcgaggtggtttttaacactgggctcgggggatatcccgaggccatcactgacccagcatacaagggccagattttaaccatggccaatcccataattggcaacggcggtgctccagacactacagccctggacgagctgggactcagtaaatacctcgaatccaacggtattaaggtgagcggattgctggttttagactactcaaaggattacaatcactggttggcgacaaaaagtttgggacaatggttacaagaggagaaggtccctgctatttatggcgttgacacaagaatgttgactaagattattcgggacaagggcacaatgcttggcaagatagagtttgagggtcagccagttgattttgtggatccgaacaaacagaatcttattgctgaggtcagcactaaggatgtcaaggtctatgggaagggcaaccccacaaaagttgtggccgtggactgtggcatcaagaacaacgtcattagacttctagtgaagcggggagctgaggtccacctagtgccatggaatcacgacttcaccaaaatggagtatgatggaattctcattgccggtggtccgggaaatccagctctggctgagcctctaatccagaacgtcaggaagattctagagagtgatagaaaggaacccctatttggtatcagcaccggaaacctgattacaggcctggccgctggagccaagacttataaaatgtctatggcaaatcgtggacagaatcagcccgtcctgaatattaccaacaagcaggcttttatcacagctcagaatcatggttatgctctggataacaccctccctgctggttggaagcctctgtttgttaatgtgaacgatcaaaccaacgaggggataatgcacgaaagcaagccattttttgccgtacaatttcacccagaagtcacccctgggccaatagacactgaatacctttttgattctttcttcagtctgatcaaaaagggcaaggctaccaccatcacgtcagtcctcccaaaacctgcgttggtcgcctcccgagtggaagtgagcaaggtattaattttgggctcagggggattatcaatcggtcaggcaggcgaattcgactattcaggtagccaggccgtaaaagcaatgaaggaggagaacgtaaaaacagttctgatgaaccctaacattgcatccgtgcagacaaacgaggtggggttgaagcaggcagacaccgtgtacttccttcccatcactcctcagtttgttaccgaagtgatcaaagccgaacagcccgatggtctgatattaggaatggggggtcagactgccctcaattgtggagtagagctctttaagaggggcgtgctcaaagaatacggcgtcaaggtcctggggacttctgtcgagtcaattatggctactgaagatagacagctgttcagcgataagttaaacgagataaacgagaagatcgcacccagctttgccgtggaatcgattgaagatgccctgaaggcggcagacacaatcggttatccagtcatgatccgcagtgcttacgcactcggaggtctgggaagcgggatatgccccaatcgtgaaacacttatggacctgtccactaaggcattcgccatgacgaaccagatcctggtggaaaagtctgttactggctggaaagagatcgagtacgaggtcgttcgggacgcagatgacaactgtgtcacagtgtgtaatatggagaatgtggatgcaatgggcgtccacaccggcgactcggttgtagtggcaccagctcagacactgagtaatgccgaattccagatgttgcggcgtacgagtatcaatgtggtgagacaccttggcatcgtcggtgagtgtaacatccagtttgccctgcatcctactagcatggagtactgcatcatagaggtcaatgcgaggctgtctcggtcatcagccctcgcctccaaagcaactggttacccgctcgcctttattgcggctaaaatagccctggggattccgctgccagagattaagaatgtggtatccgggaagacttccgcttgctttgagccaagtctcgattatatggtcactaagatcccacgctgggacttggatcgatttcacggcacctcatctcgcatcggcagctctatgaaatcggtgggggaggtgatggccattggcagaaccttcgaggaaagtttccagaaagcgcttcggatgtgccatccctctatcgaaggcttcaccccgagactgcccatgaataaggagtggccttctaatctcgatctgcggaaggagctctctgaaccatccagtactcgtatctacgccatcgctaaagccattgatgacaatatgtctctggacgaaatagagaaacttacctacattgacaagtggtttttgtacaagatgagggatatactcaatatggagaagacactgaagggtctgaactccgaatctatgaccgaggaaacactgaaaagagctaaggagattgggttctcagataagcagatcagcaagtgcctcggtttgacggaggcccaaacccgggagctcagattaaagaagaacattcacccatgggttaagcagattgatacgctggccgctgagtatcccagtgtgactaattacctgtatgttacttataacggccaggagcatgacgtgaatttcgatgaccacggcatgatggtgctggggtgtgggccataccatattggttcatctgtagagttcgactggtgcgccgtgtcgagtatacggacacttaggcagctgggcaaaaagaccgtggtcgtcaactgcaaccctgaaaccgtatccacagatttcgatgagtgtgacaagttgtactttgaggaactgtctctggagaggattctggatatctatcatcaagaggcttgcgggggatgcattatatcagtgggaggtcagattcctaacaacctggccgtgccactttataagaatggtgtgaaaatcatggggacttccccgctgcagatcgatcgggcagaagatagatccattttctctgcggtgttggatgagctcaaagtcgcccaggcaccctggaaagctgtgaacactctcaacgaggccctcgagttcgcaaagagcgttgattatccttgcctcctcaggccttcatatgtcctgagcgggagcgcaatgaacgtcgtgttttccgaggatgagatgaagaaattcctggaggaggccacccgcgtgtcccaggaacacccggtcgtgttaactaaattcgtggagggcgcaagggaagtggagatggacgctgtgggaaaggatggtcgcgtcatttcccatgccatttccgaacatgtggaggatgccggtgtgcatagcggtgatgctacactgatgctccccactcagacaattagtcagggcgctatagaaaaagtgaaggatgctactcgtaagattgccaaggccttcgccattagtggccctttcaacgttcagttcctggtgaagggcaatgacgtgctggtaatcgaatgtaacctcagagcatcccggtcctttccattcgtgagcaagacactgggagttgatttcatcgatgttgccactaaagtgatgattggcgaaaacgtcgacgaaaagcatctacccactttggaccatcctataattcctgcagactacgtggccattaaagctcctatgttctcttggccacgattgagggatgccgacccaatcctcaggtgcgagatggcaagcaccggcgaagtcgcctgtttcggtgaaggcattcacacagcattcctgaaagccatgctgtccactggctttaaaataccccaaaagggaattctgatcggcatccaacagtccttcagaccacgatttctgggcgtggctgaacaactgcacaatgaggggttcaagttgttcgcaacagaagccaccagcgactggctgaacgccaataatgtaccagcaaccccagtggcctggccatctcaggaaggtcagaaccccagtctatctagtatccgcaaactgattagggacggtagcatcgatctggtgatcaacctccccaacaacaataccaagtttgtgcatgacaactacgtgatccgccgaaccgcagtggactccggcatcccccttctcaccaatttccaggtgacaaaattattcgccgaagcggttcagaaaagccggaaggtggactctaagtctttgtttcattaccgccagtattccgcaggcaaggctgcttag

SEQ ID NO: 4269 - DNA, 213 bp, synthetic construct
  misc_feature 1..213: note = source = /note="Description of Artificial Sequence: Synthetic coding sequence"
  source 1..213: mol_type = other DNA
atgactcgcatcctaacggcttttaaggtggttcgcacccttaagactgggtttgggttcaccaatgttacagcacaccagaaatggaagtttagtcgtccagggattcgtctgctcagcgtcaaagcacaaaccgcacacatcgtgctcgaagatcgtgacgcagacacacctgcgcctttattgaaccagcccgagcctcatgtgatttag

SEQ ID NO: 4270 - DNA, 606 bp, synthetic construct
  misc_feature 1..606: note = source = /note="Description of Artificial Sequence: Synthetic coding sequence"
  source 1..606: mol_type = other DNA
atgtcgagacgggaaggaagcctggaggatcctcagactgacagctcagtgtctctcctgccacacctcgaagctaaaattcgtcagacccactctctggcccacctcttgacaaaatacgcggagcagctgttacaggaatacgtgcagcttcagggggaccctttcggactgccatctttttcccctcctagactgccagttgccggactgtctgcccctgccccttctcatgcaggtctgccagtgcacgagaggctccggttggatgcagccgcacttgctgccctgccccctctactggacgccgtctgcagaaggcaggccgagctaaaccctagggcacctcgtctacttcggagactggaagacgccgctaggcaggcgagggcgctgggtgccgctgtcgaagcactgctggccgcattgggagctgccaatcgcggaccaagagctgaacccccagctgccaccgccagtgccgcttctgctacgggcgtattcccagccaaagttctggggctgcgtgtctgtgggctgtacagggaatggctgtctcgcactgagggagacttgggccagctgctgcccggagggagcgcatag

SEQ ID NO: 4271 - DNA, 603 bp, synthetic construct
  misc_feature 1..603: note = source = /note="Description of Artificial Sequence: Synthetic coding sequence"
  source 1..603: mol_type = other DNA
atgtcgaggcgggagggctccctggatccccagaccgatagctccgtatctttgctcccccacctggaggccaaaatcaggcagacccacagcctcgcacacctactgacaaagtatgcagagcagcttctccaagaatacgtgcagctgcagggcgatccgtttggcttgccatctttcagccctccacgcctgccggttgctgggcttagcgctcccgctcccagccacgccggtctcccagtgcacgagcgtctgagactcgatgccgctgcgttagccgcactgccgcctttgctcgacgccgtatgtcgaaggcaggcggaacttaatcctagggcacccagattgctcagaaggctggaagatgccgctaggcaggcacgggcactcggcgctgccgtcgaggccctcctcgccgcactgggagctgctaaccgaggccctcgggctgagccccctgccgcaaccgcaagtgcagctagcgcaaccggagttttccctgccaaggtgttaggacttcgtgtgtgtggtttatatagagaatggctctctcgcactgaaggcgacttaggacagctgttaccaggcggatcagcctag

SEQ ID NO: 4272 - DNA, 513 bp, synthetic construct
  misc_feature 1..513: note = source = /note="Description of Artificial Sequence: Synthetic coding sequence"
  source 1..513: mol_type = other DNA
atgaagactcaaagggacggacattccctaggcaggtggtctttggtgctcctgttgctcgggttagtgatgcctctggccatcattgcccaggtgctaagctataaagaagcagttctccgggcaattgacggaatcaaccagcgtagctctgacgctaatctctatagactgctggatctagaccctaggcctactatggatggcgaccctgacacccccaagccagtaagttttaccgtgaaagagacagtgtgccccagaaccacacagcagagccccgaggactgtgattttaagaaggacggtcttgtaaagagatgcatgggcaccgttacgctgaatcaggccaggggctcattcgatataagctgtgacaaggataacaaaaggttcgccctgctgggcgacttttttagaaagtctaaggaaaaaattggcaaagagtttaaacgcattgtccaaagaattaaggactttctaaggaatctggttcccaggaccgagtcctag

SEQ ID NO: 4273 - DNA, 1692 bp, synthetic construct
  misc_feature 1..1692: note = source = /note="Description of Artificial Sequence: Synthetic coding sequence"
  source 1..1692: mol_type = other DNA
gcatgctgttgtggcggaggatgcacatgctgtggctgcacgtgtacgactggttgctgcactacgtgcacttgttgcgcctgtgcgtgcactacaggaaccacaacgggggcaggagcgtgctgcacaggcggttgcgcagcgggtggcacaggctgcggtggcgcaggctgctgctgcacttgctgcgctggagccgcaggcacgggctgcggcggaacatgcgccgctgggtgcggaggctgcgcgggatgtggcggtgccggtgcttgcggaggctgtggcgcaggctgttgtgcaggaggcgctgcttgctgtacgtgctgctgctgctgctgcgggtgcgggacatgctgctgttgtgcaggctgcacgacttgttgctgtgccggatgcgggaccgggggatgtggcggatgtggaggcgctgcatgttgctgttgctgtggaggcgctggtgccgcagctggagcggctacagctgctgccggtgcttgcacaggtggggcaacggcatgtgctggcggaacatgttgtgccacaacagcctgcggaacatgcgccacaacttgtaccggctgcgcagggggttgttgtgcggcaaccaccaccgcaaccggtgccggaggcgctgctacctgctgcgccgctggcgcaacaggcgcagccaccacaaccggcggagcaggttgtgctggcggtgctggggctggtggatgttgtggcactactacaggaacgtgtacgggttgcgctggcacaggctgttgttgctgtgcagggggttgtacaggatgcacgtgctgctgcgctgggtgcgggtgtactacctgctgctgcgccgcttgcgctggcgctggaggggcttgttgtgcgacatgcaccggcgcaacaggtgctactacgtgtgctacagcagggggttgtgcctgtgccgcagcatgcgccactggcgcagccgctacaggagcttgtactactactggcgctgcagggaccactacctgttgtacaacatgcgcagccaccgccgcagccgcagcctgcgccggtgcttgcgccgctaccgccacaggaactaccgctacctgcgccggtgctacttgtgccgcagcttgtacctgctgcggggcatgctgttgctgcgcagcgtgcggtgcgggagctaccacttgctgcacaggcgcagccggagcggcttgcactggctgtggagccggtggggctgggggaaccggaggaggctgttgtacttgtacaacgtgtgccggatgtggcgctggctgcacgggcggagcatgtaccggatgtacttgttgttgcaccggaggcgcaggctgtgcttgcggcgcaggaacaacatgtgctggaggcgcagccggaggctgcacgtgcgctgggggtgctgcaggggctggtggcgcaggcgctggatgcgccggttgcgccgctggttgtgggggtgctgctactgccacctgcacatgcggagctactggctgtgccactgccgctactgggtgcgccggtactaccggcggtaccggaggagggggatgctgtgccaccggcgcttgcgggggagggggatgctgttgtgggggagccgcttgtacctgcgcgtgctgtgccggttgcactactgcaggttgcgcaggatgcggatgtacatgtggtgggtgtaccgggtag

SEQ ID NO: 4274 - DNA, 555 bp, synthetic construct
  misc_feature 1..555: note = source = /note="Description of Artificial Sequence: Synthetic coding sequence"
  source 1..555: mol_type = other DNA
atggccgatcacctgatgctggcggagggttatcgactcgtccagagaccacctagtgccgcagcagcccacggtccacacgccctccgcacactgccgccatacgccggacctggtcttgacagcggcctgcgacctcgaggtgctccgctgggccctccccctccacgccagccaggcgcactggcctacggggcattcggtcctccctcatcgtttcagccatttccagccgtgcctccacctgctgccggaatcgcccacctgcagccagtggcaactccctacccaggtcgggcagcggctccgccaaatgccccaggcggaccgccaggcccacagcctgccccatctgcggctgctcctcccccacccgctcacgctctcggcggaatggacgccgaacttatagacgaagaagcactcacttctcttgaattggagctcggtctccacagagtccgagaacttcccgaactgttcttgggacaatctgaattcgattgcttttccgacctgggctctgctcccccagcgggatccgtctcctgctag

SEQ ID NO: 4275 - DNA, 3198 bp, synthetic construct
  misc_feature 1..3198: note = source = /note="Description of Artificial Sequence: Synthetic coding sequence"
  source 1..3198: mol_type = other DNA
atgaaaattctcattctcggcatcttcctttttctgtgtagtactcccgcttgggctaaggaaaagcactactacatagggataatcgaaacaacctgggattacgcttccgaccacggagagaaaaaactgatctctgtggataccgagcattccaacatttatctgcagaatggcccagaccgcattggcaggctgtacaagaaagccctgtacttacaatacactgacgagacgttccgtacaaccatcgagaagccagtgtggctggggtttctggggccaatcatcaaggcagagacaggtgacaaagtgtacgtgcacctgaaaaatctcgcgagtcgcccatacacatttcattcacacggaattacctactacaaggaacacgagggggctatttaccccgacaacaccaccgacttccagagagccgacgacaaagtgtaccctggggagcagtatacctatatgctgctggccaccgaggaacagtctccaggtgaaggggacggcaactgcgtcaccaggatctaccactcccacatcgatgcccctaaagatatagcaagtggcttgattggaccattgatcatctgtaaaaaagattctctcgacaaggagaaggagaagcatattgacagggaattcgtggtgatgttcagcgtcgtcgatgagaacttcagctggtacttagaagataatatcaaaacctattgctccgaaccggagaaggtcgataaggacaatgaggattttcaggagtccaacaggatgtactccgttaacgggtataccttcggcagccttccagggctgagcatgtgcgccgaggatcgggtgaagtggtacctgttcgggatggggaatgaggtagacgttcacgctgccttttttcacgggcaggctctcacaaataagaactataggatcgatacaattaatttgttccctgccacactgtttgacgcctatatggttgcccagaaccctggggaatggatgctttcttgtcagaatctgaaccatctcaaggcaggcctgcaggctttttttcaggttcaagagtgcaacaaaagttcttctaaagacaatatccgtggcaaacatgtgagacattactacattgccgcagaagagattatatggaattacgccccatccgggatcgacattttcactaaggaaaacctgactgcaccagggtccgacagtgctgtgtttttcgaacaagggacaactaggatcggcggttcttacaagaaattggtttatagagagtacacggatgcctcctttaccaatagaaaagaacgtggtccagaggaggagcacctgggaattctgggtcccgtgatctgggcggaagttggcgacacgattagagtcacattccataataagggcgcttaccccctttccatcgaaccaatcggcgtcagattcaacaagaacaatgaaggcacctattatagccccaattataatccacagtccaggtctgttccaccatcagcttcccatgtggccccaaccgaaacgtttacctacgaatggacagtgccaaaagaagtcggtcccaccaacgcggatccagtctgtttggccaagatgtactactcagcagtggagcccactaaagacatctttaccggcctcattggtccaatgaaaatctgtaagaagggcagtctgcatgcaaacggcagacagaaggacgtggataaggagttctatctgtttccaacagtgtttgatgaaaatgagtcactgttgctggaagacaatattcggatgtttacaactgcccctgaccaagtggataaagaggatgaggactttcaggagagcaacaagatgcatagcatgaacggcttcatgtacgggaatcaacctggactcaccatgtgcaagggtgattccgtagtctggtatctgtttagtgcaggcaacgaggccgacgtgcatgggatttacttttcaggcaatacatacctgtggagaggcgaacgcagagacactgcgaatctcttccctcaaaccagcctgacgctccacatgtggcccgacacagaaggcacatttaacgttgaatgtcttacaactgaccattacaccggcggaatgaagcagaagtacactgttaaccagtgcaggcgacaaagtgaagattccaccttctacctgggggaacgtacttattatattgccgcagtggaggttgagtgggattacagtccacagcgcgagtgggagaaagagttgcaccacttacaggaacaaaatgtgagtaatgcattcttggataaaggggagttttacatcggatctaagtacaagaaagtcgtctaccgccagtataccgactctacttttagagtcccagtggaaagaaaagccgaagaggaacacctcggcatcctagggcctcagctgcacgccgatgtgggcgacaaggtgaagattatatttaaaaacatggctactcgcccttattctattcacgcacacggtgtacagacggaatctagcacagtgacaccaactcttccgggagaaaccctgacttacgtctggaagatacccgaacgatcaggggctggcaccgaagacagtgcatgcataccatgggcttactacagtacagtggatcaggtgaaggacctctattcgggcttgatcggccctttgatagtctgtcgcaggccttatctcaaagtattcaacccaagaaggaaactggaatttgctctgttattcctcgtgttcgatgagaatgaatcctggtaccttgacgacaatattaagacatattcagatcatccagaaaaagtcaataaagacgatgaagagttcattgagtctaataaaatgcacgcaattaatggccgaatgttcgggaaccttcaggggctgactatgcacgttggcgatgaggttaattggtacttgatgggtatgggcaatgagatcgacctccatacggttcattttcatggacactccttccagtacaagcaccgcggagtttattcatcagatgtgttcgacatctttccaggcacctaccagaccttggagatgttccccagaacgcctggtatttggctgctgcattgccacgtgactgatcacatccatgccggtatggagaccacatataccgtgctccagaatgaggacaccaagagcggatag

SEQ ID NO: 4276 - DNA, 603 bp, synthetic construct
  misc_feature 1..603: note = source = /note="Description of Artificial Sequence: Synthetic coding sequence"
  source 1..603: mol_type = other DNA
atggctttcactgagcattcaccacttaccccacaccgacgagacctgtgttctagaagtatctggctagcaaggaagataagaagtgatctcacggccctgaccgaatcttacgttaagcatcagggcctgaacaagaatatcaatttggactctgcagacggcatgcctgtggcatctacggaccagtggtcagagctgacagaagccgagcggctccaggaaaacctccaagcgtacagaacgtttcacgttttgctggcacgactgttggaggatcagcaggttcatttcaccccaacagagggagatttccaccaggcaattcatactctcctgctgcaggtggcggcttttgcttaccagattgaggaacttatgatccttctcgaatacaaaatacccaggaacgaagcagatggaatgccgattaatgtaggcgatggaggacttttcgagaagaaactgtgggggctcaaggtgctccaggagctgagccagtggactgtgcgttccatccatgatctgcgtttcatctccagtcaccagaccgggatccccgctcgcggttcacactacattgccaacaacaaaaagatgtag

SEQ ID NO: 4277 - DNA, 1869 bp, synthetic construct
  misc_feature 1..1869: note = source = /note="Description of Artificial Sequence: Synthetic coding sequence"
  source 1..1869: mol_type = other DNA
atggcccatgtgcggggactgcagttacccggatgcctggccctggcggctttgtgcagcctggttcattcacagcatgtgttcctggctcctcagcaagcaaggtccctcctgcaacgggtccgtcgcgcaaacacctttttggaggaggttcgtaaaggcaatctggagcgcgaatgtgtggaggagacatgctcttacgaggaagcatttgaggccctcgaaagcagcaccgccactgatgtcttttgggccaaatataccgcctgcgagacagcgagaaccccccgagacaagcttgcggcttgtctggaggggaactgtgccgaaggcctgggcacaaattataggggccacgtcaacatcacccgaagtggaatagaatgccagctttggcgcagccgataccctcataaacctgaaatcaattctaccacccacccaggtgctgaccttcaggagaatttctgtcggaatcccgattcgtccaccaccggaccttggtgctatacaacggacccaactgtgcgcaggcaggagtgctcaatacccgtgtgtgggcaggaccaggttaccgtggctatgactcctcgctctgaaggctcttccgtcaatctctcccccccactggagcagtgcgtgccagatcgaggccaacagtaccagggcaggctggccgtaacaacccacggcctgccctgtctggcctgggctagcgcacaggcaaaagccctttcaaaacaccaagattttaattcagcagtccagctggtagaaaatttctgtagaaaccctgacggcgacgaggagggagtctggtgctatgtcgcgggtaagcctggggacttcggttattgcgacttaaactattgcgaagaggctgtggaagaagaaacaggtgatggcctagacgaggacagcgatcgagccattgaggggaggacagcaaccagcgagtaccagaccttcttcaacccccgaaccttcggctcgggagaagcagattgcggcctgaggcccctcttcgagaagaaatcccttgaggataagaccgagcgcgagctgctcgagtcgtatattgatggtagaattgtggaggggagcgatgcagaaatcggcatgtcgccatggcaggtcatgttattcagaaaatcaccacaggagctcctctgtggagcgagcctaatttcagatagatgggtactgacagcggctcactgcttgctttacccaccttgggacaaaaactttacagagaacgaccttctcgtgagaatcggtaagcactcccggacccggtacgagcgaaatatcgagaaaatctctatgctagaaaagatatatattcaccctcggtataactggagggagaacctcgaccgggacatcgcccttatgaagttaaagaagcccgtcgcctttagcgactatatccacccggtgtgtctaccagaccgcgaaaccgccgcttctctattgcaggctgggtacaagggcagggtgacaggctgggggaatcttaaggaaacttggacagccaacgtgggtaaaggtcagccgagtgtgctccaggtagtgaatctgcctatcgtagaacgcccagtgtgcaaggattctacccgaattcggattacagataacatgttctgtgctggctataaacccgacgaaggaaaacgtggtgatgcatgcgagggcgactccgggggacctttcgtgatgaagtcaccttttaacaacaggtggtatcagatgggcatcgtcagctggggagaggggtgcgaccgcgatggcaagtacgggttctacacacatgtattcagactgaaaaagtggattcagaaggtcattgatcagttcggagaatag

SEQ ID NO: 4278 - DNA, 195 bp, synthetic construct
  misc_feature 1..195: note = source = /note="Description of Artificial Sequence: Synthetic coding sequence"
  source 1..195: mol_type = other DNA
ctccaaggagagttccttcctcagccacggcaacagcaccacgggacgcttgtcctgcattaccgccctcacagagaagaagctggcatgcaacatccgtgtttgtggcctggctcctcccattgtagcgatgactcaactctgcgacgcctccaatgcgaaagcgtcacttcaatcggggctgtatgcccatag

SEQ ID NO: 4279 - DNA, 1752 bp, synthetic construct
  misc_feature 1..1752: note = source = /note="Description of Artificial Sequence: Synthetic coding sequence"
  source 1..1752: mol_type = other DNA
atggcacacgtgcggggactgcagctccccggatgcctggcattagcagcactctgtagcctggtgcacagccaacacgtgttcctcgcaccccaacaggccagatccctgctgcagcgagtgcgcagagccaatacattcctggaagaggtcaggaagggcaatttagagagggagtgcgtggaagaaacctgcagctatgaggaagcatttgaggcactggagagcagtaccgctaccgatgtgttctgggccaagtacacggcttgtgagaccgcgaggacaccacgagacaagttggctgcctgcctggagggtaactgcgcagagggcctgggtactaactaccgaggtcacgtgaacataacccggtctggcattgagtgtcaactgtggcgctctagatacccccacaagccagaaataaacagtaccacacatcccggagcagacctgcaggaaaacttttgccgcaaccctgactcttcaactacggggccttggtgttatactacagaccccacagtccgcagacaggagtgctctatacctgtctgcgggcaggatcaggtgaccgtcgcaatgaccccgcgaagtgaggggtccagtgtaaacctgtcccctcccctggaacagtgtgtgccagatcgcggacaacagtaccaaggtagactagccgtgaccacacatggactgccctgtttggcttgggcatctgcccaggcgaaggccttgtccaaacatcaagactttaatagcgctgttcagttagtagagaacttctgtaggaaccccgacggtgacgaggaaggggtttggtgttacgttgccggaaaaccaggcgactttgggtactgcgacctgaattactgcgaggaggctgttgaggaggaaaccggggatggccttgacgaggactccgatagggccatcgagggacgcaccgccacctccgaatatcagaccttctttaatcccaggactttcggatccggggaggcagattgcggtcttcgcccactgttcgaaaaaaaaagtttggaagacaagaccgaacgcgagttgctggagtcctacatagacgggaggatcgtagagggctccgatgcagaaattggcatgtctccttggcaggtgatgcttttccgtaagtcaccccaggaacttctttgtggtgcctccctgatttctgaccgctgggttctgaccgcagcacattgcctgttgtaccctccttgggacaaaaacttcacggaaaacgatctgctggtgaggatcggcaaacactctagaacccggtatgagagaaacattgagaagatctctatgttagaaaagatttatattcacccgagtctactgcaagccggatataagggaagggttactggctgggggaacctgaaggagacttggacagcaaacgtgggcaaaggccagccatccgtactgcaggtagtgaacctgcctatcgttgaaagacccgtctgcaaggactcgacccgtattcgaattactgacaacatgttttgcgcagggtataaacctgacgaaggcaagcgcggtgatgcctgcgagggtgattccggagggccattcgttatgaagtctccttttaacaaccgctggtaccaaatggggatcgtgagttggggtgaagggtgtgatcgggacggaaaatatgggttttatacgcatgtctttcgcctgaaaaaatggattcagaaggtcatagatcagttcggagagtag

SEQ ID NO: 4280 - DNA, 888 bp, synthetic construct
  misc_feature 1..888: note = source = /note="Description of Artificial Sequence: Synthetic coding sequence"
  source 1..888: mol_type = other DNA
atggaaaccccagcttggcctcgcgtgcccaggccagagaccgctgtagccaggacattgctgctgggatgggtgtttgctcaggtagctggtgcatctggaaccacaaatactgtcgctgcatacaacctcacttggaagagtaccaacttcaagacaattcttgaatgggagcccaaacccgtgaatcaggtgtataccgtccagatctctactaagagcggagattggaagtccaaatgcttttacacgacggacacagaatgcgatctgaccgacgaaatcgtgaaggacgtgaagcaaacatatttggcacgggtattctcataccccgcaggaaatgtggaaagcaccggctccgccggtgaacctctgtacgagaattcacccgagttcaccccctacctggaaactaaccttgggcaaccaacgatccagtccttcgaacaggtgggcaccaaagtgaatgtcactgtcgaagatgaacggaccttagtaagacggaataataccttcctgagcttacgcgatgtatttggtaaagaccttatttatacattgtattactggaagtcttcgtcttccggaaaaaagaccgccaaaaccaacaccaacgaatttctgatcgatgtagacaaaggcgagaactactgttttagcgtgcaagccgtgatcccaagcaggacagtgaatcggaagagcacggacagtccagtggagtgtatgggacaggagaaaggagagtttcgagagattttctacattattggcgctgttgtctttgtggtcatcattcttgtgatcatccttgctatcagtctccacaagtgcaggaaagccggagtgggacaatcgtggaaagagaatagtccattgaatgtctcttag

SEQ ID NO: 4281 - DNA, 717 bp, synthetic construct
  misc_feature 1..717: note = source = /note="Description of Artificial Sequence: Synthetic coding sequence"
  source 1..717: mol_type = other DNA
atggaaacccccgcttggccaagggtgcctaggcctgagactgctgttgcaagaacccttctcctcggctgggttttcgctcaggtggccggtgccagcggcactaccaacactgtggccgcttacaacctgacttggaagagcactaattttaagacaattctggagtgggagccgaagccggtgaaccaggtttatactgtccaaatctctactaagagtggagactggaaaagtaagtgtttttataccaccgatactgaatgcgatctgaccgacgagatcgtgaaggacgtcaagcaaacctatttagcaagagtgttctcgtacccagcaggtaacgtagaaagcactggctctgctggtgaacctttatatgagaacagccctgagttcaccccctacctggaaacaaacctgggtcaacctacaatccaatcgtttgaacaggtgggaaccaaagtgaatgtcaccgtggaagacgaaagaacattggtgagacgaaacaacacttttttatctctcagggacgtgttcggaaaagacctaatctatacgttatactactggaagtctagtagctctggcaagaagtatagcaccagcctcgaactgtggtatctatggagtagctctttatcaagcagctggctttacctgtacaccagcgtggaacgacaggagtggggcagagcagggagaagaacacctcattag

SEQ ID NO: 4282 - DNA, 3807 bp, synthetic construct
  misc_feature 1..3807: note = source = /note="Description of Artificial Sequence: Synthetic coding sequence"
  source 1..3807: mol_type = other DNA
atgatcgctgcccctgagatcccaactgatttcaacctgctccaagagtccgaaacccactttagctccgacactgactttgaagatattgaggggaaaaatcagaaacaaggaaaaggcaagacctgcaagaaaggaaaaaaaggccctgcggaaaagggaaaagggggtaatggtggtgggaagcctcccagtggtcctaatcggatgaatggacaccaccaacagaatggtgtagaaaatatgatgctatttgaggttgtgaaaatgggtaagagtgctatgcagtctgtggttgatgactggatcgaatcctataaacacgatagagatatcgcccttctggatctgattaatttcttcattcaatgttctggttgtaaaggcgtggtaaccgccgagatgttccgtcatatgcagaattccgagatcattaggaagatgacagaggaatttgatgaggacagtggcgactaccctctaactatggccggacctcaatggaaaaaatttaaaagctcgttttgcgaattcattggcgtgctcgtaaggcagtgccagtacagcatcatttatgacgagtacatgatggataccgtgatatccttactgacagggttgagcgactcacaagtcagggcctttcggcatacatctacgctggccgcaatgaaactcatgacggccttggtgaacgtggcactaaacttgtcgatcaacatggataacacccagagacagtatgaggctgagcgcaacaaaatgatcggaaaaagagccaacgaacgactggagctgttgcttcagaagcgcaaggaactgcaagaaaatcaggatgaaatcgagaacatgatgaatgcgatctttaagggcgtttttgttcaccgctaccgggacgccatcgccgaaattcgagccatctgcatcgaggagattggaatctggatgaagatgtacagtgacgccttcttaaacgactcttatctgaagtacgtaggctggacaatgcacgacaagcagggagaagtgcgactgaaatgccttaccgcgctgcagggcctctactataacaaagagctgaactccaagctcgagctatttaccagtaggttcaaagaccggatcgtgtctatgactttggacaaggagtacgacgttgcggtgcaggctattaagctcctcactctcgtgctgcagagcagcgaggaagtgctaacagccgaggactgcgaaaatgtgtatcacctggtgtactcagcacacaggcctgtagccgttgcggctggtgagttcctgtataaaaaactgttttctcgcagggatcctgaggaggacggaatgatgaagcgcagaggccgacaaggcccaaacgcaaacctagtgaaaacactcgtatttttctttctcgagtctgagttgcacgaacatgccgcatatcttgtggatagcatgtgggactgcgcaaccgagttactgaaggattgggagtgcatgaacagtctactcctggaggaacccttgtcaggcgaggaagcactcaccgaccgacaggaatccgctctaatcgaaatcatgctttgcacaatacggcaggcagccgaatgccaccccccagtgggtagaggaacagggaagagggtgcttacagcaaaagaaaagaagacgcagctcgatgacagaaccaaaattaccgagctattcgcagttgcactgccccagctgctggctaagtacagcgttgatgccgagaaagtgacaaacctcctgcagcttccccagtacttcgatcttgagatttatactaccggaaggctggaaaagcacctggacgccttactgagacagatcaggaatatcgtagaaaagcatacagatactgatgtattggaggcttgttcgaaaacttaccatgctctgtgtaatgaggaattcacgatattcaatcgtgtggatattagcagatctcagctcattgacgagctcgccgacaagttcaatagactgcttgaggatttccttcaggagggcgaggaacccgacgaggacgacgcttaccaggttctcagcacccttaagaggatcaccgccttccacaacgcccatgacctcagcaagtgggacttgttcgcatgcaattacaagctgctgaagaccggaatcgagaatggggatatgcccgaacaaatcgttatacacgctctccagtgcactcattatgtgatcctgtggcagctggctaaaattaccgaaagtagctcgacaaaggaagatctcctgcggttgaagaaacaaatgagggtcttctgccaaatatgccagcactatttgaccaatgtgaacacaacagtgaaagagcaagcctttacgattctgtgcgacatccttatgatattctcccatcagatcatgagtggcggacgcgatatgcttgagcctttagtatacacacccgacagctcgctccagagcgaactcttatcttttattctcgatcacgtctttattgaacaggacgacgataacaactctgcggacgggcagcaggaggacgaagccagcaagattgaagccttgcacaagagacgcaacttattggcagctttctgcaaactgatcgtgtacactgtggtggaaatgaacactgcagccgacatcttcaaacagtacatgaagtactataatgattacggtgacattattaaagagaccatgtctaaaaccaggcaaatcgacaagatccaatgtgcgaagacactgatcttgtctttacagcaattattcaatgagatgatccaggaaaacgggtataactttgatcggtcctcatctaccttctcgggcattaaggaactggctcgaaggtttgctctcacttttggacttgaccagctgaaaacacgcgaagccatcgccatgctgcacaaggatggcattgaattcgccttcaaggagccaaatccccagggagaatcccatcctcctcttaaccttgccttcctggatatcttgtccgaattttcctccaagttattacgtcaggataagaggaccgtgtatgtatacctggagaagttcatgacttttcagatgtctctgcgccgtgaggacgtgtggcttccacttatgagctaccgaaactcactcctcgcaggtggcgacgacgatactatgagcgtgataagtggtatcagttctagagggtcaaccgttaggtccaagaagagtaagccgtccactggaaaaagaaaggtggtcgaaggcatgcagttgagcttgacagaagagtcatcttcatctgattccatgtggttaagccgtgaacagactctgcacacccctgtgatgatgcaaacacctcagctcacttcaaccattatgcgagaaccaaagagattgagacctgaggatagcttcatgtccgtataccccatgcagacagagcaccaccagactcctttagattacaatacccaagttacttggatgctggctcagaggcaacaggaggaggctcgacagcagcaggagcgtgcggcaatgagttacgtaaagctgaggaccaacctgcagcatgccatcagacggggaacctccctgatggaagacgatgaggaacccatcgtggaagacgtaatgatgtcttctgagggaaggattgaagatctgaacgaaggtatggactttgataccatggacatagacctgccaccatcaaagaaccgcagagaaagaaccgagttgaagcctgactttttcgatcccgcatccattatggacgaaagcgtattaggcgtatcaatgttttag

SEQ ID NO: 4283 - DNA, 1272 bp, synthetic construct
  misc_feature 1..1272: note = source = /note="Description of Artificial Sequence: Synthetic coding sequence"
  source 1..1272: mol_type = other DNA
atgcagagggtcaacatgattatggccgagtctcctggcctaataacaatctgcctgctgggatatctcctgtcggccgaatgtaccgtcttccttgaccacgaaaatgcgaacaagattctcaatcgtcctaaaagatataattctggtaagctggaggaatttgtgcagggaaatctggaaagagagtgcatggaggaaaaatgcagctttgaagaggctcgagaggtgttcgaaaacacagagagaaccaccgaattttggaagcagtacgtggacgtgacttgcaacataaagaatggtcggtgtgagcagttctgcaagaatagtgcggacaataaagtagtgtgttcctgcaccgagggctacaggctagcagaaaaccagaaatcttgtgaacctgctgtgcccttcccatgcggaagagtaagcgtcagccaaactagtaagctcacacgggcagagactgtgttccctgatgtcgactatgttaatagtacggaagcagaaacaatcctggacaatatcactcagtctactcagtctttcaacgacttcacccgggtggtcggcggagaggatgcaaagcccggacagtttccctggcaagtcgtgctgaacggtaaagtagacgccttctgtggcggtagcatagtcaacgagaagtggatcgtgacagccgctcattgtgtggagaccggcgtcaagattactgtcgtagcaggtgagcataacattgaagagacagagcacacggagcagaaacgtaatgttatccggataattccccatcataattacaatgccgcaataaacaagtataaccatgacattgctttactggagctcgacgagcctctcgtccttaactcttatgtgaccccaatatgcatagctgataaagaatacaccaacatctttctgaaatttggtagcggctatgtgagtggatgggggcgagttttccataaagggaggagcgccctcgttctccagtacttacgggttccccttgtggatagggccacctgtctccgatcaaccaaattcaccatctataataatatgttttgcgcagggttccacgaagggggacgggatagttgtcagggtgattccggtggcccacacgtgaccgaagtggagggaacaagtttccttaccgggattatatcatggggggaagaatgcgctatgaaaggcaagtacggcatttacaccaaagtcagccgatatgtaaactggatcaaggagaaaacgaaacttacgtag

SEQ ID NO: 4284 - DNA, 6689 bp, synthetic construct
  misc_feature 1..6689: note = source = /note="Description of Artificial Sequence: Synthetic coding sequence"
  source 1..6689: mol_type = other DNA
atgttccctgggtgtcctaggttgtgggtgctggtcgtgctcggcacttcatgggtgggatgggggtcccaaggcacagaagccgctcaactacggcaattttacgtggccgcacagggcatctcctggtcgtaccgacctgagccaacaaatagctccttgaatttgagcgtaactagctttaaaaagattgtgtatagagagtatgagccttatttcaaaaaagagaagcctcagtccactattagcggactgctcggaccgactttgtatgctgaggtcggcgatatcattaaagtgcattttaagaacaaggcagacaaacccctgagtattcacccccaaggtatccgatactcaaagctcagcgagggagcgagttatctggaccacacattccccgcagagaagatggacgatgctgtggcgccaggtcgggagtacacttatgaatggtcaatcagtgaggacagcgggccaactcatgatgatcctccctgcctcacccacatctactacagtcacgagaacctcatagaagactttaacagtggcctgattggccctctgctcatctgcaaaaagggtaccttaaccgaagggggtacccagaagactttcgataagcaaatagtcttgctcttcgctgtctttgatgaatctaagtcctggagtcagagcagttccctgatgtatacagtgaatggatatgtcaatgggaccatgcctgatataacagtgtgtgctcatgatcacatctcatggcaccttctagggatgagtagcggcccagaactgttcagtattcatttcaacggacaggtcttagagcagaatcaccataaggtgagtgctatcaccctcgtatccgcaactagcaccacggcaaatatgacagtgggtcccgaaggaaagtggataatcagtagtctgacacctaagcatcttcaggctggtatgcaggcttacatagacatcaagaactgccccaagaagacacggaatcttaaaaagattaccagagagcagagacgtcatatgaagcggtgggagtattttatagccgctgaagaagtcatctgggattatgcccctgtgattcccgctaatatggacaagaaatatcgatcccaacacctggacaatttttctaatcagatcgggaagcactacaagaaagtcatgtacactcaatatgaggacgagtcattcaccaaacatactgtgaatccgaacatgaaggaagacgggatcttggggccaattattagagcccaggtccgggacacgctgaaaattgtcttcaagaatatggcctctagaccgtacagcatttaccctcacggagtcaccttctccccttatgaagatgaggtgaactctagttttacctcaggcaggaacaataccatgatacgtgccgttcaaccaggagagacttacacgtacaagtggaacattcttgagtttgatgaaccaaccgagaacgatgcgcaatgccttacgaggccctactactccgacgtggatattatgagagatatcgcgtcagggctgatcggactgctcctcatttgtaaatctaggtcacttgaccggcaaggcattcaacgagccgcagatattgagcagcaggctgtttttgccgtcttcgacgagaataaatcctggtacctggaggacaacatcaacaagttctgcgaaaatcccgacgaggtgaagcgggatgatccgaaattctacgagtcaaacattatgagcaattttacattatcagctatcaacggctatgtgcccgaaagtattacaactctggggttctgtttcgatgacaccgtgcagtggcatttctgttctgtgggtacacagaatgagattctgaccattcacttcaccggacattccttcatctacgggaagagacatgaggatactcttacactgttccctatgagaggcgagagcgtgaccgtgaccatggacaatgtgggtacttggatgctcaccagcatgaactcatcacctcgaagcaaaaaattacgccttaaattcagggacgtgaagtgtatccccgacgatgacgaggattcatatgagatttttgagccaccggagagcaccgttatggcaacccgcaagatgcacgatcgactcgagcctgaggacgaagagtcggatgcagattacgattatcaaaatcggttggcagctgcacttgggatcagatcattccgaaattcttctctgaatcaggaggaggaagaattcaatctaacagccctggctctggagaatggcacggaatttgttagttccaacaccgacattatcgtgggctctaattactcctcaccttccaacatctccaaattcacggtcaataacctagctgaaccccagaaagctcctagccatcagcaggccactacagctggctcaccccttcgccatttgatcgggaaaaacagcgtgctcaactcatcaacagccgagcactcctctccctatagcgaggatcctatcgaagacccactgcagcccgatgtgacgggtattcggctgttgagtcttggcgcaggggagttcaaaagccaagaacatgctaagcacaaggggcctaaggttgagagggaccaggccgctaaacacagattcagctggatgaaattacttgcccacaaggtcggcaggcatctgtcacaggatacagggagccctagcggaatgagaccctgggaagatctgccttcacaggacacgggctcaccatcgcggatgaggccttggaaggacccaccctcagacttgctgttactgaaacagagcaactcctcaaagattctcgtcggtaggtggcacttggccagtgagaaaggatcatacgagattatccaggacacagatgaagataccgctgtgaacaattggctgatttctccacaaaacgcttctagggcttggggagagtccaccccactcgcgaataaaccagggaagcagtcaggtcaccccaagttcccacgcgtgcgacacaagagtttacaggtgcggcaggatggtggaaaatcccgtttaaaaaagagtcaattccttatcaagacccgcaaaaagaaaaaggagaagcatactcatcatgcgcctctgtcacccagaaccttccatccacttagatccgaggcttataacactttttcagaaagacgcttgaaacactcgctcgtcttgcacaagagcaacgaaacttcgctcccaaccgatcttaatcagactctgccatccatggactttggctggattgcttccttgcctgaccataatcaaaacagcagtaatgacactggccaggcgtcctgccctccaggcctttatcagaccgtgccacctgaagaacactaccaaaccttccctattcaagaccccgatcagatgcattctacatccgatccatcccatagatcatcatcacccgaactatccgagatgttggaatacgatcgctctcacaagtcattcccgaccgatatctcgcagatgtccccgagctccgaacacgaagtctggcagactgtcatctccccggacctgtcccaagttacattgagccctgagctgtctcagaccaatctgtccccagatctgagccataccacactcagccccgaacttatacaacggaacctctcacccgctcttgggcagatgcctatctctccggatctctcccatactacccttagtccagacctttctcatactaccttgtcccttgacctcagccagacaaatctgagtcccgagctctcccaaaccaatctctctcctgcgttaggacagatgcctctgtcgccagacctgagccatacaaccttgtctctggattttagccagacaaaccttagccctgagctttctcatatgacgctgtccccagagctgtcccagactaatctgtcccctgccctggggcagatgcccatttctcccgacttatctcatacgacgctgtctttggactttagccagaccaacctcagccctgagctgtcccagaccaacctaagtccagccctcggacagatgccactttccccagaccccagccataccacattgtccttggacctatcacaaaccaatttgtcgccagaattgtcccagaccaacctgagtccggacttgagcgagatgcctctcttcgccgatttgtcccagattcccctgaccccggacctggatcagatgacactctcccctgacctcggagagacagatttgtcaccaaattttggccaaatgtctctatcaccagatctcagccaggtaactctgagccccgatatctctgacactaccttgctgcctgacctgtctcagatctcacctccacctgacctcgaccagatcttttacccaagcgaatctagccaatcacttctgctgcaggaattcaacgagagttttccctatcccgatcttgggcaaatgccaagtccaagcagccccacacttaacgacaccttcctctccaaggaatttaatccactggtgatcgttggtctgtcaaaagacggcaccgattacatcgagattatcccaaaggaagaagttcaaagcagtgaggacgactatgccgaaatcgattacgtgccttacgatgatccatataagacagacgtgaggaccaatatcaacagctcacgggatccggacaacatagcggcatggtacttgcgctctaataatggtaatcgcaggaattattatatagcagcagaggagatttcatgggactattccgaatttgtgcaaagggagacggatatcgaagacagtgatgatattcccgaggataccacttataagaaagtcgttttcaggaagtacttagactctacatttacaaagcgcgaccctcggggagagtacgaagagcatctggggattctgggaccaatcattagagctgaggtagacgacgtgatacaggtgcgtttcaagaatctcgcatccagaccgtacagcctgcacgctcacggactgtcctacgaaaaatcaagcgagggcaagacatacgaggatgactctccggaatggtttaaggaggacaacgcggtccaacccaactcatcctacacctacgtatggcatgccaccgagcggagcgggccagagtcccctgggtcagcatgccgcgcttgggcatactacagcgccgtgaaccccgaaaaagacattcacagtgggcttatcggtcccctgctgatctgtcagaaggggattcttcataaagactctaacatgcctatggatatgagagaattcgtgcttctgttcatgaccttcgatgagaagaagtcctggtattatgaaaagaaatcacgctcaagttggcggctgacctctagcgagatgaaaaaatcacacgagtttcatgctattaacggcatgatctacagtctccccggattgaaaatgtacgagcaggaatgggttagactacatttactgaatatcggtggcagtcaggatatccatgtggttcattttcatggacagacccttctcgagaacggtaacaagcagcaccagttgggtgtctggcctttgctgccaggaagcttcaagactctcgagatgaaggcatcaaaacccggatggtggctgcttaatacagaagttggtgagaaccagcgcgctggaatgcagacccctttcctaattatggacagggattgcagaatgcctatgggactatccacgggcataatttcagacagccaaattaaagcttccgagttcttggggtactgggaacccagactggcacggctgaataatgggggttcatacaacgcctggagtgtggagaaactggccgctgagttcgcttcaaaaccatggattcaggtggatatgcagaaggaagttatcatcaccggtatacagacacaaggggctaaacattacctcaaaagttgttatacaacagaattttacgtcgcatattcctccaaccagattaattggcagattttcaaaggaaactcaaccagaaacgtcatgtattttaacggaaactccgacgcctctaccatcaaagagaaccagtttgatcccccaattgttgctcgatatattagaattagccctacgagggcttataacaggcccaccctgaggttggaactgcagggctgcgaagtcaacggatgcagtacacccctagggatggaaaatggcaaaatagagaataaacaaatcacggccagctctttcaaaaagagctggtggggggactattgggagccatttagggctcggctcaatgcacaaggcagggtcaatgcctggcaggccaaggcaaataacaacaaacagtggctcgagatcgacttgctcaagatcaagaaaatcacagccattataactcagggctgcaaatcactttcatcagaaatgtatgtaaaatcatacaccatacactactcagagcagggggtcgagtggaagccataccgcttaaagtcctctatggtagacaaaattttcgaaggaaacacaaatacgaaggggcatgtaaaaaacttttttaacccccctattatctctcgatttatcagggtgatcccgaaaacatggaatcagagcatcgctcttaggctggagctattcgggtgtgatatttacta

SEQ ID NO: 4285 - DNA, 6674 bp, synthetic construct
  misc_feature 1..6674: note = source = /note="Description of Artificial Sequence: Synthetic coding sequence"
  source 1..6674: mol_type = other DNA
atgttccctggctgtccaagactctgggtcttggtagtcttgggtaccagctgggtaggatgggggagccaaggcaccgaggcggctcaacttcgtcaattttatgtggcagcacagggaatatcttggtcctaccgcccagagccaacaaactcctccctgaacctttccgtcaccagtttcaagaagatcgtgtacagggaatatgagccttacttcaaaaaagagaaaccacagtctaccataagcggactgcttggtcccacactgtacgccgaggtgggagatattatcaaggtgcacttcaagaacaaggctgataagccgctgtccatacacccacaagggatccgatattccaaattgagcgagggggcatcttaccttgatcacactttcccggctgagaagatggatgatgccgtggcacctgggagagaatacacgtacgaatggtctatttccgaggattccggaccaactcacgacgatcctccttgcctgacacacatctactactcacatgaaaacctgatcgaggatttcaattcaggactgatcggaccacttttgatatgtaagaagggtacactgacggaagggggaacacagaagaccttcgataagcaaattgtgttactcttcgccgtgttcgatgaatctaaaagttggtcacagtccagctctcttatgtatactgttaatggttacgtaaatggcaccatgcctgatattacagtatgtgcccacgatcatatcagctggcacctgctcggtatgtcctccggacccgaactgttttccatacatttcaacggccaggtcttggagcagaaccaccataaggtttccgccatcactctcgtcagcgcaacaagcaccacagcaaatatgacggtgggcccagagggtaagtggataattagcagcctgacccccaagcacttgcaggccggaatgcaggcctacatcgatatcaagaactgccccaagaagacccgcaatctcaagaagatcactcgggagcagcgtagacacatgaagcgatgggaatactttattgcagccgaggaggttatctgggactacgcccctgtgatccccgctaacatggataagaagtacagatcacaacacctcgataatttctcaaatcagatcggaaagcattacaagaaggtgatgtatacccagtatgaagacgagtccttcaccaagcataccgtaaatccaaatatgaaagaagacgggattctcggccctattatcagagcccaggtgcgagacactctgaagattgtgtttaagaacatggcatccaggccttattccatctatccacacggcgtgaccttttccccatatgaagatgaagtcaactccagcttcactagcggcagaaacaatacgatgattcgagctgtacagcccggtgagacctacacatataaatggaacattctcgaatttgatgagcctaccgaaaacgatgctcagtgtctcacgaggccatattacagtgacgtggatattatgcgcgacatagcaagcggcttgataggattacttctgatttgtaaaagcagatccttagatcggcaggggatccaaagggcagcagacattgaacagcaggcggtctttgccgtcttcgatgagaataaatcttggtaccttgaagacaatatcaacaaattctgcgagaacccggatgaggtgaaacgagacgatccaaaattttacgagtcaaatatcatgagcaccataaatggctatgtcccagagtccattactacactggggttttgttttgatgacacagtgcagtggcatttctgctctgtgggcacccagaacgagatcttgaccattcacttcactggacattcattcatctacggtaagagacatgaggacactctcaccctgtttcctatgcggggtgagtctgtaacagtgaccatggacaacgtgggtacctggatgctgacctccatgaatagcagtcccagatccaagaagctgcgccttaaatttcgtgatgtgaaatgcattccggatgatgacgaggactcctacgaaatattcgagccaccggaaagcaccgtaatggccactagaaaaatgcatgataggctggaaccagaagacgaagaatcagatgcggactatgactatcagaacaggctcgctgccgctctgggaataaggagctttaggaactcttcattgaaccaggaggaggaagaattcaatctgacagccctcgccctggagaatggcacggagtttgtttcctcaaatactgacatcatagtcggcagcaactatagcagcccgagcaacatctcaaagtttacagtcaataatttggctgagcctcaaaaggccccttcacaccagcaagccacaacggccggaagccctttgcgccacctcataggaaagaactctgtgttgaactcttcaaccgctgagcattcttctccatacagtgaggatccgatcgaagatcccctgcagcccgacgttaccggaatacggttactgtctcttggcgcaggagaatttaaaagtcaagaacacgcaaaacataaaggtcccaaagtggagagggatcaggcagccaaacacagattcagttggatgaaactcctggcccataaggtcggtaggcacttatcacaggatactggctctccaagcggtatgaggccctgggaggatctaccaagccaggatacaggatcgccatcacgcatgcgaccctggaaggaccccccttcagaccttctgctgctgaaacagtccaattcctctaaaattctcgtcggcagatggcacctagcctcggaaaaagggtcctacgaaattatccaggacacagatgaagatacagcagtcaacaactggctcatcagtccccagaacgcgagtcgggcatggggggagagtacgcccctagccaataagccagggaagcagtccggtcacccaaagtttccccgagttcggcataagtccctccaagtacgtcaagacggtgggaagtctaggcttaagaagtcacagttcttgatcaagactaggaagaagaaaaaagagaagcacacacatcacgcaccattaagccccaggacgtttcaccccctcagaagcgaggcttacaacaccttctccgagcgcagactgaaacactccctggtgctccataagagtaacgaaacctcattacccacagatctgaatcagaccctcccttccatggacttcgggtggattgcttcattaccagatcacaaccagaacagttcaaacgatacaggtcaggcctcctgccctccaggtctctatcagacggtcccacctgaagagcactaccagaccttccccatccaagaccctgaccaaatgcatagcacctctgacccctctcatcggtcatctagcccagagttgtccgagatgctcgaatatgacagatcccataaaagcttccccactgatatttctcaaatgagcccgagtagcgagcacgaggtctggcagacagtgatcagtcctgatctcagccaggtgactctttcaccggaactgtcccaaacaaatttgtcacctgatttgagccacactaccctgtcaccggagctcatccagcgcaacctatcccctgctctgggacaaatgcccatttctccagacctgtcgcatactacactgtccccagacctgagtcatactactctgtctctcgatctttctcagacaaatctttcgcccgaactctcgcagaccaacctttcgcccgcattgggacagatgcccctgtcccccgatctgtcccacacgacgctgtctctggattttagtcagacgaatctgagtccagagctgagtcacatgacactttctccagagctctcacagacaaatcttagtcccgctttaggacagatgcctatcagccctgaccttagccacaccaccctttccttggatttctcacagaccaacctcagccctgaattgtcccagaccaatctgtctcccgcactgggtcagatgcccctgagcccagatccaagtcatactaccttgtctttggacctgagccaaacaaacctttctccggagctgagccagaccaatttaagccccgaccttagcgagatgcccttattcgccgacctgtcgcaaatcccccttacccctgacctggatcagatgaccttgtcccctgatctgggggagactgacctctcccccaattttggccagatgagtctcagcccagatctcagccaagtcacattatcgccggacataagtgatactacactgctcccagacctctcccaaatctcccctccccctgacctggaccagatcttctacccctccgagagttctcagagcttgctactccaagaattcaacgaatctttcccctatcctgacttaggacagatgcctagtccatcaagccccaccttgaatgatacatttctgtccaaggagtttaatcccctcgtgattgttgggctgagtaaggacggaactgactatatcgagattatacctaaagaagaggtgcagtctagcgaagatgattacgcggagattgactatgtgccttacgatgacccctacaagacagatgtgaggaccaatatcaactcttcaagagatccagataatattgccgcttggtacttgcggagtaacaacggtaaccggaggaattattatatagcagcagaggaaatcagctgggactattccgaattcgtccagcgtgagacagatattgaggattctgacgacatccccgaggatactacctacaagaaagtggtctttagaaaatacctcgattctacctttactaagagggatcctaggggcgagtatgaagaacatctaggcattctgggccctatcatacgagccgaagtggacgatgtcattcaggtgcgttttaaaaatctggcatcacgaccttactctctccatgctcatggactatcctatgagaaaagcagcgagggcaagacctacgaggacgacagtccggagtggttcaaggaggataacgcagtgcagcccaatagctcctatacttatgtctggcatgctacggaaagatccggaccagagtctcccggttccgcctgtcgagcatgggcctactattctgccgttaacccagagaaggatatccactccgggctgatcgggccattgcttatctgccaaaagggtatcttgcacaaggatagtaacatgcccatggacatgcgcgaattcgtattattatttatgacctttgacgagaagaagtcatggtactacgagaaaaaaagtcgaagcagctggagactgaccagctccgaaatgaagaagtcccacgagtttcacgctatcaacggcatgatctactcattgccaggtctaaagatgtacgaacaggagtgggtccgcctgcacttactgaacattggaggatcgcaggacatacacgtggtgcacttccatggccagacgctgctggagaatggcaacaagcagcatcaactgggcgtgtggcctttgcttcctggatccttcaagactctggagatgaaagcaagcaaacctggatggtggttgctgaatacggaggtgggagagaaccaacgagccggaatgcagactcctttcctgataatggaccgggattgtcggatgcccatgggtctaagcaccggtatcatttcggattctcaaattaaggcatctgaattcctgggttactgggaacctcggctcgccaggctcaacaatgggggtagttataacgcatggtccgtggagaagctggctgccgagtttgcctctaagccttggatacaggttgatatgcagaaagaggtgattatcaccggcatccagactcagggagctaagcattacctgaaatcgtgctataccaccgaattttacgtggcttacagcagtaaccagattaactggcagatctttaaagggaattctacaagaaacgttatgtacttcaacggtaactcggatgcgagcaccataaaggagaatcaattcgatccccctatcgtggccaggtatatcagaatctctccaactcgggcatacaatagacccacgcttagattagagctgcaaggctgtgaggtgaacggctgctccactcctctgggaatggagaatggtaagattgagaataagcaaataacagcttctagtttcaagaagtcttggtggggggactactgggagccttttcgtgccaggcttaatgcgcagggcagggttaacgcatggcaggctaaagctaacaacaataagcaatggctggagatcgacttgttaaagattaagaaaatcacggccattattacccaagggtgtaaatccttgagcagtgaaatgtacgtaaagtcttatacgattcattactccgaacagggagtcgagtggaagccataccggctgaagtccagtatggtggacaagatctttgaagggaatactaacacaaaaggtcacgtaaaaaatttcttcaacccacctattataagtcggttcatcagagtgatcccaaagacatggaaccagtccatagcccttaggctggaactgtttggatgtgatatatatta

SEQ ID NO: 4286 - DNA, 999 bp, synthetic construct
  misc_feature 1..999: note = source = /note="Description of Artificial Sequence: Synthetic coding sequence"
  source 1..999: mol_type = other DNA
atggatgacgctgtcgccccaggacgagaatacacgtatgagtggtcaatctccgaagacagcggtccgacacatgatgaccccccatgtctgacccacatctattattcccacgagaacttgattgaggattttaactccggactgattggccctctgcttatttgcaagaaaggaaccctcaccgaaggtgggacccagaagaccttcgataagcagattgtgttgctgttcgccgtcttcgacgagtccaagagctggtcccagtcttcctccttgatgtatacagtcaacggttacgttaatggcacaatgcctgacatcacagtgtgtgcccatgatcacattagctggcacctgcttggcatgtcgtcagggcctgaattgttttctatccactttaatggccaggttttagagcagaatcaccacaaggttagtgctattactctcgtgtcagctacatccacaaccgctaatatgactgtggggccagaaggaaagtggattatatcctctctgacgcccaagcatctacaagcaggaatgcaggcctacatcgacatcaagaattgtccaaagaaaacaaggaatttaaaaaaaatcaccagagaacagcggagacacatgaagcggtgggagtactttatcgccgctgaagaggtgatttgggactatgcaccagtgatcccagcaaatatggacaagaagtacagaagccagcatctggataacttctccaaccagattggcaagcactataaaaaagttatgtatacgcagtacgaagatgaaagctttaccaagcataccgtgaatcctaacatgaaggaagatggcatcctcggcccaatcattcgcgctcaggtgcgcgataccctgaagatcgtcttcaagaatatggcctcgaggccctattccatttaccctcatggggttactttcagcccatacgaggacgaggtgaatagttctttcacatcggggacgacaccctag

SEQ ID NO: 4287 - DNA, 1335 bp, synthetic construct
  misc_feature 1..1335: note = source = /note="Description of Artificial Sequence: Synthetic coding sequence"
  source 1..1335: mol_type = other DNA
atggtgagccaggcgctgagactgctgtgcctattattgggcttgcagggatgcctggccgctgtcttcgttacccaggaggaggctcacggagttttgcaccggaggagaagggcaaacgccttccttgaggagctgaggccaggatctctggagagagaatgcaaagaggaacagtgcagttttgaagaggccagggagatttttaaggatgcggaaagaactaaacttttttggatttcgtattccgacggggatcagtgtgccagttccccttgccaaaatggaggcagctgcaaagaccaactgcaaagttacatttgcttctgtctgccagccttcgagggtcgaaattgtgagacccataaggacgaccagctcatctgcgttaatgaaaacggaggatgtgagcaatactgttccgatcacacaggaaccaaaagaagctgtagatgtcatgagggttactccctcctggcagatggcgtgtcctgcactccgacagtcgaatacccatgcggtaaaattccgatcctagagaaaagaaacgcttcaaagccacagggcaggatcgtgggcggaaaggtgtgtccaaagggcgaatgtccatggcaggtgctcctgttggtgaacggagctcagttgtgcggcggtacactcatcaacaccatctgggtggtatcggccgctcactgtttcgacaaaattaaaaactggcgtaatctgatcgcagtcctgggggagcacgacctctctgagcacgacggagacgaacagagccggagggtggcccaggtgataatccctagcacctatgtgccagggacaaccaatcatgacatagcactgctgagactgcatcagcccgtggtgctaactgaccacgtcgtgccgctgtgcttaccagaacgtaccttctctgagagaactctcgccttcgtgcgcttttctctggtgtccggatgggggcagctcctggatcgaggagcgactgccctcgagttgatggtactcaatgttccacgcctgatgacccaggactgtctgcagcagagtaggaaggtgggcgacagcccgaacattaccgaatatatgttctgcgccggatatagcgacgggtcaaaagattcatgcaaaggggactccggcggaccacatgcgacccactatcgaggtacctggtacttgaccgggattgtctcctggggtcagggatgcgcaactgtgggacacttcggagtgtatacccgcgtgtcccagtatattgaatggctgcaaaagctgatgcggtcagagccccgacctggtgtgctgctgagggcccctttcccctag

SEQ ID NO: 4288 - DNA, 1401 bp, synthetic construct
  misc_feature 1..1401: note = source = /note="Description of Artificial Sequence: Synthetic coding sequence"
  source 1..1401: mol_type = other DNA
atggtgtcccaggcactgagactcctttgcttgcttctgggcctgcagggttgtctggccgcaggcggagtggccaaagcctcaggcggtgaaacacgcgatatgccttggaagcccggaccacaccgggtgttcgtgactcaggaggaggcccacggtgtgctacacagacgcaggagagccaatgccttcctggaagaactgcgtcctggatcactggaaagagaatgtaaagaggaacagtgttcattcgaagaggccagggagatcttcaaagatgctgaaaggactaaattattctggatttcgtacagtgacggggatcagtgtgcgtcctccccatgccagaacggaggatcatgcaaagaccagcttcagtcctacatctgcttttgcctgccagcctttgagggcagaaattgcgagacgcacaaggacgatcagctgatatgcgtgaacgaaaacggtggttgcgaacaatactgctcagatcatactggtactaagagatcttgtcggtgtcacgaggggtacagcctgctggcagacggcgtatcttgcacgcccacagtagagtatccatgcgggaaaatccccatactggagaaacggaatgccagcaagccacaagggcgtattgtgggaggtaaggtgtgccccaaaggcgagtgcccttggcaggtgctgctgttagtcaatggtgcacagctgtgtggcggtacccttatcaacacaatctgggttgttagtgcggcacactgctttgacaagattaagaactggcgaaacctgattgcggtgctcggcgagcacgatctttccgagcacgatggagatgaacagagtaggcgagtcgcacaggtgatcatcccctcaacatacgtgcccggaactacaaatcatgacattgcgttactgcggttgcatcagcctgtcgtgctaaccgaccacgtggtgccactctgtcttcctgagcgcactttttctgagcggacactggctttcgtgcggttctcgttagttagcggctggggccaactccttgataggggggctaccgctctcgaacttatggtattgaacgtacctagactgatgacacaagattgtctgcaacagtcaagaaaagtgggagactcacctaacatcactgagtacatgttttgtgccggatacagcgatggaagcaaggattcttgtaaaggtgactctggaggacctcatgctactcactaccggggaacatggtaccttactggtatcgttagttgggggcagggatgtgccaccgtaggccatttcggagtctacactagagtgagtcagtacattgagtggctacaaaaactgatgcggagtgaaccccgaccaggggttcttttgagggccccattcccatag

SEQ ID NO: 4289 - DNA, 1194 bp, synthetic construct
  misc_feature 1..1194: note = source = /note="Description of Artificial Sequence: Synthetic coding sequence"
  source 1..1194: mol_type = other DNA
atgggaaatgtgaacaggcagggccagcattgccgggatttcatcatggtgtctcaggctctcagacttctttgtctacttctcgggttacagggatgtctcgctgcagacggtgatcaatgtgcttcatcaccatgccagaatggtgggtcctgtaaggatcagctccagtcctatatatgcttctgtctccccgcattcgagggcaggaactgtgaaacacacaaagatgatcaactcatctgtgtgaatgaaaacggcggttgtgaacagtattgctccgaccatacaggaaccaagagatcatgccgctgccacgaggggtattctctgcttgccgacggagtctcctgtacgcccactgttgaatacccctgcgggaagatccccatcctcgagaaacggaacgccagcaagccccagggccgaattgtcgggggaaaggtgtgccctaagggcgaatgcccatggcaagtcctgctgctcgtcaatggagcccagctgtgtgggggaactctgatcaacacaatctgggttgtgtctgccgctcactgcttcgacaagatcaagaattggcgtaacctgattgccgtgcttggggagcacgatttgtccgagcacgacggtgatgagcagtccagacgggtggctcaagtgatcattccctcaacatatgttccagggaccacaaaccatgacattgccctgcttaggttgcatcagcctgtcgtcttgaccgaccacgtggtgccactgtgtctgccagagcgtactttcagcgagcgaactctggccttcgttaggttctctctcgtcagtggttggggacagttgctagatcggggtgcaacagccctcgagctcatggtgctcaacgtgcctcgcttgatgacgcaggattgtttacagcaatctcgcaaagtgggcgacagtcccaacatcacagagtacatgttctgcgctgggtactctgacggctccaaggactcctgtaagggggattctggtggccctcacgccacccattaccgaggtacctggtacctgaccgggattgtgagctggggccaggggtgcgcgacggtgggccatttcggcgtctatacccgcgtctctcagtatatagaatggctgcagaagctgatgagaagtgagcctaggcctggtgtactgctgcgcgcaccttttccatag

SEQ ID NO: 4290 - DNA, 651 bp, synthetic construct
  misc_feature 1..651: note = source = /note="Description of Artificial Sequence: Synthetic coding sequence"
  source 1..651: mol_type = other DNA
atgagaatccaggatcccggaaaagtgtttttcggcaacgtcgattccagcggtataaaacacaacattttcaaccctcccatcattgccagatatatccgcctgcacccaacacactactcgattcggagcacacttaggatggagcttatgggctgtgatttgaacagctgttcgatgcctctggggatggaaagcaaagctattagtgacgcgcagatcacagccagcagctacttcactaatatgtttgccacatggtctccatccaaagcaagactgcacctccagggcagaagcaacgcctggagaccacaggtcaacaatccaaaagagtggctgcaggtagattttcaaaaaactatgaaggtcactggcgtcacgactcaaggggtaaagagtcttctgacaagtatgtacgtgaaggagttcttgatcagtagctcccaggatggtcatcagtggaccctctttttccaaaacggcaaagtgaaggtgtttcagggcaatcaagacagcttcacacccgtagtcaacagtctggatcccccactgttaacccgctaccttcgcatccacccacagtcctgggtccatcagatagccctgcggatggaagttcttggctgcgaagcccaggacttgtattag

SEQ ID NO: 4291 - DNA, 7056 bp, synthetic construct
  misc_feature 1..7056: note = source = /note="Description of Artificial Sequence: Synthetic coding sequence"
  source 1..7056: mol_type = other DNA
atgcagattgaactgtccacatgcttctttctctgtctattacgattttgcttttccgccaccaggagatactaccttggtgctgtcgaactgagctgggattacatgcagtcagacctgggggagttgcctgtggacgccaggtttccccctagagtcccaaaaagcttcccatttaacacttcagtcgtgtacaagaagacgctctttgtggaatttaccgatcatctgttcaacattgccaagcccagacctccgtggatgggcctgctggggccaacaattcaggccgaagtatatgatactgtagtgataaccctcaagaatatggcaagtcatccggtgtccttacatgctgtgggggtttcctattggaaggcttcagagggggctgagtacgacgaccaaacctcccagcgggaaaaggaggacgacaaagtatttccgggaggatcccacacctacgtatggcaggtcctgaaggagaacggtcctatggctagtgaccctttatgcttaacatactcgtatttaagccatgtggacctcgtgaaggacctgaatagcggccttatcggagccctgctggtgtgccgagagggatcactggctaaagagaaaacacagaccctccacaagtttatcctactgtttgcagtcttcgacgaagggaagagctggcattccgaaaccaagaattcactgatgcaggaccgggacgcagcatctgcaagggcttggcctaaaatgcacactgtcaatgggtatgtcaatcgttctttaccgggactgatagggtgccaccgcaagtctgtgtattggcacgtaattggaatgggcactactccagaggtccattccatctttttggaaggccacacctttctggtccgcaaccataggcaggcttcacttgagatatcccctatcaccttcttgaccgcacagactctcctcatggacctgggacagttcttgctgttttgtcatatctcttctcaccagcacgatggaatggaagcctatgtcaaggtggactcttgccccgaggaaccacaactgagaatgaagaataatgaggaagcagaagactatgacgacgacctcaccgattccgagatggacgttgtgcgctttgacgatgataactcaccttcctttatacagattaggtcggtggccaaaaagcacccgaaaacttgggtccattacattgcagccgaagaagaggactgggattacgcacccctcgttctggctcccgacgatcgcagctacaaatctcagtacctgaacaatggaccgcagcgcataggccgaaagtacaagaaagtccgattcatggcctacactgacgagacctttaaaacacgcgaggccattcaacacgagagcggaatcttagggccactgctgtatggtgaggtgggcgataccctgctcataatttttaagaaccaagcatctcgaccgtacaacatttatcctcatggcataaccgacgtcaggccactctattctcgaagactgccgaaaggcgtgaagcacctgaaggactttcccatccttcctggggagatctttaagtacaagtggacggtgacagtagaggatgggcctacgaagtccgatcctagatgtctgacaagatattacagcagttttgtaaatatggagcgtgacctggcgtccggccttattgggcctctcctgatttgctacaaggagtcagttgatcagagaggtaaccagatcatgtctgacaagcgcaacgtaatcctgttttctgtgttcgatgagaacagaagctggtatctgacagagaacattcagcggttcctgcctaatcctgcaggagtgcagttagaggaccctgagtttcaggctagcaacattatgcactctattaacggttacgtgtttgactccttgcaattatccgtctgcctgcacgaagtggcatattggtacattctttctattggggctcagacagacttcttgtctgttttcttctctggatataccttcaagcacaagatggtgtacgaagataccctcactctcttccccttttctggggaaaccgtctttatgagtatggaaaaccctggactgtggatcctgggatgtcataactccgacttcaggaatagaggaatgactgccctgctaaaggtgtccagttgtgacaagaacacaggagattactacgaggactcttatgaggacatcagcgcctacctcctgagtaagaacaacgccatcgagccgcgatcattcagccagaatagccgacacccatccacccgacagaagcagtttaatgccacaaccattccagaaaacgacatcgaaaagactgatccttggttcgcgcacaggacacccatgcccaaaattcagaacgtgtcaagctctgacctcctgatgttgctccgccagtcccccaccccacacggactgagcctgtctgacttgcaagaggccaagtatgagacgttctcggatgatcctagccctggggcaatcgattcgaacaactctttaagcgagatgacgcattttaggccacaattgcatcacagcggtgacatggtattcacacccgagtccggactgcaacttcgacttaatgagaagttggggacaactgcggcaaccgaactcaagaagctagacttcaaggtctcctccacctccaataacctgataagtaccattccgagtgataatcttgctgccggtacagacaacacttcctccctcggccctcctagcatgcctgttcactatgattcgcagctggacaccacgctgttcggcaagaagtcttcccctttgacggaaagtggtggtcctcttagcctgtcagaagagaataatgattccaagctgctcgagtctggactcatgaattcccaggaaagcagttggggcaaaaatgtgagctcaacagagtctggtagactgttcaaaggcaaaagggcccacggtcctgccctattgaccaaagacaacgccctttttaaagtgagcataagtctcctcaagaccaacaagacaagcaataacagtgccacgaatcggaagacccacatcgatggcccttccctgcttatcgagaacagtccatcagtatggcagaacatcctggagtctgacacagagtttaaaaaggtcactccgctaattcacgatcgtatgctgatggataaaaacgctactgccttgcggctaaaccatatgagcaacaagacgacgtcatctaagaacatggaaatggttcagcaaaaaaaggaagggcctatcccccctgatgcacagaatccagacatgtcctttttcaagatgttgttccttccagagtccgccagatggatccagcggacacacggcaaaaattccctgaatagtggccagggacccagccctaaacagctggtcagtctggggcctgaaaagtccgtggaaggacaaaactttctcagtgagaaaaataaggtggttgtgggcaaaggtgagttcaccaaggacgtcggcctgaaagagatggtgtttcctagttctcggaatctgtttctgacgaatctggataatctgcatgaaaacaacacccacaatcaggagaagaagatccaggaagaaattgagaaaaaggagaccctcattcaggagaacgtggtgcttcctcagattcacacagtcactggaacgaaaaacttcatgaaaaacttattccttctttccacgaggcagaatgttgaaggctcttatgatggggcttatgcccctgtactccaggacttccgctccctgaatgattcgacgaacagaaccaaaaaacacactgcccacttctccaaaaagggtgaggaagagaacctggaaggattgggaaatcagaccaagcaaatcgtggaaaagtacgcttgtaccacacggatctcaccaaacacctctcagcagaattttgtgacccagaggagcaagcgtgcattgaaacagttccgactccctctggaagagactgagcttgaaaaacggattatcgttgatgatacatcgacccaatggtcaaaaaacatgaagcacctcacaccttccactcttacacagatcgactacaacgagaaggaaaagggcgcaataacccaatcccctctgagtgattgcctgacacgcagtcattcaattccacaagccaaccgaagccctttgccaatcgccaaggtgagttccttcccttccatcaggcctatctatttgactagagtcctctttcaggacaactctagccatctgccagctgcttcatataggaagaaggactctggggtacaggaatctagccacttcctgcagggtgctaagaagaataacctgtctttggctattctaaccctggaaatgaccggagatcagcgggaggtaggaagccttggcacttctgctaccaattctgtgacctataagaaggtggagaatacagttctcccaaaacccgacttgcctaaaacttccggtaaggtggagttactgccaaaagtccatatctaccagaaggatctgtttcccaccgagactagcaatggatctcccggtcatttagatttggtagaaggcagcctactacagggaaccgagggagccattaagtggaacgaagccaataggcccggaaaagtgcccttcttaagagtggctactgagtcatccgctaagacgccctctaagctcctcgatccacttgcttgggacaaccactatggtacacagatccccaaagaagaatggaagtcccaagagaagtccccggagaagactgccttcaaaaagaaggataccatcctttcattgaatgcctgtgagagcaatcatgccatagcagccatcaacgaaggacaaaacaagcctgagatcgaagtaacatgggctaagcagggtcggacagaacgcctttgctcccagaacccgccagtgttgaaacggcaccaaagagaaatcacacgcactaccctgcagtccgaccaggaagagatcgattacgacgacacaatcagcgtcgaaatgaaaaaagaagatttcgatatatatgacgaggacgaaaaccagagccctagaagcttccaaaagaaaacccggcactactttatcgccgcagttgagcgcctgtgggattatggaatgagctcaagtccacatgtactgaggaatcgcgctcaatccggttcagtcccacagtttaagaaggttgtgttccaggagtttacggatggatcttttacgcagccgctctacagaggagaactgaacgagcacctgggcctcctgggaccctatattcgcgctgaggtcgaagataacataatggtaacatttcgaaatcaagcaagcaggccatactctttttactcgagcctgatctcatacgaagaagatcagcgtcaaggtgctgaaccccgtaaaaacttcgtaaagcctaacgagacgaagacttacttttggaaggtgcagcaccacatggcccctacgaaggacgaatttgattgcaaggcctgggcctatttctctgatgtcgatcttgagaaggacgttcattctggtttgattggccctttgctcgtgtgtcatacgaacaccctgaatcccgcacatggcaggcaagtcactgttcaagagtttgcgcttttcttcacgatatttgatgagaccaaaagttggtattttaccgagaatatggagcggaactgccgtgccccatgtaacatccaaatggaagaccccacgtttaaggagaactaccgtttccatgctataaatggctacataatggatacactccccggacttgtgatggctcaggaccagagaatcagatggtacctgctctccatggggtctaacgaaaacatacactctatccactttagcggacatgttttcacagtccggaagaaagaggaatacaaaatggctctttacaacttgtatccaggtgtttttgaaaccgtggaaatgctgcctagcaaggccggtatatggcgagtcgaatgccttattggcgagcaccttcatgctggcatgtcgacactgttcttggtgtacagcaacaaatgtcagacacccctgggtatggcgagtggtcatatcagagacttccagattaccgcatctgggcagtacgggcagtgggcccctaaattggctcggctacattactcagggtctattaacgcctggtcgacaaaagaacctttttcctggattaaagtcgacctccttgcacccatgattatccacgggatcaaaacccagggtgcaagacagaagttctcatcactgtacatcagccagtttattatcatgtattccttggacggaaaaaagtggcaaacctaccgtggcaatagcacaggaaccctaatggttttctttggcaacgttgacagtagcggtatcaaacacaatatttttaatccgccaatcatcgcccgatacattaggctccacccaactcactattccatcagatccacgttgcgaatggagctgatgggttgtgaccttaactcttgttctatgccactgggtatggagtcaaaggccataagcgacgcccaaataacagcatcttcatatttcaccaatatgtttgccacatggagtccctccaaagcccgtctccacctgcagggaaggtcgaacgcatggcgacctcaggtgaacaatccaaaggagtggctccaggtggacttccaaaagaccatgaaggttaccggagtcaccacccagggggtgaagtctctcttgacttctatgtacgttaaggagtttttgatttcctcatcacaggacgggcatcagtggacccttttcttccagaacggtaaagtgaaagtgttccagggaaatcaagattcctttacacccgttgtgaattcccttgacccccctctcttgacacgatacctcaggattcacccccagagttgggtgcatcagatcgcactccgaatggaggtgcttggttgtgaggcccaggacttgtattac

SEQ ID NO: 4292 - DNA, 999 bp, synthetic construct
  misc_feature 1..999: note = source = /note="Description of Artificial Sequence: Synthetic coding sequence"
  source 1..999: mol_type = other DNA
atgggacggcctctgcacctagtcttgctgtctgcctctcttgctggcctgcttctgctgggtgaaagcctgtttatcagaagagagcaggccaataatattttggcaagagtgacccgcgctaattcctttttggaagagatgaagaaaggacacttggaaagggagtgcatggaggagacctgcagctatgaagaagctcgggaggtgttcgaagactccgacaagaccaacgagttctggaacaagtataaagacggggatcagtgcgaaactagtccttgccagaaccagggaaaatgtaaagacggtttgggagaatacacatgcacctgcctggagggctttgaaggaaagaattgcgaattgtttacccggaagctgtgttctttggataacggtgattgcgatcagttctgtcatgaggagcagaactccgtggtttgctcctgtgcaagaggctacacattggccgataatggcaaggcatgcattcctaccggcccatacccctgcggaaaacagaccctagagcgaaggaagaggtccgttgcacaggcaacctcctccagcggtgaggcacctgatagcatcacctggaaaccgtatgacgcagctgatctggatcctactgagaaccctttcgacttgctcgatttcaaccaaacgcagccggagcgcggagacaacaatttaacacggatagtcgggggacaagagtgcaaggacggagaatgcccttggcaggctctgcttatcaacgaggaaaacgaaggcttctgtggaggaacaattctgtcagaattttatatcctgaccgctgcccactgtttgtaccaggcgaagaggtttaagggtaccggaaccagaagcaggcgaagggcagtccggaggtgtactcgctggcgctggtccagttcgactactggcagccagcgaaggcctatgacttcaacttcaccttgctctgggtctcgtccaccctctccaagtgcttag

SEQ ID NO: 4293 - DNA, 1467 bp, synthetic construct
  misc_feature 1..1467: note = source = /note="Description of Artificial Sequence: Synthetic coding sequence"
  source 1..1467: mol_type = other DNA
atgggcaggccacttcacttggtgctgttgagcgcctcactagcaggcctcctcttactaggggagtctctgtttattagaagagagcaggccaacaatatactggctagggtgactcgggcaaatagttttctcgaggaaatgaagaagggacacctagagagagagtgcatggaagaaacatgcagctacgaagaggccagagaagtatttgaggacagcgacaagactaatgagttttggaataaatataaagacggcgatcaatgcgagaccagtccatgtcaaaaccaggggaaatgcaaggatgggttgggtgaatacacctgcacttgcctggaagggttcgaggggaagaattgtgagctctttactcggaagttgtgctcacttgataatggagattgtgatcagttctgtcatgaagagcaaaattcagttgtgtgtagctgtgcccgtggctatactctggcagataacggtaaggcatgcatccctaccggcccttacccttgcggcaagcaaactcttgaacgcaggaagaggagtgttgcacaagcgactagttcaagcggagaggcccctgacagtatcacctggaagccatatgatgcagcggacctggacccaacagagaaccccttcgatctacttgacttcaaccagacacagccagagcgcggtgacaataacctgacaagaattgtcggcggacaagaatgtaaggatggcgagtgtccttggcaggcccttctcattaatgaagagaacgaaggtttttgcggagggacaattctctccgagttttatatccttacggccgcacactgtttgtatcaggcgaagagattcaaagtaagagttggagacagaaatacggagcaggaggaaggcggtgaagctgtgcatgaggtcgaagtggtcataaagcacaacagatttacaaaggaaacttacgacttcgacatagcagtgctccgtctcaaaacccctataacgtttaggatgaatgtggcccctgcctgtctgccagagagagattgggctgagtcaacgctgatgacacagaagacaggcatcgtgtctggcttcggcaggacacacgaaaaaggaagacagtcgactcggcttaagatgctggaggttccctatgttgatcgcaactcctgtaagttgtcaagctccttcatcataacacagaatatgttctgtgcagggtatgacacaaaacaggaggacgcttgtcagggcgactccgggggtccacatgttactcggtttaaagatacttattttgtgaccggtatcgtaagttggggagaagggtgtgccagaaaaggcaagtacggtatttatacaaaggtgacagcatttctgaagtggattgacaggtcaatgaagactcggggactacccaaggctaaaagtcacgctcccgaggtgattacctcgagtcctctgaaatag

SEQ ID NO: 4294 - DNA, 1005 bp, synthetic construct
  misc_feature 1..1005: note = source = /note="Description of Artificial Sequence: Synthetic coding sequence"
  source 1..1005: mol_type = other DNA
atgggacgcccactgcacctggttctgctctctgcctctttggctggactgctgctgctgggagagagtctatttatccgacgagagcaggctaataacatactggccagggtgactcgggcaaacagctttctggaggagatgaaaaaggggcacctcgaaagagaatgcatggaagaaacgtgctcctacgaagaagcccgagaggtgtttgaagacagcgacaagacgaatgagttctggaataagtataaggacggagaccaatgcgaaaccagtccatgccaaaaccagggcaaatgtaaggatggtctcggcgagtacacctgcacctgtctcgagggattcgaaggaaagaactgcgagctgtttacccgtaagttatgctcccttgataacggggactgcgatcagttctgccacgaggagcaaaactctgtggtttgcagctgcgccagaggatatactctggcggacaacggcaaggcctgcatccccacgggcccttacccatgtggtaaacagacactggagaggcgtaaaagaagcgtggcgcaggctacaagttcctcaggtgaggctcctgatagcatcacctggaaaccatatgacgcggctgacttagaccctaccgagaatccatttgatctgctagactttaatcagacacagcccgagagaggcgacaacaacttaacccgcatcgtcggcggacaagaatgcaaagacggggagtgtccttggcaggctctgcttatcaatgaggagaacgagggcttctgcggcggtactatactgtccgagttctacatcctcactgcggcacattgcctgtaccaagcaaaacgcttcaaggtacgcggaaccgggacccgtagtagaagacgcgcagtgaggcggtgtaccagatggcgttggagcagcagcactactggctcccagcgtagacccatgacttcaacgagtccatgttcggggagccggccaccttctccttccgcatag

SEQ ID NO: 4295 - DNA, 1722 bp, synthetic construct
  misc_feature 1..1722: note = source = /note="Description of Artificial Sequence: Synthetic coding sequence"
  source 1..1722: mol_type = other DNA
atgatctttctctatcaagtcgtccactttatcctgttcacatcagtctccggggagtgcgtaacccagctcctgaaggacacgtgtttcgaaggcggtgatatcacaactgtttttacaccgagcgcaaagtattgccaggtcgtgtgtacataccaccctagatgtctcctctttactttcacagccgaatccccatctgaggacccaacccgctggttcacatgcgtgctgaaggatagtgttaccgaaaccctgccaagggtgaacaggaccgctgccatcagtggctacagctttaaacaatgctcccaccagatttctgtgaacaacatctgccttctaaaacacacacagaccggtacgcctactaggattacgaagctggacaaggttgtctcaggttttagtctcaaaagctgtgcgctgtccaacctggcctgtattagggatatctttccaaacacagtgttcgccgactcaaacatagactctgtgatggctccggacgcgttcgtgtgtggtcggatttgcacacaccatccgggatgtctattcttcacgtttttctctcaggagtggcctaaggaaagtcagaggaacctctgcctgcttaagacgagtgagtcggggctgcccagcacccggatcaagaagagcaaagcactgtctggattctccctgcaatcttgtagacacagcatccctgtgttttgccactctagcttttaccacgacacagactttctgggtgaggaattagacattgtagcagcgaagagtcatgaggcttgtcagaaactctgtacaaacgcggttcggtgtcagtttttcacctatactccagcacaggcctcctgcaacgaagggaaaggcaagtgttacctgaaactgtcctctaatggcagtcccaccaagatcttgcatggtaggggagggatcagtggttataccctgcgcttatgtaaaatggacaatgaatgtaccactaaaatcaaacccaggattgtgggcggaaccgctagtgtcagaggagagtggccttggcaagtaaccctgcacactaccagtcctactcagcgccatctatgtggaggaagtatcattggaaatcaatggatcctcacagccgctcactgtttttatggtgttgaaagtccaaagatcctacgtgtctatagcggcatactgaatcagagtgagattaaagaggataccagtttctttggtgtgcaagaaattattatacacgatcaatataagatggcagaatccggctacgacatcgctctgttaaaattggagacaaccgtcaattacaccgacagccagagacctatctgtctaccgtccaaaggagacaggaacgtgatttacacagattgctgggtgaccgggtggggctaccggaaacttcgcgataagatacagaacacactgcagaaagctaagatccctctggtgaccaacgaagaatgccagaaacgctacaggggccacaagattactcataagatgatctgcgccggatacagagaaggaggtaaggacgcctgtaagggggatagcggaggtcctctgtcttgtaaacacaatgaggtgtggcacctggtgggcatcaccagctggggcgaaggctgtgcgcagagggagcgccctggagtgtacactaatgtcgtggagtatgtggactggattctggaaaagacccaggctgtctag

SEQ ID NO: 4296 - DNA, 1878 bp, synthetic construct
  misc_feature 1..1878: note = source = /note="Description of Artificial Sequence: Synthetic coding sequence"
  source 1..1878: mol_type = other DNA
atgatcttcctgtaccaggtagtgcatttcatactgttcacctccgtatctggtgaatgcgtgacacaactcctcaaagatacctgctttgagggaggcgacattacgaccgtgttcacaccgagtgccaaatattgtcaagtggtgtgtacctaccatcctaggtgtctccttttcacttttaccgcagagagtcctagtgaagatcctaccagatggttcacatgtgtgctgaaggatagtgtcacggagaccctgccccgtgtaaataggacagcggcaattagtggctactcattcaagcagtgcagtcaccaaatctctgcgtgtaacaaggatatctatgtggatcttgacatgaagggaatcaactataactcttcggtcgctaagtctgctcaagagtgccaagaaaggtgtacagacgatgtgcactgtcactttttcacttacgcaacaaggcagttcccaagcctggagcaccgtaacatatgtctgctcaagcacacgcagactggcaccccgaccagaatcaccaagctggacaaagttgtctccggcttctctctgaagtcttgcgcactgagtaacctggcttgtattcgcgatatttttcctaataccgtttttgccgactctaatattgattccgtcatggcgccagatgcctttgtctgcgggcgtatctgcacgcaccaccccggatgcctctttttcactttcttctctcaggaatggccaaaggagtctcaaaggaacctgtgtttactgaaaactagtgagagtgggctaccctcaacacgcattaagaaaagcaaagctctcagcggcttctctctgcaaagctgtcgacatagcataccggttttttgccactctagcttttaccacgacacggatttcttgggcgaggagctcgacattgttgccgctaagtctcatgaggcttgtcagaagctctgtaccaacgctgttaggtgccagttcttcacgtatacccctgcacaggccagctgtaacgagggaaagggaaagtgttatcttaagctgtcttccaacggctctcccacaaagatcctgcatggtcgcggtgggatcagcggctataccctgagactttgtaaaatggataacgagtgcacgacaaaaatcaagccgcgtatagtcggtggaaccgcttcagtccggggagaatggccctggcaggtaacgctacataccacatcacccactcaacggcacctctgtggcggaagcatcatcgggaaccagtggattcttactgcagctcactgcttctacggagtggagtcacctaaaattctgcgggtgtattctgggattctgaaccaatcagaaatcaaagaagatacaagcttcttcggagtgcaagaaataattattcacgatcagtataaaatggctgaaagtggatacgacatcgccctgctcaaattggaaaccacagtgaactacactgattcccagcgacccatctgtctgcccagtaagggtgataggaatgtcatctacactgactgctgggttacaggatggggctatcgtaaattgagagataagatccaaaacaccctgcaaaaagctaaaattcccttggtgaccaatgaagaatgtcagaaaagatacagagggcataagattacacataaaatgatttgtgctggatatagggagggaggcaaggatgcttgcaaaggcgacagcgggggtccactgagctgtaaacataacgaggtctggcacttggtaggcatcacatcctggggcgagggatgcgctcaaagagagaggcctggggtatacaccaatgtcgttgagtatgtcgattggattctggaaaagactcaggcagtgtag

SEQ ID NO: 4297 - DNA, 633 bp, synthetic construct
  misc_feature 1..633: note = source = /note="Description of Artificial Sequence: Synthetic coding sequence"
  source 1..633: mol_type = other DNA
taatccgggttttcattgaaatcttgtgctcttagtaatcttgcctgtattcgcgacatcttccccaacacagtgtttgcggatagcaatattgattccgtaatggccccagacgcgttcgtgtgcggtaggatttgcacacatcaccctggctgtttgtttttcacattctttagtcaagagtggcctaaagaaagtcaacgaaacctctgtctgttgaagacctccgaatccgggcttccgagcacaaggatcaagaagtctaaggctctctctggattcagtcttcagtcctgtcggcacagcatccccgtattctgccacagcagcttttatcacgataccgatttcctgggagaggaactggacatcgttgccgctaaaagccacgaagcctgtcagaaattgtgtactaacgctgttcgctgtcaatttttcacatacactccggcacaagccagctgtaacgaaggcaaggggaaatgttacttaaaactgagttctaatggttcgcccacgaaaatactgcacggcaggggaggtatctccggatatactctccggctctgtaaaatggataatgagttgcgcggtgcaccaatgaagatctccggctggctcaagacgagctag

SEQ ID NO: 4298 - DNA, 2199 bp, synthetic construct
  misc_feature 1..2199: note = source = /note="Description of Artificial Sequence: Synthetic coding sequence"
  source 1..2199: mol_type = other DNA
atgagcgaaacaagtagaaccgccttcggcggacggcgagcagtgcccccaaataacagcaacgcggctgaggatgatctgcccacggtagagctgcagggcgtggtgccccgaggagttaatcttcaggagtttcttaatgtgacatctgttcacctttttaaagagcggtgggacaccaacaaagtggaccaccacactgacaagtatgagaacaataaattgattgttaggcggggacagtccttctacgttcagatcgacttttccagaccctacgacccgcgaagggacctgttcagagtggaatacgtgatcggccgatatccacaggagaataagggtacttacattcccgttccaatcgtatcagagctgcaaagcgggaaatggggagccaagattgttatgcgtgaggatcggtctgtgcggctctctatccaatctagccccaagtgcattgtcggcaaattccggatgtacgttgcagtttggactccctatggggtgctgcggactagtaggaacccggagactgacacctatattctattcaacccctggtgtgaagatgatgccgtgtacctcgataatgaaaaggaaagggaagaatatgtacttaatgatattggcgtgatcttctacggtgaggtgaacgacataaagacccgttcttggtcatacgggcagtttgaagatggtattttggacacttgcctctatgttatggatcgggctcagatggatctctctggtcggggaaatccaatcaaggtttctcgggtgggctctgccatggtgaatgccaaggatgacgagggcgtcctcgtggggtcttgggataatatttacgcttacggagtccccccatctgcctggacagggtctgtcgacatcctgctagagtaccgctcttctgaaaatcccgtacgctacgggcagtgctgggtgttcgcaggagtatttaacacatttttgagatgtctcgggatcccagcacgcatcgtgaccaattactttagcgctcatgacaatgatgcaaatttgcagatggacatatttctggaggaggacggcaatgtcaattcgaagctgaccaaagattccgtctggaattaccactgttggaacgaggcgtggatgactcgccctgatcttcctgtgggttttggtggctggcaggcggtcgactcaacgccacaggaaaattcagatggaatgtaccgttgcggccctgcatcagtgcaggctattaagcatggccatgtgtgtttccagttcgacgcacctttcgtgttcgccgaggtcaactcagacctgatatacattacagctaagaaggatgggacccacgtggtggaaaatgtcgatgccacacatatcggaaaactgatcgtgactaagcagatcggcggagatggcatgatggatattaccgacacttacaagttccaggagggccaggaggaagaacgacttgccttagaaaccgcgcttatgtatggggctaagaagccactgaacacagaaggtgtgatgaagtctcgatcaaatgttgacatggacttcgaggttgaaaatgctgtgttgggaaaggatttcaaactgagcattacctttaggaataacagccacaatcggtacaccattactgcttacctatcggctaacatcactttctataccggggtccccaaggccgaattcaagaaggaaacattcgacgttacattggagccactgagcttcaagaaagaagcagttctgatccaggccggagaatacatgggtcagctcctggagcaggccagtcttcacttttttgtgactgctaggatcaacgagacacgcgatgtgctggctaagcagaaatctaccgttcttactatccccgagattattatcaaggtgagagggacccaggtagtcggatccgacatgacagttacggtggaattcaccaaccccctgaaggagacattgcgcaacgtttgggtccatctggacggccctggggtgactcgccctatgaaaaaaatgtttcgcgagatccgccctaacagcaccgtgcagtgggaagaggtgtgcaggccctgggtgagcggccacagaaagctgatcgcaagtatgtctagtgactctctcagacatgtctatggtgagctcgacgtacagatccaaagacgcccttctatgtag

SEQ ID NO: 4299 - DNA, 417 bp, synthetic construct
  misc_feature 1..417: note = source = /note="Description of Artificial Sequence: Synthetic coding sequence"
  source 1..417: mol_type = other DNA
atgtcagagactagcaggacagctttcggaggacgcagggccgtccctcctaataactctaacgcggctgaggacgacttaccgaccgtggagttacaaggtgtggtgccccgaggggtcaacctgcaagagtttctgaacgtcacctcggtgcatctgttcaaagaacggtgggacaccaacaaggtggaccatcacacagacaaatacgagaacaataaactgattgttcgtcggggtcagagcttttatgtccagatcgacttctcacggccatacgatccaaggcgggacttgtttcgtgtggaatatgttatcggcaggtacccccaggaaaacaaaggcacatacatccccgtgcccatcgtgtccgaactccagagtgggaagtggggggcaaagattgtcatgcgctag

SEQ ID NO: 4300 - DNA, 1881 bp, synthetic construct
  misc_feature 1..1881: note = source = /note="Description of Artificial Sequence: Synthetic coding sequence"
  source 1..1881: mol_type = other DNA
atgtcagagacatctcgtaccgcgttcggagggagacgagccgtgcctcccaacaatagcaatgcagcggaagacgacttgcccacagtggagttacaaggcgtggttccacgaggtgtgaatttacaggggcgatacccccaggagaataagggcacgtatatcccagtaccaattgtatctgaactgcagagtggaaagtggggggctaagatcgtgatgagggaagatcggagcgtccgcttgtctatccagagcagcccaaaatgtattgtgggcaagttccgcatgtacgttgccgtatggacaccatacggcgtcttgagaacctcgagaaaccccgagactgacacatatattttgttcaatccctggtgtgaagatgatgctgtgtacctggacaatgagaaagagcgtgaggagtacgtgttaaacgacatcggagtgatcttctatggcgaggtcaatgatataaagacgcgatcatggtcctatggccagtttgaggacgggatcctggacacttgcctttacgtaatggaccgcgctcagatggacctgagcgggaggggaaatcccataaaagtaagccgcgtgggatccgcaatggtgaacgcgaaggatgatgaaggcgtgctggtaggctcttgggacaatatctatgcttacggcgtcccaccctctgcgtggaccggttccgtcgacattctgttggaataccgcagcagcgagaatccggtgaggtatggacagtgttgggtgtttgccggtgttttcaatactttcctgcgatgtctaggtattcccgcaaggatcgtgacgaactactttagcgcccatgacaacgacgccaaccttcagatggatatattcctggaagaagatggaaatgttaatagcaaactcaccaaggattctgtctggaactatcactgttggaacgaggcgtggatgacacggccagacctgccggtgggattcggtggctggcaggccgtcgattccacccctcaggaaaacagtgacgggatgtatcgctgcggacctgccagcgtacaggctattaaacacggccacgtctgctttcagttcgatgctcccttcgtgtttgccgaagtcaattcagatctgatatacatcaccgcgaagaaggacgggacccatgtagtggaaaacgtcgatgccacccacatcggaaagctcattgtgaccaagcagatagggggagatggaatgatggacatcaccgacacctataagttccaggaagggcaagaggaggaaagacttgcgttggaaactgccctcatgtacggggcaaagaagccccttaatacggagggggttatgaaaagccggagcaacgtggacatggatttcgaagtggaaaatgccgtactgggcaaagacttcaaactttctatcacgtttcgaaacaatagccacaaccggtacaccataacagcttatttgagcgccaacatcacattttatactggcgtacctaaggcagagttcaagaaggagacatttgacgtgacactggagcctttaagctttaaaaaggaagccgtgctcatacaggccggagagtacatggggcagctgctggaacaggcatccctgcacttttttgttaccgctcgcatcaatgaaactagagatgtgctggctaaacagaaatccacggtcctgactattcctgaaatcattattaaggtgcgcggaacacaagtggtgggttccgatatgaccgtcactgaagtttgccgaccctgggtttccgggcatcggaaattgattgctagcatgagcagcgatagcctgagacacgtctatggagaattagatgtgcagatacagcgcaggcccagcatgtag

SEQ ID NO: 4301 - DNA, 8835 bp, synthetic construct
  misc_feature 1..8835: note = source = /note="Description of Artificial Sequence: Synthetic coding sequence"
  source 1..8835: mol_type = other DNA
atgactctcagactactggtcgcagccctctgcgcgggaatcctcgcagaagctccaagggtgcgcgctcaacaccgggagcgcgtgacttgtacccggctgtatgccgctgacatagtttttcttctggatggctcttcgtcgatcggacgttctaatttccgcgaggttagaagcttcctggaggggcttgtccttccgttctctggcgctgcttccgcccagggtgtgcggtttgccactgtgcagtatagcgatgacccccgtacagagtttgggctggatgcactcgggagcggtggcgacgtaatcagagcaataagagagctaagctataagggcggtaacactagaaccggagctgccatcttacacgttgccgatcacgtgtttttaccgcagttggcgaggcccggtgtaccaaaggtgtgtattttgattactgacggaaagtcacaggatcttgtggatactgctgcccagagattgaagggacagggggtcaagctgtttgcagtgggcatcaagaatgctgatcccgaagagctcaaacgcgtcgcttcccagcctacatcagatttcttcttctttgttaacgatttttccatactccgaaccttactgccgctagtgagcagacgggtctgcaccacggccggaggcgtcccagtgacccgcccacctgatgacagcacaagcgctccacgtgacttggtgttgtctgaaccttcctcacaaagtttacgagttcagtggacagccgcttccggtccggtgaccggctacaaggtccagtacacaccactcaccgggcttggccagccccttccctccgagcgccaggaggtcaatgtgcctgccggagaaacatctgtccgactccgaggactccggcctcttactgagtaccaggttactgtgatagccctatatgctaattcaatcggcgaagccgtgagtgggactgccagaacaactgcccttgaaggcccagaactgacaatccagaacactaccgcacactcactcctggtagcatggagaagtgtccccggagccacaggataccgagtaacctggcgggttctgtcagggggaccaacccaacagcaggagctcggacccggacaggggtccgtgctcctgagggacctggaacccggtactgattacgaagtaacagtgagtacgctgttcggtagatcggtaggtcccgctaccagcctcatggctcggacagacgcttccgtggagcagaccctgcggccagtcatacttggcccaacatctatactgctgagctggaatctagtccctgaggcgagggggtatcgtctcgagtggcggagggaaactgggctggagcctccccagaaggtggttctgcccagcgacgttacgcgatatcagttggatggcttgcagcccggaactgaatataggttgacactgtacactctcctggagggccacgaggttgccaccccggctactgtggtgcctactggcccagagctgcccgtgtccccagtcaccgacctgcaggccacagagttgccgggacaacgggttagggtatcttggtcacccgtgccaggggctacacaatatagaataattgtccgcagcacacaaggtgtcgagaggacacttgtcctgcctggctcccagacagccttcgacctggacgatgtgcaggccggactgagctacaccgttagggtgtcagctcgcgtgggaccacgcgaaggctcagcgagcgtcctcactgtcaggagagagcccgagacccctttggcagtacctgggctgcgggtggtcgtaagcgacgccacaagagtaagagttgcttggggacctgttccgggtgcatccggctttcgcatcagttggtcaaccggtagtggtccagagtccagtcagaccttacctccggacagcaccgcgaccgacataactggcctccagcctggaacaacttaccaggtggctgtgtctgttctacgtggacgtgaggagggacctgccgctgttatcgttgccagaactgaccccttaggtccagttagaaccgttcatgtgactcaggcttcctccagcagcgttacaataacatggacccgcgtgcctggggctacaggctacagagtgtcttggcacagtgctcatggacccgagaagtcacagttggtatcaggagaagccacggtggccgaactggacggcctggagcccgacactgaatatacagttcacgtgcgagctcatgtcgcgggtgtggacggacctccagcttcggttgttgtccgaacagccccagagcccgtgggacgggtgagccgactgcagattctgaatgccagttcagacgtcctgagaatcacctgggtcggcgtcactggtgcgaccgcttaccgactcgcatggggtagatcagaaggtggtcctatgagacatcagatcttgccaggaaacaccgactctgcggaaatcagaggactagagggaggtgtctcatacagtgttagagtaacagccctggtgggagacagagaggggacacccgtttccatcgttgtgacgacccctcctgaggccccacccgcactcgggactctgcacgttgtccagcggggagagcactctctcagactgcggtgggaacctgtccctcgagcacagggatttctccttcattggcagcccgagggagggcaggagcaaagtcgggtcctcggacccgagctgtcttcctaccacctcgacggactggagcctgccactcagtacagggtgagactgagtgtgttaggacccgcaggcgaagggcctagcgccgaagtgacagcgagaactgaatcaccacgtgtaccgagtattgagcttagggtggtcgacaccagcatcgactccgttaccttagcctggacacccgtgtcccgggcttcctcctatattttgtcatggagacccctgagaggcccagggcaggaagtaccaggcagtcctcaaaccctcccgggaatctccagcagtcagcgggtgactggactcgagcccggagtgtcttacatcttctcactgactcctgtactggatggtgtccgcggacccgaggccagcgtcacccagacaccggtctgtcctcggggactggccgatgtcgtgtttttaccgcatgcaacacaggataacgcgcatcgggctgaggccacccggagggttctggagcgcctagttctggctctgggtcctctcgggcctcaagcagtgcaggttggattgctgagctatagtcaccgcccttctcctctgtttcccctaaatggcagccatgacctgggcatcattctgcagagaatcagagatatgccatatatggatccgagcggaaacaatctcggcactgccgtggtcaccgctcatcggtacatgctggcacccgacgccccaggacgccgtcaacacgtgcccggagttatggtgcttcttgtggacgaacctctacgcggagacatatttagtccgatcagggaggcgcaggcttcaggcctgaatgtcgtgatgctgggcatggctggcgcagaccctgagcagctcaggaggttggctccaggaatggactccgttcagacgtttttcgccgtggatgacggcccatctttagatcaagcggtctccggactagccaccgctctgtgccaagcgtcatttactacacagcccaggcccgagccttgcccagtgtattgccccaaggggcagaagggggagccgggtgagatgggtctccggggtcaggttggaccccctggagacccaggtctacctggcaggaccggcgctcccggtcctcagggccctcccggtagtgcaacagcgaaaggggaaagagggttccccggtgccgacgggagaccaggctcacccggaagagcaggtaaccccggaacacccggtgcacccggactaaaggggagccctggattgccgggaccgaggggtgatccaggcgagcggggacccagaggtccaaagggagaacctggtgctcctggacaggtgatcggtggtgaaggtcctgggctcccaggcagaaagggggatccaggaccctcaggccctccaggcccaaggggacccctgggcgaccctggcccacgcggtccacccggacttccaggtactgccatgaaaggcgacaagggtgaccgaggagagcgcggtccccctggaccgggtgaaggcggaattgcacccggagagcctgggctgcctgggcttcctgggagcccgggtccacagggtcccgtcggaccacccggaaaaaagggcgagaagggtgattccgaagacggcgcaccgggtctgcccggtcagcccggttcccctggcgaacagggccctcgaggcccaccaggcgcaattgggcctaagggcgaccgaggcttcccaggtcccctgggagaggctggagaaaaaggcgagcgcggtccgcctggtcctgccggaagccgagggctacccggagtcgccggacgacctggcgcaaagggccctgagggaccgccagggcctaccggcagacaaggcgagaagggagagccgggaaggcccggagatcccgcagtggtgggtcccgcagtcgctgggcctaaaggggaaaaaggtgacgtagggcctgctggcccacgtggcgctacgggcgttcagggtgaaagaggtccacctggcctagtgctccccggtgaccctgggcctaaaggcgatccaggagataggggccctatcgggttgaccggacgagccggtcctcctggagatagcggtccgcctggcgagaaaggagatccaggtcgaccgggaccgccaggtccagtgggcccacgaggcagggacggagaggtaggtgagaaaggtgacgagggccctcccggagacccagggctgccaggaaaagccggtgagcgtgggcttcggggagcacccggtgtgcggggacccgtgggagagaagggagaccagggggaccctggtgaggatggccgaaacggctccccaggcagctccggcccaaagggcgatcgcggtgaacccggaccacccggaccaccaggacggctcgtggacacaggcccaggtgccagggaaaaaggggagccaggcgatcggggtcaggagggaccccgtggtcccaaaggcgaccccggattgccaggcgcacctggggagcgcggtatcgagggatttaggggacctccgggaccgcagggggaccctggagtcaggggtcctgctggcgagaagggcgaccgaggaccaccgggactagacggaaggtcggggctcgacggcaagccgggagccgctgggccaagcggcccaaacggggctgcaggcaaggccggtgaccccggaagggatggccttcccggactgaggggggaacaggggctgcctggaccttccggacctcctggcttgcccggaaaacctggcgaggatggtaagcctggcttgaatgggaagaacggagaacccggtgaccctggtgaagacggacgtaagggtgaaaaaggagattcgggggcttctggaagagaaggtagggatggacctaaaggcgaacgcggagcgccaggtatccttggacctcagggaccccctggcctgcccggacccgtgggaccaccagggcagggatttccaggtgtacccggagggacaggcccaaaaggtgaccggggagaaactggctctaagggcgagcaaggactgcccggtgaaagaggcctgaggggtgagcctggctctgtccccaacgttgatcggttgctggaaacagcagggatcaaggcaagcgcactgcgcgagattgtggaaacatgggacgaatcaagtgggtcctttttaccagtgcctgaaagaagacgcggacctaaaggagatagtggtgagcaaggcccacctggaaaggaaggccctatcgggtttcctggagaaagaggccttaagggcgacagaggcgaccctggtccgcagggtcctccaggtctggccttaggtgaaagaggccctccaggccctagcggattggcaggtgaacccggaaaaccaggtatccccggactacctggaagagctggtggagtgggagaagcaggcagacctggcgaacgcggagagcgtggagagaaaggcgagcgaggcgaacaaggtagagatggccctccaggacttcctggcacccctgggccaccagggcctcccggacccaaggtgtctgttgatgaacccggaccaggactcagtggtgagcaaggaccgccaggtctcaagggtgctaagggggaaccaggatccaatggagaccagggccctaagggggaccggggagtccctggcataaagggggataggggagagccgggaccacgtggacaggatggaaaccccggtttgcccggagagcgagggatggccggacctgagggtaagcccggtctgcaagggcctcggggaccacccggtccagtggggggtcacggtgacccagggcctcccggagcacccggattggcaggcccagcagggccacagggtccctcagggctgaagggcgaacctggagagacgggcccacctggtcgaggtctgacaggccctactggtgctgtcggactgccgggacccccagggcctagtggcctggtcggaccgcagggatctcccggactacctggacaggtgggtgaaacagggaaacccggtgctcccggacgcgacggagcctcagggaaggatggggaccgtgggtcacccggagtaccagggtccccagggctgccagggccagtggggccaaagggcgaaccgggacccacgggcgctccaggacaagcggtggttggattaccaggggctaagggtgaaaaaggagcacctggaggcctagccggtgatttagtgggcgagccaggcgcaaagggggatcggggacttccgggtccacgcggagaaaagggagaggcagggcgtgccggagaacccggagacccaggagaggacggacagaagggtgcccctgggccaaagggcttcaagggggatcccggagtgggagtacctggcagtcccggtcccccaggacctcccggagtcaagggagatctcggcctccctgggctcccaggcgcacctggagtcgtgggctttcccggtcagaccgggccaaggggcgaaatgggccagcctggaccgtctggcgagcggggactggccggaccccctggcagagaaggcattccaggacccctgggacccccagggccacctgggtccgttggcccacccggtgcatccggcttaaaaggtgataagggtgaccctggggtcggactccccggtccaaggggggagcgcggagagcccggaatccggggagaagacggccgacccggtcaagagggcccaaggggtctaaccgggcctcctggatcacgaggagagcggggagaaaagggggacgtggggtccgccggtcttaagggagataaaggcgattcagctgtgatactaggacctcccggtccacggggagccaagggagacatgggcgagaggggcccacgcggactggatggggataagggacccaggggcgataatggagaccctggagataaaggatccaagggcgagccaggggataagggcagcgcgggattgcctggcctgagggggcttcttggcccacagggacagcccggagcagccggaatccctggcgaccccggttcacctggaaaagatggcgttcccggtattaggggagagaaaggcgacgtgggctttatggggccaagaggacttaagggggagcgaggtgtgaagggcgcttgcggtctcgacggcgagaagggggataagggggaggccggtccaccagggaggccagggctggcaggccacaaaggcgagatgggagagccaggcgtgcccggtcagagcggggctcccggtaaggaaggcctgatcggcccaaagggagaccggggtttcgatggtcagcctggtccgaagggggatcagggggagaaaggcgaaagggggacccctggtataggtgggttccccggtccctccggaaacgatggaagtgctggcccacctggccctccgggaagcgtgggccctcgaggaccggaaggcctgcagggccaaaagggcgagcggggaccacccggagaacgggtggttggagcaccgggagtgcccggagcacccggtgagcgcggtgagcagggacggcctggccctgctgggccaaggggtgagaaaggtgaagcagcactgaccgaggacgatatcagaggctttgtgcgccaggagatgtctcagcattgtgcctgtcaggggcagttcatagcttcgggttcgcgtccccttcccagttatgctgccgacacagctggctctcagctgcacgctgttccggtgctccgggtgagccacgctgaggaggaggagagggtaccgcctgaggatgatgagtacagcgagtattcggagtactctgtcgaagaataccaagatcccgaggcaccttgggactccgacgacccctgtagtttgcccctggacgagggttcttgcactgcctacaccctgcgctggtatcacagagccgttacaggtagcactgaagcgtgtcacccattcgtctacggaggatgcggcggtaatgccaacagattcgggactcgcgaggcgtgtgagcgtaggtgtccaccaagggtggtacagagccaggggactggcaccgcccaggactag

SEQ ID NO: 4302 - DNA, 8738 bp, synthetic construct
  misc_feature 1..8738: note = source = /note="Description of Artificial Sequence: Synthetic coding sequence"
  source 1..8738: mol_type = other DNA
atgactctgcgcctcctagtcgctgccctgtgtgctggaattcttgccgaggcgccacgggttcgcgctcagcatagagagagagtgacttgtacccgcctttacgccgctgatattgtcttcctgcttgacggaagctcttctatcggcaggagcaactttagagaggtgcggtcctttctggagggactggtcttaccatttagcggggcagcgtcagcccagggggtgaggttcgcgactgtgcaatattccgacgatccgagaacagagtttggtctagacgctttgggatcaggaggggatgtgattcgggctatccgagagctttcctataaaggaggaaacacgagaaccggcgctgcgattctccacgtggcagatcacgttttcttgccccagctcgctcggccaggggtgcctaaagtatgtattttgattacagacggtaagagtcaggatctggtggatactgctgcacagagattgaagggccaaggcgtcaaactcttcgcagttggaatcaagaacgccgaccccgaagagcttaaacgagtggctagtcagcctactagtgattttttctttttcgtgaatgatttcagcatcctgcgcactctactccctctggttagtcgccgtgtctgcaccacagccggtggggtgcccgttacaagaccaccagatgatagtacttccgctccacgcgatctggtgctgtcagaaccgtcgagccagagtctccgggtgcagtggacagctgccagcgggcctgtcactggttacaaggtgcagtatactccactgacgggcctcggccagccgctgccatccgagcgccaggaagtgaatgtgcccgctggcgaaaccagcgtgcgcctcagaggactgcgcccactaacagagtaccaagtcacagtgattgctttatatgcaaacagcattggcgaagctgtctccggaacagcacgcacaaccgctctcgagggaccagagctaaccatccagaacaccaccgcacacagtttgctggtcgcgtggcgctctgttccgggtgctaccggctacagggtcacctggcgggtgctgtcggggggtcccacacagcagcaggaactgggaccaggacagggctccgttctgttgagagatctggagcctggaactgactatgaagtgactgtgagcaccctgttcggacgttctgtaggacccgctacatcactcatggcacgaacggacgcaagcgttgagcagaccttgcgaccagtgattctggggccaaccagcatcctgctcagctggaacctagtaccagaggcgaggggttatcggctcgagtggaggcgcgaaaccgggttagagcccccacagaaggtggtactccccagcgacgtaacacgatatcagctagatgggctgcagcccggtactgagtacaggttaaccctctacacactgctggagggccacgaggtggccacccctgctaccgtggttccgactggtccggaactgcctgtttctcccgtcaccgatctccaggcaaccgaactgcctggccagagggtgcgcgtatcttggtctccagtgcctggggcaactcagtatagaattattgtgcgctcgacccaaggagtagaaaggacactggtgctgcccggttctcagacagctttcgatcttgacgatgtgcaagcagggctgtcctatactgtcagggtttccgccagagttgggcctcgagagggctcagcatccgtgctgactgtgcgacgagagccagaaactcccctggcagttcctggtcttagggtagtggtcagcgacgcaacacgagtgcgcgtggcttgggggccagtacccggtgcgtctggcttccgcatttcttggtccaccggatctggccctgaaagcagtcaaacccttccgcctgatagtacagcgacagatattaccggcctacagcccggtactacataccaggtcgcggttagcgtgctcagaggccgagaggagggcccagctgctgtgatagttgcaagaacggatccactgggacccgtccgtacagtccacgtgactcaggcatcttcgtcgtcggtgacgattacctggacaagggtccctggcgcaaccggctatcgggtatcatggcacagcgcacatgggcctgagaagagccagctagtctccggagaagccacagtagccgaacttgacggactcgaacccgacacagagtatacggtccatgttcgcgctcacgtggccggagtggatggtccaccggcatctgtggtggtgaggacggctccagagcccgtgggcagagtgtcccggcttcaaatactgaatgcatctagtgacgtgctcaggattacatgggtgggtgtaaccggcgctactgcctacaggctagcatggggcaggagtgagggcggaccaatgcgtcaccagatactccctggcaataccgatagtgccgagattaggggccttgagggcggtgtgagttatagtgtgcgggtgactgccctggttggggacagagaagggactcccgtctctatcgtggtcaccaccccaccggaggctccaccagcacttggcacactgcacgtagtccagcgcggagagcactctctgcggctgcgatgggagcctgtgccccgagcccagggatttctgctgcattggcagcctgagggaggccaagagcagtctcgtgtgcttgggccagagctgtccagttaccacctggatggactggagccagctacccagtacagagtcaggctttcagtgttagggccagcgggtgaagggccttcagccgaggtgacggccagaacggaatcacctcgcgtgccgtctatcgaactccgtgtggtagatacgtctatcgactctgtcacgctggcctggactcctgtatctagggcgtcttcgtacatcctgagctggaggcccctgcgcggaccaggccaggaagtcccagggtcccctcagactctccctggcataagctcttctcagcgcgtgacagggttagagccaggcgtgtcttacatcttctccctcacacctgttctggatggtgtgcgcggacctgaagcatcggttactcagaccccggtctgtccgcgtgggttggctgacgtcgtctttctgccacatgccacccaggacaatgcacatcgggcagaagccacacgtcgcgtactagaacggctggtgctggcgctcggtcctctcggtccgcaagcagtccaagtgggcctgttatcctactcacatcgtcccagtcctcttttcccccttaacggtagccacgacctcggtataatactgcaaaggatccgggatatgccttacatggaccccagcggcaacaatctgggcacagctgtcgttactgcccataggtatatgcttgctccagacgctccgggtcggcgacagcacgtaccaggcgtgatggttttgcttgtcgatgagccactaaggggcgatatcttttcaccgattagagaggcccaggccagcggcttgaacgttgtcatgctcggtatggcaggcgcagatcccgagcagttgcgacgcctggctcccggaatggattcagtgcaaacattctttgcagtggatgacggtccctcgttggaccaggctgtgtccggactggcgacagctctgtgccaggcttcattcactacacaacctcgcccagaaccctgtcctgtgtattgccccaagggccaaaagggcgagcctggtgagatgggtctgagaggccaggtgggacctcctggggacccaggcttgcccggacgtacaggagctccagggcctcagggcccacctgggtctgctaccgccaaaggtgagcggggatttcctggggcagacgggagaccaggctcacctggcagagcaggcaacccgggtactcccggtgctcccggtctcaaagggtcacctggccttccaggccctcgaggagaccccggtgagagggggccacgcggacccaagggagaaccaggcgcacctggacaggtgatcggaggagagggccctgggttgcccggtcgaaagggggaccccggaccttcgggcccaccaggacctagagggcctctgggcgatccaggcccacggggtcctcccggattgcccggaactgccatgaagggcgataaaggagaccgcggagagaggggcccacccggaccaggcgaggggggaattgcgcctggtgaacccggacttcccggactacctggcagccctggtcctcaaggccctgtgggaccaccgggtaagaagggcgagaagggagactccgaagatggagctccaggcctcccagggcagcccggttccccgggtgaacagggcccacgcggaccacccggagccattgggccaaagggcgacaggggcttcccgggacctcttggagaagccggtgagaagggcgaaaggggtcccccaggcccagctggatctagggggcttcctggcgtagccggacgacctggcgcaaaaggtcccgagggccctcccggaccgacaggacggcaaggagaaaagggtgagccgggaagacccggtgatcccgctgtggttggccctgctgtcgcaggaccaaaaggcgaaaagggagatgtgggccctgcagggccaagaggcgctactggcgtgcaaggcgagaggggcccacccggattggttctccctggagatccgggaccaaagggtgatcctggcgacagaggacccatcggacttacaggacgtgcaggcccaccgggtgatagtggcccaccaggggagaaaggagatcctggcaggcctggtcctccgggacccgtgggaccgaggggcagagacggtgaagtgggtgaaaagggggatgagggccctcccggagatcctggtctgcctggcaaagccggtgagcgcggactacgaggagcccctggggtcagaggaccagtcggcgagaagggcgaccagggagatccgggtgaggacggcaggaatggcagccctggatctagcgggcctaagggtgatagaggcgaacctggccctcccggacctcccggtaggttagtcgatacaggaccgggtgcgagggaaaaaggggaacctggtgaccgaggacaagaggggccacgagggcctaagggcgaccctggcctgcccggtgcccctggagaacggggaattgaaggattcagagggccaccagggcctcagggagaccctggagtgcggggaccagcaggtgagaaaggtgacagaggcccaccaggattggacggcaggtctggactggatggcaaacctggcgctgccggtcccagtggccctaatggggctgccggtaaagcaggtgatccagggagagacggcttacccggactccgaggcgaacaaggtctgccaggaccctcggggccacccggactgccgggaaagcctggcgaagacggaaaacctggtttgaatggaaagaatggcgagccgggtgatccaggggaagatgggaggaagggtgagaaaggagacagcggtgcctcaggccgtgagggattcccaggggtgcccggtggtacaggtccgaaaggtgatcgtggcgaaacaggttcaaaaggtgagcaggggctccctggagagcgtggcttaagaggggagccaggatccgtgcccaacgtagacaggctgctggagaccgcgggaattaaagccagcgccctcagagagattgtcgagacatgggacgaatccagtggaagtttcctgccagttccagaaagacgcagaggtcctaagggcgacagcggggagcaaggccctcctggcaaggaaggtcccattggctttcctggagaacgcggactgaagggagaccgaggtgacccaggaccccagggccctccagggctcgctctcggcgagcgcggtccgccaggcccatccggccttgcaggcgaacctggcaagccgggtatccccggactgcctgggagagctggaggtgttggagaggcaggcaggccaggcgagcgcggtgaaaggggggagaagggagaacgaggcgaacaagggagggatgggcctccgggactgcctggcactccaggtccacccggacctcctggtcccaaggtctctgtcgacgagcctgggccagggctgagtggggagcaaggtccccctggcctcaaaggggcaaaaggcgagccgggtagcaacggcgaccagggtcctaaaggcgacaggggagtcccaggcattaagggagatcgcggagaacccggacccagggggcaggacggaaatccagggctgccaggggagagaggaatggctggcccagagggtaagcccggtctgcaaggccctagggggccacctgggcctgttggaggccacggagacccaggcccacctggtgcccctgggctagctggcccagccggaccacagggccctagcgggctgaagggggaacctggcgaaactggacctcccggtcggggactgaccgggccaaccggcgctgtcggtctgccgggacctcctggcccttccggtctggtgggtccgcaggggagcccgggactcccaggacaggttggggaaaccgggaagcccggtgcccctggccgagatggagcatctggaaaggacggcgacaggggctcacctggcgtgcccggttcgcctggcctacctggcccagtgggaccaaagggagaaccagggccaacaggtgcaccgggacaggccgtcgttggtctgccgggagcaaaaggagagaaaggcgctcctggcggtctggccggagaccttgtcggggaacctggcgctaagggtgaccgaggcctgccagggccaagaggcgaaaaaggagaagccggacgagccggagagccaggggatccaggcgaagatggccaaaaaggggcacccggtccgaagggatttaagggggaccccggtgtgggggtgcccggatctcccggacctccaggtccgccaggtgttaaaggtgatctgggacttcctggtctgcccggagcccctggtgttgtaggatttcctggtcagaccggaccgaggggggagatgggtcagcccggaccctctggtgaacggggattagccggacctcctggcagggaggggatcccaggacctctcggcccacccggtccacctggttcagtcggacctcccggtgcatccggactgaagggcgacaaaggagatccgggagtcggattacccggtccacgtggagagaggggagagccaggcattcggggtgaggatggcaggcccggacaagagggaccaaggggcctcaccggaccgccaggatcgcgcggtgagcgtggagagaagggagacgtcggatctgcaggcctgaagggtgacaagggcgactccgcggtgattctgggcccaccagggccaaggggggcaaaaggtgatatgggggagcggggtcccagaggactggacggcgacaaaggacccagaggtgataatggggaccccggtgacaaaggctcgaagggggaaccgggagacaaggggtccgctggactgccgggactccggggactcctcggacctcagggacagcccggagctgctggcattccgggagacccaggatcgcctgggaaggatggcgtccccggaatcaggggagagaagggagacgtgggattcatgggccctcgagggctcaaaggcgagcgtggggtgaagggcgcttgtgggctggacggagagaaaggagataagggtgaggctgggcctccagggagaccgggactggccggtcacaaaggagagatgggagagccgggtgttccgggacagtctggtgcccctgggaaggaggggctgattggcccaaaaggcgatagaggattcgatgggcagccgggtccaaagggcgaccagggagagaagggcgaacgtggcaccccaggcattggcggatttcccggaccgagtggtaatgacggctccgccggaccaccagggccaccaggctcggtgggcccaagaggacccgagggcctgcagggacaaaaaggcgagcgcggaccccctggcgagcgcgttgtgggtgctccaggggtgcccggtgccccaggagaaaggggcgagcaagggagaccgggtccggcagggccaagaggtgagaagggcgaggctgccctgacagaggacgacatacgaggtttcgttaggcaagaaatgtcgcaacactgcgcctgtcaagggcagttcatcgccagtggaagtcgtccactgcccagctacgcggcagatacggccggatcacagctccacgcggttccagtgctgagggtgagccacgccgaagaggaggagagagttccccctgaggatgacgaatatagtgaatactcagaatacagcgtagaagaataccaggaccctgaggcaccttgggattcagacgatccctgtagtctcccactggatgaaggatcctgcacggcctacaccctgcggtggtatcatcgggctgtcacggggtctactgaggcctgtcatccgtttgtgtatggaggctgcggaggcaatgcgaatcgatttggcacccgggaggcctgcgaacgcaggtgccccccacgcgtggtacaatcccagggaacagggacagctcaggatta

SEQ ID NO: 4303 - DNA, 435 bp, synthetic construct
  misc_feature 1..435: note = source = /note="Description of Artificial Sequence: Synthetic coding sequence"
  source 1..435: mol_type = other DNA
atgtggctgcaatcgttactccttctgggaaccgtggcctgtagcataagtgctccagctagaagcccttccccatccacccaaccatgggagcacgtgaatgctatccaggaggcccgacgcctcctgaatctgagtcgcgacactgcagccgagatgaatgaaaccgtggaagtgatcagtgagatgttcgatctccaagaaccaacttgcctgcagaccagattagagctgtataagcaggggctgagaggatcgctcacaaaacttaaaggtcccctaacgatgatggcgtcgcattacaagcaacactgtcctcctacccccgaaacatcgtgtgctacgcagatcattacattcgagagctttaaggaaaatctaaaagacttccttctcgttattcctttcgactgctgggagcccgtgcaggaatag

SEQ ID NO: 4304 - DNA, 1218 bp, synthetic construct
  misc_feature 1..1218: note = source = /note="Description of Artificial Sequence: Synthetic coding sequence"
  source 1..1218: mol_type = other DNA
atggaagctagcttcgtgcagacgacgatggcattgggtcttagctcaaagaaagccagctcccgcaatgtggccgtcgagcgaaagaacctaattaccgtgtgtaggttctcagtaaaaacactactggaaaaatacactgcagaacctattgatgattcttcagaagagttcgtgaatttcgccgcaattctggaacagatccttagccaccgttttaaagcttgcgcacccgctggcccagtgtcctggttcagctcggacgggcagagaggattctgggactacataaggctggcatgtagtaaagtgccgaataattgcgtctcaagtatagagaacatggagaatatttcaacagccagggctaagggccgagcttggatccgcgtggcacttatggaaaagaggatgagtgagtatatcaccacagctctgagagacacacgtaccacgcgaaggttctacgactccggtgcaatcatgctgcgagatgaagcgacgatcctaactgggatgctcatcggactgagcgccatcgactttagcttttgccttaaaggggaagtcctggatggcaaaacacccgtagtgattgactacaccccatacctgaagtttactcaaagttacgattacctgacggacgaggaggagcggcatagtgcagaatcttctacctccgaggacaactcgcctgagcatccgtatttgcctctggttaccgacgaggactcatggtactcaaaatggcacaagatggagcagaaatttcggatcgtgtatgcgcagaaagggtacctagaggagctggtgcgccttagggagtcccaacttaaagatctggaagccgagaatcggcgactgcagttgcaactggaagaagccgctgcccagaatcagcgcgagaagagagaactggagggcgtcatattggagctccaggagcagctcaccggactgatcccctccgaccacgcacctttggctcagggtagtaaagaactgaccactccactcgttaaccagtggccctctctcggcacgctgaatggagccgaaggcgcatctaatagcaagttatatcgtagacactcctttatgagcacagaaccactttcagccgaggcatccctaagcagcgattctcaaaggttgggcgaaggtactagagacgaggaaccttggggtcccattggcagcagtgaacccaattag

SEQ ID NO: 4305 - DNA, 603 bp, synthetic construct
  misc_feature 1..603: note = source = /note="Description of Artificial Sequence: Synthetic coding sequence"
  source 1..603: mol_type = other DNA
atgtcgcccgaacctgccctttctcctgcgctccaactgctgctgtggcattctgccctctggaccgtccaggaggcaacccccctgggccctgcctccagcctccctcaaagttttctccttaagtgtctcgaacaggttagaaagatccaaggggatggggctgctcttcaagaaaaactgtgcgcgacttacaagctgtgtcatcccgaggagctggtcctgctgggacacagcctgggtattccctgggccccactatcttcttgtccttcccaggctttgcaattagctggttgtctgagccaactgcattctggcctttttttgtaccaaggactcttacaggcactcgaggggatttccccagagcttggcccaaccctggatactcttcaattggatgtcgccgattttgccacaaccatttggcagcagatggaagaacttggtatggctcccgctctgcagccaacacaaggcgcaatgcctgctttcgcctccgcctttcagcggagagctgggggagtactggtggcttctcatctccaatcatttctcgaggttagttatcgggtcctgcggcacctggcacagccttag

SEQ ID NO: 4306 - DNA, 516 bp, synthetic construct
  misc_feature 1..516: note = source = /note="Description of Artificial Sequence: Synthetic coding sequence"
  source 1..516: mol_type = other DNA
atggccggacccgctacccagtctccaatgaagctcatggcactccagctccttttgtggcacagcgccctgtggactgtgcaggaagctacacctctgggacccgctagctctctgccacaaagttttctcctcaaatgtctggagcaggttcgtaagattcagggcgacggtgccgctctccaggagaaattagtgtctgaggcgggttgcttatcccaactgcattcaggcttatttctgtatcagggtctgttacaggccctggaagggatcagcccagagctggggcctaccttagacaccctacagctcgacgtggccgactttgccacaaccatctggcagcagatggaggaattgggcatggcaccagctttgcagcccactcaaggagcaatgccagcgttcgcgtctgcatttcagagacgggctgggggagtcttagtggccagccatttacaatcgttcctcgaggtgtcgtaccgagtactgcggcatttggctcagccctag

SEQ ID NO: 4307 - DNA, 615 bp, synthetic construct
  misc_feature 1..615: note = source = /note="Description of Artificial Sequence: Synthetic coding sequence"
  source 1..615: mol_type = other DNA
atggctggacccgcaactcagtcgccaatgaaactgatggccctgcagctgctgctgtggcactctgcactttggaccgtccaggaggctacaccccttggtcctgcctctagtctgccccagagtttcttacttaagtgtctggagcaagtgcgcaaaatccaaggagatggagcggcactgcaggaaaagttgtgcgccacctataaactatgccatccagaggaactggtgctgctcgggcatagcttgggtattccctgggctccactgtctagctgccccagccaggccctgcagctcgcaggttgcctgtcacaactacactcagggctatttctgtaccaaggactcctccaagctctggaggggatatcccccgagcttggtcccaccctagacacactgcaactggatgtggctgatttcgcaacaacgatctggcagcagatggaagaactgggcatggcaccagccttacagcctacccagggcgcaatgcctgcattcgcctccgcgtttcagcgtagggccggaggtgtcttggttgccagtcatctgcagtctttcctagaagtgtcttacagagtcctgaggcatttggcgcaaccatag

SEQ ID NO: 4308 - DNA, 3696 bp, synthetic construct
  misc_feature 1..3696: note = source = /note="Description of Artificial Sequence: Synthetic coding sequence"
  source 1..3696: mol_type = other DNA
atgcgcctgcttgctaagattatatgcctgatgctctgggctatatgcgtcgccgaggattgtaacgaactgcccccacgacgcaacaccgagatccttacgggctcatggagtgatcagacgtatcccgagggaacccaggctatctataaatgtagaccaggctatcgctctctcggaaacgtgattatggtgtgtcggaaaggagaatgggtggcgctgaatcctcttcggaagtgtcagaaaagaccttgcggacatccgggagatacaccatttggaacttttacacttacagggggaaacgtgttcgagtatggagtcaaggccgtgtatacatgcaatgaaggctaccaactattgggagaaatcaactacagggagtgtgatactgatggatggaccaacgacatcccaatttgtgaagtggttaaatgtctgccggtgacagctcctgaaaacggaaagatcgtgagttcggccatggagcctgatagagaataccatttcggacaagccgtgagattcgtgtgtaattccgggtacaagattgagggcgatgaggagatgcattgtagtgatgatgggttttggtcaaaagaaaaaccaaaatgcgtggagatttcatgcaagtcccctgatgtgatcaacggaagccccatctcacagaagattatctacaaagagaacgagaggtttcagtataagtgcaatatggggtacgagtacagtgagaggggggacgcagtgtgcaccgagagtggatggcggcctctgcctagttgtgaggagaaatcatgcgataatccatatatccctaatggagattactctcccctcagaataaagcaccgcacaggagacgagattacctaccagtgtcgtaacggcttctaccctgccacgagggggaatacagccaaatgtacatccacgggatggatacccgctccaagatgcaccctgaaaccctgcgattatccagatataaagcacggtgggctttaccatgaaaatatgcgtcgtccatactttcccgtcgctgtgggcaaatattacagctactattgcgatgagcattttgagacaccaagcggttcctactgggatcacattcactgcacccaggacggctggagccccgctgtcccttgccttcggaagtgctatttcccataccttgagaacgggtacaaccaaaaccacggacgcaaatttgtccagggtaaatccattgatgttgcctgtcatcccggatacgccttaccaaaagctcaaacgacagttacctgcatggaaaacgggtggtcaccgacgcctaggtgcatccgggtcaaaacctgctctaaatcctccatcgatattgagaacggcttcatcagcgagagtcagtatacctacgccctgaaagagaaagccaagtaccagtgcaaactgggttacgtgacagctgacggggaaaccagcgggtcaatcacatgcgggaaggatggctggtcagctcagcctacctgcattaaatcttgtgacatcccagtatttatgaacgccaggacaaagaatgattttacctggtttaagctgaacgacacccttgattacgagtgtcatgacggatatgaatcaaacacaggatctacaactggctcaatcgtatgcggttacaacggttggtctgatctccctatctgctatgagcgcgagtgtgaactgcccaaaatcgacgttcatctggtgcccgatcgcaagaaggaccagtataaagtcggtgaggtactgaagttcagttgcaagccgggtttcacaatcgtggggcctaatagcgtgcagtgctatcacttcgggctgagtcccgacttgcctatctgcaaggaacaagttcagtcctgcggccctccacctgaattgttgaacggtaatgtcaaggaaaaaacaaaggaggagtatggtcactcagaggtagtagaatactactgtaacccacgttttctcatgaaggggcctaacaagatccagtgtgtcgatggcgagtggactacactgcctgtttgtatcgttgaggagagtacctgtggggacatccccgagttggaacatggttgggctcagctaagctcacctccatactactacggggactcggtggaatttaactgctcagaaagcttcacaatgattgggcatcggtccatcacctgtattcacggagtgtggacgcagctacctcaatgcgtggctatagacaaactgaagaagtgtaaatccagcaatctcattatcctcgaagaacacttgaagaacaaaaaagagtttgatcataactcaaacattcgctaccgctgtcgaggtaaagaaggctggatccatacagtctgtatcaacggtcggtgggatcccgaggttaattgctctatggcacagatccaactgtgtccaccacccccacaaatcccaaattctcacaacatgactacgactcttaattatcgggatggcgagaaggtgagcgtgctgtgtcaagagaactacttaattcaggagggagaggaaattacctgcaaagatggcagatggcagtctatccccctgtgcgtggaaaaaatcccatgtagccagcctccccagatcgaacatggtactataaacagttcgagatctagccaggagtcttacgcacacgggacgaaactgtcctatacttgtgagggcggattccggatctccgaagaaaacgaaaccacctgttatatgggcaaatggagcagccccccacaatgcgaggggttgccctgcaaatcacctccagagataagccacggagttgtggctcacatgtcggattcttaccagtacggcgaggaggttacatataaatgcttcgaggggttcggcattgacggcccagccatcgcaaagtgcctgggtgagaaatggagtcaccccccatcttgtataaaaaccgactgtttaagtctgcctagcttcgaaaatgccatcccgatgggtgagaaaaaagacgtgtataaggccggtgagcaagtcacatacacctgcgcaacgtactacaagatggacggagcctcaaatgtaacatgcatcaatagccgttggactggcagaccaacgtgccgggatacaagctgcgtaaaccctccaactgtccagaacgcttacattgttagccgccagatgtccaaatacccgtcaggtgaacgagtacgctatcagtgtagatcaccctacgagatgtttggcgatgaagaagtgatgtgcctaaatgggaattggacggagccccctcaatgcaaagattcaacaggaaaatgcgggccaccgcctcccattgataatggggatattacttcatttcctctgtcagtctacgctcctgctagctccgtagagtaccagtgtcagaatctgtaccagctggaagggaacaaacgaattacatgccgcaatggacaatggtccgagccaccaaagtgtttacatccctgcgtgatctcccgcgagatcatggagaattataacattgctctgaggtggaccgctaaacagaaactgtatagcagaacaggtgaatccgtcgagtttgtgtgtaaacgaggctaccgcttatccagcaggtcccataccttgcgcaccacctgctgggatggtaagttggaatatcctacctgtgccaagaggtag

SEQ ID NO: 4309 - DNA, 1350 bp, synthetic construct
  misc_feature 1..1350: note = source = /note="Description of Artificial Sequence: Synthetic coding sequence"
  source 1..1350: mol_type = other DNA
atgcgactcctggcaaagatcatctgcttaatgctctgggccatctgtgtcgccgaggactgtaatgaacttccacccagaaggaatacagaaatcctgactggctcctggagcgatcaaacctatcccgaaggtactcaggctatctataagtgtaggcctggctaccgatccctcggaaatgtcattatggtgtgccgaaagggcgagtgggtggctctaaacccactgcggaaatgtcaaaaacgtccgtgtggccacccgggtgatactcctttcgggacattcacactaaccggcggtaacgtgttcgagtatggcgtcaaagccgtgtacacttgcaatgagggctatcagctcctaggcgagataaattatcgcgagtgcgacactgatggctggactaatgatatcccaatttgcgaagtggtgaaatgtctgccagtgacagcccctgaaaacggcaaaatagtgtccagtgctatggagcctgacagagaatatcatttcggacaggcggtccgtttcgtgtgtaatagcggctataagattgagggcgatgaagaaatgcactgttccgatgatggcttctggtctaaggagaagcctaagtgcgtcgaaatttcctgtaagtcccccgacgtgatcaacggtagtcccatcagccaaaaaattatatataaggagaatgaacgtttccagtacaagtgcaatatgggttatgaatacagcgaacgcggagacgccgtgtgtacagaaagtggttggagaccactgcctagttgtgaggagaagtcatgcgataacccgtacattccaaacggggactactccccactgagaatcaagcatagaaccggtgatgagatcacctatcagtgcagaaacggcttttatcctgctacacgcggaaacacagctaagtgtacatcaaccggatggattccggcaccacggtgcaccttgaaaccctgcgactatcctgatatcaagcacgggggtctctatcacgaaaacatgagacggccatatttcccagtggcagtgggaaaatactattcctactactgtgacgaacactttgagacacctagcggcagctactgggatcatattcactgcacccaggacggctggagtccggctgttccgtgcttgcggaagtgctacttcccttatttggagaacggatataatcagaatcatggccgaaaatttgttcagggtaagagcattgacgtggcctgccatcccggttatgccctgcccaaggcccaaactaccgtgacgtgtatggagaatgggtggtcaccaacccctcggtgtatcagagtgattttccagttgtag

SEQ ID NO: 4310 - DNA, 1350 bp, synthetic construct
  misc_feature 1..1350: note = source = /note="Description of Artificial Sequence: Synthetic coding sequence"
  source 1..1350: mol_type = other DNA
atgagactcttagctaagataatctgtctgatgctgtgggctatttgcgttgcggaggattgtaatgaactccccccacgcagaaacacggaaattctcactggctcctggtcagatcagacttacccagaagggacccaagccatctacaagtgccggcctggctatcggagcttgggcaatgttatcatggtgtgtagaaagggagaatgggtagcgctgaatccacttagaaagtgtcagaaacgtccctgcggccatccaggcgatacaccctttggaaccttcacactcacaggcggtaatgttttcgagtatggagtgaaggccgtctatacttgcaatgagggctatcagctgctgggggagatcaattacagagagtgtgacacagacggctggaccaatgatatccctatatgcgaggttgtgaaatgcttgccagtcactgccccagaaaacgggaagattgtctcctctgccatggagcccgaccgggaataccacttcggccaagccgtgcggtttgtgtgcaattcaggctataagatcgaaggggatgaggaaatgcactgctccgacgatggattctggtctaaggaaaagcccaaatgtgtagaaatcagctgtaaatctccagatgtgatcaatggatccccaatctcccaaaagattatctataaggagaacgaacggtttcaatacaagtgcaatatgggatatgaatacagcgagcggggagatgcagtgtgcaccgaatcaggctggagaccccttccatcatgtgaggagaagtcgtgtgataacccctacatccctaatggggattacagtcctcttcgtataaaacaccggactggcgatgagatcacgtaccagtgcagaaacggattctaccccgcaaccagggggaatacggctaaatgtacatcgacgggatggatacctgcaccacgatgcactctgaagccctgcgattaccctgatattaaacacggaggtctgtaccacgaaaatatgagacgaccgtatttccctgtcgctgtcgggaagtactacagctattactgcgacgaacactttgagacaccgtcaggcagctattgggatcatatccattgcacccaggacggctggagtccagccgttccttgtctcagaaaatgctatttcccttacctcgagaatgggtataaccagaaccacggacgtaaattcgtacagggtaagtcgattgacgtggcttgtcatccaggctacgccttgcctaaggcgcaaacgacggtgacatgcatggaaaacggatggtcacctacgcctaggtgcatccgcgtatcttttactctatag

SEQ ID NO: 4311 - DNA, 573 bp, synthetic construct
  misc_feature 1..573: note = source = /note="Description of Artificial Sequence: Synthetic coding sequence"
  source 1..573: mol_type = other DNA
atggccgcaggcgagctagagggcggtaagcctctgagcggcttgcttaacgccctagctcaggataccttccacgggtatccgggaataaccgaggaattgctccgcagtcagctgtaccccgaagttcctcccgaggagtttaggcccttcttagccaagatgcggggtatcctcaaaagcattgcgagcgcagatatggatttcaaccagctagaagcctttctgacggcacagacaaagaagcagggcggtatcacaagtgaccaggccgctgtgattagcaagttctggaaatcgcacaaaactaagatccgggagtctctgatgaaccagtccagatggaattctggtttgcggggactgtcttggcgtgttgacggcaaatctcaaagtcgtcattccgcccaaatacacaccccagtcgcgattatcgaactggaactgggaaaatacggccaggaaagcgagtttctgtgtctcgaattcgacgaagtgaaagtaaatcagatcctgaagaccctgtctgaagtcgaggaaagcatcagtacactcatctcccaacccaactag

SEQ ID NO: 4312 - DNA, 117 bp, synthetic construct
  misc_feature 1..117: note = source = /note="Description of Artificial Sequence: Synthetic coding sequence"
  source 1..117: mol_type = other DNA
taacaagaatcagaatttctgtgcctcgagttcgacgaggtgaaggtgaaccaaatcctcaaaaccctgtcagaagtcgaagaatctatctctactttgatcagccagcccaattag

SEQ ID NO: 4313 - DNA, 99 bp, synthetic construct
  misc_feature 1..99: note = source = /note="Description of Artificial Sequence: Synthetic coding sequence"
  source 1..99: mol_type = other DNA
tgatgcctggaatttgatgaggtgaaagtgaatcagattttaaagaccttatccgaagtggaggagagtatttcaaccttaatctcccagccaaactag

SEQ ID NO: 4314 - DNA, 117 bp, synthetic construct
  misc_feature 1..117: note = source = /note="Description of Artificial Sequence: Synthetic coding sequence"
  source 1..117: mol_type = other DNA
tagcaagagagtgagtttttgtgtctggagttcgacgaggtcaaggtaaaccagatcctgaagacattgagtgaggtggaggaaagtattagcactctgatttctcagcctaactag

SEQ ID NO: 4315 - DNA, 480 bp, synthetic construct
  misc_feature 1..480: note = source = /note="Description of Artificial Sequence: Synthetic coding sequence"
  source 1..480: mol_type = other DNA
atggcagctggggagcttgagggtgggaagccactgtccgggctcttaaatgctttggctcaagacacattccacggatatccgggaatcaccgaggagctgctgcgatcccaactctaccccgaggtgccacctgaggagttccgtccattcttggctaaaatgaggggcattctgaaatcaatcgctagtgccgatatggatttcaatcagttagaggccttcctgaccgcccagactaaaaagcagggcggaattacatctgaccaagccgctgtgatttcaaagttctggaagtcacacaagaccaagatcagagagtccctaatgaatcagtcacggtggaatagtggtctccgaggcctgagttggagagttgatggcaagtctcaaagccgacattcggcacagatacacaccccggttgctataattgaattggagctgggaaaatacggtcaagtccattgtaaccagtag

SEQ ID NO: 4316 - DNA, 591 bp, synthetic construct
  misc_feature 1..591: note = source = /note="Description of Artificial Sequence: Synthetic coding sequence"
  source 1..591: mol_type = other DNA
atgcgtcttccgttgcttgtgtctgccggagtattattggtggctctgctgccttgtcctccatgcagggcactgctctcccgaggcccagtaccaggagctcgacaagccccacagcacccccagccccttgatttcttccagccaccccctcagagtgagcagccacagcagccccaggccagacctgtccttctccgtatgggcgaagaatactttctcagactcggaaacctgaacaagagcccggctgcccctctatcgccggcttcatccctcctagccggaggcagcggctcacgcccttccccagaacaggctaccgccaattttttccgggtgctactgcagcaactactgctgccacggcgaagtcttgactctcccgctgcccttgcggagagaggagcgcgaaatgctttgggcggacatcaagaggctcccgaaagagagcgcaggagcgaagagcctccaatctcattagacctcaccttccatctgctgagagaggtgctcgaaatggcaagggctgaacaactcgctcagcaggcccacagtaatcggaagctgatggagatcatcggcaagtag

SEQ ID NO: 4317 - DNA, 4443 bp, synthetic construct
  misc_feature 1..4443: note = source = /note="Description of Artificial Sequence: Synthetic coding sequence"
  source 1..4443: mol_type = other DNA
atgcagcggagtcccctcgaaaaggcatctgtggtttcgaagctgttcttttcctggacccgcccaatactcaggaagggttaccggcagagattggagctgagcgatatttatcagatcccaagcgtggactctgccgacaatctttccgagaagcttgagagggaatgggatcgggagctcgctagcaaaaagaacccaaagctaataaacgctctacggcgatgtttcttttggaggtttatgttctacggaatattcctctacctcggcgaagtgactaaagccgtgcagcccctactgctgggacgcattatcgcttcatatgaccctgataacaaggaggaacggagcatcgccatctacttagggatcggactctgcctgctcttcattgtccgaactctgttacttcatcccgcaatctttggtctgcatcacattgggatgcaaatgaggattgctatgttttcgctgatttacaaaaagacgctaaaactttcaagcagggtcctcgacaagattagcataggacagctggtcagccttctgtcgaacaacctgaacaaattcgatgagggactagccctggctcacttcgtgtggatagcgcctctgcaggtggcccttctgatggggttgatatgggaactactgcaggccagcgcgttttgtggcttgggctttctgatagtacttgccttatttcaagctggtctgggacgcatgatgatgaaatatcgggaccagcgagccggtaagatcagcgaacgactggttatcacctctgaaatgatagaaaatatccagagcgttaaagcttactgctgggaggaagcaatggagaagatgatcgaaaacctacgccagacagaattgaagctgacccgtaaggccgcttacgtgaggtacttcaattcgtccgccttttttttttcaggctttttcgtggtcttcttaagtgtattgccttacgccctgattaaggggatcatcttaagaaagatctttactactatttctttttgtattgtcctaaggatggctgttactaggcagttcccctgggctgttcagacctggtatgatagcctcggagcaattaataagattcaggatttcctgcagaaacaggagtacaaaactttagaatacaaccttactacaacagaagtagtgatggagaacgtcacagctttttgggaagagggattcggtgaactctttgagaaggcaaaacagaacaataataatcgaaaaacctcaaacggtgatgattctctgttcttcagcaacttctctctgctcgggactccagtactgaaggatatcaattttaagatcgaacgtgggcaactgcttgccgtagcaggctccactggtgctggcaagacctccttgcttatggtgattatgggagaactagaaccgtccgagggcaagataaagcattccgggaggatatcattttgtagtcagttcagctggatcatgcctggtactataaaggaaaacatcattttcggggtttcttacgatgagtaccgatacaggagcgtgattaaagcgtgccagctggaggaggatatatcaaagtttgccgagaaagataatatcgtcctcggcgaaggcggtatcaccctgtcagggggtcaacgggcacggatcagtctagcacgcgctgtttacaaggacgctgatctgtatctgctggactcgcctttcggctatctggatgtgctcacagagaaggagatattcgagtcctgcgtgtgtaagctgatggctaacaagacacggattctcgtgacgtccaagatggaacacctgaagaaggcagataagatcctcatattacacgagggtagcagttacttctatggaaccttcagcgagctgcagaatctgcagccagactttagctctaagctgatgggatgcgactcctttgaccagttctctgccgagcgccgaaattccatactgaccgagacacttcacaggttttcactggaaggagacgctcctgtctcctggactgagactaaaaagcagagctttaaacagactggggagttcggcgaaaagaggaaaaatagcatcttgaatcccattaacagtatacggaaatttagcatcgtccagaagacccctctgcagatgaatggcatagaggaagattcagatgagccacttgagagacggctgtcgctggtaccagactccgaacaaggcgaggccatactgccccgaatctccgttatctccactggtcccacattgcaggcacggaggagacaatccgttttgaacctgatgacacattcagtgaaccagggccagaatatacatcgaaagacaacggccagcaccagaaaggtgagcctggctccgcaggcaaatttaaccgagctcgatatatattcccgtcgtttgtcccaggagactgggcttgaaatcagcgaagaaatcaacgaggaggatctgaaagaatgctttttcgacgatatggaatccattcccgctgtaactacctggaacacctacctgcgctatattaccgtgcacaaatcacttattttcgtgctgatctggtgcctggtcatctttctggctgaagtcgccgcttcacttgttgtgctttggctgcttggaaacaccccccttcaggataagggcaatagtactcatagtcggaacaactcctacgctgtaatcatcacttctacatcatcttactatgtattctacatatacgtaggtgtggctgacactttattggccatggggtttttccggggattaccactggtgcacacactcatcaccgtgtctaaaatactccatcataagatgctgcacagtgtgctgcaagcccctatgtcaactcttaacaccctcaaagccggagggatactgaatcgtttctctaaggacattgctattctggacgatctgttgcctcttaccatctttgactttattcagctcctgctgatcgtgatcggagcaattgcagtggtagctgtgctgcagccatatatctttgtcgctacagtgccagtcatcgtggccttcattatgttaagagcgtatttcttgcaaacatcccagcagctcaagcaactggaaagtgaaggcaggtcacctatcttcacacatttggtgacaagtctgaaaggcctctggacgctgagagcctttggcagacagccatattttgagacccttttccataaagcgttaaatctacacaccgctaactggtttctgtatctcagcactctccgttggtttcagatgcggatcgaaatgatctttgtgatcttttttatagcagtaacctttatctccatcttgaccaccggcgagggtgagggccgtgttggtattatcctgacattggctatgaatataatgtctacccttcagtgggccgtaaatagcagcatcgacgtcgacagtttaatgagatcagtgtcccgggttttcaagtttatcgatatgcctacagaaggcaaacccacgaaatccaccaagccatacaaaaacggtcagttatccaaggtgatgatcatagagaattcccacgttaagaaggacgacatctggccttcgggcggacaaatgactgtgaaggacctcacggctaagtacacagagggcggtaatgccatcctcgaaaacataagtttcagcataagtccaggacagagggtgggcctcctcggtcgaaccggaagcgggaaatccacgcttctgagtgctttcctccgcctgctcaacaccgaaggagagatccagattgatggagtgtcatgggacagcatcacactgcagcagtggcggaaagctttcggggtaatccctcaaaaggtgtttatcttttcaggaaccttcaggaaaaacctggatccgtatgagcagtggagtgatcaggaaatttggaaagttgcggacgaagtgggactcaggtctgtgatcgagcagtttccgggaaagctggactttgtgctggtagacgggggttgtgtgctatcccatggacacaagcagctaatgtgcttagcgcgatccgtgctcagcaaagccaagattcttcttctggacgagccaagcgcacacctggaccccgtcacttatcagatcattagacggacactaaaacaggcttttgccgactgtacggttatcctatgcgagcaccggatcgaggccatgctggagtgtcagcagttcctggtaatcgaagagaataaggtacgccaatacgattcaattcagaaactcctcaacgagcggtcattgttccggcaagccatcagtcctagtgaccgggtcaagctttttcctcatcgcaactctagcaaatgtaagagcaagccccagatcgccgcacttaaggaggagactgaagaggaagtacaagacacgcgtttgtag

SEQ ID NO: 4318 - DNA, 4317 bp, synthetic construct
  misc_feature 1..4317: note = source = /note="Description of Artificial Sequence: Synthetic coding sequence"
  source 1..4317: mol_type = other DNA
atgcagcgctcacctctggaaaaggcttcggttgtaagtaaactgttcttttcctggacccgacctatactccggaagggataccggcagagactcgaactatccgacatttatcagatcccaagcgttgactcggcagacaacctgtctgaaaaactcgaacgtgaatgggacagggaactcgcgagtaaaaagaatcctaagctcattaatgctttgcgccgttgttttttctggcggttcatgttctacgggatctttttgtatcttggagaagtcacgaaggctgtgcagccactcctgctgggcaggatcatagcgagttacgaccctgacaataaggaggagaggtccatcgccatttacctaggaataggcctgtgtctgctgtttatagtgagaacattgcttctgcatcccgcaatctttggcctacaccatattgggatgcagatgaggattgccatgttctctctgatctacaagaaggggctggctcttgctcatttcgtgtggatcgcccctttgcaggttgccctgctcatgggtctgatctgggagctgctgcaggcaagcgctttctgtgggctgggttttctgatagtcctggctctctttcaagcgggactgggccgtatgatgatgaaatatcgggatcagcgggctggtaaaatcagcgaacgtctggtgataacttctgagatgatcgagaatattcagagtgtgaaagcttactgctgggaagaagccatggaaaagatgatcgagaatctccgacaaacagaactgaagctcactagaaaagctgcctacgttagatattttaacagcagtgccttctttttctctggtttctttgttgtgttcttaagcgtgcttccatacgcattaatcaagggcatcatcttgcggaaaatcttcaccactatttctttttgcatcgtcttgcgcatggctgtaacacggcagttcccctgggccgttcaaacatggtacgattccctgggtgcaatcaataaaatccaggacttcttgcagaagcaggagtacaaaactctcgaatacaatcttacaaccactgaggtcgtgatggaaaacgtgacagccttctgggaagaaggattcggggaattatttgagaaagcgaagcagaacaacaataatagaaagacatcgaacggcgacgattcgctatttttctcaaacttctccctgctgggtacccccgtcctcaaggacattaatttcaaaatcgagcggggtcaactgctggccgtcgctgggtccacaggcgctggcaaaacatcgctgttgatggtgatcatgggggagctggagccaagcgagggtaaaatcaagcactcaggcagaattagcttctgctcccagttttcttggattatgcctggcacaataaaggaaaacataattttcggtgtgagctatgatgaataccgctataggtccgtaatcaaggcgtgtcagcttgaggaagacataagcaaattcgctgagaaagataacattgttcttggggaaggaggcatcacattgtccgggggacagagagctcgaatttctctggctcgggctgtctacaaggatgctgacctgtacttactggattctcccttcggctacttggatgtgctgaccgaaaaggaaattttcgagtcttgcgtctgtaaactgatggccaataagacgagaatcctcgtgacctctaagatggaacacctcaagaaggcggataagattctcattctgcacgagggctcctcctacttctacggcacattctcggagctgcagaatttgcaaccagatttctcctcaaaattaatggggtgcgatagcttcgaccaattttccgcagaaaggcggaactccatactgactgagactttgcaccggttttcgctagaaggagacgcaccggtgtcctggacggagacaaagaaacaatctttcaagcaaacaggtgaatttggcgagaagcggaaaaacagcatcctgaaccccatcaactctattcgcaagttcagtatagtccagaagacccccttacagatgaacgggattgaggaggacagcgatgagccgctcgaacggaggctaagcttagtgcctgacagcgaacagggagaggctatcctcccgaggatatctgttatatctacaggccctacattacaagcacggagaaggcaatcagtgctgaatttgatgacccactccgtgaaccaagggcagaacatacatcggaaaactacagctagcactcgcaaggtgagtcttgcgccacaggctaatctgaccgagttggatatctactcacgcagattaagccaggagactggtctagagatctccgaagagataaacgaagaggatctgaaagaatgtttttttgatgatatggaatctatccccgctgtaacgacatggaacacctacctccgctacattaccgtccacaagagcctcatctttgttctcatatggtgtctggttatttttctggctgaagttgccgcatccttagtggtcttgtggttactaggtaatactcccctgcaggataaaggaaactccacacattctaggaataactcttatgcagtgatcataacatccacatcttcttattacgtgttttatatttatgtgggtgtggctgataccctgctggccatgggatttttcagaggactacccttagttcatactctgatcaccgtctctaagattctgcatcataaaatgctgcattccgtgctccaagctcctatgagcactctgaacaccctcaaggctgggggtatcctcaatcgattctcaaaggacatcgcaatccttgatgacctcctgcctctgaccatctttgacttcatacagctcctgctgatcgtaatcggcgctatagccgtggtggctgtcctccagccctacatattcgtagctaccgtgcctgtgattgtggctttcattatgttgcgcgcttactttctgcagacatcacagcagttgaaacagctagaatcagagggtaggagccccatctttacccatctcgttacaagtttaaagggcctctggactctccgggcttttgggaggcaaccgtacttcgaaacacttttccataaggctctaaatctgcacaccgcaaactggttcttgtatctgtctacactgagatggtttcagatgcggatcgagatgatattcgttatctttttcattgctgtaaccttcatctctatcctgactactggtgaaggggaggggagagtgggcatcatcctaactttggccatgaacatcatgtcaacactgcagtgggctgtaaacagctcgattgacgttgatagcctaatgcggtctgtatctagggtgtttaagtttatcgacatgcctacagagggaaagcctacaaagtcgactaaaccctataaaaacgggcagttatccaaggtgatgattatcgagaattcccacgtaaaaaaagacgatatttggccatccggtggtcagatgacggtgaaggacctgacagctaagtacaccgagggcggaaacgccatcttagagaacatttcattttctatctcacccggtcaacgggtcggactcctcgggaggaccgggtcaggcaagtctacactattgtccgccttcctgaggctccttaacacggaaggcgaaatccagatcgacggagtttcctgggactccatcaccctgcagcagtggcgcaaagcctttggtgtgattcctcagaaagtgttcatatttagtggcacctttcggaagaatctcgatccctatgaacagtggtccgatcaagaaatctggaaggtcgccgacgaagttggcctacgctctgttatagaacagtttcctggcaagctagacttcgtgcttgtagacgggggttgtgttttgagccatggccataaacagttaatgtgtctggcccgatctgtccttagcaaggctaaaatcctgctcctggacgagccgagcgcccacctggaccccgtgacgtatcagatcattcgaaggactctgaaacaggccttcgcggattgtactgtcatactgtgtgaacatagaatcgaagctatgctcgagtgccaacagtttttagttatagaggagaacaaagtcaggcagtatgactctattcagaaactgcttaatgagaggagtctgttccgccaagctatcagtccgtccgatagggtaaagctctttcctcataggaacagttcaaagtgtaaaagcaaaccacagatcgccgcactcaagtag

SEQ ID NO: 4319 - DNA, 4260 bp, synthetic construct
  misc_feature 1..4260: note = source = /note="Description of Artificial Sequence: Synthetic coding sequence"
  source 1..4260: mol_type = other DNA
atgcagagatccccattggaaaaagcaagcgtggtgagtaagttattcttctcatggactcgaccaatcttgagaaaaggatatcggcagaggctggagctgagtgatatataccaaattccatccgtggatagtgccgacaacctctctgaaaaactggagcgggagtgggaccgcgagctggcaagtaagaagaaccctaagcttatcaacgctttgcgcagatgcttcttctggaggtttatgttttacgggatctttttgtatctgggtgaggttaccaaagctgtacagccactgttgctgggcagaatcatagcatcctatgatcctgacaacaaggaagagagaagcatcgcaatctacctggggattggcctctgcttactgtttatagtgcgcaccctgctgctacatccagcaatctttggtttacatcatatcggaatgcagatgcgcattgctatgttctccttgatttacaaaaagactttaaaactctccagtagagtcctcgacaaaatttcaatcggccagctcgtttccctgctgtctaataacctgaataagtttgacgagggtcttgccttggcacacttcgtctggattgcacccctgcaggtagctctgttaatgggccttatctgggagcttctccaagcctctgccttctgtggcctaggatttctgattgtgctggctctctttcaagccggtctcggtcggatgatgatgaaataccgtgaccaaagagcaggcaaaattagcgaacggctcgtgatcacaagcgagatgatcgaaaatatccagtccgttaaagcatattgttgggaggaggcgatggaaaagatgattgagaacctgcgccagaccgagctgaagctgacaagaaaagccgcatacgtcagatatttcaacagttctgcttttttcttctccggctttttcgtggtcttcctgtctgtactgccgtacgccttgatcaaagggattattctgaggaaaatcttcacaaccataagtttctgcatagttctgcggatggccgttacgcgccagttcccgtgggcggtgcaaacctggtacgattcactcggcgctatcaacaagatacaagatttcttgcagaaacaggaatacaaaacactcgagtataatctgaccacaaccgaagtcgtgatggaaaacgtcacggccttttgggaagagacctcccttctgatggtgataatgggcgagttagagcctagcgaaggaaagattaagcattcaggacgcattagcttttgcagccaattttcttggatcatgccaggtacaattaaggagaatattatctttggggtgtcatacgatgagtacaggtataggtcagttatcaaggcgtgccagctggaggaggatatatccaaattcgctgagaaggacaacattgtcctgggcgagggcggtatcacactcagcggcggacaacgtgcgcgtatcagtctcgcccgtgccgtctacaaagacgcggatctgtatctgctggacagcccttttgggtatctggatgtcttgaccgagaaggagatttttgaatcctgcgtgtgcaagctcatggccaacaaaactcgcatcctggtgacctccaaaatggaacacctgaagaaggccgataagatactgattctgcacgaagggagcagctacttctatggaacgttcagcgaacttcaaaatttgcagccggactttagcagcaaattaatgggctgtgacagtttcgaccagttctccgccgagagaaggaacagcatcctgacggaaaccctccacagatttagtctggagggagacgcacctgtgtcctggaccgaaacaaagaaacagtctttcaagcagaccggcgagtttggagaaaaacgaaaaaattctatcctaaatcccatcaatagcattcgcaaattcagcattgtacagaaaacaccgctccagatgaacggcatcgaggaagactcggatgagcccctcgagcggagactgtccctagtaccggatagcgaacaaggtgaagccatcttgccgaggattagcgtcatctccactggccctacactccaagctcgccgaagacaatccgtccttaaccttatgacacattccgtcaatcaagggcaaaatatccacagaaagacaaccgcctccacaagaaaagtctctctagcgcctcaggcgaatctcacagagctggatatttattccagaaggcttagtcaggaaacaggcctggaaatttccgaggaaatcaatgaagaggacctcaaagaatgcttctttgatgatatggaatctatcccggctgttacgacctggaacacgtacctgcggtatattaccgtgcataagtcacttatatttgtgcttatttggtgcctggttatcttcctggccgaggtggccgcatcattggttgtcctatggcttctaggcaatacaccgctgcaggacaaaggaaactctacacatagtaggaacaacagttacgctgtcatcattaccagcacctcttcctattatgtgttttacatctacgtgggggtagctgacaccttgctagcaatgggctttttcagaggtcttccccttgtacatactctgattaccgtcagcaagattttacaccacaagatgcttcattccgtcctgcaggccccaatgtcaacactaaatacgcttaaggcaggcggtatcctgaaccgttttagtaaggacattgcaatactggatgacctgctgcccctgacaatctttgactttatacagctacttctgattgtgatcggggcaatcgccgtggttgctgttctccagccgtacatcttcgtggctaccgtacctgtaattgtggcttttattatgctacgcgcttactttcttcagaccagccagcagttgaagcaactcgagtcagaaggacgctccccgatctttacacatctggtgacaagcttgaagggactatggacattgagggcatttggtagacagccgtactttgagaccttgttccacaaggcccttaaccttcacacagccaactggttcttgtacctctcgactctccgttggttccagatgagaattgagatgatctttgtcattttcttcatcgcagtcacgtttatctcaatactgacaacgggagagggagaaggtcgggtcggcattatactcacactggctatgaatattatgtctaccttgcagtgggccgttaacagctccatcgatgtcgactcccttatgcggagtgtttctagggtttttaagttcatcgacatgcccaccgagggaaaacccacgaaatccacaaagccttataaaaacggccagctgtctaaggtgatgattattgagaacagtcatgtaaagaaggatgacatttggccttcaggcggacagatgaccgtgaaggatctgacagcaaaatacaccgaggggggtaatgccatccttgaaaacatttcattctctataagccctggtcaacgtgtcggcctgctcgggagaacgggtagcggaaaatcaaccctactctcagcattccttcgtctgttaaatacagaaggggaaattcagatcgatggtgtttcatgggacagcattaccctgcaacagtggagaaaagctttcggggtcatcccacagaaggtcttcatcttctcgggcaccttccgcaaaaacctcgacccttatgagcagtggtctgatcaggaaatctggaaggtggctgatgaggtgggcctcaggagtgtcatcgagcagttccccggaaaactggatttcgtgctggtcgatggtggatgtgtcctcagccacgggcacaagcagctgatgtgtctggctcgctccgtgctgtctaaggccaagatcctgcttttagacgagccctccgcccatcttgaccccgtgacgtatcagattatacgccgaactctcaaacaggcattcgcagactgcactgttattctatgcgagcatcggatcgaggccatgctcgagtgccagcagttcttagtgattgaggagaacaaggtgcggcaatacgacagtatccaaaagcttctgaacgagcgctcccttttcaggcaagctatttcccctagcgaccgggtcaaactgtttccccatcggaactccagtaaatgtaaatctaaaccacagatcgcagctctcaaggaagagacagaggaggaagtgcaggacacacgcttatag

SEQ ID NO: 4320 - DNA, 573 bp, synthetic construct
  misc_feature 1..573: note = source = /note="Description of Artificial Sequence: Synthetic coding sequence"
  source 1..573: mol_type = other DNA
taaaaaggactctggaccctgcgtgcctttggacgccagccttacttcgaaacactgtttcacaaagcactcaacctccatacagctaattggttcttatatttgtccaccctgcggtggtttcagatgaggatcgaaatgatttttgtgattttcttcattgccgtaaccttcatttcaatcctcactaccggcgagggcgagggaagggtcgggattattctgacactggcaatgaacatcatgagtaccctccagtgggctgtcaatagttccatcgatgtagatagcctgatgcggagtgtctcccgagtctttaagtttatcgatatgccaacggagggcaaaccgactaaatctaccaagccatataagaacgggcagctcagtaaagtgatgattattgagaactctcatgtgaagaaggatgacatctggcccagcggcggtcagatgactgtaaaagacctgactgccaagtacactgagggtgggaatgctattctggaaaatatcagcttctccatctccccaggccagcgggtacggttcgagcactgcttgctgtgttag

SEQ ID NO: 4321 - DNA, 1203 bp, synthetic construct
  misc_feature 1..1203: note = source = /note="Description of Artificial Sequence: Synthetic coding sequence"
  source 1..1203: mol_type = other DNA
atgattcggaactggctcactatctttatacttttccccttaaagctggtggagaagtgcgagagtagtgtgtcacttaccgttcctcctgtcgttaagctggagaatggctcatctaccaatgtttctctgaccctgagaccgcctcttaacgctaccctggtgattaccttcgaaatcactttccggagcaaaaacatcacaatcctggagctgcccgacgaggtggtggttccacccggagtcactaactccagctttcaggtgacttcacagaatgtgggacaattgacggtataccttcacggtaaccatagtaatcagactggccctagaattcgtttccttgtcatcaggagttctgccatctcaatcatcaatcaagtgatcggctggatttactttgtagcttggagcatttctttttacccgcaggtaattatgaactggcgcagaaagtccgtcatcggactgagcttcgattttgtggccttaaatctcacaggttttgtcgcttatagcgtgtttaacataggacttctctgggtgccttatatcaaggaacagttcctattaaagtatcccaatggagtcaaccctgtaaactcgaacgatgtcttcttttcattgcatgccgtcgttctcacactcattatcatcgtgcagtgctgtctctatgaacgcggaggacagagggtgagctggcctgccattggtttcctggttctagcctggctgtttgcctttgtcacaatgatcgtcgcagccgtcggagttaccacctggctacaattcctgttttgcttcagttatataaagcttgctgtaactttggtcaagtacttcccccaggcgtatatgaacttctactacaaatccacagaaggatggagcattggtaatgttctgcttgacttcaccggtggatcctttagcttactacagatgttcctgcagtcctacaacaacgatcagtggacgctcatctttggggacccaacaaagttcggtctgggagtattttccatagtgtttgatgtcgtgttttttattcagcatttctgcttgtatagaaaaagacccggtctgcaggccgctcgcacaggctccggatctcgattgcgacaagattgggccccttccctccagcctaaagcccttccccaaaccactagcgtctccgctagctccctgaagggctag

SEQ ID NO: 4322 - DNA, 1104 bp, synthetic construct
  misc_feature 1..1104: note = source = /note="Description of Artificial Sequence: Synthetic coding sequence"
  source 1..1104: mol_type = other DNA
atgatcagaaattggctgacaatcttcatccttttcccattaaagctggtggaaaagtgcgagtcttctgtgtcactcacagtcccaccggtagtaaagctggaaaatggatctagcactaacgtaagcttaaccttgcggcctcccctcaatgctaccttggttatcacattcgagattaccttcagatctaagaacataacgatcctggagttgcccgacgaagtcgtggttcccccaggggtgaccaattcatcattccaggtaacttcccagaacgtggggcaactgacggtctatctccacggcaaccatagcaatcagaccgggccacgaattcgcttcctggtcatccggtctagcgcgatctccattatcaaccaggtgatcggctggatctactttgtggcatggagcatctctttttaccctcaggtcatcatgaattggcggcgaaaaagtgtgattgggctttcgttcgacttcgtggccctgaacctgaccggctttgtggcctattccgtattcaacatcggtctgttatgggttccttacataaaagagcaattccttctgaaatatcctaacggggtgaaccccgtcaacagtaatgacgttttcttttcacttcacgcagtcgtgttaacactgattataattgtacagtgttgtctgtacgagagaggcggtcagcgagtgtcttggccagccatcggttttctggtcttggcgtggctgtttgcattcgtgacaatgatcgtggcagccgtgggggtcacaacttggcttcaatttttgttttgcttctcttacatcaaactggcagtaacactggtcaaatacttcccacaggcttatatgaatttttactacaaatcgaccgagggatggtctataggcaacgtcctcttggatttcactggaggaagcttttcacttctgcagatgtttctgcagtcctacaacaacgaccagtggacgcttatattcggcgaccccaccaaattcgggctgggagtgttttcaattgtatttgacgtggttttctttatccaacacttttgcctgtatcggaagcgccctgggtacgaccagcttaactag

SEQ ID NO: 4323 - DNA, 663 bp, synthetic construct
  misc_feature 1..663: note = source = /note="Description of Artificial Sequence: Synthetic coding sequence"
  source 1..663: mol_type = other DNA
atgaactggcgtaggaagtcagttattgggctcagctttgatttcgtcgccctcaatcttactggctttgtggcctattcggtgttcaatatcggcctgctatgggtgccttacattaaggagcagttcctgttgaaataccctaatggagtaaatccagtgaactctaacgatgttttcttcagcctgcatgcagtggtcctgacactgattattatcgtccagtgctgtctttatgaaagggggggacaacgggtttcctggccagcaatcggcttcttggtcctagcctggcttttcgcgttcgttaccatgatagttgctgcagtcggggtgacgacctggctgcagttcctgttctgtttctcatatattaagctggccgtgactctggtgaagtactttccccaggcctacatgaacttttactataagagtactgagggctggagcatcgggaatgtcctgctcgactttaccggaggatccttcagcttacttcaaatgtttttacagtcttacaataatgaccagtggacactcatttttggagaccccaccaaattcggactgggcgtgttttccatcgtttttgacgtcgtcttctttatccagcatttttgtctgtaccggaagcggcctggatatgaccagcttaattag

SEQ ID NO: 4324 - DNA, 879 bp, synthetic construct
  misc_feature 1..879: note = source = /note="Description of Artificial Sequence: Synthetic coding sequence"
  source 1..879: mol_type = other DNA
atgtgtcctaggatacggttcctagtcatcagatcatctgctatctctattatcaaccaagtgataggctggatctattttgtggcctggtctatctccttctatccgcaggtcatcatgaactggaggcgaaaaagcgttattgggctgtcttttgattttgtcgccttaaatctgacagggtttgtcgcatattctgtgtttaatatcgggctgctgtgggtgccttacatcaaggaacagttccttctgaagtaccccaatggggttaaccccgtcaactccaacgacgtgtttttttctctgcatgccgtggtcttaacccttataatcatcgtgcaatgttgtctgtatgagcggggaggtcagagagtatcctggcccgctattggattcttggtcttagcttggttattcgctttcgtcacgatgatcgtagccgcagtgggggtgacgacatggctgcaatttttattctgcttctcctatattaagctcgccgtgacattagttaagtacttcccacaggcatacatgaacttctattataaaagcactgaaggctggtccattggcaatgtgctgcttgacttcactgggggatccttttctcttttacaaatgttcctacagtcttataacaacgaccaatggacactgatttttggggatcctacaaagtttggactgggggtgttcagcattgtctttgacgttgtattctttatacagcacttctgtctatataggaaacgcccaggcctgcaagccgctcgaactggctctggtagtcgtctgcggcaggactgggccccatccctgcaacccaaggcactgcctcagacgacctcggtgtctgccagttcactgaaaggctag

SEQ ID NO: 4325 - DNA, 228 bp, synthetic construct
  misc_feature 1..228: note = source = /note="Description of Artificial Sequence: Synthetic coding sequence"
  source 1..228: mol_type = other DNA
atgattcgaaattggttgacaatcttcatcctgtttcccctgaaattggtcgaaaagtgtgaatcctctgtatcccttaccgttcccccagttgtgaaactcgaaaatggcagtagcaccaacgtcagtcttactctgcggcctcccctgaatgccaccctggtgatcacattcgaaattaccttccgaagcaagaatatcacaatcctagaattgcctgacgagtag

SEQ ID NO: 4326 - DNA, 204 bp, synthetic construct
  misc_feature 1..204: note = source = /note="Description of Artificial Sequence: Synthetic coding sequence"
  source 1..204: mol_type = other DNA
atgcgaatccactatctgctctttgctcttctgttcttattcttggtccctgtccccggacacggcggaatcataaacacgctgcaaaagtactactgccgggttaggggagggcgttgcgcggtcttgagctgcttgccgaaagaagaacagatcgggaagtgcagtactcgaggacgtaaatgctgtcgaagaaagaagtag

SEQ ID NO: 4327 - DNA, 204 bp, synthetic construct
  misc_feature 1..204: note = source = /note="Description of Artificial Sequence: Synthetic coding sequence"
  source 1..204: mol_type = other DNA
atgcgaatccactacttgctctttgctttgttgtttttgttcttagtgcccgtccctgggcacggaggaattattaacaccttacaaaaatattattgccgcgtgagaggaggcagatgcgctgtactttcatgtctacccaaggaggaacagataggaaagtgctccactaggggcaggaagtgttgcagacggaaaaaatag

SEQ ID NO: 4328 - DNA, 195 bp, synthetic construct
  misc_feature 1..195: note = source = /note="Description of Artificial Sequence: Synthetic coding sequence"
  source 1..195: mol_type = other DNA
atgagagtactttatctcctgttcagcttcctgtttattttccttatgcctctacccggagtgttcggaggtatcggtgacccagtgacgtgcctgaaatcaggagccatctgtcatccagtcttctgtcccaggcgctacaagcagattggcacctgcggccttcctggcaccaagtgttgcaagaaaccatag

SEQ ID NO: 4329 - DNA, 195 bp, synthetic construct
  misc_feature 1..195: note = source = /note="Description of Artificial Sequence: Synthetic coding sequence"
  source 1..195: mol_type = other DNA
atgcgtgtgctctaccttttattctctttcctattcatattcttaatgcctctgcccggagtgttcggagggattggcgatccagttacctgtctgaagagcggcgcaatctgtcatccagttttctgtcccaggcggtataaacagatcgggacctgtggactgcccggaactaagtgttgcaagaagccatag

SEQ ID NO: 4330 - DNA, 849 bp, synthetic construct
  misc_feature 1..849: note = source = /note="Description of Artificial Sequence: Synthetic coding sequence"
  source 1..849: mol_type = other DNA
atgcgcggtatgaagttactgggcgctctcctagccctggccgctttactgcagggagctgtttccctgaagatagcggctttcaatattcaaacatttggagagactaaaatgtcaaatgcaacacttgtaagttatattgtgcagatcctgtcaaggtacgacattgccttagtccaagaggtccgagactcacatctgactgcagttggaaagctgctggataacctgaaccaagatgccccagatacctaccactacgtggtcagcgaaccccttgggaggaatagctataaggagaggtatttatttgtgtacaggcccgatcaggtaagcgcagtggatagttattattacgatgacggctgcgagccttgcggtaatgacaccttcaacagggaaccggcaatcgttcgattcttctcaagatttactgaggtccgcgaatttgcaatagtgccccttcatgccgctcccggtgacgccgttgcggaaatcgacgccctgtacgacgtgtacctggatgtgcaggagaagtgggggctggaggatgtgatgttaatgggggactttaacgcgggatgcagttacgtacggccttcccagtggagttcgattagactgtggacttctccaacgttccaatggctcatcccggattcagctgataccaccgctacacccactcactgcgcttatgatcgtatcgtggtggccggaatgttgttacgcggtgccgtggtgcctgacagcgccctgccatttaacttccaagctgcatacgggctatctgatcagttagctcaggctattagcgatcattacccagtagaggtgatgctaaagtag

SEQ ID NO: 4331 - DNA, 849 bp, synthetic construct
  misc_feature 1..849: note = source = /note="Description of Artificial Sequence: Synthetic coding sequence"
  source 1..849: mol_type = other DNA
atgcgtggaatgaaactgttaggtgctctgctagctctggcagcactgctgcaaggggctgttagcctgaagattgcagctttcaacattcagacatttggggaaacaaagatgagtaatgcaaccctggtctcatatattgtccagatcctgtcacgatatgatatcgccctcgtccaggaagtccgcgattctcatctcactgcagttggcaagctgctcgataatttgaaccaggatgcgcctgacacatatcattacgtagtgtccgaaccactcgggcgaaattcctataaagagcgctatttgttcgtttacaggcctgatcaggtctcggccgtcgattcctactactacgacgatggatgtgaaccctgtggcaacgacacatttaaccgggaacctgcaattgttcgatttttttcaaggttcaccgaggtgagggaatttgctatcgttccattgcacgcagccccaggtgacgccgtagccgaaattgatgctctttacgatgtctatctcgatgtgcaagaaaagtgggggctcgaagatgtcatgttgatgggggatttcaacgccggatgctcctatgttcggccatcccagtggagttccatacgactctggacatcaccaacatttcagtggttaattcccgattccgccgacaccaccgctacacccacccactgtgcctatgataggatcgtggttgcgggtatgctcctacgcggagctgtagttcctgacagtgcgctgccgttcaactttcaagcagcatacggtcttagtgatcagttggctcaggccatttccgatcactatccagttgaggttatgctgaagtag

SEQ ID NO: 4332 - DNA, 564 bp, synthetic construct
  misc_feature 1..564: note = source = /note="Description of Artificial Sequence: Synthetic coding sequence"
  source 1..564: mol_type = other DNA
atgcaccagacaccaataacgacctggagtgtaagccattgggacggcacagccatccgatccgccacctgtagttgtaccggccttacgcgttgtctcaggtggactgccaccaccacaatgatggccgctagcccagcgggtacaaccccttctacagaatctcagcctctttccggatccagtcctggatctcaggacgtgatgttgatgggcgactttaatgcaggctgctcatacgtgaggccttcacagtggtcatcaatcaggttgtggacatccccaacttttcaatggctgattccagattcggccgacacgactgctacgccgacacactgtgcttatgatcgaattgttgtagcaggcatgttactgagaggcgctgtcgtcccagatagtgctctaccatttaatttccaggccgcatacggcctgtccgaccagctgttttccgtgcacacttgctcaggcgctgggctgggagagcggcatggtttgccagcatccgcggctctcccctcaaatacctgcagggcgggaacacaccgtgtgtctacctag

SEQ ID NO: 4333 - DNA, 6242 bp, synthetic construct
  misc_feature 1..6242: note = source = /note="Description of Artificial Sequence: Synthetic coding sequence"
  source 1..6242: mol_type = other DNA
atgttacgcgtctttatactgtacgccgagaacgtgcacactcccgacaccgacatctcagatgcctattgtagtgctgtgttcgccggagttaagaaaagaacaaaggtgatcaaaaatagtgtcaatccagtgtggaatgagggctttgagtgggacctgaagggcataccattggaccaagggtctgagctccacgtggttgtgaaggaccacgagaccatgggtcgcaatagattccttggcgaagccaaagttcccctccgcgaagttttggcgacaccttcactgtctgcttcattcaacgcacccctcctggacacaaaaaagcagcctacgggggcaagtctggtgcttcaggtctcctatacccctctccccggagctgtccccctttttcctcccccaactcctctggagccttcccccactctccctgacctggacgtagtcgcagacacgggcggagaagaagatacagaggaccaaggactcactggcgatgaagctgagcctttcctcgatcagagcggcggacccggagccccaaccacaccccgtaagctgccttcaagacccccaccacactatcccggtatcaaacggaaaagatcagcacctacttcaaggaaattgttgtcagacaagccacaggactttcagatcagagtacaagtcatcgagggtcggcagttacccggagtaaatatcaaacccgtggtgaaggtcaccgccgcagggcagacaaagagaacgaggatccacaagggaaattcccctctcttcaatgaaacccttttcttcaaccttttcgattcacccggtgaactcttcgacgaacccatatttatcactgtcgtggattcgcgctcgctgagaactgatgcactgttaggggaatttagaatggacgtgggaaccatctaccgagagcccagacatgcgtatctgaggaaatggctgcttttgtccgaccctgacgatttttctgcgggagcaaggggctacctcaagacaagtctttgtgtgctgggtccaggcgacgaagcgccactggaacggaaggacccctcggaggataaggaagacattgagagcaatcttttacgccctacaggcgtggcactgcggggagcccatttctgcctgaaggtgtttcgcgctgaggaccttcctcagatggatgatgccgtaatggacaacgtcaaacagatttttggctttgagagcaataaaaagaacctggtcgacccattcgttgaagtgtctttcgccggtaagatgctctgctcaaagattttggaaaaaactgccaatccccagtggaatcaaaatatcaccctgcctgctatgttcccttctatgtgcgaaaagatgaggattcgcataattgactgggataggctgacgcataatgacatcgtggccaccacttatctctctatgtccaagatctctgcccctgggggagaaatagaggaagaacccgcaggagccgtcaagccttccaaagcttctgatttggacgattacctgggctttttgccaacatttggaccatgctatataaacctctatggctccccgagggagtttacgggcttccccgatccatacactgagctgaataccgggaaaggcgagggagtagcgtaccggggacgattgcttctgtcccttgaaacaaagttagtggagcactccgagcagaaggtggaggatctccccgcagacgacattctgcgggtggagaaatacctgagaagaaggaaatatagtctcttcgccgctttttatagtgctacaatgctccaggacgtcgacgatgctattcagttcgaggtctctatcggaaattacggcaataagttcgacatgacgtgcctccccctggcttccactacccaatattcgagagccgtgttcgacggctgccactactattaccttccatggggtaacgtgaagccagtcgtggtgctgtcgtcttattgggaggatatctctcaccgcattgagacccagaatcagctgctcggtattgccgatcgcttggaggcaggtttagagcaggtgcacctagcactcaaggctcaatgtagcaccgaggacgtcgactccttggtagctcagctgaccgacgagctgatcgctggatgttcacagccgctaggcgacattcatgaaactcccagcgcaacacacctagaccagtatctgtatcagctgagaacccaccatctttctcaaataaccgaggccgctctcgcgctgaaacttggacatagcgagcttcccgctgctctggaacaggctgaggattggttgctgcgcttacgcgcacttgctgaggaaccccagaattccctcccggatattgtgatctggatgctgcaaggcgataagcgggttgcctatcagagagtccccgcacaccaagtgctcttctcgcgcagaggagcaaattactgtgggaagaattgtggcaaactgcaaacgatcttcctcaagtaccccatggaaaaggttccgggtgcacggatgccagtgcagatcagagttaaactgtggtttgggctgtcggtggatgaaaaagaattcaatcaattcgccgaaggaaagttgtctgtcttcgccgaaacatatgagaacgagacaaagctggccttggtcggtaattggggcaccacagggctgacctacccaaaattctctgacgtcacaggtaagattaaactgccaaaggactccttccggccatcggccggatggacttgggcgggagactggttcgtatgccccgaaaagacactgctgcacgacatggatgctggccacttgagctttgtggaggaagtttttgagaatcagaccagactcccagggggacaatggatctatatgagtgacaattatactgacgtgaatggcgagaaagtgctaccgaaggacgacattgagtgtccgctagggtggaaatgggaggacgaggagtggtcgacagacctcaatcgcgctgtcgacgagcagggttgggagtacagcatcactataccacccgaacgcaagcccaaacactgggttccagcagagaagatgtactatactcatagacggaggcgttgggttcgccttaggcgcagagatctgagccagatggaggctctcaaacgacaccggcaggccgaggctgagggggagggctgggagtatgcttctctgttcggatggaaattccatctggagtatcgcaaaaccgatgcctttcgccgacggagatggagacgtaggatggagcccctcgaaaaaaccggccctgccgctgtgtttgctctggagggagccctcggcggagtgatggacgataaatccgaagactcgatgtcggtgtcaactctcagtttcggcgttaaccggccaaccatatcctgcatctttgactatgggaataggtaccatcttcgatgttacatgtatcaggctagggatctggccgctatggacaaggattcgttttccgatccatatgccatcgtgtcgttcctacaccagtcccaaaaaaccgtcgtggttaagaataccctgaacccaacgtgggaccaaacactgatcttttacgagatagagattttcggcgaacctgccacggttgcagagcagccacccagtattgttgtagaactgtacgaccacgacacctacggtgccgacgaattcatggggcgttgcatctgtcagcccagtctcgaaaggatgcctagactcgcttggttcccgcttacgcggggaagccagccctccggagagctgctggccagctttgagcttatacagagggagaagccggctatccatcacatccctggatttgaggtccaggaaacttcacgtatcctggacgagtccgaagataccgatttgccttacccacctccacaaagagaggcaaacatttatatggtgcctcaaaacattaaacctgcactgcagcggacagcaattgagattttggcctggggtcttaggaatatgaagagttatcagctggcaaatattagctccccttccctggtagtggagtgtgggggacagacggtgcagtcatgcgtgatcagaaacctacgtaaaaatcccaattttgatatctgtacactgtttatggaggtaatgctgccaagagaggagctgtattgcccaccgattacggtgaaggtcatcgacaacaggcagtttgggcgaagaccagttgtgggccaatgcaccattaggtctctggagtccttcctatgcgacccgtattctgctgaaagccctagtccacaaggcggtcctgacgacgtgtccctcctctcgcccggagaggacgtgctcatcgacattgatgataaggagcccctcattccaattcaggaagaagaattcattgactggtggtcgaagttcttcgcctcaataggggagagagagaaatgtggctcttatctggagaaagatttcgatacgctaaaggtttatgacactcagctcgaaaatgttgaggcttttgagggcttgtctgacttttgtaatacgttcaagttataccgtggcaagacacaggaagaaacagaagacccatctgtgatcggagagttcaagggcctgttcaaaatttatcctctccccgaggaccccgcaataccgatgcctccccgacagtttcaccaacttgccgctcagggcccacaggagtgccttgtgagaatatatattgttagagccttcggtctgcagccaaaagaccccaatggcaagtgcgatccttacattaaaatcagcatcggcaaaaagtccgtatcagatcaggacaattacataccttgcactctcgaacccgtgtttgggaaaatgtttgagctcacctgcacccttcctctagaaaaggatctgaaaattacactgtatgactatgatctgctgtcaaaggatgagaaaatcggggagaccgtcgtggatctcgagaaccggctcttgagcaaattcggagctagatgtggactgcctcagacatactgcgtgtcggggccaaatcagtggcgggatcaattgagaccgtcacagttactgcacctgttttgccaacagcaccgagtgaaggctccagtatatcgcactgacagggtgatgttccaggataaagaatactccatagaggaaatcgaagcaggtcggatcccaaaccctcacctggggccagtggaagaaaggcttgccttgcacgttctacaacagcagggcctcgtgccagaacacgtggaaagtaggccactttattcacctctccagcccgacattgagcagggaaaacttcagatgtgggtagatttattcccaaaagcacttggcaggcctgggccacctttcaacatcacaccacggcgagcgcgacgctttttccttcgctgcatcatttggaatactagagatgtgattctggatgatctgtccctgacgggggagaagatgtctgatatctatgtaaagggttggatgattggattcgaggaacacaagcagaagaccgacgtgcactacagatcacttgggggagagggaaatttcaactggcggttcattttcccgttcgattaccttcctgccgagcaagtttgcactatcgcaaaaaaggacgcattctggaggctcgataagactgagagcaaaatccccgctagggtagttttccagatctgggacaatgacaagttttcattcgatgatttcctcggttcactccagctggacctgaaccgaatgcctaagccagcaaagactgccaagaaatgcagcttggaccagctggatgatgccttccaccctgagtggttcgtatctctgttcgaacagaagactgtaaaaggctggtggccctgcgtcgctgaggaaggggaaaagaagatactggcagggaaactggaaatgaccttagagatagtcgcagagtcggagcatgaagagcgacctgccggacaggggagagatgagccaaatatgaaccccaaacttgaggatccgcgtcgacctgacacctctttcctgtggtttacttccccttataaaacaatgaagttcatcctttggcggaggttcagatgggccataatcctgttcattattctgttcattctcctgctgttcctggctattttcatttatgcctttccaaactatgctgcaatgaagctggttaagcctttcagcta

SEQ ID NO: 4334 - DNA, 6246 bp, synthetic construct
  misc_feature 1..6246: note = source = /note="Description of Artificial Sequence: Synthetic coding sequence"
  source 1..6246: mol_type = other DNA
atgctttgctgcctgctggtgagagcatccaacctgccttcagccaagaaagatagacggtccgacccagtcgccagcttaacattcaggggagtgaaaaaaagaaccaaagttataaaaaacagcgttaatcctgtttggaacgagggatttgagtgggacttgaagggaatccccctcgatcagggcagcgaactgcatgtcgtagtgaaggaccatgaaacgatggggagaaacagatttttgggtgaggccaaagtgcctcttcgtgaagtgttggccacaccatctttatccgcttcgttcaacgctcccctccttgacacaaaaaagcagccaacgggcgcttccctggtgctccaggtgagttacacacctcttcccggtgccgtcccattgtttcccccacctacacccctggaacctagtcccactcttcccgatttggatgttgtagccgatactggtggggaagaggacaccgaggaccaaggactgactggcgacgaagccgagcctttcctcgaccagtcaggcggtcccggtgcacctactaccccacggaagctcccgagtcgaccgcctccacactaccctggtatcaaacggaagcgatcagcccctacctctcgaaaactgctgtcagataagccgcaggactttcagatcagggttcaagttattgaaggcaggcagctgcctggggtcaacatcaaacccgtcgttaaagtgaccgctgccggtcagaccaagaggaccaggattcacaagggcaactctccattattcaatgaaaccctgttctttaacctgtttgactctccaggagagctcttcgatgagccaatattcataactgtcgtggactctagaagtcttaggactgacgcactgctgggcgaattccggatggacgtgggaaccatttatcgcgaaccacgacacgcctatttgcgtaagtggctccttctgtctgatccagatgatttctctgccggtgcacggggttacctgaagaccagcttatgtgtgttgggccctggggacgaggccccactggagcgcaaggacccctcagaggataaagaagatatagagagcaatctattaagacccacgggcgtggcgcttcgaggcgctcatttttgcctgaaggtgtttcgggctgaagacctaccccagatggatgacgcagttatggacaatgtaaagcagatattcggctttgaaagcaacaaaaagaacctggtggacccctttgtggaagtgagttttgccggaaaaatgctttgctcaaagattcttgagaagactgcaaacccccaatggaaccagaacattaccctccccgctatgttccccagtatgtgtgagaaaatgagaattaggataatcgactgggatagactgacccacaatgacatagtcgcaactacttatctgagtatgagtaaaatctccgccccaggtggggagatcgaggaagaacctgccggtgccgtcaagccttccaaagcttcagacctggacgattatttgggtttcttgcccacgtttggtccttgttatatcaacttgtatggatctccgcgtgaatttactggctttcccgatccttataccgaacttaacactgggaagggagagggtgtcgcttacaggggccgactccttctcagcttggagaccaagttggttgagcattctgagcagaaggtggaggatctgccagccgacgacattctgcgcgtggagaagtacctcaggaggaggaaatacagcctattcgcagcattctatagcgcgactatgctgcaggacgtggatgacgccatacagttcgaggtatctattggcaattacggcaacaaattcgacatgacgtgtctgccgctcgcaagtactacgcagtacagtagagccgtattcgacggctgccactactactatctgccatggggcaacgtaaaacctgtggttgttctgagtagttattgggaggacatctcacacaggatcgaaactcagaatcagcttctgggtatagcagacagattagaggccggattggagcaagtgcacctggcgttgaaggctcagtgctcaactgaagacgtagacagcctggtggcacagttaacggacgaactgattgcaggttgcagccaaccactcggggacattcatgagacaccaagcgccacacacctggatcagtatctataccaactgagaactcatcatctgtcacagatcacagaagctgcactggctcttaagctcggccattctgagctgcccgctgccttggagcaagcagaggattggttactgcgactacgggctctggcagaagagccacagaattctctgcccgacatcgtgatatggatgcttcagggtgataagagagtggcgtaccagagggttcctgcccatcaggtgttattctctagaagaggagctaactactgtggaaaaaactgcgggaagctgcagactatctttctgaagtaccccatggaaaaagtgccaggcgcacggatgccagtccaaattcgtgtcaagttgtggttcgggctgagtgttgacgagaaagagtttaaccaattcgccgaggggaagctgagcgtgttcgctgaaacctatgagaacgaaactaaactagccctggtcgggaactgggggacgactggtctcacgtacccaaaatttagtgatgttaccggcaaaatcaagcttccgaaggattccttccgccctagtgctggatggacatgggcaggcgattggttcgtgtgcccagaaaaaaccctactccatgatatggacgccggacaccttagcttcgtggaggaggtttttgagaatcaaactagacttccagggggacagtggatatacatgagtgataactataccgatgtaaacggagagaaagtgctgcccaaggacgacatcgaatgccccctcggctggaagtgggaggacgaagagtggagtaccgacttgaacagggctgtcgacgaacaggggtgggaatatagtatcacaataccccctgagcgaaagccgaagcactgggtccctgcagaaaaaatgtactacactcataggaggagaaggtgggtgagactgagacggagagatctgtcacagatggaggcccttaagcggcatcgccaagccgaggctgaaggagaggggtgggaatatgccagcttgttcggttggaaattccatctagagtaccgtaaaacagacgccttccgccgtcgtcgctggagacggaggatggaaccactagaaaagaccggaccagctgccgtatttgcactcgaaggcgcactgggtggtgtaatggatgacaagagcgaagattctatgagcgttagtacgctgtcatttggggtcaatcggcctactatttcatgtatctttgattatggcaaccgttaccacttaaggtgttatatgtaccaggccagagatttagcggctatggacaaagattcattctctgacccctacgctatcgtcagcttcctgcaccagtctcagaaaaccgtcgtcgtaaagaacaccctgaatccaacatgggaccagactttaatcttctatgaaatcgaaatatttggagaacccgctactgttgcagagcagcccccatccatcgtagtcgaactctacgatcacgatacatacggcgctgacgaattcatgggcagatgcatttgtcagccctcgctggaaagaatgcccagactcgcctggtttccgctcacaaggggatcccagccctccggcgaactcctggcctccttcgaacttatacaaagagaaaagccagccattcatcacatccccggtttcgaggtgcaagagacgtcccgaatactggacgaaagcgaagacacagatttaccttaccctcctccgcagcgcgaagctaacatatacatggtgcctcagaacattaagcccgcactgcaacgaaccgcaatagagatactcgcttggggactgcgcaacatgaagtcctatcagctggcgaatatctcatccccttccctggtcgtggagtgtggagggcagaccgtgcagtcctgtgttattcgcaatctacgtaagaaccccaattttgacatatgtaccttgtttatggaggtgatgctacctcgcgaagagctgtactgcccacccatcaccgtgaaagtgattgacaataggcagttcggcaggagaccagttgtaggccagtgcacaatccggagcctggaaagcttcctgtgcgacccttactcggctgagtcaccttccccgcagggaggtccggacgatgtgtctctgttgtctccaggcgaagatgtgctaatcgacatcgacgataaagagcctctcatccccatccaagaagaggagttcatagactggtggtccaagttcttcgcttctatcggggagcgcgaaaagtgcggatcttatctcgaaaaggacttcgacacattgaaggtatacgatacgcaactggagaatgtggaagcgttcgaaggattgagtgacttctgtaacactttcaaattatacagggggaagacacaggaggagacagaggacccgtccgtgatcggtgaatttaaggggcttttcaaaatctatcccctgccagaagatcctgccataccaatgcccccacgacaattccaccaactggccgctcagggaccacaggagtgtctcgtcaggatctacatagtcagggcattcggactccaacctaaagatcccaacggcaagtgtgacccgtatatcaagatttccattggaaagaagagcgtcagcgaccaggacaattacattccatgtacattggagccagtgttcggcaaaatgtttgaactgacatgcacactacctctggagaaagacttgaaaatcaccttgtacgattacgatctgctgagcaaagacgagaagattggcgagaccgtcgtcgatctcgagaaccgacttctgtccaaattcggagcccgatgtggcttgccccagacctattgcgtttccggccctaatcagtggagggaccagcttagaccaagccagcttctgcacctgttctgtcagcagcacagggtgaaggctcccgtgtacagaacggaccgcgtgatgtttcaggacaaggagtactctatcgaggagattgaagccggtcgcatacccaaccctcatctcggcccagtggaagagagactggccctacacgtcctgcagcaacagggactagtccctgaacatgttgaaagccgtcctctctatagccccctgcagccagatatcgagcaggggaagctgcagatgtgggttgatctgtttccaaaggccctggggagacctggcccacccttcaatattacccctcggcgagcgaggcgattttttctccgttgcattatctggaacacacgggatgttatcctggacgacctgtcactgactggggagaagatgagtgacatatatgtaaaaggatggatgattggcttcgaggaacataagcagaagaccgacgtccactatagatcactgggcggtgagggaaactttaactggcggtttatctttccttttgattatctacctgctgagcaagtgtgtactatagccaaaaaggatgccttctggagattagacaagacagagtccaagataccagcacgcgtggtgtttcagatatgggataatgacaaattctcgtttgacgattttcttggctccctgcagctcgacttgaacagaatgcctaagcccgctaagactgcaaaaaagtgctcgctggaccagcttgacgacgccttccaccccgagtggtttgtttcacttttcgagcagaagaccgtaaaaggatggtggccctgcgtggctgaagagggtgaaaagaagatactggcaggtaagctagaaatgacattagaaatcgtggcagagagtgaacatgaagaacggcctgcaggccaggggagggatgagcctaatatgaatcctaagctggaagatcctcggcgacctgatacatccttcctgtggtttacctctccctataagacaatgaaatttatactctggcgaagattcaggtgggccattattctctttataatactcttcatcctgctattattcctggccatattcatatatgcctttcccaactatgccgcaatgaagctggtcaagcctttttcgtat

SEQ ID NO: 4335 - DNA, 6309 bp, synthetic construct
  misc_feature 1..6309: note = source = /note="Description of Artificial Sequence: Synthetic coding sequence"
  source 1..6309: mol_type = other DNA
atgttatgctgtctgttggtccgtgcatcgaatctgccaagcgccaaaaaagaccggagaagcgatccagtggcttcactcacttttcgcggagtgaagaagagaaccaaggttatcaagaacagcgtgaaccccgtatggaatgaggggttcgaatgggacctaaaggggattccgctggatcaggggagcgagttacacgttgtggtgaaggatcacgagacaatgggcagaaaccggtttctgggggaggccaaggtgcccctccgtgaagtcttggcaactccatcgctctcagcaagcttcaacgcacccctcctggataccaagaagcagcccacaggcgcttcactggttctccaggtttcttacacccccttgcccggagccgtgcccctcttccctcctccaacgcccctcgagccttcccctacactgcccgatcttgatgtggtcgccgacaccggaggcgaagaagacacagaagatcagggtctgactggcgatgaggccgaacccttccttgaccagagtggtgggccaggcgcaccgaccacgcccagaaaactgccctctcggcctccaccacactatcccggtattaagcgtaaacgaagcgccccaacaagtaggaaactactaagtgacaagcctcaggatttccagattagagtgcaggtgatagaggggaggcaattgcccggtgttaacataaaaccagtggtcaaggtgaccgcggctggccagacaaagcgaacgcgaatccacaaggggaatagcccactcttcaatgaaacactttttttcaatctgttcgattccccgggagagctgtttgatgagcctatctttatcaccgtcgtggacagtagaagcctgcggaccgatgccctgttaggagaattcagaatggatgttggcacaatttaccgggagccacgccacgcttacttgcggaaatggttgctcctctccgatccagacgacttctcagccggtgccagggggtacctgaagacaagcctttgtgtgctcgggcctggagacgaggctcctctggagcgcaaggatccctctgaagataaagaggacatcgagtcaaacttgctgaggcccaccggcgtggctctaagaggagcccatttctgtctcaaagttttccgggcagaggacctcccccagatggatgatgctgtcatggataacgtaaagcagatctttggttttgagagtaataagaagaatttggttgacccgttcgtggaagtatcctttgccggtaaaatgttgtgctcaaaaattctggagaagaccgcaaatccgcaatggaaccagaatatcaccctccccgcaatgtttccttccatgtgcgaaaaaatgcgcatcaggattattgactgggatcgtctgacccacaacgatattgtggctacaacttacttgtcgatgtccaagatatccgcccctggtggagaaatcgaagaggagcccgcaggcgctgtcaaaccctctaaagcttctgatctcgacgattatttggggtttcttccgacctttgggccttgttacattaacctgtacggctcccccagggagttcactggatttcccgatccttatactgagttgaacaccgggaagggagaaggggtggcgtatcgaggccgtttactactctctttggagacaaagttggttgaacattccgaacagaaagtggaggacttacccgctgacgacattctaagagttgaaaaatacctgcgaagacgcaaatatagcctcttcgcagctttttatagcgcgaccatgttgcaggatgtggacgacgcaatccagtttgaggtttctataggcaattatggtaataaatttgacatgacatgtctacccctggcatctacaacacagtactccagggctgttttcgacgggtgtcattattactatctgccctggggaaacgttaaaccagttgttgtgctaagcagttactgggaagacatttcccacagaatcgagactcagaaccaactgctgggaattgccgatagactcgaggcaggactggagcaagtgcatttggctctcaaagcccagtgtagcaccgaggacgtggattcgcttgtggcgcagctgaccgatgagctgatcgccggatgttcgcagcctctgggagatatccacgaaactccaagtgctacacacctggaccaatacctgtatcaactgaggacccatcaccttagtcagatcacggaggcagctctggccctaaagctgggtcactcggagctccctgcagccctcgaacaggctgaggactggctgcttcggctccgggcactggcagaggagccacagaattcacttcccgacatagtcatctggatgcttcagggagacaagagagttgcttaccagcgcgtcccggctcaccaggtgctgttctcacgcagaggggcaaactactgtgggaagaattgcgggaaattgcagaccatattcttaaagtatcctatggaaaaagtcccgggagcaagaatgccagtgcaaatccgagtgaagctgtggtttggactgtcagtcgacgagaaagaatttaaccagtttgctgaaggcaaactttcggtgttcgccgaaacttacgaaaacgagactaagctagcgttagtcggcaattggggcactaccggccttacatacccaaaattctcagatgttacaggtaagatcaagctgccaaaagactcattccgccctagcgccggatggacctgggctggagattggttcgtgtgccccgagaaaaccctgctgcacgacatggatgccggtcacctgagttttgtggaggaagtttttgaaaaccagaccaggctaccaggcggtcaatggatttatatgagcgataattacacagatgttaacggagaaaaagtgttacccaaagacgacatcgagtgccctcttgggtggaagtgggaggatgaggaatggtctacagacttgaacagggcagtagacgaacaggggtgggagtatagtattacaatccctccagaaagaaaacccaagcattgggttcccgcagaaaagatgtactacactcatcgcaggcgccgttgggtgcgcttaaggagacgcgatttatctcagatggaggccttaaaaagacaccggcaggccgaggcagagggagaaggctgggaatacgcatctctttttggttggaagttccacctagagtatagaaaaacagacgccttcaggcggaggaggtggagacgacgtatggagccattggagaaaaccgggcctgccgctgtgtttgcactagagggggctcttggaggggttatggatgataagtcagaggacagcatgagtgttagcaccctctcatttggcgtgaatcgcccaactatctcctgcattttcgactatggtaatcggtaccatctcagatgctatatgtaccaggctagggaccttgcagctatggataaagactcattttcagatccctacgcaattgtctcatttctgcatcagagtcagaaaactgtggtggtgaaaaacacgctgaaccctacctgggaccagactctgatcttctacgagattgaaatatttggtgaacctgctacagtcgcagagcagcctccctcaatcgtggtggagctgtacgaccacgatacatacggtgccgatgagttcatgggacgctgcatctgtcagccttcactcgagcgtatgccgaggctcgcatggtttcccctcactcgaggctcacagccctccggagaactgctcgcttcctttgaactgatccagagagaaaaacccgctatccaccatattccaggctttgaggtgcaggagacctcaaggattctagatgagagcgaggacacagacctgccctatccaccgcctcagcgcgaggcaaatatttacatggttccccagaacatcaaaccggcacttcagcgaaccgccatcgagatcctggcttggggcctacgtaacatgaaatcataccagctcgccaatatttcctctcccagtctggtggtagagtgcggaggccaaaccgtccagtcatgcgtcattagaaatctgagaaaaaatccaaatttcgatatctgtactttatttatggaggtgatgctgcccagagaggagctttactgtccaccaatcactgtcaaggtgatagacaataggcaatttggccgaaggcccgttgttgggcagtgtaccattaggtcactggagtcctttctgtgcgatccctattctgctgagtcccctagtccacagggcggaccagatgacgtgagcctcttgtcccctggcgaagatgtgctgattgacatcgacgataaggaaccactgattcccatccagctcgctgacggcttatcctctctggcacctacaaataccgcctcgccacccagttcaccgcatgaggaagagtttattgattggtggagcaagtttttcgcatcgattggagagcgggaaaagtgcgggagttacctcgagaaagattttgataccttgaaggtgtatgatacacagctagagaacgtcgaggcctttgagggcttgtctgatttctgcaacacattcaagctgtatagaggtaagacacaagaagaaacagaagacccatctgttatcggcgagttcaagggactcttcaaaatatatccgctcccagaggaccctgcaatcccgatgcctccacgtcagttccatcagctcgcagcccaagggccacaagagtgcctagtccgcatctacattgtgagggcatttggtcttcagccaaaagaccctaacggaaagtgtgacccttacattaaaatttcaatcggtaagaaaagtgtttcagaccaggacaattacattccatgtactctcgaaccggtttttgggaaaatgttcgaactaacctgcaccctgccccttgagaaggatcttaagatcaccctgtacgactacgacctgctgtcaaaagatgagaagattggtgaaaccgtcgttgatctggagaatagactgttatcgaagttcggcgcaagatgtggactgccccagacatactgcgtgtctggccctaatcagtggcgggaccagctacgtccatcacagcttctgcaccttttttgccagcagcatagagtcaaggcaccggtgtaccggaccgatcgtgtgatgtttcaggataaagagtacagcatagaggaaattgaagccggacgaataccaaatccacatctgggaccagtcgaagagagattggcactccacgtcctccagcagcagggattagtgccagaacatgtagagtcccggcctctgtattcacccttgcagccagacatcgagcaggggaaactccagatgtgggtggatctgtttccaaaggcactgggcagacccggtccaccattcaacatcacaccgaggcgagccaggcggtttttccttcgctgcattatttggaacactcgagacgtgatattagatgatctttcacttactggagaaaagatgtccgacatttacgttaaaggctggatgatcggctttgaggaacataagcagaaaacggacgtgcactaccggtcacttggaggcgagggaaactttaattggcggttcatcttcccctttgattaccttcctgccgaacaggtatgtaccatcgccaagaaggatgcattttggcgtctcgacaagaccgagagtaaaatccctgctagggtggtcttccagatttgggacaacgataagttttcctttgatgattttctgggttcattacaattagatctcaaccgaatgccaaaaccagccaagacagcgaaaaagtgctccctggaccaactggatgacgctttccatcctgaatggttcgtctcgctgttcgaacaaaaaactgtgaaaggctggtggccctgcgtggcggaagagggagagaagaagatcctagcgggaaaactagagatgaccctcgagatcgtcgcggagtctgagcatgaggagcgacctgccggacagggtcgcgatgagccgaatatgaatcccaaattagaagatcctcggaggcccgataccagcttcctgtggtttacctccccatacaagaccatgaagttcatcctctggagaaggtttcggtgggccattatattgttcatcatcctgtttatccttctgctctttctggccatttttatatacgcatttcctaactatgcggctatgaaactggtaaaacctttttcttat

SEQ ID NO: 4336 - DNA, 6357 bp, synthetic construct
  misc_feature 1..6357: note = source = /note="Description of Artificial Sequence: Synthetic coding sequence"
  source 1..6357: mol_type = other DNA
atgttacgtgtctttatcctctacgccgagaatgttcacacacccgacactgacatctctgacgcctactgttcggccgtgttcgcgggtgttaaaaaacgcacaaaggtgatcaaaaactctgtcaaccctgtatggaatgaaggcttcgagtgggacttgaagggcattcccctagaccaaggttctgagttacatgtagtggttaaagaccacgaaaccatgggacgaaaccgattcctcggggaggcgaaagtccccctgcgtgaggttttagctacaccatcactatccgcctcctttaatgctcccttattggacactaaaaaacagcctactggcgcatctcttgtcctgcaggtgagttacaccccgctgcctggcgctgtgcccctttttcctccacctacacccttagagccctcacccacattgccggatcttgacgtcgtggccggaggaggccagtcaagagctgaaacatggagccttctgtctgatagtacaatggacacccgctatagcggcaagaagtggcccgcaccaacggacactgggggagaggaggacacagaggatcagggtctgacgggggatgaggccgaacccttcctggaccagtccgggggaccaggggcacccactacgcctcgcaaactgccaagcagacctcctccacactatccaggtatcaaacgcaagcgatccgctcctacgtcaagaaagcttctgagtgataagcctcaagatttccagattcgagtccaagttattgagggaagacagcttcccggtgtcaatattaagcctgtggtgaaagtgactgcagccggacaaacaaaacgcacaagaatccacaaaggaaactccccattgtttaatgagaccttatttttcaatctgttcgattctccgggtgagcttttcgatgagcccattttcatcactgtggttgactcacggtccctccgtaccgacgctctgctgggcgaatttaggatggacgtgggaactatctaccgagagcccaggcacgcgtacctgcgtaaatggttgctgctgagtgacccggacgacttctctgccggagcccgaggctacctgaagaccagtctctgcgttctgggaccaggcgacgaagcgcctctggagagaaaggacccatcagaggataaggaggacatagaaagcaatctgctgcgcccaaccggcgtggctctcagaggggcacatttctgtctcaaggtgttcagggctgaagatttgccccagatggatgatgcggtcatggacaacgtcaaacagatttttggcttcgagtctaataaaaagaaccttgtggacccgttcgttgaagtgtctttcgctgggaagatgctgtgctccaagatattagagaagaccgccaacccccagtggaaccagaacataaccttacccgcaatgtttccctccatgtgtgaaaagatgagaataaggataatagattgggacaggctgacccataacgacatagtggctaccacgtacctgtcaatgtccaaaattagtgcccctgggggagagatcgaggtagacgactatctcggtttcttacccacatttggaccgtgttacattaatctctatggttctccgcgtgagtttacaggatttcctgatccatacacggaactgaataccggcaagggggagggagtagcttatcgcggtaggttactgctctcgctggaaaccaaactggtcgagcactctgaacagaaagtcgaagacctgccggctgacgacatcttacgtgtggagaaatacctgcgacggcgtaaatactctctctttgccgctttttatagcgccacaatgctgcaggacgtggatgacgccattcagttcgaggtcagtatcgggaattatggcaataagttcgatatgacctgcttgcccctggccagcactactcagtattccagggcagtgtttgacggttgccactactactatcttccttggggcaatgtgaagccggtcgtagttctgtcatcatactgggaagacatctcacaccgaattgagactcagaatcagctcttaggcatcgctgaccggctggaggcaggactggagcaggtgcatctggctttaaaggctcagtgttccacggaagacgtcgattccctggttgcacagctcacagacgaactgattgccggatgttcccaacccttgggcgatattcatgaaactccaagcgccactcaccttgaccaatatctttaccagcttaggactcaccacctgtctcagatcactgaagctgcattggctctgaagttgggccactcagaactgccagcagctttggaacaggcagaggactggctgttgagactgcgagccctagccgaggagccgcagaacagcctccccgatattgtcatctggatgttgcaaggggataaaagggtcgcataccaacgggtgcccgctcaccaggtgctgttttcccggaggggtgctaattactgcggaaaaaattgtggaaaactgcagaccatcttccttaaataccccatggagaaggtcccaggagctaggatgcccgtgcagatcagagtgaagttgtggtttggtctgagcgtggacgagaaagaatttaatcagtttgctgaaggaaagctaagcgttttcgcagagacttacgaaaacgagactaaactcgcactagtcggaaactggggtacaaccggtcttacgtaccccaagttcagcgacgtgactggaaagatcaaactgccaaaagattcctttaggccgagcgctggatggacttgggctggagactggttcgtgtgtccagaaaagaccctgctacatgacatggatgccggacatttatcatttgtcgaagaggtcttcgagaatcagacacggcttcctggtggtcagtggatatacatgagtgacaactatacagatgtaaacggcgagaaagtactgcctaaagatgatatcgagtgccccctaggctggaagtgggaggatgaggagtggagtacggatctgaatcgcgcagtggatgaacagggctgggaatactcaatcacaattcctcctgagagaaagccgaagcactgggttcctgccgagaaaatgtactacactcacagaagaaggaggtgggtgcgcctccggagacgagacctatctcaaatggaggctcttaagcgtcatcgtcaggctgaggcagaaggtgaaggttgggaatatgctagcctatttgggtggaagtttcacttagagtaccgcaaaacggatgcattccgccgacgcagatggcgtagacggatggagcccctggaaaagactggccctgccgcagtcttcgcgctagaaggggcactggggggtgtgatggacgacaaaagcgaagattccatgtccgtttccactctttcttttggagtgaaccggccaacaatcagctgcattttcgactatggtaatcgttatcacctgcgttgctatatgtatcaggcgagagacctggccgcaatggacaaggactctttttctgacccctacgcaatagttagcttcctgcatcagagtcagaaaacggtagtggtgaagaacacactgaaccccacatgggaccaaaccctcatcttctacgagattgaaatcttcggtgagcctgcaacagtggctgaacagccaccatctatcgttgtcgaactctatgaccacgacacctacggagctgacgagtttatgggccgatgcatttgtcagccatccctcgagagaatgcctcgattggcgtggttccctttaacacgaggcagccagccttctggtgaacttctggcctcattcgaactcatccagcgggaaaaacccgctatacaccacatccccggttttgaagtccaggagacctcaagaatcctggacgagtctgaggacacggacctcccttatccccctcctcaaagggaagccaacatctatatggtgcctcaaaacatcaaacctgcccttcagcgcactgcaatcgaaatcctcgcttgggggctgcgaaacatgaagagttaccagctcgccaatattagtagtccatcactggtggtggagtgcggtggacaaactgtccaatcatgcgtgatccgcaatttaaggaagaatcccaatttcgatatttgcaccttgttcatggaagttatgttgcctcgagaagagctttactgtccccctatcacagtcaaagtgatcgataacagacagtttggacgtcgccctgtggtgggccagtgcacaatacgatctcttgagagttttctatgcgatccttatagcgccgaaagcccatctccccaggggggtcccgacgacgtgtccctgctaagtcccggtgaggacgtccttattgacatcgacgacaaagagcccttgatccccatccaactcgccgacggcctgagttctttagctccaaccaatacggcctcgcctcctagctctcctcatgaagaggagtttatcgattggtggagtaaatttttcgcgtccatcggtgaacgggaaaagtgtgggagctatctggaaaaggatttcgatacgctcaaagtctatgacacacagctcgagaacgtggaagctttcgagggactttccgacttttgtaacaccttcaaattgtacagagggaagacacaggaggagaccgaagatccatctgtaatcggggaattcaaaggcctttttaagatctaccccctccccgaggaccctgcaatcccaatgccaccacgacaattccaccagctggctgctcaaggtccgcaggagtgtctggtcagaatctatatcgttagggccttcgggctgcaaccaaaagatcccaacggaaaatgcgacccatatattaagatttcaattgggaagaaatcggtcagcgaccaggacaactacattccctgcacactagagccggttttcggcaagatgttcgagctgacctgtaccctacctctggaaaaggacttgaagatcaccttgtacgattacgatttgctgtccaaggatgagaagatcggggaaaccgtcgtggacctagaaaaccgcctgctatccaagttcggggctagatgtggacttcctcagacctactgtgtgtcgggtccaaaccagtggagagaccagctgcgcccttctcagctcttgcacctcttttgtcagcagcacagagtgaaagctcccgtctataggaccgatcgggtgatgtttcaagataaagagtattccattgaggaaattgaggcgggaagaattccgaacccacatttaggaccagtcgaggagcggctggcactccatgtgctgcagcagcagggcctggttccagaacatgtggagagccgcccactctattcaccgctccagccagatattgaacaggggaagctgcagatgtgggtggacttattcccgaaagctcttggcagaccgggtcccccttttaatattacgccaaggagagctaggcgattttttctgcgatgcatcatctggaacactcgcgacgtgattttagacgatctgtccctgacaggggagaaaatgtcagatatctatgtaaaaggatggatgattgggttcgaggagcacaaacagaaaactgacgtccactacaggtctttgggcggtgagggcaattttaactggaggttcatctttcctttcgactacctgcccgcagaacaggtgtgtactatcgccaaaaaggacgcattctggcgccttgataaaactgaatcaaagattcccgcaagggtcgtatttcagatatgggacaacgacaaattcagcttcgatgacttcctcggcagtttgcagctcgatctgaaccgtatgcccaagcctgccaaaactgctaagaagtgttccctggatcagctggacgacgcgtttcacccagagtggtttgtaagtttgttcgaacaaaaaacagtgaaggggtggtggccgtgtgttgcagaggagggagagaagaaaatcctggctggcaagctcgaaatgacactagagatcgtggccgagtccgaacacgaagaaaggcctgctggccagggccgagatgagccgaatatgaaccccaagttggaagatccacgcagaccagatacttctttcttatggttcacctccccctataagaccatgaagttcatcctctggcgcagattcaggtgggctatcatcctctttatcattctgttcatcttgcttctgtttctcgcaatttttatctacgcttttccgaattacgcagccatgaaattggttaagcccttcagttag

SEQ ID NO: 4337 - DNA, 6339 bp, synthetic construct
  misc_feature 1..6339: note = source = /note="Description of Artificial Sequence: Synthetic coding sequence"
  source 1..6339: mol_type = other DNA
atgctgtgttgtctgctggtcagggcttcgaacctcccttccgctaagaaggaccggaggtccgacccagtggcatctttaacatttcggggagtcaaaaaacgaaccaaggtgataaaaaattcagtcaacccagtttggaatgaaggtttcgagtgggacctcaaaggcattccgcttgatcagggctccgagcttcatgtggtggttaaggaccacgagacaatggggaggaatcggtttctaggcgaggcaaaagtgccattacgagaagtgctcgctaccccaagtttatcagcatcgttcaacgcacctctgctggacaccaagaaacagcccacaggcgcatccctggtcctccaggtgtcttacactcccctcccaggagctgtgcccctgttcccacctccaaccccacttgagccgtcccctactctgccggatttggacgtggtcgccggaggaggacagagcagggcagaaacctggtccctgctgtccgattcaaccatggacactagatatagtggcaagaagtggcctgcacctaccgacactggcggagaagaagacaccgaggaccaaggactaaccggcgatgaggccgagccattcctggatcagtccgggggacctggtgctcctactactcctcgaaaactcccaagccggccaccgcctcactaccccggaatcaaacgcaaacgtagtgcccctacaagtcggaagctgctctctgacaaaccgcaggattttcagatcagagtgcaggtgatcgagggcaggcagttaccgggtgtgaacataaagcctgtagtgaaggtcaccgccgcaggccaaacaaagcggacaaggattcacaaagggaactctccactgtttaacgaaactctgttctttaacttattcgacagccccggagagctctttgatgaacccatttttatcaccgtggttgactcacggtcactgcgaacagacgcactacttggcgagttccgtatggacgtgggaactatttacagggagccaaggcacgcctacttgaggaagtggctcctattaagtgacccggatgacttctctgcgggagcacgaggttacctgaagacctccctctgtgtgttgggtccaggcgatgaggccccactggaacggaaggacccgtcggaggataaagaagacatagagtctaaccttctacggcctacaggagtcgctcttcgtggagcccatttctgtctcaaagtgttccgtgccgaggacctccctcagatggacgacgccgtcatggacaacgtcaagcaaatattcggatttgaaagtaataagaagaaccttgtggatccattcgtggaggtgagttttgccggaaagatgctgtgttcgaagatactcgagaaaacagccaacccacagtggaaccagaatatcactctcccggcaatgtttccttccatgtgtgagaaaatgagaatcagaatcatcgattgggaccgcctgacccataacgatatcgtcgccacaacttacctatcaatgtccaagattagcgctcccggaggagaaattgaggaagagccagctggagcggtgaaaccctctaaagcaagtgacttggatgattacttggggtttttgcctactttcggcccatgctacattaacttgtatggctctccgagagaatttaccggtttcccagatccatataccgagctaaacacaggaaaaggggaaggcgtggcctacagaggcaggcttctgctctccctggagactaaattagtggagcactcagagcagaaagtggaagatctgcccgcagacgatatactgagagttgaaaagtatctcagacgtcggaagtacagtctctttgccgctttttatagcgccactatgcttcaggacgtggacgacgcaattcagttcgaagtctctatcggcaattacgggaacaagttcgacatgacctgtcttcctctggcttctactactcagtattcgagggcggtcttcgacggctgccattattactatttgccttggggcaatgtgaagccggtggttgttctttccagctactgggaggatatctcccatagaatcgaaacacagaatcaactgttgggcattgccgatagactggaagctggattagagcaagttcaccttgctctgaaggctcagtgctctacagaagacgtcgacagcctggtcgcacaattgaccgacgagcttatcgccggttgcagccaacctctgggcgacatccacgagaccccttccgccacacacttggatcagtacctgtaccagctgaggacccaccacctgtctcagattactgaagctgcgctcgcgttaaagctcgggcattcagagctgcctgctgctctcgaacaagccgaggattggcttctgcgacttcgcgcattagctgaggagccacagaattccctgccagacatcgtgatttggatgctccaaggggataaaagggtagcctatcaaagagtaccagcacaccaagtgttgttcagtcggcgaggggctaattactgtgggaaaaattgtgggaagctgcagacaatttttttgaaataccccatggagaaggttcctggagcgagaatgcctgtccagattcgcgttaaattatggttcggcctatccgtggatgagaaagagtttaatcagttcgccgagggcaagctgtccgtcttcgcagagacatatgagaacgagaccaagctggccttggtcggcaattggggtaccacaggcctaacttacccgaagttcagtgatgttacaggaaaaataaagttgcccaaggactcttttcgcccatcggctgggtggacatgggcaggggattggtttgtgtgcccagagaaaactctcctccatgatatggacgctggacacctctcattcgttgaggaagtctttgagaatcagacccgcctgccaggtggccagtggatttatatgtccgacaactacactgacgtcaatggcgagaaggtgctcccaaaggatgatatcgaatgcccactgggctggaagtgggaagatgaggagtggtccaccgatctgaatagagccgttgatgaacagggttgggagtattccattactattcccccagaacgcaaaccaaaacattgggtacctgctgagaaaatgtattatactcatcgaaggcggcgatgggttagactgagacgcagggacctctcacaaatggaggccctgaaaagacaccggcaggccgaggcagagggtgagggctgggagtacgcaagcctgtttggctggaagtttcacttagagtatcgtaagactgatgccttccgccgacgcaggtggcggagaaggatggagcccttagaaaaaactgggcctgcagctgttttcgcgctcgaaggcgctttaggcggtgtcatggacgacaagtctgaagacagtatgagcgtgtctactttgtccttcggcgtgaacagacctactatttcctgcatcttcgactacggaaacaggtaccatctccggtgctacatgtaccaggccagagacctcgctgctatggataaagactccttttcagatccatatgccatcgtgtcctttctgcatcaatcccaaaaaacagtcgtcgttaagaacacccttaaccccacatgggatcagacactgatcttttacgaaattgaaatcttcggggaaccagcaactgttgcagagcagccacctagcatcgttgtagagttgtacgatcatgatacttatggagccgatgaattcatgggtagatgcatatgccagcctagtctggaaagaatgccaaggctggcctggtttccccttacaagaggttcgcaaccttcaggcgagctgttagcttccttcgagctaatccagcgggaaaagcccgctatccatcacattccgggatttgaggtgcaggagactagtcggatcctggacgagagtgaggatactgacctgccatatccaccaccgcaacgagaggcaaatatatatatggtaccacagaatattaaaccggcactgcagcgaacagccattgaaatcctggcttggggcctgcggaacatgaaatcataccagctagcaaacatatctagcccaagtctggtggtggagtgtgggggacagactgtgcagtcatgtgtcattagaaacctgagaaagaatcccaattttgacatctgcacgttattcatggaggtcatgctccctcgggaagagttgtattgtccacccatcactgtgaaggtgattgacaaccggcagtttggcagaaggcctgtggtgggccagtgtaccattagatctcttgaatctttcctctgtgacccttattctgcagaatctcccagcccacaaggaggtccagatgacgtgtcgctgctgtctccaggagaggatgtcctgattgatattgacgataaggagcccctaatacctattcaggaggaggagttcattgactggtggtccaaatttttcgctagcatcggcgagagggagaaatgtgggtcatacctggagaaggactttgacacactgaaggtgtacgacacacagctggagaacgttgaggcctttgaagggctttccgacttttgtaacacgttcaaactatataggggaaagacacaggaggagaccgaagatccttcagtgatcggcgagttcaaaggcctgtttaaaatctacccgctgcctgaagacccggctatcccaatgcctccccgtcagtttcatcagctcgccgctcaaggtccgcaggagtgtttggtaaggatttatattgtgagggctttcggacttcaacccaaagatccgaacggcaagtgcgacccgtacattaaaattagtataggcaaaaagagcgtttctgaccaggacaactacattccttgtacacttgaacccgtctttggtaaaatgttcgagctgacctgtactctgccccttgagaaagatttgaagatcaccttgtacgattatgacctgctgtccaaagatgaaaagattggagagacggtggtagacttggagaaccgcctgctgagcaaatttggcgcaaggtgtggtcttccccaaacatactgcgtgagcgggccaaaccagtggagagaccaactccgcccatcacagttgctgcaccttttttgtcagcaacatcgagtcaaggctcctgtgtacagaaccgaccgtgtcatgtttcaggataaggaatactctattgaggaaatagaagccggtcgtattcctaatccgcacttgggcccagtggaggagagactggctctccacgtgttacagcagcagggtctggtccctgagcatgtcgaatcacgccctctgtatagccccctccagcctgacattgaacagggaaaactccagatgtgggttgacctctttcccaaggctctgggtagacctggccctcctttcaacataacacctcgcagggcgaggaggttcttcctgagatgcatcatttggaacacccgcgatgtcattctcgacgatttaagtcttaccggagaaaagatgagtgacatctatgttaagggctggatgatagggttcgaggaacacaagcagaaaacagacgtacactaccgttctctgggcggagagggcaactttaactggcgctttatcttccccttcgattatcttccagcagagcaggtgtgcacgatcgccaagaaggatgccttctggcgtctcgataagacagagtccaagatccccgcacgcgtggtgttccaaatttgggataacgataagttctcttttgacgacttccttggtagcctgcagttagatctgaaccgtatgcctaaacctgcaaagaccgctaagaagtgctctctagatcaattggacgacgcctttcaccccgagtggttcgtgagcctgttcgaacagaagaccgtcaaagggtggtggccttgtgtagcggaggaaggggaaaagaaaattcttgccggaaagttagagatgactctggagatcgtcgctgagtcagagcacgaggagagacccgcaggacaaggtcgcgacgaacccaatatgaacccaaagctggaagatccacggagaccagatacatcgttcctttggtttacgtcaccctacaagactatgaagtttattctctggcggcgattcagatgggccattatcctatttatcatactgttcatcttactcctgtttctggccatattcatatacgcattcccaaattatgcagcgatgaagctggtgaaacccttctcctaa

SEQ ID NO: 4338 - DNA, 6267 bp, synthetic construct
  misc_feature 1..6267: note = source = /note="Description of Artificial Sequence: Synthetic coding sequence"
  source 1..6267: mol_type = other DNA
atgctttgttgcctcctcgtccgggcaagcaatctccctagcgcgaaaaaagaccgcaggtctgaccctgtcgcctctctgaccttccgcggagtaaagaagagaaccaaggttattaagaatagcgtcaatcccgtctggaatgaagggtttgagtgggaccttaaaggcataccattggaccagggcagcgaactgcacgtggtggtgaaagatcacgaaacgatgggacgcaacagattcctcggcgaagctaaagtgcccctacgcgaggtgctggcaacgccctctttatcagccagcttcaacgctccgctactggataccaaaaagcaacctacaggtgccagtctcgtgctacaggtcagttacacaccccttccgggtgccgtcccactctttcctccaccgacccctctggagccctcgccaacgctccctgacctggacgtggttgcggatacaggcggagaagaggatacggaggaccagggcctcaccggtgatgaggcagaacctttcttagaccaaagtggagggcctggggcacctaccacccccagaaagttaccctctcggccaccaccacattatcccggaataaaaaggaaacgaagcgctcccacaagtagaaagctcctgagtgataaaccccaggactttcaaatccgcgtgcaggtcattgaagggaggcagctgccaggcgtgaatatcaagcccgttgtgaaagttaccgccgcagggcagacgaaaaggacccggatccacaagggaaatagtcctctttttaacgaaacgctgttctttaatttattcgattctccgggtgagctattcgatgagcccatttttatcaccgtggtggacagcagatccctgcgtaccgatgccctactgggcgagttcaggatggatgttggtacaatttatcgcgaaccacgacatgcctaccttcgaaaatggctcctgctttctgatcccgatgatttctcagccggtgccagaggctatctgaagaccagtctgtgcgtgctggggcctggggatgaagcccctctcgagcgaaaagacccatcagaggataaggaggatatcgagagcaatctgctgcgaccaacaggtgtagctcttcgtggggctcacttctgcctgaaggtcttcagggcggaggatctcccccagatggatgatgctgtcatggataacgtcaagcaaatcttcggattcgagagcaataaaaaaaacttggtcgacccctttgtggaggtttcattcgccggaaaaatgctgtgctccaagattctcgaaaagacagctaacccgcagtggaatcagaacatcaccctccccgcaatgttccctagtatgtgcgaaaagatgcgaatccgaattattgattgggatagacttactcataatgatattgtggccaccacctatctgtctatgtccaaaatatccgcacccggaggagagatagaagtggatgactatctgggattcttaccaactttcggcccttgctatataaatctttacggctcacctagagaatttaccggctttcctgatccatataccgaacttaataccggaaaaggagagggcgtcgcctatcggggaagacttctcctgagcctggaaacaaagctggttgaacactctgaacagaaggttgaggacttgcccgcagatgatatcctgcgcgtggaaaagtatcttaggcggaggaagtattccttgtttgccgctttttattctgccacaatgctgcaggacgtcgatgacgccattcagtttgaggtctccattggaaattacggtaacaaatttgacatgacctgtctgcccctcgcctccactactcaatacagtagagccgtttttgatggctgccattattactatctcccctggggcaacgtgaagccagtcgtggtcctgtcatcctattgggaggatatctcacacagaattgagactcagaaccagttgttgggcatagccgatcgattggaagctgggctggagcaggtccacctggccctgaaagcccaatgttctactgaagacgtggactcgctcgtagcccagctaaccgacgaattaattgcgggatgttctcagccccttggcgacatccatgagacccctagcgcaacacatctggaccaatatctttaccagctgagaactcatcacctttcccagataactgaggccgcactggccttgaagttaggccattccgagctgcccgcagccttagagcaggccgaagactggctgctgaggctacgggcactggctgaagaaccgcagaactcattacctgacattgttatttggatgctgcaaggggacaaaagagtcgcctatcagcgcgtccctgcccatcaggtattattctctaggaggggcgcaaattactgcggtaagaactgcggaaagctccagacgatttttctgaaatacccaatggagaaggtgcctggggcaaggatgcctgtacagattagagtgaaattgtggtttggcctttctgtcgatgagaaagagttcaatcagtttgcagaagggaagttgagcgtgtttgcagaaacttacgaaaacgaaaccaagctggccctggtagggaactggggaacaacaggacttacctacccaaagtttagcgatgtgaccggcaagataaagctgcctaaggacagttttaggccttcagcgggatggacctgggcaggtgattggttcgtatgccccgaaaaaactctccttcacgacatggatgccggtcatctgagcttcgtggaagaggtctttgaaaaccagactcgtttgcccggtggtcagtggatatatatgtccgacaattacaccgatgtgaatggtgagaaagtgctcccaaaggatgatattgagtgccccctggggtggaaatgggaggatgaggaatggagcaccgatctcaatagagccgtggatgagcagggctgggagtacagtattaccatacctcctgagaggaaacccaagcactgggtccccgcagagaaaatgtactacactcacagacggcgacgttgggtgcggttgcgcaggcgagacctctcgcagatggaagctctaaaacggcatagacaggcagaagctgagggtgaaggatgggagtatgctagcttgtttggttggaagtttcacctcgagtaccggaaaaccgacgctttccgcaggagacgttggcgcaggcgcatggaaccattggaaaagaccggaccggctgcggtgtttgcattggaaggtgctctcggaggcgtaatggacgacaaatccgaagactccatgagcgtgtcaaccctgagctttggcgtcaacagacctactataagttgtatcttcgattacggcaatagatatcatttacgctgctacatgtaccaggccagagatctggcggcaatggacaaggattctttcagcgacccctatgcaattgttagttttctgcaccaaagccagaaaacagtggtcgttaaaaacaccctgaatcccacttgggaccaaacattaatcttttacgagattgaaatttttggcgaacccgcaaccgtggccgagcaaccacctagtatcgtcgtggaactgtacgatcatgatacctatggagcagacgaattcatgggcaggtgcatctgtcaaccatccctcgaaaggatgccgagactggcttggttcccacttactcggggaagtcagccgtcaggtgagctgctggccagtttcgagcttatccagcgtgaaaagcctgctatccaccatatccccggttttgaggtgcaggaaaccagtcgcattctggacgaaagtgaggatacagatttgccttacccgcctccccagcgtgaagcaaacatttacatggtgccccagaacatcaaaccagcactccagcggacagccattgagattttggcatggggccttaggaatatgaagagctaccagttggccaatatttcctcccccagcttagtcgtggagtgtgggggtcagaccgttcagagctgcgtgattagaaaccttcgaaagaaccctaatttcgatatttgtaccctgttcatggaggtgatgctcccccgagaagaactgtactgccctcccataactgtcaaagtcattgacaaccgtcaattcgggagacgacctgtcgtggggcaatgcacgatacgctccctggagagttttctctgtgacccctatagcgccgagtcaccctcacctcaggggggtcctgatgacgtgtcactcctcagccccggtgaagacgtgcttatcgacattgacgacaaggagcccctgattccaatacagttggctgacgggctgtcatcactcgcccctactaacaccgcttctcctcctagctcaccacatgaggaggaattcatcgattggtggtctaaattttttgctagtatcggagagcgggaaaaatgtggaagctacctggagaaggactttgacacccttaaggtttatgacacacagctggagaatgtggaggcttttgagggcttaagcgacttctgcaacaccttcaaactttatagaggaaagacccaggaggagactgaggacccatcagtaattggcgaatttaaaggattgttcaaaatataccccttgcctgaagacccagcaatcccgatgccaccacggcagtttcaccaactcgccgctcaggggccacaagaatgtctggttcgtatttacatcgttcgcgcttttggcttgcaacccaaggaccccaatgggaagtgcgatccttacatcaagataagtattgggaagaaatctgtgtccgaccaggataattacattccctgtacactcgagcccgtttttggcaaaatgtttgaactaacctgcacactccctctggagaaagacttaaagattaccctgtatgactatgatctgttaagtaaagacgaaaaaatcggggagacagtcgtagacttggagaatcggctgctgtcaaaattcggcgctcgctgtgggcttccacagacctactgcgtgagtggccctaatcagtggcgcgaccaactgcgaccatctcagctcctgcacctcttctgccagcagcatagagtgaaggccccagtataccgaaccgatcgtgttatgtttcaggataaggagtactctattgaagagattgaagccggtcgcatcccaaacccccacctaggaccagtagaggagcgactggcccttcatgtgctgcagcagcaggggctggtccctgagcatgtggagtctaggcccctgtacagccccttgcaacctgacatcgagcaaggcaagctccaaatgtgggtggacttgttccctaaagctttgggtagacccggtccccctttcaacataacacccaggcgggctcggcgattctttttaaggtgtattatttggaatacccgcgacgttatcctagacgacctgtcgctgactggagaaaaaatgtccgatatttacgtcaagggttggatgatcggcttcgaagagcataaacagaaaaccgatgtgcattatcgcagcctcggcggagaaggtaattttaactggcgcttcatctttccatttgactatctgccagctgagcaggtgtgcacgatcgccaagaaagatgctttctggaggctcgacaagacagagtccaaaattcccgcacgcgtcgtgttccaaatctgggataacgataaattttccttcgatgatttcctgggatcactacaactcgacttaaatagaatgccaaaacctgccaaaaccgcaaagaagtgcagcctggaccagctcgacgatgccttccacccagaatggtttgtctctctgttcgaacagaaaacggtgaaaggctggtggccatgcgtggccgaggagggggaaaaaaaaatccttgctgggaagctcgagatgacgctggaaatcgtggctgagagcgaacatgaggagcggccagccggtcagggcagagatgaaccgaatatgaatcctaaacttgaagatcctcgacgcccagatacctcttttttgtggttcacgagcccttataaaacaatgaagttcatcctctggagacgattccgatgggctattatcctgtttatcatcctgttcattcttctactgttcctggcaatctttatctacgcattcccaaactacgcagccatgaagcttgttaaacccttcagctag

SEQ ID NO: 4339 - DNA, 6294 bp, synthetic construct
  misc_feature 1..6294: note = source = /note="Description of Artificial Sequence: Synthetic coding sequence"
  source 1..6294: mol_type = other DNA
atgcttcgggtctttatcctatatgccgaaaacgtccacacccctgataccgatatctctgacgcctactgcagtgcggtgttcgccggagtcaagaagcggacaaaagtgatcaagaatagtgttaatcctgtttggaatgagggttttgagtgggatcttaaagggattccactcgatcaaggctcagagctgcatgtggttgtaaaggatcacgaaactatggggcgaaatcggttcctgggagaagccaaggttcctctgcgcgaagtgttagcaacaccctccctgagcgcatccttcaacgcccctctcctagatacaaagaaacagcccaccggcgcttccttagtcttgcaggtttcctatactccactccctggcgcagtgccactcttccccccaccgacacctctggagccatcacctaccttgcctgacctggatgtggtcgccggtggagggcagagccgcgctgagacatggtctctgttgtcagactccactatggataccagatatagcggtaagaagtggcctgctcctacagacaccgggggagaggaggacacagaggatcaagggttaacaggagacgaggccgagccctttctagatcaaagtggcggacccggtgcacccaccacaccaagaaaactgccctccagacctccaccccattatccgggaatcaagcgtaagaggagcgcccctacaagtcgcaagcttctgagcgataagccacaagattttcagattcgggtgcaggtgatcgagggtaggcagctcccaggtgtgaatatcaagcccgtggtcaaagtgacagcagctggccaaactaaaagaaccaggatccacaagggcaattcgccgctcttcaacgaaaccctctttttcaatctctttgactcgccaggggaactgtttgacgaaccaattttcatcactgtggtagactcgagaagcttacgcacggacgctctgcttggtgagttcaggatggatgtgggtaccatctaccgcgagcccagacatgcctatttgcgcaagtggctgcttctctccgatcccgacgattttagcgccggagctcgaggctacttaaagacctctttgtgcgtgttaggacctggcgacgaagctccactcgagaggaaggacccctctgaggataaagaggacattgaatctaacttgctgcgccctaccggagtcgccctcagaggtgcacatttttgtcttaaggtcttccgcgctgaggacttgccacagatggacgacgctgtgatggacaacgtgaagcagatctttggcttcgaaagcaacaaaaaaaatctggtggaccctttcgtagaagtgtccttcgcaggaaagatgttgtgtagcaaaattcttgagaaaaccgcaaaccctcagtggaaccagaatatcaccctgccagctatgtttccctcaatgtgtgaaaagatgcgaatccgcattatcgattgggacaggctgactcataatgatatcgttgcgaccacctatctgtccatgtcaaaaatttcagccccaggcggagaaattgaagtcgacgattacttgggatttctccccactttcgggccttgttatataaacctgtatgggtctccgagagagttcacgggctttccagacccatacaccgagctgaatacagggaaaggtgagggggttgcataccggggacggctccttctcagcctggaaacaaaactcgttgagcactctgaacaaaaagtggaggaccttcctgccgacgatatcttgagagtcgagaaatacctccgtcgtcgcaagtatagcctttttgccgctttttactcagcaaccatgcttcaagatgtggatgatgccattcagtttgaggtgtccataggcaactatggtaataaatttgacatgacttgtctgccgttagcgagcaccacccaatacagccgcgctgttttcgatggctgccactattactatttgccatgggggaacgtcaaacccgtggtggtattaagctcttactgggaggacatcagtcatcggatagagactcagaatcaactcctgggaatcgccgacaggctggaagccggactcgaacaggtccacctcgctctgaaagcccagtgctccacggaggatgtggattcgctggtggcccaactgacggacgaattaattgcaggatgctcccagcccctgggagacatccacgagaccccttccgcgacccacctggaccagtatctgtatcagctgagaacccaccacctttctcaaatcactgaggctgccttggctcttaagctggggcattctgagctccccgctgctttggagcaagccgaggactggcttttacggctccgtgctctcgccgaagagccacagaattcgctgccagatatcgttatctggatgcttcaaggagataaacgcgtggcttaccaacgcgtgcccgctcaccaggtcctgttctcgagacggggagctaactattgtggcaagaactgtggcaagctgcaaaccatctttctgaagtacccaatggagaaggtgcccggagctagaatgccagtccagattagagtcaaattgtggtttgggctgtctgtggacgagaaagaatttaaccaattcgcggagggcaaattaagcgtgttcgctgaaacctatgagaacgagacgaagctagcattagtcgggaactggggtacaacaggcctgacgtacccaaaattctccgacgttactggcaaaataaagctgccgaaggactcatttagaccttcggccggttggacctgggcaggggattggtttgtgtgcccagaaaagacactcctacatgacatggatgcaggccacctgtcttttgtggaggaggtttttgaaaaccagactaggctgcctggtgggcagtggatctacatgagtgataactatactgatgtcaatggcgaaaaggtcctcccgaaggacgacatcgaatgcccgctcgggtggaaatgggaggatgaagagtggtctacagatttgaatagggctgtggacgaacagggttgggagtacagtatcacaattcctcctgaaaggaagccaaaacactgggtgcccgctgagaagatgtattacacacaccgcaggaggaggtgggtgagattgcggcgacgggacttgtcacagatggaggctcttaaacgccaccgccaagcggaagctgagggagagggttgggagtacgcctccctgtttggttggaagttccaccttgaataccggaaaacggatgcgtttcgtcgccgtaggtggcgacgccgaatggaacccctggaaaaaaccggtcctgccgcagtgttcgcgttggagggcgctctcggtggggtgatggatgacaaaagtgaagattccatgtccgtctctacactttccttcggcgtcaaccgcccaactatctcctgtatattcgactacggcaatcgctaccatctgcggtgttatatgtaccaggcccgagatcttgccgcaatggacaaggatagcttctctgacccctatgccattgtgtcattcctccaccagtctcagaaaacagtggtcgttaagaatacattgaatcctacctgggaccagaccttgatcttttatgaaatagaaattttcggggaaccagctaccgttgcggaacaacccccaagtattgtggtggagctgtatgatcatgatacttacggcgctgatgagttcatgggcagatgtatctgccaacctagcttggagcgcatgcctagactggcttggtttcccttaactaggggaagccagccttcaggggaattgctcgcatcattcgaactgatccaaagagagaagcccgctatccatcacataccagggtttgaggtgcaggagacgtcccggatcctcgatgaatccgaggacacagatctcccctaccctccacctcagcgcgaagctaacatctatatggtcccccagaatattaagcccgcacttcagagaactgcaatagagattctggcgtggggtctgaggaatatgaaatcctaccaactggccaacatcagcagcccaagcctggtggtggagtgcggcggacagaccgtgcagtcctgcgtgattagaaatctgcggaagaaccccaattttgacatatgtaccctgttcatggaagtgatgctcccccgtgaggagctttattgtccgcctatcacagtgaaagtcattgataacaggcagtttggcaggcgcccagtcgttggacaatgtacaatccgcagccttgagtcattcctgtgcgacccatatagcgcagaaagcccttccccccagggcggacccgatgatgtgtcactgctatccccgggagaagacgtgctgatcgatatcgacgataaggagcccctgatacccatacaggaggaggaatttattgactggtggagtaaattcttcgcctctatcggcgagagggagaagtgtggcagttacctcgagaaggattttgacaccctgaaggtgtacgacacacaattggagaacgtcgaggcgtttgaagggctgtcagacttttgcaatacctttaaattataccgtgggaagactcaagaagaaaccgaggatcccagcgtgatcggcgaattcaagggactctttaagatctatcctctgcccgaagatcctgctatccctatgcctccccgtcaatttcaccagctggccgctcagggaccccaagagtgcctggttaggatctacattgtgcgcgcatttggcttacagcctaaagaccccaatgggaaatgtgacccatacatcaaaattagtatcggaaaaaaaagtgtgtccgatcaagacaactacattccctgtaccctggaacccgtatttgggaagatgttcgagctcacctgtactctcccactcgaaaaagacctaaagattactctctacgattacgacctgttgagcaaggatgaaaagatcggcgaaacggtggtggacttagagaaccggctgctcagcaaatttggagcccgatgtggattgccacagacttactgcgtgagcggaccaaatcaatggcgggatcagctgaggccaagtcaactcctccacttattctgccaacaacaccgagttaaggccccagtctacaggactgatcgagtgatgttccaagacaaggaatatagcattgaagagatagaggctgggaggatccccaacccccatctgggaccagttgaggaaaggctggcattacacgtgctccagcagcagggtctggtccctgagcacgtcgagagccgtcccttatatagtccactgcagccagatatagaacaagggaaacttcagatgtgggtggacttattccctaaagccctgggccgacccggaccaccgttcaacataacaccgaggcgcgctagacggttcttcctgcgctgtataatctggaacaccagagacgtgattctagacgacctttctctgactggggagaagatgagtgatatttacgtgaaggggtggatgatcggtttcgaagagcacaaacagaagaccgatgttcactataggagtctcggtggcgaaggaaactttaactggcgctttattttcccttttgactacctgcctgcagaacaggtatgcaccattgccaagaaagacgctttttggaggctcgataagactgagagtaaaatcccagcacgagtggtctttcagatttgggataatgacaaatttagcttcgacgacttcctcgggtccctgcaacttgatttgaacaggatgcctaagccagccaagaccgcaaagaaatgcagtctcgaccaattagatgacgctttccatcccgaatggttcgtgtccctcttcgaacagaagaccgtcaaaggctggtggccttgcgttgccgaagagggcgagaaaaagatactcgcagggaaactggagatgacccttgagattgtagcagagtctgagcacgaggaaagacctgcaggtcagggacgagatgagcctaatatgaatccaaagctagaggaccccagacgtcccgacaccagcttcctgtggtttacctcaccttataaaaccatgaagtttatactgtggcgcagattccggtgggcaataattctcttcattatcctctttatactcttgttatttctcgcaatcttcatatacgcctttcccaactatgccgcaatgaaactggtaaagccgttcagctaa

SEQ ID NO: 4340 - DNA, 6360 bp, synthetic construct
  misc_feature 1..6360: note = source = /note="Description of Artificial Sequence: Synthetic coding sequence"
  source 1..6360: mol_type = other DNA
atgttatgctgcctgctcgtgagggcgtccaatttgccatccgccaaaaaggatagacggagcgacccagtggcatctctgacttttagaggagtcaaaaaacggactaaggtgatcaaaaacagtgtaaaccctgtttggaatgaagggtttgagtgggatttgaaaggaattccgctggatcagggctcagagctccacgtggtggtgaaagaccatgagaccatgggtcgaaatcgcttcctgggcgaggccaaggtgcctcttagggaagtgttagctactccaagcttaagcgcttctttcaacgcgccactgctcgatacaaagaaacagcccacgggcgcatccctagttcttcaggtgagctacacacccctgccaggtgccgtgcccctcttcccccctcccacaccactggagccttcacctaccctgccagatctggacgttgtggcagggggtggtcaatcacgcgctgagacttggtctcttttatcagactcaaccatggataccagatactctggtaagaaatggcctgctcctacggataccgggggtgaagaggatactgaagatcagggactgaccggcgatgaggcggagccctttctggatcagagcggagggccaggggcaccaacgactcccagaaaactgccaagccgaccccctcctcactaccccggaatcaaaaggaagcgatctgctccaacaagccgtaaactcctatccgacaagccccaggacttccaaattcgtgtgcaggtcattgagggaagacaactgcctggggttaacatcaaacccgtggtgaaggttaccgcagctgggcagaccaagagaactcgtattcacaagggaaattcgccactgtttaacgaaaccctctttttcaacctgttcgactcccccggagagttgttcgacgagccgatcttcataacagtggtggactcccggtcccttcggaccgatgccttactgggggagtttcgcatggatgtgggcacaatctatcgtgagcctaggcacgcctacttacgcaagtggctgttgctgtccgacccagatgacttttctgctggcgcacgcggatatctgaaaacatctctctgcgtcctgggcccaggagacgaggcccctctggaacggaaggatccctctgaggataaagaagacatcgagtctaatctactgaggccgacaggagttgcgttgagaggggctcatttttgcctgaaagtgttcagagccgaagatctcccacagatggatgacgccgtgatggataatgtcaaacagattttcggcttcgagagcaataagaaaaatttagtggatccgttcgtagaggtgtcattcgccggaaagatgctgtgctccaagattctcgaaaaaacagctaatccccagtggaatcagaacataacacttcccgctatgttccccagcatgtgcgagaagatgcgaataaggataatcgactgggatcgtctgacccataatgatatcgtggcgactacatatctgtcgatgtctaagatcagcgcacccggtggggaaattgaggtggatgactacttaggattcctgcccacctttggcccatgttacatcaacctctacggttccccaagagaattcacagggttccctgatccgtatacagagttgaacaccggcaaaggcgagggcgtagcctaccggggtagactcctgttgtctctcgaaacaaagctcgtcgagcacagcgagcagaaagtagaggatctaccagcagatgacattcttcgagtggagaaatatctcaggcgaaggaaatacagtctgttcgctgccttttatagcgccaccatgctgcaggatgtggacgacgccatccaatttgaggtttcaataggtaactacgggaataagttcgatatgacatgtctccccctagcttcgaccactcagtattcccgcgcagtttttgatgggtgccattattattacctgccctggggcaatgtgaaacccgtggtggtgctcagtagttactgggaagacatatcacacagaatagagacgcagaatcaactgctagggatagctgacaggcttgaagccggacttgagcaggttcacctggcactaaaggcacagtgctctaccgaagacgtcgacagcctagtggcacagcttacggatgagctgatagccggttgttctcagccgctgggtgacatccatgaaaccccctcagccacgcatctggaccaatatctgtatcaactgagaacccatcacttaagtcaaattaccgaagccgcactggccctcaagctgggacatagtgaacttcctgccgctctggaacaggctgaggactggctgctccgcctgcgggctcttgctgaagagccacagaactccttgccagacatcgtcatttggatgctacagggagataagcgcgtggcctaccagcgcgtgccagcccaccaggtgctcttcagcaggaggggagctaattactgcggcaagaactgtggaaagctccagactatctttctgaagtatcctatggaaaaagtcccaggcgctaggatgcccgtgcaaatcagggtgaaattgtggtttgggctcagtgtggatgaaaaagagtttaatcagttcgctgagggaaaactctctgtgtttgcagagacctacgaaaatgagactaaattagccctggtggggaattggggtaccacaggccttacatatcccaagttcagtgatgtcacaggcaagatcaaattgcctaaggactcattcagaccctcagccggttggacatgggcgggagactggttcgtctgccctgagaaaaccctgctgcacgatatggatgctggacatctgagttttgtggaggaggtgttcgaaaaccagaccaggctccccggtgggcagtggatttatatgagcgacaattatacggacgttaacggcgagaaggtgctgccaaaggacgacatcgagtgcccactaggatggaagtgggaggatgaggagtggagtactgatctcaaccgggcagtcgacgagcagggatgggaatacagcatcacgatccctccagaaagaaaacctaagcactgggtgccagcagagaaaatgtactacactcatcggcgtagacggtgggtgaggttacgaagacgcgatcttagtcagatggaggcactgaaacggcacagacaggctgaggccgagggggaagggtgggaatacgcctctctctttggctggaagttccatctggagtaccggaagactgatgctttccggagaagacggtggcggaggcggatggagcctctggaaaagacaggtccagctgcggtctttgccctcgaaggggcactcggcggagtcatggacgataagtcagaggattcaatgtcagtatccaccctctcctttggtgtgaacaggcccaccatcagttgcatattcgattacggcaatagatatcacctccgttgttacatgtaccaagccagagatctggcagcaatggataaggacagtttctcagatccttacgctattgtttcattcctccatcagtcccaaaagaccgtcgtagttaagaacactctgaatcccacttgggaccagactttaattttttatgaaatcgagatatttggcgagccagcaacggtcgcggaacaaccacccagtatagtcgttgagctgtatgatcacgacacatatggcgctgacgagttcatgggaaggtgcatctgccaacccagtctcgaacgaatgcccaggctggcatggtttcctctaacgcgcggatcacagccttctggtgaactcctggcctccttcgagctgattcagcgtgaaaagccagcgattcatcacattcccggttttgaagtgcaggagaccagcagaatccttgatgaatctgaggatacagatctcccttatcccccaccccagcgcgaggccaacatttacatggtaccacaaaacataaaacccgcactccagcggaccgctatcgagatattggcgtggggcctgcggaacatgaaatcctaccagcttgccaatatctcatcacctagcttggtggtggagtgcggcggtcagacagtacagtcgtgtgtgatccgcaatctgaggaaaaacccaaattttgatatttgcacgttatttatggaggtcatgctgcctcgagaggaactgtattgccccccaatcactgtgaaagtaatcgataacagacagttcggacggagaccagtggtgggccagtgtaccattcggtcactggagagcttcctgtgcgacccatacagtgcagagtcgccgtctcctcagggcggacccgacgacgtttccctgctctcaccgggagaggatgtactgattgacatcgatgataaggagccactgattcctatacaactagccgatggcctttcatcactagcacctactaatactgccagcccccctagttcgcctcacgaagaggagttcatcgattggtggtccaagtttttcgcttctatcggtgagagagaaaaatgtgggtcctacttagaaaaggacttcgacactttgaaggtgtacgatacccaattggaaaacgtggaagcgtttgagggattgtccgacttctgtaatacatttaaactctacaggggcaagacccaagaagaaaccgaggatccttcagtgatcggtgagttcaaaggtctgttcaagatctatcctctccctgaagatccagccatccctatgcctcccagacagttccatcagctggctgcacaggggccacaggaatgtctcgtaagaatttatattgtgagagccttcggactccagcctaaggacccaaacggtaagtgtgatccatatattaaaatatcgataggtaaaaagagcgtctccgaccaggacaactacatcccatgcactctggaacccgtgttcggtaaaatgtttgaattaacctgcacactgcccttagaaaaggacctaaagatcacactgtatgattacgacctgctgtctaaagacgagaagattggagagactgttgtggatctcgaaaaccgcctcctcagcaagttcggggcaagatgcggccttcctcagacctattgcgtctcaggccctaaccaatggcgtgatcagctgaggccaagccaactcctgcatctattttgccagcagcacagggtgaaggccccagtctaccgaacagacagggtgatgtttcaggacaaagagtattccattgaggagatcgaagcagggaggattcccaacccccacctcggaccggtggaggagcgcctcgcattgcatgttctccagcagcagggattggtccccgaacatgtcgaatctcggccattatattctccactccaacctgatatcgaacaggggaaacttcaaatgtgggtcgacctgtttcctaaagctttggggcgtcctggtcctccctttaatatcacacctcgtcgggcaaggcggtttttcctgcgatgcatcatctggaatacccgtgacgtcatccttgacgacttgtccctaacaggcgagaaaatgagcgatatttacgtgaagggttggatgattggatttgaggagcataagcagaagactgacgtgcattatagatcacttgggggagagggcaattttaactggcggttcatcttcccctttgactacctccccgctgagcaggtgtgtaccattgcaaaaaaagacgcgttttggcgcctggacaaaaccgagtccaagatccccgctagggttgtcttccagatctgggataatgataagttcagcttcgacgactttctgggcagccttcagctcgacctaaaccgaatgcccaaaccagccaagaccgccaagaaatgtagccttgatcagctcgatgacgcctttcacccagagtggtttgtatctcttttcgagcaaaaaaccgtcaaggggtggtggccatgtgttgcagaagagggtgagaaaaagatcctggccggaaagctcgaaatgacacttgaaattgtcgccgaatccgagcacgaggagagacctgccggtcagggcagagatgagcctaacatgaatcctaagctagaagaccctcggagacctgatacttctttcctgtggtttacttccccctacaaaacaatgaagtttatcttgtggcggaggtttcgctgggcgattattctctttatcattctctttatcttgctcctcttcttagcgatttttatctatgctttccctaattacgcagcaatgaaattagtcaagcctttttcatag

SEQ ID NO: 4341 - DNA, 6297 bp, synthetic construct
  misc_feature 1..6297: note = source = /note="Description of Artificial Sequence: Synthetic coding sequence"
  source 1..6297: mol_type = other DNA
atgctgtgttgcctgctcgtacgcgcatcaaacctcccgtcagctaagaaagaccgccgatccgatcctgtggcgagtctcacctttagaggcgttaagaaaaggactaaggtcattaagaacagcgtcaaccctgtgtggaacgaggggttcgaatgggacctcaagggaattccactggatcagggctccgagttgcacgtggtcgtgaaggaccatgagactatgggcaggaaccggtttctgggagaggccaaagtgcctctgagggaggtcttagccacacccagtctttctgcctcctttaatgccccattgttagatacgaagaaacagccaaccggcgcttctttggtgctccaggtcagctacacaccgctcccgggagccgtgcctctttttccccctcccactccgttggaaccatccccaacgctcccagatctggacgtggtcgcaggcggaggtcagtctcgcgctgaaacatggtcacttctgtcagactcgaccatggatactcggtatagcggcaagaaatggccagctcctactgacaccgggggagaggaggacacggaagaccaaggcctgaccggtgatgaggcagaaccctttctggaccagtccggtggcccaggtgctcctaccacgcctcgtaaactgccgagccgcccaccacctcactaccccggaatcaagagaaaacggtctgcacctacatcacgcaagctgctgtcggataaacctcaggactttcaaatccgagtacaagtaatcgaagggcgacagctccccggagtcaacattaagcccgtcgtgaaagtaacagccgcaggccagacaaaacgcacccgtatacataagggtaattctccgctgttcaacgaaaccctgttttttaatctttttgacagcccaggcgagctcttcgacgagccgatcttcattacagttgtggattctagatcattgagaaccgacgcccttctgggcgagttccggatggacgtgggcacaatctacagggagccaaggcatgcctatttacgcaaatggcttttgctctctgaccccgacgatttcagtgctggggctagaggctatttgaaaaccagtctgtgcgtgctggggcctggtgacgaagctccactggaaaggaaagacccctccgaagataaggaggacatcgagagcaaccttctgcgccctaccggagtggcgctgagaggcgctcacttttgtctgaaggttttcagggccgaagacttaccccagatggatgacgcagtgatggacaacgtgaaacagatttttgggtttgagagcaacaaaaagaatctagttgacccctttgtcgaggtgagctttgcaggcaagatgttatgtagcaaaatcctcgaaaagaccgcaaaccctcaatggaaccagaacatcacactccctgccatgtttcctagcatgtgcgagaagatgcgtatccgcataatcgattgggatcgccttacccataacgacattgttgccaccacttaccttagcatgagcaaaatttctgcgccaggtggggagatcgaagtggatgactaccttgggtttctgcccacttttgggccatgctatatcaatttatatggatccccgagggagttcactgggtttcctgatccatacacagagctgaataccggcaagggggagggggttgcctatcgtggccgtctgcttctgagtctggagactaagctggtggaacattccgagcaaaaggtggaggatctacctgcagacgatatcctccgtgtggagaagtaccttcgcagacgcaaatatagtcttttcgcggctttctactccgcaactatgcttcaagatgtggatgacgcaatccaatttgaggtgagtatcggcaattatggcaacaaatttgatatgacctgtcttcccctggcttcaaccacgcagtacagcagagccgtcttcgatgggtgtcactattactacctcccctggggaaatgtgaagcctgtggtggtgttgtcgtcttactgggaggacattagccaccgcatcgagacacagaaccagctgctgggcattgcagacaggctggaggcaggcctcgaacaggtacacttagcactgaaggcccaatgttcaaccgaggatgtagacagtttggtggcccagctgaccgacgaactgatcgcaggttgcagccagccattaggagacatccatgagaccccgtctgcaacgcacctcgaccagtatttgtaccagttaaggactcaccatctttcacagataacagaagcggctctagcgctcaagctgggtcacagcgagctgcccgcagcccttgagcaggctgaggactggcttcttcggctgcgggctctggcggaggagccccagaattctctgcccgacatcgtgatttggatgcttcaaggagataagcgcgtggcctaccagagggtgccggcacatcaggtccttttcagtcgacggggagccaactactgcggaaagaattgtgggaaactgcagactattttcctcaagtatcccatggaaaaagtccccggagcacggatgcctgttcagatccgcgtcaaactgtggttcggtctgagtgtggacgagaaggagtttaaccagtttgccgaggggaagttgtccgtatttgcagagacttatgaaaatgagactaagctggccttggtgggtaattggggcacaaccgggctcacttatccgaaatttagcgacgtgaccggaaaaattaaattgccaaaggattcatttagaccctcagccggatggacctgggcgggagattggtttgtgtgcccagagaaaactttgctgcatgatatggatgccggacacctgtcctttgtggaggaggtctttgagaaccagactaggctaccaggaggccagtggatttacatgtccgataactataccgatgttaacggcgaaaaggtcttacccaaggacgacatagagtgccctctgggatggaaatgggaagacgaagaatggtctacagacctcaatcgcgcagtggatgagcagggctgggagtacagcattaccatccctccagagagaaaaccgaagcactgggtgccagcagagaagatgtattacacacaccgacgacggcgttgggtgagactgaggaggcgggatctcagtcagatggaggcgttaaaacgacatcgccaggcagaggcggagggcgaagggtgggagtacgctagcctgtttgggtggaaatttcacttggagtacagaaagacggacgctttccggcgacggaggtggcgcaggcgaatggagccactagagaaaaccgggccagcagcagtctttgctctcgaaggagcgttgggcggagttatggacgacaagtctgaggatagcatgagtgtttcaactctgtcattcggcgtcaacaggccaaccattagttgtatttttgactatgggaatcggtaccaccttcgctgttacatgtatcaggctagagacctagcagccatggacaaggactcattctccgatccctacgctattgtgtctttcctccatcagtcccagaagactgtggtcgtgaaaaatacacttaatcctacatgggaccagacactcatcttttacgagattgaaatttttggggagcctgcaacagtcgccgaacaaccaccctctattgtcgttgaactatacgatcacgatacatacggagccgacgagtttatggggaggtgcatttgccaaccctcgcttgagagaatgccccgtcttgcatggtttcctttgactagaggatctcagccaagtggcgaattacttgcatcatttgagctgattcaacgcgagaaacccgctatccatcacatccctggcttcgaagtgcaggaaacttcccggatcctcgacgaatcagaagacactgacttaccttatcctccccctcagcgcgaagctaacatctatatggtgccccagaacataaaacctgctttgcagcgaacggcgatcgaaattctggcttggggtctgaggaatatgaaatcctatcagctcgctaacatttcttctccttccttggtcgtggaatgcggagggcaaacagtccagtcctgtgttatccgaaacctgcgaaagaaccccaattttgatatttgtaccctcttcatggaggtaatgctgcccagggaggagctctattgcccaccaattacggttaaagtcatcgacaaccgacaattcgggagacgcccagtggtgggtcagtgcacgattcgaagcttggagagttttctgtgtgacccctactcagccgagagtccttctcctcaggggggtcccgacgatgtaagcttattaagccccggagaagacgtcctgatcgatatcgatgataaggagccactgatccccattcaggaagaagagttcattgactggtggtctaaattttttgcctctattggagaacgagagaagtgcgggagttatctcgagaaagacttcgatacacttaaagtgtatgacacccagctcgagaatgtggaggcgttcgagggcctgtctgatttctgcaatacattcaaattatacagaggcaagacgcaggaggagactgaagacccatccgtaatcggagaatttaaagggctcttcaagatatatcccctgcccgaagaccctgccatcccaatgccccctcgccagttccaccaactggccgctcaggggccacaggaatgtttggtaagaatctacattgtccgggcatttggtctgcaacctaaggaccctaatggcaaatgcgatccgtacatcaagatctcgatcggcaaaaaatctgttagtgaccaagataattacatcccctgtactctggagcccgtcttcggcaagatgttcgagttgacttgcacactccccctggagaaagacctgaagattacgttatacgattatgatttgctgagtaaggacgagaagataggcgagaccgtggtcgacttagagaacaggcttctgtctaaattcggcgcaaggtgtggactcccgcaaacctattgcgtatcaggacccaaccagtggcgggatcagctgcggcctagccagctgcttcatttattctgtcagcagcaccgtgtgaaagccccagtatatcggactgaccgagtgatgttccaggacaaagaatacagtatcgaggagatcgaggcaggcaggatccctaatccccacctcggccctgttgaagagagactcgcacttcatgtactgcagcagcagggcttggtgcccgaacacgttgaatcccgccctctctactcccctcttcagcctgacatagaacaggggaagcttcagatgtgggtggacctgttccctaaggcactggggcgacctggcccaccgttcaacatcacaccaaggagagcgaggcgcttctttcttcgatgcataatctggaacacccgcgatgtaatcttagacgatctgtctcttacgggggaaaaaatgtccgatatctacgtcaaaggatggatgataggattcgaggagcacaagcaaaagaccgacgtgcattaccgttctctagggggagagggtaattttaactggcgatttatttttcccttcgattatctccccgctgagcaggtttgcaccatcgccaagaaggatgcattttggagactagacaagacagaatcaaagatccccgctcgtgtggtcttccagatctgggacaatgataaatttagcttcgatgactttctggggtctttgcagttggacttgaacagaatgccgaagcccgctaagacggcaaagaagtgcagcctcgaccagttggatgacgccttccatcccgagtggtttgtatcgctgttcgagcagaagaccgtgaagggctggtggccatgtgtagccgaggagggcgagaagaagattttagccggaaagttagagatgacccttgaaattgtggctgagtccgaacacgaggagaggcccgcaggacagggcagggatgaacctaatatgaatcccaaactggaggaccctcgccgacctgatacatctttcctgtggtttaccagtccatacaagaccatgaagtttatcctctggaggcgcttcaggtgggccatcattttgtttattatcctttttatcttgctgctttttttagcgatttttatatacgcatttccgaattacgccgctatgaaacttgtgaagcctttctcctac

SEQ ID NO: 4342 - DNA, 6335 bp, synthetic construct
  misc_feature 1..6335: note = source = /note="Description of Artificial Sequence: Synthetic coding sequence"
  source 1..6335: mol_type = other DNA
atgctgagggtctttatactgtacgctgagaacgtgcatacccctgacaccgatattagcgatgcttattgttcagcagtctttgcaggcgttaaaaagcggactaaggttattaagaacagtgtcaacccggtttggaatgagggctttgaatgggatttaaagggtatcccgttggaccaaggcagcgagcttcacgtggtggtcaaggaccatgagaccatgggaaggaacaggttcctgggagaagcgaaagtgccccttcgggaagtgctggcaacaccctcactgagcgcatcgtttaatgcacccctgttggataccaagaaacagcccaccggggcatcattagtcctgcaggtttcatatacacccctgcctggcgctgttccacttttcccaccccctactcctttagagccatcacctaccctgccagaccttgacgtcgtggctggcggaggccagagtcgggcagagacatggtccctgttgtccgactccactatggacactaggtattccggcaagaagtggcctgcgccaaccgataccggcggagaggaagacaccgaagatcagggcctcacaggcgatgaggccgagccatttctggatcagagtggagggcctggggctcctacaacaccacgcaaactcccgagtaggccgccaccacactatccgggaatcaaacggaaaaggtccgcccctacctccaggaagcttctgtctgacaagcctcaggactttcaaattcgtgtgcaggtaatcgaagggcgacagcttcctggagtgaacattaagccggtcgttaaggttactgctgcgggacagacaaaacggaccagaatacacaagggtaattctccgctttttaacgaaaccttgtttttcaacctgttcgacagcccaggcgagctctttgacgagcccatcttcattaccgtcgtcgactcacggtcactgcgtaccgacgcccttttaggagagttccgaatggatgtgggcaccatctaccgggaaccgaggcacgcataccttcgaaaatggcttctgctcagcgatccggatgacttttctgctggggcacggggatacctcaagacctctctctgtgttctcggccctggcgatgaagccccattggagaggaaggatccttccgaagataaagaagacattgagtcaaacctgcttcggcctacaggtgtggcccttcgaggcgctcatttctgcctaaaagtcttcagggctgaggacctgccgcagatggatgacgcggtgatggataacgtaaagcagattttcgggttcgaatcaaataaaaagaacttggtggaccccttcgtcgaagtctcatttgctggcaaaatgttgtgctcaaaaattctggagaagacagcaaacccccagtggaatcaaaatatcacattaccagcaatgtttccctctatgtgcgagaagatgcggatacgtatcatcgactgggatcgactcactcataacgatattgtggcaacgacctatctgtctatgtccaagattagtgctccaggtggcgagatagaagaagagccagctggagctgtaaagccatcgaaggccagcgacctcgatgactaccttgggttcttaccgaccttcggaccatgttatatcaacctgtacggcagcccacgggaattcaccggttttccagacccctatacggagctcaataccggaaagggtgagggcgtagcctaccgcggacggttattactatcccttgagacaaagcttgttgaacactcagagcaaaaggtggaggatcttcccgctgacgatatactaagggtggaaaagtacctgagacggcgtaaatactctctcttcgcagctttttattcggctaccatgctgcaggacgtggatgatgctatccaatttgaggtctcaattggaaactatggaaacaaattcgatatgacatgtctccctttggccagcactacacagtacagccgtgctgtcttcgacgggtgccattactattacctgccctgggggaacgtgaagcccgtagttgtactgtccagctattgggaagatataagccacaggatcgagacgcagaaccagctgctgggaatcgccgatcggctagaggccggtctcgagcaagttcacctcgcactcaaggcacaatgctcgaccgaggacgtcgacagcttagtggcacaactgaccgacgaactgatcgctggatgtagccagcctttgggcgatatccatgaaactccctccgccactcacctggaccagtacctgtaccagcttcggacgcaccaccttagccagattaccgaagctgctctggccctcaaactaggacactcggagcttcctgcagcactagaacaggcagaggactggctcttgaggctccgggcactagctgaggaaccacagaattctctgccggacatcgtaatttggatgctccagggtgataaaagagttgcttaccagagggttcccgctcatcaagttctgtttagccgcagaggggcaaactactgcggcaaaaattgcggaaaacttcaaacaatctttttgaaatacccgatggaaaaagttccgggagcccgtatgcccgttcagattagagtcaagctgtggttcggtttatccgtggacgaaaaagagtttaaccagttcgccgaaggcaagctatctgtctttgctgaaacatatgaaaatgaaaccaagctggctcttgtgggtaactgggggactactggcctgacatatccaaagttttctgacgtgaccggcaagatcaagctgccaaaggacagctttcggccatctgccggttggacctgggccggtgattggttcgtgtgtcctgaaaagacgctgctccatgacatggatgcaggacacctgtctttcgtggaggaggtatttgagaaccagactagactgccagggggacagtggatctatatgagtgataattacactgatgtcaatggggaaaaggttctcccaaaggatgacatcgagtgtccattggggtggaagtgggaggatgaggagtggtctacagacctgaacagggcggtcgatgaacaaggttgggagtatagcattacaatccctcccgaaagaaagcctaaacactgggtgccagcagaaaaaatgtactatacacataggcgcaggcggtgggttcggctccgaaggcgcgacctgagccaaatggaggccttgaagagacaccgccaggctgaagccgaaggagaaggctgggagtacgcgtcactcttcggatggaagtttcacctggagtataggaaaaccgatgcgtttcgcaggagaagatggcgtaggcgaatggagcccttggagaagacagggcctgcagccgtctttgccctcgaaggggcactgggtggagtgatggatgacaaaagcgaggatagtatgtctgtgtccacactgtcctttggcgtgaatcggccaactataagctgtatctttgactatgggaaccgttatcatctcagatgttacatgtaccaggctcgcgatcttgcagcgatggataaggatagcttttcagacccgtatgccattgtctcgtttcttcaccagagccagaaaacagtagttgtaaagaacaccctcaatccaacctgggaccagactttaattttctatgaaattgagatcttcggggaaccagcaaccgttgcagagcagccccctagtattgtggtcgagttgtatgaccatgatacttatggggctgacgaatttatggggcgatgtatctgtcagccctcactagaacgaatgccgcgattagcctggttccccctaactcggggatctcagccttccggtgagttgctggcctcgtttgagcttatccaaagggagaagccggcaatccaccacattcctggattcgaggtccaagagacatcgcggattctggacgagtctgaggacacggacctgccctaccccccaccccagagagaggccaacatttacatggttcctcagaatatcaaacccgcactccagcgaaccgctatagagatcctggcatggggactgcgcaacatgaagagctaccagctggccaatataagtagcccttccctcgtggtagaatgcgggggacagacagtgcagtcctgcgttataagaaacctgagaaaaaatccaaacttcgacatatgcacgctcttcatggaggtcatgctgcccagggaagaattatactgcccccctatcaccgttaaggtcatagataaccgtcagttcgggagaagaccagtggtaggtcagtgcacaatccgctctctggaaagcttcctgtgcgacccttactctgcggagtccccgtcaccacaggggggacctgacgacgtctctctgctgagtcccggtgaggacgtcctgattgatatagacgataaagagcctctgattccaatccaagaagaagagttcattgactggtggtccaagttttttgcctctattggcgagcgggaaaagtgtggtagttacctcgaaaaagacttcgatactctcaaggtatacgatacccagctggagaatgtggaggcttttgaagggctctcagatttttgtaacaccttcaaactctatcgcggaaagacacaggaagagacagaggacccctccgtgataggcgaatttaagggcctgttcaaaatctacccacttccagaggatccagccattcctatgccgccaaggcagtttcaccagttggcagctcaggggcctcaagaatgcttggtgcgaatttatattgtgcgcgcatttggactgcagccaaaagatccaaacggcaagtgtgacccttatatcaagatcagcatcggtaagaagtccgtctccgaccaggataactacatcccttgtactctggagccagtcttcgggaaaatgtttgaactgacatgcaccttgcccctggagaaggacctcaagataacactttatgactatgatttgctaagcaaagacgagaaaataggagagaccgtggtagatcttgaaaacaggctcttatctaaatttggagctaggtgtggacttccccaaacctactgcgtctcaggaccaaaccagtggcgggaccagctgaggcccagtcaactgttgcaccttttctgccagcagcatagagtcaaggccccagtctatagaacagatcgggtcatgttccaggacaaagagtactctattgaggaaatcgaagcaggaagaatccccaacccccaccttggcccagtggaagaaaggctggccttgcacgtcctgcagcagcagggcctggtgcccgaacacgtggagagcagaccgttatacagccccctacagcctgacattgagcagggcaaacttcagatgtgggtggacctctttcccaaggccctgggccgtcccggacctccattcaacataacacccagaagagccagacggttcttccttcggtgcattatttggaacactagggatgtaatcctcgatgatcttagcctgactggggaaaaaatgtctgatatttacgttaagggatggatgatcggatttgaagagcataagcaaaaaaccgacgtgcattacaggtccctcgggggagagggcaactttaactggagatttatatttccttttgactacctaccagccgagcaggtctgtacgatcgcaaaaaaggatgccttctggcgccttgataagacagaatcgaagatccctgccagagtggtctttcagatatgggataatgataagttctcctttgatgacttcctcgggtctctgcagcttgacctgaatcggatgcctaagcccgcaaagaccgccaaaaagtgcagtcttgaccaactcgatgacgcctttcaccccgagtggttcgtctccttgtttgagcagaaaactgtcaaaggatggtggccctgtgtggctgaggagggcgagaagaagatcctggcgggaaagctggagatgacactggaaattgtggctgaatccgaacacgaggagcgccctgccggacagggccgtgacgaacctaatatgaatcctaaacttgaagaccccaggcgcccagacactagttttctctggtttactagcccttacaagactatgaagttcattctatggcgacggtttaggtgggccatcattttgttcatcatcctcttcatcctcttgctgtttcttgctatctttatctatgctttcccgaactacgctgccatgaaattagtgaaaccttttagtta

SEQ ID NO: 4343 - DNA, 6305 bp, synthetic construct
  misc_feature 1..6305: note = source = /note="Description of Artificial Sequence: Synthetic coding sequence"
  source 1..6305: mol_type = other DNA
atgttgcgtgtattcatactctatgctgagaatgtccatacccccgacacagacatttctgatgcttactgctccgcggtgtttgctggggttaagaaacgcacaaaggtgatcaagaactccgtgaatcctgtatggaatgagggctttgaatgggatcttaaagggatccccctggatcaggggtctgagcttcacgtggtcgtgaaagaccacgaaacaatgggcagaaatcggtttctgggcgaagccaaagtcccccttcgcgaggttctggctaccccatctctgtcggctagcttcaacgctccattgctcgatacaaagaaacagccaaccggagctagcctggtactccaggtgtcctatacgcctttacctggggctgtgccattatttccacctcctacgcccttagagccgagcccaaccctacccgacctggatgtggtggcagataccggaggcgaggaagataccgaagaccagggactgaccggagatgaagccgaaccctttctggaccagagcggagggccaggggctcccacaactccccgtaagctcccatcccgccctccccctcactatcccggtataaagaggaagcgttcggctccaaccagtcggaagctcctgagtgataagcctcaggatttccagattagagtgcaggttatcgaagggaggcagctgccaggcgtgaatatcaagccggtggttaaggttactgcagccggtcagactaaaagaacacgtattcacaaaggcaatagtccacttttcaacgaaacactttttttcaacctctttgattcccctggtgagctgtttgacgaaccgattttcatcacggtggtggatagtcgcagcctgcggacagatgccttgctgggcgagtttagaatggatgttgggacaatatatagggagcccagacacgcttaccttcggaagtggctcctgctgagcgacccagacgacttttctgcaggagccaggggatacttgaaaacatccttgtgtgtcctgggtccaggcgatgaggcccctctcgaacgaaaggatcctagcgaagataaagaagacatcgaatcgaatttactgagacccacaggagttgcactgcgcggtgcccacttctgtctgaaggtgttccgggctgaagatttaccccagatggatgatgccgtcatggataacgtcaaacaaatcttcggctttgaaagcaacaaaaaaaatcttgtggacccttttgtagaggtcagttttgcaggaaaaatgctgtgctctaagattttagaaaagaccgccaacccccagtggaaccagaatatcacactacctgccatgtttccatctatgtgtgagaagatgagaattcggattatcgattgggataggctcacccataacgatattgtggccaccacatacctgtccatgagcaaaatctcggcgcctgggggagagatcgaggaagaacccgcaggagcggtgaagccctcaaaagctagcgacctggacgactacctgggttttctacccacgttcggaccttgttacatcaacctgtacggttcacctagagaatttaccgggtttccagatccgtacactgagctgaacaccggaaagggagaaggtgtagcttacagaggcaggctgctgctgtcgttggagaccaaattggttgagcattctgagcagaaagtggaggatcttcccgctgatgacattctacgggtagagaagtacttgagacgtagaaagtactcactgtttgctgctttttacagcgcaactatgcttcaagatgtagacgatgccatacagtttgaggtgtccattggaaattacggcaataagtttgatatgacatgtttgcctctggcgagcactacacaatacagtagagcagtctttgacggatgtcactactattatctgccgtggggaaatgtcaaacctgtggttgtcttgtcctcttattgggaggatataagccatagaattgagactcaaaaccaactcctgggtattgctgaccgccttgaggcgggtttagaacaggtccacctggccttaaaggctcagtgtagtacagaagacgtggattcgttggtagcacagctgacagatgaactgatagcaggatgctcacagccactgggggacatccacgagacccctagcgcaacacatctagaccagtatctgtaccagctgcgtacccatcatctgtcccagataactgaagctgcactagccctgaagctgggacattcggaacttccggcagcccttgaacaggctgaagattggttgcttcgactgcgggctctggccgaagaaccccaaaattccctgcccgatattgtgatttggatgctccagggagacaaacgtgtcgcttatcagcgagtgccagcgcaccaggtattattttcccggaggggcgctaattactgcggcaaaaattgcggcaaactccagaccattttcctgaagtaccccatggaaaaagtcccaggggctagaatgcctgtgcagattagagtgaaactgtggttcggtttaagcgtagatgaaaaggagttcaaccaattcgcggaaggcaaactctcagtgtttgcagaaacctacgagaatgaaacaaaactggccctggtgggcaactgggggacaaccggcctaacataccctaagttctcagacgtgactggcaagattaagttaccaaaagactctttccgcccaagcgcaggctggacctgggcaggcgactggttcgtgtgcccggaaaaaacactactgcacgacatggacgcaggccatctgtcattcgtcgaggaggtgttcgagaaccaaacaagactgcctggcggtcagtggatctatatgtccgacaactacacagacgtcaacggagagaaggtgctcccgaaggacgacattgagtgtcctctaggatggaagtgggaggacgaggaatggtcgaccgacctgaatcgcgcagtggacgagcaaggctgggagtatagtattacaattcctccagagagaaaaccgaagcactgggtccctgccgagaaaatgtactacacacacagaagacgtcgctgggtacgactcagacggagagacctcagtcagatggaggccttaaaaagacaccggcaggccgaggcagaaggcgaagggtgggagtacgcgagcttatttggctggaaatttcacctggagtaccgcaagaccgacgcattcaggaggcggagatggaggagaagaatggagcccttagaaaagacaggccctgctgccgtgttcgccttagaaggcgctctgggaggggtgatggatgataaatcagaggacagtatgtctgtatcaactctgtcttttggcgtgaataggccaaccataagctgcatatttgactacggtaatcgatatcatctcaggtgctatatgtatcaagccagagatctggccgcaatggacaaagacagcttttctgacccttatgccattgtttccttcctccaccagtctcagaagactgtcgtggtgaagaacactctcaaccccacttgggatcaaacccttatcttctacgagattgagatatttggcgagccagctactgtcgccgagcagcctcctagcattgtggtggagctatatgatcacgatacttatggagcagatgagttcatgggcaggtgtatctgtcaacccagcttggagcgcatgccaagattggcctggttcccactgacccggggaagtcagcccagtggtgaattattggcttctttcgagctcatccaaagagaaaagcctgccattcaccatatccccggtttcgaagtccaggagactagtcgcattttggacgaatccgaagacactgacctgccttaccccccacctcagcgcgaggccaatatttacatggtccctcagaacattaagcctgccttacagcgaacggctattgagatccttgcatgggggctcagaaacatgaaaagttaccaattagctaatatatctagcccatcactggtggtcgaatgtggcggacaaaccgtgcaaagctgtgtaatacggaatctgcgtaagaaccctaactttgacatttgcactctgtttatggaggtaatgctcccccgagaggaactgtattgtccaccgattacagtgaaagtgatcgataaccggcagtttggacggcgacccgtggtgggtcaatgcactattaggagcttagagtcgttcctatgcgatccctacagtgcagaatccccgtccccacagggcggacccgacgatgtgagtctattgagtccaggcgaggacgttttaatcgatattgacgacaaggaacccctgattcccatccagctcgcagacggcctgagctctctggcacccaccaataccgcttcgcccccttcctcacctcacgaggaagagttcattgactggtggtccaaattttttgcgagtattggcgagagagaaaaatgtggcagttacctggagaaggatttcgacacgctcaaagtgtacgacacacaacttgagaatgtggaagcctttgaaggactttcagacttttgtaatactttcaagctgtatcgtggcaagacccaggaggaaaccgaagaccccagcgtaataggggaatttaaaggactcttcaagatatacccactgcccgaggatccagccatccccatgcccccacgccagtttcaccaacttgcagctcaaggtccacaggagtgtttagtccgcatctatattgtccgcgcatttgggctgcaaccaaaagacccaaatggcaagtgcgacccctacataaagatctccattggaaagaaatctgtctccgatcaggacaactatatcccttgtaccttggagcccgtgttcggtaagatgtttgagttgacatgcacacttccactagagaaagacttgaagattacactgtacgactatgaccttctcagtaaagatgagaaaataggcgaaacggtggttgatctcgaaaaccgccttctgtccaagttcggcgctcgttgtggactcccccaaacatactgtgtgtcaggtcccaaccaatggcgagatcaactcagaccctctcaattgttgcatttgttctgccagcagcatagagtgaaggcgccagtgtaccgcactgaccgcgtcatgttccaagacaaagagtactcaatcgaagagattgaggccggaaggattccaaacccccacctgggcccagtggaggaacgtctggcccttcacgtgctgcagcagcaagggctagtgcctgagcatgtagagagccggcctctgtacagccctctgcagccagatattgaacagggaaaattacagatgtgggtcgatttatttccaaaagctctggggcgtcccggtcccccttttaacataacgcctcgtagggcgaggaggttcttcctacgttgtatcatatggaacacccgcgatgtaatactggatgatctttctctgactggcgagaagatgtcagatatctatgtaaagggatggatgattggatttgaggaacataaacaaaagactgatgtgcattacagatcactgggcggtgagggcaatttcaattggaggttcatctttccgttcgattacctccccgcagagcaggtgtgcacaattgcaaaaaaggatgctttctggcggctggataaaactgagagcaaaatccctgctagggtggtcttccaaatttgggacaacgacaagttttcatttgacgattttctcgggtccctccaactcgacttaaacaggatgccaaaaccagcaaaaactgccaaaaaatgcagtcttgaccagctggatgacgctttccacccagagtggtttgtatcactattcgaacagaaaacagtcaagggctggtggccttgtgtggccgaggagggcgagaaaaagatcctggccggtaaattggaaatgactctcgaaatcgtggcagaaagcgagcatgaagagcgtccagctggacaaggcagagatgagcccaatatgaaccccaaactggaggacccacgccgtcctgacacctcgtttctctggttcacatctccctataaaactatgaagttcatcttatggcgaagatttaggtgggcgatcattctcttcatcatactctttatcctgcttctgtttctcgcgatctttatatatgcctttcctaattatgcagccatgaaactggtaaagccttttagtta

SEQ ID NO: 4344 - DNA, 447 bp, synthetic construct
  misc_feature 1..447: note = source = /note="Description of Artificial Sequence: Synthetic coding sequence"
  source 1..447: mol_type = other DNA
atggggtatccagaagtggagcgtcgggagttgctcccagcagcagcaccgagggagcggggtagccagggctgcggatgcggcggtgccccagctcgggcaggggagggaaacagctgcctgctgttcctcggattttttggactatcacttgccctccatctgctgacactatgttgctatctggagctcagatccgagctgcgcagagagcgaggcgcagaatccaggctgggagggtcaggcacaccaggtacgagcggaacactatccagtttgggcggactggatcccgactctcctatcaccagccatttaggacagccttcccccaagcagcagccccttgaaccaggggaggccgcacttcatagcgactcccaagacggacaccaggacttcgactatatcatctcctttagttacgggctacaaggcttctgttag

SEQ ID NO: 4345 - DNA, 1176 bp, synthetic construct
  misc_feature 1..1176: note = source = /note="Description of Artificial Sequence: Synthetic coding sequence"
  source 1..1176: mol_type = other DNA
atggggtatccagaggtcgaaaggcgggagctgttacctgccgctgctcccagggagagaggttcccagggatgtgggtgcggcggagcaccagccagagccggtgagggcaactcgtgcttgcttttcctggggttcttcggattgtccctggccctgcatttactcaccctgtgctgctaccttgaactcagatcagagcttcgcagggagcggggagcagagtccagattgggcggttccggaaccccgggaactagcgggaccctcagctcattagggggacttgaccctgatagccccattacgtcccatttagggcagcccagtcctaagcagcagccgctagagcccggtgaagcagccctccacagcgactctcaggacggacaccagatggctttgttgaactttttcttcccggacgaaaaaccttattcggaggaggagtcgcgacgcgtgcgtcggaacaaacgcagtaagagcaacgagggagcagacgggccagtgaagaataagaaaaaaggcaagaaagctgggccacctggacccaacgggccacccggaccacccggacctccaggaccccaggggcctccaggcattcccggaattcccggaattccgggtaccaccgtaatggggccaccaggccctcccggaccccctgggccacagggccctccaggcctgcaggggccaagcggggctgccgacaaagctgggactcgggaaaatcaaccggcagtcgtgcacctgcagggacagggtagcgcaatccaagtcaagaacgacctttctgggggtgtgctcaatgactggagtcggattactatgaatcccaaagtattcaaactgcacccgaggtccggagaactggaagtactggtggatgggacttattttatctatagtcaggtggaagtttattacattaactttacagacttcgcgtcctatgaggtggtcgtcgacgagaagccctttctacagtgcactagatctattgagaccggcaagacaaactacaacacctgttacacagccggtgtgtgcctgctgaaagctcgacaaaagatcgccgtcaagatggtgcacgccgatataagtatcaacatgtctaagcacacaacctttttcggagccattagactcggcgaagcccctgcttcctag

SEQ ID NO: 4346 - DNA, 1170 bp, synthetic construct
  misc_feature 1..1170: note = source = /note="Description of Artificial Sequence: Synthetic coding sequence"
  source 1..1170: mol_type = other DNA
atgggttacccagaggtggagcgaagagagctcctgcctgcagccgctcccagggagcgcggttcccaagggtgcggctgcggtggagcgccagcccgtgcaggcgagggcaactcatgtctgttgtttctcggctttttcggcctgagtctggcattgcatcttctgacgctgtgctgttacttggagctccgctctgaactcagacgcgaacgcggagcagaaagcagactgggaggtagcggcacgccgggaacctccgggacccttagctccctgggaggacttgaccccgactccccaatcacttcccacctgggtcagccttcccccaaacagcagcccctcgaacccggagaggctgccctccatagcgattcacaggacgggcatcagatggctctgctgaactttttctttcctgacgagaagccatacagcgaggaagagtcacgcagggtgcgccgaaataagcgatctaagtccaatgaaggcgcagacgggcctgtcaaaaacaagaaaaaagggaagaaagccggtccgccaggccctaatgggcctcctgggcctccgggtccccctggaccccaagggccacctgggataccaggtatcccaggcataccaggcacaaccgttatgggcccaccgggtcccccaggtcctcctggaccacaggggcctccagggttacaaggaccttcgggcgctgccgataaggccggaactcgcgaaaatcagcccgctgtcgttcatctgcagggacagggatccgctatccaagttaaaaatgatctgtcgggcggtgtgcttaacgactggtcccgcatcacaatgaaccctaaagtgttcaagttacaccctaggtccggcgagctcgaagtacttgtagatggaacctatttcatctacagtcaggtgtattacataaacttcacagattttgctagctatgaggtggtcgtggatgagaaaccgttcctgcagtgtaccagatctattgagacagggaagacgaactacaacacctgttacaccgcaggagtatgtctcctgaaagcaagacagaagattgccgtgaaaatggtgcatgccgacatctccataaacatgagtaaacacactaccttctttggggctattcgcctcggcgaagccccagcgagttag

SEQ ID NO: 4347 - DNA, 408 bp, synthetic construct
  misc_feature 1..408: note = source = /note="Description of Artificial Sequence: Synthetic coding sequence"
  source 1..408: mol_type = other DNA
atgggctaccctgaagtcgaacgaagagaactcctgcccgctgcagcccctcgagaacgcggatcccagggttgtggatgcggtggcgctcctgcaagggctggggagggaaattcttgcctgctgttcttgggtttcttcgggctctccttggctctccatttgctgaccctgtgttgctatcttgagctgcgttcagagctaaggagggagcggggtgcagagtctcgcctgggtggcagcggcactccagggacttccggtacgttgtctagcctgggagggttggatcctgactctcctatcacgtcgcatctgggacagccgtctccgaaacagcaaccgttggagccaggggaggcagccctacacagtgatagccaggacggccaccaaggccaccaatag

SEQ ID NO: 4348 - DNA, 1161 bp, synthetic construct
  misc_feature 1..1161: note = source = /note="Description of Artificial Sequence: Synthetic coding sequence"
  source 1..1161: mol_type = other DNA
atgggatatccagaagttgagagaagagagctcttacccgcagctgccccaagagagagaggaagccaggggtgtgggtgcgggggagcgcctgcacgggcaggagaaggcaattcctgtctcctgttcctgggtttcttcgggctgtcccttgccctgcacctgctgaccttatgctgttacctcgaactccggtctgaacttaggagggagcggggagcagagagtaggctgggcggttccggcacgcccggtactagcggtaccctctctagccttgggggtctagatcccgactctcccatcacctcccatctgggacaaccgagcccaaaacaacagcctctcgagcctggcgaggccgctctccattccgactctcaggatggacaccagatggcactgctaaatttctttttccctgacgagaagccatattcagaggaagaatccaggagagttcggcgaaataaacggagtaagtctaatgagggggctgacggtccagtgaagaacaaaaagaagggcaagaaggccggaccacccggtcctaatggaccccctggccctcccggacctcctgggcctcagggcccaccaggcattcccggaattcccggtattcctggaacaacggtcatgggccctcctgggcctcccggtccaccagggccacagggcccacctgggctgcaaggacctagtggagctgccgataaggcgggaacccgagaaaaccaaccggcagtggtgcatctgcaggggcagggatctgctattcaagtaaaaaatgggggtgttctcaatgactggagtaggatcacaatgaatcctaaggtatttaaattacacccacgctcaggtgaactggaagtgttagttgatggtacttactttatctacagccaggtgtactacatcaactttacggactttgcctcctacgaggttgtggtcgacgaaaagccctttctacagtgtacaaggagcatcgaaacaggcaagacaaactataacacctgttataccgctggagtgtgtcttctgaaggcacgtcagaaaatcgccgttaagatggtccatgcagatatttcaatcaacatgtcaaagcacactacattctttggcgcaatcaggctgggcgaagccccagctagttag

SEQ ID NO: 4349 - DNA, 447 bp, synthetic construct
  misc_feature 1..447: note = source = /note="Description of Artificial Sequence: Synthetic coding sequence"
  source 1..447: mol_type = other DNA
atgggatatcctgaggtagagcggagggaattactgccggctgccgcaccccgtgagcgtggctctcaaggttgcggatgtggtggtgccccagcccgagccggagagggaaattcgtgtctgctttttctgggcttctttggcctcagccttgcacttcaccttctgacactttgctgctatctggagttaaggtctgagcttcgtcgggagcgcggtgccgaaagccgactaggtggcagcggcactcctggcacctccggcaccttgtcttctcttgggggtttggatcctgattcaccaattacaagccacttgggccagccctcccccaaacagcagccattagaacccggtgaggcagcgcttcactcggatagtcaagatggacaccaagacttcgactatataatttctttctcctatggcctccagggcttctgttag

SEQ ID NO: 4350 - DNA, 3429 bp, synthetic construct
  misc_feature 1..3429: note = source = /note="Description of Artificial Sequence: Synthetic coding sequence"
  source 1..3429: mol_type = other DNA
atgctggtactgagatgccgattgggcacaagcttccctaaactggacaacctagtccccaaaggtaagatgaaaatcctcctggtgttcctcggcctccttggtaattcggtggcaatgcctatgcacatgcctcgcatgcctggcttctcttcaaagagcgaagagatgatgagatataaccagttcaatttcatgaatgggccacacatggcccacttgggacctttttttgggaatggactgccccaacaattccctcagtaccaaatgcctatgtggcctcaacccccaccaaacacatggcatcctagaaaatcctccgccccaaagcgtcacaataaaaccgatcagacacaagaaactcagaagccaaaccagacccagagcaaaaagccaccccaaaagcgaccgctgaaacaaccctctcacaaccaaccgcagccggaggaggaagcacagcctccccaagcattcccaccctttgggaatggactgttcccttaccagcagccaccgtggcagataccacagcggctgcctcctccaggttatggcagaccacctattagtaatgaagagggtgggaacccgtacttcggttacttcggatatcacggcttcggtggtaggccaccttactattcagaggagatgtttgagcaagactttgagaaaccaaaagaggaggaccctccaaaggccgagagcccagggacagagcccacagcaaacagcactgttaccgagaccaactcgacccaacccaacccaaaaggttcgcaggggggaaatgacacgtcgcccacaggtaatagtactcccggtctaaatactggcaacaatcccccagctcagaacggtattggcccactcccagctgtcaacgccagcggacaggggggtccagggagccagatcccttggcggccatctcaacctaacataagagagaatcacccttatcctaacattcggaacttcccatccggacgtcagtggtattttactggtacagtgatgggccacaggcagaatcggccattttaccgcaaccagcaggtgcagcgcggacccagatggaattttttcgcatgggagaggaagcaagtggccaggccaggaaatcctgtgtaccataaagcgtacccccctacctcacggggtaactatcccaactacgcgggaaacccagctaatctgcggagaaaaccacagggtcccaataagcacccagtgggcaccaccgtcgccccacttggcccaaaacccggacccgtggtgcgaaatgaaaagatccagaatcccaaggaaaaaccgcttggcccaaaggaacagatcatcgtgccaaccaagaatcccacgtccccctggcggaactctcagcagtatgaggttaataagtctaactacaagctgccacatagtgaaggctacatgcccgtgcccaactttaattctgtggatcagcacgaaaatagttattaccctagaggagacagccgaaaagtgcctaattctgacgggcaaacccagagccagaacctacccaagggtatcgtcctggggtcccggagaatgccctatgaaagtgaaactaaccagtccgagctgaaacattcttcttatcaaccggctgtatacccagaagagattcccagcccggctaaagagcattttccagcgggtagaaacacatgggaccaccaggagatctccccacctttcaaagaagatcctgggaggcaagaggaacatctgccccacccctcacacggcagtcgaggctcggttttttatccagagtataatccctatgatccccgagagaatagcccatacttgcgaggtaacacctgggacgagcgggatgattcccccaacaccatgggacagaaagagagtccactctatcccattaacacaccggatcaaaaggagattgtcccgtataacgaggaggatcctgtggaccccactggcgatgaggtttttccaggccaaaataggtggggagaagagttgtcctttaagggcggtccgacagttagacactacgagggggaacagtacacctcaaatcagcccaaagagtacctcccctattcactggacaaccctagtaaaccccgagaagatttttactattcagaattctatccctggtcccctgatgaaaattttccctcatacaacactgcctctactatgccgccacccatcgagtctcgcggttactacgttaataatgcagccggacctgaggagagcacactatttcctagtcgaaattcttgggaccaccgtatccaagcacaggggcagagagaacggagaccctatttcaaccgcaatatctgggaccaggccacccatttacagaaggccccagctagacctcctgatcaaaaaggcaaccagccgtactacagcaacactcctgcagggctgcagaagaaccccatctggcacgaaggcgaaaacctgaactacggcatgcaaattactagaatgaacagcccagagcgcgagcacagttcattccctaatttcattccccctagctacccttctggccagaaggaagcacacctgtttcacttgtctcaacgcggttcttgctgtgcaggttctagcaccgggcctaaggataaccctttggctctccaagattatacgccgtcctacggactcgcacccggagagaatcaggatacctctcctttgtacaccgacggcagtcataccaagcagacgcgggatatcatctctccaacgagcattctgcctgggcaacggaactcctccgagaaacgggagtctcagaatccttttcgggacgatgtgagcacactgcgcagaaacacaccctgttctattaagaaccaattaggacagaaagaaattatgccattccctgaggcatcttcactgcaatctaagaacactccgtgtctcaaaaacgatctcggcggagacggcaataatatcctagagcaggtgttcgaagacaaccagctgaacgagaggacagtggatttaacacccgaacagctcgtcatagggacacccgatgagggcagcaacccagaagggatacagtcacaggtgcaggagaacgagtccgagcgacagcagcagaggccatctaatatcctccatttgccctgttttggatctaaactcgccaagcaccacagcagcacaactggaacaccaagctcagatggtcggcagagcccgttcgacggtgacagcattacccccactgagaatcctaataccctggttgagcttgcgaccgaagagcagttcaagagcatcaacgtggatcctcttgatgccgatgagcatagcccgtttgaatttctgcagcgcggtaccaacgtacaggaccaagtacaggactgtctcctgcttcaggcttag

SEQ ID NO: 4351 - DNA, 582 bp, synthetic construct
  misc_feature 1..582: note = source = /note="Description of Artificial Sequence: Synthetic coding sequence"
  source 1..582: mol_type = other DNA
atgggcgtccacgaatgcccggcttggctgtggttgctgctgagcctgctgagcttacctctggggctgccagtgttgggcgcaccacccaggcttatctgcgactcgagggttctcgaaagatacttacttgaggccaaggaggctgagaacattactactgggtgcgccgagcactgctctctcaatgaaaacattactgtgcctgataccaaagtgaacttctatgcctggaaacgcatggaggtcggccagcaggcagtcgaggtgtggcaaggtctggcactactctcggaggccgtactgagaggacaggctctgctcgtgaatagttctcagccttgggaacccctgcagctgcacgtggacaaagccgtatccgggctacggagtttgacaaccttactgagagctctgggcgcacaaaaggaggcgatttcccctccagacgccgcttctgcggctcctttgaggacaattacagccgatacattccgaaagctgtttagagtgtattctaactttctgagaggcaaactcaagctgtataccggggaggcctgtaggactggtgatcgatag

SEQ ID NO: 4352 - DNA, 192 bp, synthetic construct
  misc_feature 1..192: note = source = /note="Description of Artificial Sequence: Synthetic coding sequence"
  source 1..192: mol_type = other DNA
atgccgtcatccgtgtcctgggggatcctgctgctggctgggctctgttgcttggtgcctgtgtctcttgctcatggagagggaacattcacttccgatctgtctaagcagatggaggaagaagctgtgcgtctgtttatcgagtggctcaagaatggcggaccgtcgagcggggcaccccctccctcttag

SEQ ID NO: 4353 - DNA, 1050 bp, synthetic construct
  misc_feature 1..1050: note = source = /note="Description of Artificial Sequence: Synthetic coding sequence"
  source 1..1050: mol_type = other DNA
atggaggcagtgaaagccgaagcctgggagggtgccgcagtcgcccaagatctcctggccctcgggtatgggggagtgcccggagccgctagcagaggagcttcctgcccagattttagagggttgtgtgtgcgcctggccgctgaattggccacactgggcgcactggagcaacagagagaggccggtgccgaggtgctcagcgctggtgatggaccaggggcagaggaggattttctgaggcagttagggagcctcttacgtgaactgcactgtcctgatcgagctctgtgtggaggcgatggagctgccgctttgcgtgaaccaggagctggcctcaggctgcttagattcctgtgctccgagctacaggccacccgacttctctgtctccgatccctcctagatccctctcctagaccaccgttgggagagggtgtcgtggaaggtgccggaatggtgcaagagctggatctgacacttcaggccttggggctgcccaggcccgctccagggaccccggctagtcaactcctgcaggaattgcatgcaaaaatatctgaattgcaaccgtctttacctcccggttcattgcagcccctcttatcatgttccctcgatgcaccaaggtgggaggctttggaatccctgtcacaaagtctcagagatcagtataggtgtcgcagatgtctgctgctcaaacggctggatctgacaaccagcgctttccactggagcgatcgagccgaggcccagggcgaagcaatgcgggcagtgctgatccccatccgggaagttttgaccccagaatcagatatatccatagctcacgtgttagcagcccgtgcggatctcagctgtttggttccagccacaagtgtggcagtcagacggggtacatgctgtgcgatcaacaaagttttgatgggcaacgtgccagatcggggaggaaggcccaacgagctcgagcctccaatgcccacatggcggtctcgacgtgaagatggaggccctcaatgttgggggcgaaagaaaaaaaaaaagaagtag

SEQ ID NO: 4354 - DNA, 804 bp, synthetic construct
  misc_feature 1..804: note = source = /note="Description of Artificial Sequence: Synthetic coding sequence"
  source 1..804: mol_type = other DNA
atggaggccgttaaggctgaggcatgggaaggtgccgctgtcgcacaagacctgctggccctgggctacggaggcgtcccaggcgcagcttcgaggggtgcgagctgcccggattttcgtgggttgtgtgttagattagcagccgagctggccacgttgggcgcacttgagcagcagcgcgaggccggtgctgaggttttatccgctggcgatgggcctggtgcagaggaggactttctgcgacagctggggtcactgctacgggaactgcattgcccagaccgagccctgtgcggaggggacggtgcggctgccctgagagagccgggagccggtctccgcctgctacgttttctgtgtagcgagctgcaggcgactagactcctgtgtctcagatcactgttggatccctctcctcgaccacccctcggggagggggtggtggagggggctggcatggtccaggagctggaccttacactgcaggcccttgggttgccaaggcctgcacctggaacccccgcttctcagctgctccaggagctgcatgcaaaggaagcgctagagtccctcagccaaagtctgcgtgatcagtacaggtgtagacgatgtctactgttgaaacgacttgatctgaccactagcgcatttcattggagtgatagggccgaggtgctgatgggcaatgtgccagaccggggtgggagacccaacgaactagaacccccaatgcccacatggcggtctcgcagggaagatggaggaccacagtgctgggggaggaagaagaagaaaaagaagtag

SEQ ID NO: 4355 - DNA, 2601 bp, synthetic construct
  misc_feature 1..2601: note = source = /note="Description of Artificial Sequence: Synthetic coding sequence"
  source 1..2601: mol_type = other DNA
atgttttccatgaggatagtgtgcttggtactgagcgtcgtgggcacagcctggacggcagattcaggggaaggcgattttctggcagaaggcggtggagtgcggggaccccgagttgttgagaggcatcagagtgcctgcaaagatagcgattggcctttctgctctgacgaggactggaattataaatgcccttccggctgtagaatgaagggactcattgacgaggtcaaccaggatttcactaacagaattaacaagctgaaaaacagcctctttgaatatcagaagaataacaaggacagccattcactcacaaccaatattatggagattctgcggggtgacttctcttccgctaacaaccgtgacaacacctacaatagagttagcgaggacctgcggtcccgtatcgaggtgttgaaacgtaaggtcattgagaaggtgcagcacatccagctgttacagaagaacgtccgcgctcagcttgtcgacatgaaacgcttggaagtggacattgacattaagatacgcagctgtaggggaagttgctctcgggcattagcccgagaggtggatctgaaggactatgaagatcagcaaaaacaattagaacaagtcattgcaaaggatctcctcccgtcccgcgacagacagcacttgcctctcatcaagatgaaacctgttccagaccttgtgccagggaattttaaatctcagctgcagaaagttcctcccgagtggaaggcattgactgatatgccacagatgcgtatggagctggaacgacccggaggcaacgagattacacgtggcggaagcacctcttacgggacaggaagcgagactgagtctccacgcaatccctcatctgccggaagctggaattcagggtcaagcggccctggaagtacagggaatcggaacccgggaagctcaggtaccggcggaaccgcaacttggaaacccggttcatctggcccagggtccaccggcagttggaactcaggttcttctggaaccggatcaaccggaaatcagaaccctggctccccacggccaggctctactggtacctggaatccaggatccagcgagcggggaagcgctgggcattggacaagcgagtcttcagtgtctgggtccacaggacagtggcactctgaatccggatcgttccggcctgatagccccggatctgggaacgccaggccaaacaatcctgattgggggacctttgaagaggtgtcaggaaacgtttcaccaggaaccaggcgcgaataccatacagaaaaattagtcacgtcaaagggagacaaggagttacgcacaggcaaagagaaggttacttcgggaagcaccacaaccacacgtagatcgtgttcaaagaccgtgacaaaaaccgtgatcggaccggatggccataaggaggtaactaaggaggtagtgacctccgaggatggttcagactgcccggaagctatggatctggggactttgagcggaataggtacattagatgggtttagacaccggcatcctgatgaagcagctttcttcgacacagcctcaaccggcaagactttcccaggatttttttctccaatgctgggtgaatttgtctctgagactgaaagtcgaggatcggaaagcgggatctttaccaatactaaggagtcatcttcccatcacccaggaattgcagaattccccagccgcggaaagagcagttcctactccaaacaatttaccagcagcacctcgtataaccgcggagactccacctttgagagcaaaagctataaaatggctgacgaggcaggatccgaggcagatcacgaagggactcactccactaaaagaggacatgccaagtcaagaccagtgagggattgcgatgacgtgcttcagacccatccctcaggaactcagtctggtatttttaacatcaaactcccaggatcctcgaagatcttctccgtgtactgtgatcaggagacctcactcggaggttggctattaattcagcagcgcatggatggatccctcaactttaatcgcacctggcaagactataagagaggcttcggaagcctgaatgacgagggagagggagaattctggctcggcaatgactacctgcaccttctgacacaaagagggagcgtgttgagggttgagcttgaggactgggccggtaacgaagcatatgcagaatatcacttccgggtcggcagcgaggctgagggatacgccctgcaggtatcttcgtacgaaggaacagcgggtgatgcactcatcgagggcagcgtggaagagggggcagaatacaccagccataacaatatgcagttcagcactttcgaccgagatgccgaccaatgggaggaaaactgtgccgaggtatacggtggcggatggtggtacaacaattgccaagctgccaacctcaatgggatctattatcctggaggttcttacgacccccgaaataattcaccttacgagatcgagaatggagtcgtgtgggtgtccttccgtggcgctgactactctctccgggcagtacggatgaagatcagacccctcgtgacacaatag

SEQ ID NO: 4356 - DNA, 1935 bp, synthetic construct
  misc_feature 1..1935: note = source = /note="Description of Artificial Sequence: Synthetic coding sequence"
  source 1..1935: mol_type = other DNA
atgttcagtatgcgcatcgtttgtttagtgttgtctgttgttggtacagcctggacggctgattcgggagagggcgactttctggccgaaggaggcggagtccggggaccaagggtcgttgaaagacaccaatccgcttgcaaagacagtgattggccgttctgctctgacgaggattggaactacaagtgtccaagtggttgcaggatgaagggactgatcgatgaagtgaatcaagacttcacaaacagaatcaacaaattaaagaacagcctcttcgagtaccagaagaacaacaaggattcccattccctgacgaccaatatcatggagatcctcaggggagacttctctagtgccaataacagggataacacgtacaatagagtgagcgaagacctccggtcccgaatcgaggtcctgaaacggaaggtgattgaaaaggtccagcatattcagttgctgcagaaaaacgtgcgcgctcaacttgttgatatgaagaggttggaggtggacattgacatcaaaatccgaagctgcagaggatcttgctcccgcgctctggcgagggaagttgacctcaaagactatgaagaccaacaaaaacagctggaacaagtaatcgccaaggatctccttccctcacgagatcggcaacacttacctctgattaagatgaagccggtgcctgacctcgtgccgggtaatttcaaatcccagctacagaaggtgcctcccgagtggaaggctctcaccgacatgcctcagatgcggatggaattggagcgacctgggggtaatgaaataacacgcggtggctccacatcatatgggaccgggtcagaaaccgaatccccgcgaaatccttctagcgctggttcttggaattccggcagttcaggacccggaagtactggcaaccggaatcccggtagctccggtacaggcggaacagcgacctggaaaccaggatcatccgggccaggaagcactggctcttggaacagcggatcaagtgggacgggcagcactggaaatcagaacccgggttcaccacgacccggtagtacaggcacgtggaaccctgggtcttcggagcggggtagcgcaggacactggactagtgagagttctgtgagcggttccactggccagtggcattccgaatcaggatccttcaggcctgacagcccagggtccggaaacgcaagacctaacaaccctgactgggggaccttcgaagaagtgagcggcaacgtgtcccctggtacacggcgagaatatcatacggagaagctcgtgactagcaagggggataaggaacttagaacaggcaaggagaaagtaacaagcgggagcaccacaacaacaagacgctcttgcagtaagacagtcaccaagactgtgattgggcctgatggccataaagaagtgaccaaggaagttgtgactagcgaggacggctcggattgcccagaagccatggaccttgggacactgagcggcattgggactctggatggatttaggcatcggcatcctgatgaagctgcattttttgatactgccagcacggggaaaacattcccgggattcttcagtcctatgctaggagagttcgtgagtgaaactgaatcacggggatccgaatcgggtatctttacaaataccaaggagtccagttctcaccaccccggaatcgcggaattcccaagtcggggaaagtctagtagttacagcaagcagttcacgagcagcacctcctacaatcgaggcgactctactttcgagtctaagtcctacaaaatggctgacgaagccggaagtgaggcagaccacgaggggacccactccaccaagcggggacatgcaaaaagtagacctgttaggggcatacacactagcccactgggaaagccatcactctccccgtag

SEQ ID NO: 4357 - DNA, 870 bp, synthetic construct
  misc_feature 1..870: note = source = /note="Description of Artificial Sequence: Synthetic coding sequence"
  source 1..870: mol_type = other DNA
atgttcagtatgcgtatagtgtgtctggtgctctcagttgtgggcaccgcctggacggctgatagtggagagggcgatttccttgctgaaggaggtggcgtccgcggacccagggtggtcgaacgccaccagtctgcctgtaaggattcagattggcccttttgttctgatgaggactggaactataaatgtccctcgggctgcagaatgaaggggctgattgatgaggtgaatcaggactttactaaccgaataaataagctaaaaaatagcctatttgagtaccagaagaacaacaaagactcccactccttaacaaccaatattatggaaatattaagaggcgacttctcgagtgctaacaatagagataacacttataatagagtgagtgaggatctacgatcgcggatcgaggttttgaagcgcaaggtgatcgagaaggtccaacacatccagctgctccagaagaacgtgagagcccaacttgtcgatatgaaacgcctggaagtggatattgacatcaagatcagaagctgccggggttcttgctccagggctctcgcaagggaagtggatttaaaagattatgaagatcagcagaaacagctagaacaggtgatcgctaaagacttgctgcctgttgtgaatctgcaggtaactgccaataacctattagtggctcgagtcactacagaggagaccccgcacctgaaagctcgggcaataaaatggcaaatgcgtcctgaggtgaaaccgataatgaaggagcacattgccccacgggaagctatgctgaacttggctttgtctgaggtttcgacgcttctgttgtgggggtctctgccttgtcccccacggctgtcttag

SEQ ID NO: 4358 - DNA, 1476 bp, synthetic construct
  misc_feature 1..1476: note = source = /note="Description of Artificial Sequence: Synthetic coding sequence"
  source 1..1476: mol_type = other DNA
atgaagaggatggtatcctggtccttccacaagctgaagacaatgaagcatctccttttgttactattatgtgtgtttctcgttaagtctcagggggttaacgacaacgaggagggattcttcagcgcaagaggacacaggccactggataaaaaacgagaagaggccccatctcttcgcccagccccaccgcctataagcgggggaggctaccgagccagaccggcaaaagccgctgcgacccaaaagaaagtagagcgaaaagcccctgacgcagggggatgcctgcatgcggacccggacctgggcgtgttgtgccctaccggttgccaactgcaggaagctctgctgcaacaggaacggcctattcgaaactcggtggacgaactgaataacaacgtggaggctgtctctcagaccagctctagctccttccaatatatgtacctgctcaaggatttatggcagaagagacagaaacaggtgaaggataatgagaacgtcgtgaacgagtactctagcgaactggaaaaacatcaactgtatattgacgagactgtcaactcgaacatcccaaccaatctcagggttctgcgctctattttggaaaacttgcgcagcaagatccagaagctggaaagtgacgtgtccgcccagatggaatactgcagaactccctgcacagtgagctgtaacatacccgtggtcagtggcaaagagtgcgaagagattatccggaagggtggagagaccagcgagatgtatctgattcagcccgatagtagtgttaaaccatatcgcgtctattgcgacatgaataccgaaaatggcggttggacggttatccagaaccgtcaggatggttctgtagatttcgggaggaaatgggacccgtataagcaggggtttgggaatgttgccacaaataccgatgggaaaaattactgtgggctgccaggggagtactggttgggcaatgataaaatttctcagttaactaggatggggcctactgaacttctgattgagatggaggattggaagggggataaagtgaaggcccactatgggggattcaccgtgcagaacgaagcaaataagtaccaaatatctgtaaacaagtacagggggaccgcaggcaatgcacttatggacggcgcaagtcagctcatgggcgagaacaggactatgaccattcataatggaatgttcttctcaacttacgatcgggataatgatggttggctgacttctgatccccgaaaacaatgctccaaggaggacgggggtggctggtggtataatagatgccatgcagctaaccccaacggacggtactattggggtggtcagtacacctgggacatggctaaacatggaaccgacgacggcgtagtgtggatgaattggaagggaagctggtattccatgcggaaaatgagtatgaaaatccgacccttttttccacagcagtag

SEQ ID NO: 4359 - DNA, 1425 bp, synthetic construct
  misc_feature 1..1425: note = source = /note="Description of Artificial Sequence: Synthetic coding sequence"
  source 1..1425: mol_type = other DNA
atgaaacggatggtgagctggagcttccacaagctgaagaccatgaagcatctccttctgctactgctttgcgtatttctggtcaaaagccagggagtgaatgacaatgaagagggcttcttcagcgcgagagggcaccgcccattagacaaaaaaagagaggaggcacgaccagctaaagccgctgctacccagaagaaggttgagcggaaagcccctgatgcgggaggctgcctccatgccgatccagacctcggagtgctgtgcccaaccggctgtcaactacaagaagctctgctacagcaggaaaggcctatcaggaattccgtcgatgagctcaataataacgtggaagccgtcagccagacgtcatccagctcattccagtacatgtacctgctgaaggacctctggcaaaaacggcagaagcaggtcaaggacaatgaaaatgtcgtgaacgagtatagttcagagttagagaagcatcagctttacattgatgaaacagtgaattcaaacatcccaactaacctgagagttctcagaagcattttggaaaatctccggagcaaaatccagaagctggagtctgacgtgagcgcccagatggagtattgcagaacgccgtgtacagttagctgtaacatcccagtggtgagcggcaaggagtgcgaagagataatacggaaaggtggagagacgtctgagatgtacctcattcaaccggacagctcggtcaaaccttatagagtgtactgtgacatgaataccgaaaacggcggatggactgtgatccagaatcggcaggacggtagcgtggacttcggtcgtaagtgggatccctataaacagggattcggaaatgtggccacaaataccgatgggaagaattattgcgggctgcctggtgaatattggttgggtaacgataagatctcgcagctgacacggatgggcccaaccgaactgctgatcgaaatggaggactggaaaggcgacaaagtaaaagcccactatggcggattcaccgttcaaaatgaggccaacaaatatcagatatctgtgaataagtaccgcggtaccgccggtaacgctctgatggacggcgctagccagctgatgggcgaaaatcgtacaatgacaattcataacgggatgtttttctccacgtacgaccgcgacaatgacggatggctgacatcagacccacgtaagcagtgctcaaaggaagacggcggagggtggtggtataaccggtgtcatgcggcaaatcccaacggaaggtactattggggcggacaatatacctgggacatggcaaagcatggcactgatgacggtgtggtatggatgaattggaagggctcatggtactctatgaggaagatgagtatgaagatccgtccattcttccctcagcagtag

SEQ ID NO: 4360 - DNA, 1362 bp, synthetic construct
  misc_feature 1..1362: note = source = /note="Description of Artificial Sequence: Synthetic coding sequence"
  source 1..1362: mol_type = other DNA
atgtcctggagtctgcacccacggaatctgattctgtacttttacgccctgcttttcctgtcatctacctgtgtggcctacgtggccactcgggataattgctgtatcctagatgaaagatttggcagttattgtcccacaacctgtgggatcgccgacttcctatctacataccaaactaaagtcgataaagatctccagtctctggaggatatcctgcaccaggtggagaacaaaacttccgaagtcaagcaactcatcaaagcaattcagttaacctacaaccctgatgaatcatcaaagcccaacatgattgacgccgcaaccctcaagtctcggaagatgcttgaagagatcatgaagtacgaagcatccattcttacacacgattcttccatccgatatttgcaagagatctacaactccaacaatcagaagatcgtgaacctgaaggagaaggtggctcagctggaggcgcagtgtcaagagccctgcaaggataccgtgcagatacacgacattactggcaaggattgccaggacatcgccaacaagggggcaaaacagtctggcctctatttcatcaagcctctgaaggcaaatcagcagttcttggtgtactgtgagatcgatgggtcgggcaatggctggaccgttttccagaagcggctggacggctcagtggatttcaagaagaattggatccagtacaaggaagggttcgggcacctgagccccaccggcaccaccgaattttggctcggcaatgaaaagatccatttgattagcacacagagcgcaataccctacgccctgagggtggaactggaggattggaatgggagaacttctacagcagactatgctatgttcaaagttggacccgaagctgataagtataggcttacttatgcctacttcgctggaggtgatgcaggagacgctttcgatgggttcgatttcggggacgatccaagcgataagttcttcacctctcataacggaatgcagttctccacttgggataacgacaacgacaaattcgagggcaattgcgccgagcaggatggctctggatggtggatgaacaaatgtcacgcaggccacctgaacggagtctactatcagggtggcacctactctaaggcgagtaccccaaacggatacgataacggcatcatatgggctacctggaagacacgatggtatagcatgaagaagaccaccatgaaaattattccttttaaccggttgactattggcgaaggacagcaacaccacctcggcggagctaagcaggtacgccctgaacacccagccgagacagaatacgattccctctatcctgaagacgatctctag

SEQ ID NO: 4361 - DNA, 1314 bp, synthetic construct
  misc_feature 1..1314: note = source = /note="Description of Artificial Sequence: Synthetic coding sequence"
  source 1..1314: mol_type = other DNA
atgtcgtggagcctgcaccctcggaacctgatcctgtatttttatgcactgctgtttcttagttccacatgtgtggcttatgtcgccacccgagataactgctgcatcttagacgaacggtttggcagctattgtcccaccacatgtggaatcgcggacttcctctccacgtaccagacaaaggtcgacaaagatctccagtcattggaagacatactacatcaagttgaaaataagacgagtgaagtgaaacaattaattaaggccattcagctgacttacaacccagatgagtctagtaagcccaatatgatagacgcggctaccctgaagtcaaggaaaatgctagaggaaatcatgaagtacgaggcttcgatactaactcacgattcaagtatccggtatctgcaagagatttacaactcaaataatcagaaaattgtgaatctcaaggaaaaggttgctcagctggaggcacagtgccaggaaccgtgtaaagacaccgtacagatccacgacattacgggaaaagactgccaggatatcgcgaacaagggcgcaaagcaaagcgggctgtactttattaaaccacttaaggcaaatcagcaattcctggtgtattgcgaaatcgacggatcaggcaatgggtggacagtatttcagaagcggctggacggaagtgtggatttcaaaaaaaactggattcagtataaagaaggctttggacatctgagcccaacaggcaccactgagttttggctgggcaatgaaaagatccatctgatctcgacacagagcgctattccatatgccctgcgcgttgaactggaggactggaacggacgaactagtacggcagactatgccatgttcaaggttggccctgaggctgacaaatacaggcttacctacgcgtatttcgcgggtggagacgcaggcgacgcgtttgatggattcgatttcggcgatgaccccagtgacaaattcttcacgagccataatggaatgcaatttagtacttgggacaacgataacgacaagtttgaggggaactgtgcagaacaggacggcagtggctggtggatgaacaagtgtcacgccggtcaccttaatggggtatactatcagggcggaacctacagcaaggctagtacacctaatgggtatgataacgggataatctgggccacatggaagacaagatggtacagtatgaaaaaaactacaatgaaaataataccctttaatcgcctaaccatcggagagggacagcaacatcatctgggaggagccaagcaggccggagatgtctag

SEQ ID NO: 4362 - DNA, 2892 bp, synthetic construct
  misc_feature 1..2892: note = source = /note="Description of Artificial Sequence: Synthetic coding sequence"
  source 1..2892: mol_type = other DNA
atgttgagcggcgaacgcaaggaaggaggaagccctcgatttgggaagctgcacctgccggtgggtctctggattaacagcccgaggaagcagctggctaaactcggacgtcgctggccgtctgccgcttccgtgaagtcatcttcgagtgacacgggctccaggagtagcgagcctctgccacctcctccacctcacgtggagttgcgacgcgtgggcgcagtgaaagccgcaggaggcgctagtgggagccgtgcgaaaagaatctcacagttgtttaggggctcaggaaccggcacaaccggaagttccggcgcagggggacccggtaccccgggtggcgcacagcggtgggcaagcgagaagaagcttccagagctcgccgctggcgtggccccagaaccacctttggccacacgggctacagctcccccaggcgtcctcaaaattttcggtgcaggattggccagcggcgctaactacaagtctgtcttggcaacggccaggagtacagctcgcgagcttgtggctgaggcactcgaaaggtacggcctcgccggtagcccaggaggcggtccaggcgagtccagctgcgttgacgcatttgctctgtgcgacgccttgggcagaccagctgccgctggagtggggagtggtgagtggagggcggaacatctacgcgtgctgggtgattccgagcggccactgctggtccaggagctgtggcgggctcgcccaggctgggcaaggcgttttgaactcaggggcagagaggaagctagaaggcttgaacaggaggcgtttggagctgcagatagtgaaggaactggcgctccatcgtggcgaccacagaaaaatagatcccgggcagcgtctggaggtgcagcccttgcttcccccggaccgggaactggctctggtgctcctgctggatccgggggtaaagagagaagcgaaaacctgagcctccgcagatccgtctcggagctgagccttcagggacgacgcaggagacagcaggaaagacggcagcaggctctgagtatggccccaggcgcagctgacgcccagatcgggaccgccgatcccggagatttcgatcagctgactcagtgtctcatccaggccccttcgaaccgcccatactttcttcttctacagggttatcaagatgcacaagatttcgttgtgtatgtcatgacaagggagcagcacgtcttcgggcgtggtggaaacagctctggacggggtggctctccagccccatatgtagacacatttctcaacgccccagacatccttcctcggcactgtaccgtgagagccggacccgaacacccggcaatggtacggccaagtaggggtgcccctgttacacacaacggctgtctgcttcttcgagaggcagagctccatccaggcgatttacttggccttggcgagcacttcttattcatgtataaagatcccagaactgggggatctggacctgccagacctccctggttgcccgcacggcctggagctactcctcccggtcccggatgggcattcagttgtcggctgtgtgggagggggctacaggagcggggtgaagcccttgctgcctacctggacggccgtgaaccagttcttaggtttcgcccacgggaggaggaggctctgctgggtgagatcgtgcgggcagccgctgctggatctggcgatctacctcccctcggccctgcaactctcttggccctgtgcgtccagcacagcgcacgagaacttgaactagggcatcttcctcgtctcctcggccgacttgccagactgattaaagaggctgtatgggagaaaattaaggagataggtgatcgtcaaccagaaaaccatcctgaaggcgtgccggaggtgcccttaacccctgaagcagttagtgtcgagctcaggccacttatgctgtggatggccaatactaccgagctgctgagctttgttcaggaaaaagtgttagagatggaaaaggaagctgatcaagaagacccacagctgtgcaatgacttggagctctgtgatgaagctatggccctgcttgatgaagtcattatgtgcaccttccagcaaagcgtgtattacttaacaaagactctgtactcaacattgcctgcactgctggacagcaatcccttcacggctggggctgaactccctggcccaggtgccgagctgggggcaatgccacctggcctcaggcccaccctgggtgtgtttcaggcagcgctcgaattaacaagccagtgcgagctgcatcctgatctggtgagccaaactttcggctacctgtttttctttagcaacgcttcgcttctgaatagtttaatggagaggggacagggtcggccattctatcagtggtcaagagccgtacaaattcgtaccaacctggatttggtgttggattggcttcagggcgcaggactgggagacattgcgactgagtttttcaggaagctgagtatggccgtgaatcttctttgtgtccccagaacttcattattgaaggcctcttggtcttcactccgaaccgaccatccaacactcacacccgcacagctacaccatttactgagtcactaccagctgggacctggacgtggcccacctgccgcatgggatcccccaccggctgaacgggaagccgttgacacaggggacatttttgagtcattttcctcccatccgccactgattttgcccctgggtagtagtagacttcgactcactgggccagttactgatgatgccttgcacagagaactgcgaaggctgaggcggctgctgtgggatctggagcagcaggagctgccggcaaactatcgccacggaccgcctgttgccacctcaccatag

SEQ ID NO: 4363 - DNA, 630 bp, synthetic construct
  misc_feature 1..630: note = source = /note="Description of Artificial Sequence: Synthetic coding sequence"
  source 1..630: mol_type = other DNA
atggactctgacgaaaccggattcgagcacagcggactatgggtctctgtgctggcgggtcttctgctgggagcttgtcaggcccatccaatcccagattcctcacccctgctgcagtttggcggacaggtacgccagcgctatttgtatacggatgacgctcagcagactgaagcccatctggaaattagagaagacggaaccgtaggtggcgctgcagatcagagccccgaatctctgttgcaactgaaagcactgaagcctggcgtgattcagattctgggggtgaagacctctagatttctgtgtcaaaggcccgatggtgctttgtatggatctctgcatttcgacccggaggcctgtagtttccgcgagctgctcctggaagacggctataatgtttatcagagtgaagctcatggtctgccgctccaccttcccggtaacaaaagtccacatcgcgacccagcccctcgaggacccgctagattcctgcctcttcctggcctaccccctgccttgcccgaacctccaggaattctggcccctcagcccccagacgttggaagtagtgatccactgtccatggtcggtcccagtcagggacgctctccatcctacgcttcctag

SEQ ID NO: 4364 - DNA, 321 bp, synthetic construct
  misc_feature 1..321: note = source = /note="Description of Artificial Sequence: Synthetic coding sequence"
  source 1..321: mol_type = other DNA
atgttacgattcatccaggaggttaacactaccacccgttcctgtgccctgtgggatttggaagaagataccgagtacattgttcacgtgcaggctattagtatccagggccaatcacctgcttcagaaccagtgctgttcaagacccctcgagaggccgaaaaaatggcttccaagaacaaggacgaggtaacaatgaaggaaatgggcagaaatcagcaattaaggactggtgaggtgttaatcattgtggtggttctgttcatgtgggcaggggttattgctctattctgccggcagtacgacataattgaggcatag

SEQ ID NO: 4365 - DNA, 414 bp, synthetic construct
  misc_feature 1..414: note = source = /note="Description of Artificial Sequence: Synthetic coding sequence"
  source 1..414: mol_type = other DNA
atgcttagatttattcaggaggtcaacacaaccacaagatcttgtgcactctgggatctggaagaagacacagaatatatagtccacgtgcaggccatatctatccaggggcagtcgccagcaagtgaaccggtgctgtttaaaaccccccgtgaggccgaaaagatggcttccaaaaacaaagacgaagtgactatgaaggagatgggtaggaaccagcagttgcgaacaggggaggtgctgatcatcgtggtagtcctatttatgtgggcaggcgtgatcgccctgttctgcaggcagtacgatattatcaaagataatgaacctaacaacaacaaggaaaagaccaaatctgccagcgagacaagcacccccgagcatcaagggggtggcctgctgcggagcaagatttag

SEQ ID NO: 4366 - DNA, 390 bp, synthetic construct
  misc_feature 1..390: note = source = /note="Description of Artificial Sequence: Synthetic coding sequence"
  source 1..390: mol_type = other DNA
atgaaaaccttgcagtttttctttctgttctgttgctggaaggcaatctgttgtaactcttgtgagctcaccaacattactatcgccatcgagaaggaggagtgtcgattttgtatcagcatcaataccacatggtgcgcgggttactgctatacccgggaccttgtctataaagatcccgctcgacccaagattcagaaaacatgtactttcaaggagttggtatatgaaacagtgagggtgcccggttgtgcacaccatgccgacagcttatatacctatccggtagccacacagtgtcattgtggaaagtgtgactccgattctactgattgcactgttagggggctgggtccaagttactgctctttcggcgaaatgaaagagtag

SEQ ID NO: 4367 - DNA, 390 bp, synthetic construct
  misc_feature 1..390: note = source = /note="Description of Artificial Sequence: Synthetic coding sequence"
  source 1..390: mol_type = other DNA
atgaaaacacttcaattctttttcctgttctgttgctggaaagccatatgctgcaacagctgcgagctgaccaacatcactattgcaattgagaaagaggaatgcaggttctgtatatccattaatactacctggtgcgccggatactgttacacacgtgacctggtgtacaaagatcccgcaagacccaagattcagaaaacatgtacgttcaaggagctggtctatgaaacagtcagagtccctgggtgtgcccaccacgccgactctctctacacctacccagtggccactcaatgtcattgcggcaagtgcgatagtgatagcacagattgcacagtacggggtttggggccttcttactgcagctttggtgaaatgaaggagtag

SEQ ID NO: 4368 - DNA, 390 bp, synthetic construct
  misc_feature 1..390: note = source = /note="Description of Artificial Sequence: Synthetic coding sequence"
  source 1..390: mol_type = other DNA
atgaagacattgcaattcttctttctcttctgctgttggaaggcgatctgctgcaatagctgtgaactgacaaatattactattgcaatcgagaaagaagaatgtcggttctgcatatccatcaacaccacctggtgtgcgggatactgctatacccgtgacctggtgtacaaggatccagctcggccaaagatccagaaaacttgcacattcaaggaactggtgtatgagaccgtgcgggtccccggttgtgctcatcacgccgatagtctttatacctaccctgttgccacacaatgccactgtggaaaatgcgacagcgatagtaccgattgcactgttagaggcctgggaccaagttattgtagcttcggcgaaatgaaagagtag

SEQ ID NO: 4369 - DNA, 1260 bp, synthetic construct
  misc_feature 1..1260: note = source = /note="Description of Artificial Sequence: Synthetic coding sequence"
  source 1..1260: mol_type = other DNA
atgagttttattcccgtggctgaagacagtgactttcccatccataatctgccctatggcgttttctccacgcgaggagatcccagacctcgtatcggcgtcgccattggcgaccagatccttgatttgagcatcattaaacacttgttcaccggaccggtgctgagtaagcaccaagacgtgttcaaccagcctactcttaatagctttatgggactcggccaggctgcctggaaggaggctcgcgtatttctgcagaatctgctcagtgtgagccaggctcggctcagagatgataccgagctgcgaaaatgcgcctttataagccaggcctctgccaccatgcaccttcccgcaacgatcggggattatactgatttctactcctctaggcagcatgcaactaacgtcggtatcatgttcagagacaaggagaatgccttgatgccaaactggctgcacctgcccgttggctatcacggccgagcctccagcgtagtcgtatcagggacccccatcaggcgcccaatgggacaaatgaagcccgatgatagtaagcctcctgtgtatggcgcatgtaagctgctggacatggaacttgaaatggcattcttcgtgggccctggtaaccggctgggggagcctatccccatttctaaggcccatgaacacatatttggcatggtgttgatgaatgactggagtgccagggacatccagaaatgggagtatgtgcctttgggtccctttctgggaaagagcttcggaaccaccgtaagcccttgggtggttccaatggacgctctcatgccattcgcagtgcctaaccccaagcaggatcctaggcctctgccctacctgtgccatgacgaaccctacaccttcgatatcaacctttcagttaacctgaagggagaagggatgagtcaagccgctaccatctgtaagtctaactttaaatacatgtactggaccatgctccagcaactgacgcatcacagtgtgaatgggtgcaatctcaggcctggcgatctactcgcctcaggaaccatttctggacctgagcctgagaacttcggctcaatgttggaactcagttggaaaggaacgaaacccattgatcttggcaacggacagactcggaagttcctgctcgacggggatgaggtgattatcaccgggtattgccaaggcgatggctatcggattggttttgggcaatgtgccggtaaagtgctgcccgcactgctaccttcttag

SEQ ID NO: 4370 - DNA, 1260 bp, synthetic construct
  misc_feature 1..1260: note = source = /note="Description of Artificial Sequence: Synthetic coding sequence"
  source 1..1260: mol_type = other DNA
atgagtttcatccccgtcgccgaggattctgattttccaatccataatctgccgtacggggtattttcaaccagaggcgacccccgtccacgaattggcgttgcaatcggagatcagattctcgacttatccattatcaagcacctgttcaccggcccagttctgtctaaacaccaagacgtcttcaatcagcccacactcaattcctttatggggctgggccaggctgcttggaaagaggcccgagtgtttctgcaaaatctgctaagcgtgagccaggccagactgcgagacgacactgagctgagaaaatgtgcatttattagtcaagcgagcgctacgatgcacctccccgcaaccattggggactatactgacttctactcgtctaggcaacacgccaccaacgttgggattatgttccgtgacaaagaaaatgcccttatgcctaattggctccacctgccagtgggatatcatggcagagcatcaagcgttgtggtatcaggaactcctatcagacggcctatgggccagatgaaaccagacgactctaaaccgccagtttacggtgcttgtaaattgctcgatatggagttagagatggctttcttcgtagggccaggcaacagacttggagagcctatccctatcagtaaagcccatgaacatatctttggtatggtgttgatgaatgactggtcagcccgagacattcagaagtgggaatacgtgcctcttggcccattccttggcaagagttttgggactaccgtgagcccttgggttgtgcccatggacgctctgatgccgtttgctgtgcccaaccctaagcaggacccacgccctctaccctatctgtgccatgacgaaccatacacttttgacattaacctgtcagtcaatttgaagggagaaggcatgagtcaagcagcaacaatttgtaagagtaatttcaagtacatgtactggaccatgctccagcagctcacccatcattctgtgaatgggtgcaaccttcgcccaggcgatctgctcgctagcggaacaattagcgggcctgagcctgaaaacttcggctccatgctcgagcttagctggaaggggactaagcccatcgacttaggcaacgggcaaacccgcaagtttctgcttgatggggatgaagtgattattacgggttactgccaaggcgacgggtataggatcggattcgggcaatgtgccggaaaggtgctacctgctttactcccatcatag

SEQ ID NO: 4371 - DNA, 1260 bp, synthetic construct
  misc_feature 1..1260: note = source = /note="Description of Artificial Sequence: Synthetic coding sequence"
  source 1..1260: mol_type = other DNA
atgtccttcatacctgtcgcagaggacagcgactttcccatccacaatcttccttacggagtcttctctaccaggggagacccaagaccccgaattggcgtcgccataggagaccagatcttagacttgagcatcatcaagcacttatttactggtccagttctttccaaacatcaggacgtctttaaccaaccaactcttaacagcttcatgggactgggtcaagccgcatggaaggaagcacgggtcttcttacagaacctactgtctgttagccaagctcggctcagggacgacactgaattgaggaagtgcgcattcataagtcaggcctcggctactatgcacctccctgcaaccattggggactacactgacttctattcctctaggcaacacgccacaaatgtgggaatcatgttcagagacaaggaaaacgccctgatgcctaattggcttcacctgcctgtgggttatcatggcagggcatccagcgtggtggtcagtggtaccccgattagacggccaatggggcagatgaagcccgatgacagcaagcccccagtatatggagcatgtaaactgctggatatggaacttgaaatggccttttttgtgggtccgggaaacaggttaggcgaacctatacccattagtaaggctcatgaacatatcttcgggatggtgctgatgaatgactggtcggccagggatattcagaaatgggagtatgtaccgctcgggcctttccttggaaaatcattcggaacaacagtctccccttgggtcgtccccatggatgccctgatgccgtttgccgtccccaatcctaaacaggatccgaggcctctaccttacttatgtcatgacgaaccatacacgttcgacatcaatctgagtgtgaacttgaagggcgaagggatgtcccaggccgcaaccatctgcaagtcaaactttaagtacatgtactggaccatgctacagcagctcacccaccactccgtcaatggctgtaacctgagaccaggggacttgctggcgagcggcacaatcagcggccctgagcccgagaatttcggttccatgctagagctgtcctggaaaggaactaaacccatcgacctgggcaacggccagacacgaaaattcctgctcgacggggatgaggttattataactgggtattgtcagggcgacggctaccggataggctttggacaatgcgctggcaaggtcctgccagcccttctgccttcatag

SEQ ID NO: 4372 - DNA, 759 bp, synthetic construct
  misc_feature 1..759: note = source = /note="Description of Artificial Sequence: Synthetic coding sequence"
  source 1..759: mol_type = other DNA
atggaggcgatgtggctgctgtgcgttgctctcgcggtgctcgcctggggatttctctgggtctgggacagctcagagcgcatgaagtcacgcgagcagggagggaggttaggtgctgagagcagaacattgctagtcatcgcacaccctgatgatgaagctatgtttttcgccccaactgtgctcggcttagctagactgcgacactgggtttatctgctctgcttttccgctggcaactactacaatcaaggagagaccagaaaaaaagaactgctgcaatcttgtgacgtgttgggaatccctctatcttctgtcatgatcattgacaaccgggactttcccgatgacccaggaatgcagtgggacacagagcacgtggcgcgagtgctgctgcagcacattgaagtgaatggtatcaacctggtggtcacatttgacgctggaggcgtgagcggccacagcaaccatattgcactttacgcggctgtgcgggcactccactccgagggaaaactcccgaagggctgctcagtgctaactctccaatcggtaaacgtactaaggaagtacatctcactcctagatctccctctgagcctcctgcacactcaggacgtgctctttgtccttaactctaaggaagttgcccaggcaaaaaaggctatgtcctgtcacaggagccagctgttgtggttccgcagattgtatatcatcttttccaggtatatgcggatcaactccctgtcgtttctctag

SEQ ID NO: 4373 - DNA, 1203 bp, synthetic construct
  misc_feature 1..1203: note = source = /note="Description of Artificial Sequence: Synthetic coding sequence"
  source 1..1203: mol_type = other DNA
atggcagccctccgtcaacctcaagtagccgaactactcgctgaggcaaggcgggcattccgcgaagagttcggcgctgagcctgagttggctgtgtctgcccctgggcgagtcaatttgataggagaacacaccgactacaatcagggccttgtccttcccatgcgggatcgactcttcccaaccctggaaggccgaaagagggggtctggccgtgagagagtgaggggacggcttctcgcgcaggctcgccctcttggagccggagctcccaggcttcagccagggtccatgttcccactgaattgcgaggcactgtgcgcaacgcagaaggggacgcttcgggcaagcggacacagaggggcaccgacagcagacctgggagagcgcagtttactggcccagcccgtccaatttacggaggaggagactggaggcgctttcagacctatctgtagcctaggctcggctcaggcctcctcccctccatgtccaacagcgcaaggcagggtgcaagacggtttggtgtccctgctcaccaccagcgagggggctgatgagccccagagactgcagttcccattacccacagctcagcggtctttggaacccggaactcccaggtgggccaactacgttaagggggtaatccaatactacccagccgcaccactgcctggcttttccgctgttgtggtatcatccgtccctctcgggggaggtttaagttcatcggcaagcctggaagtcgccacttacacatttttgcagcagctttgtccagactcaggtacaatcgctgcgagagcccaagtgtgccagcaagcggaacactccttcgctgggatgccctgcggtatcatggatcagtttatatctctgatggggcaaaaggggcatgctctcctcattgactgccggagtctggaaacatcattagtgccgcttagcgatcctaaactcgctgtgcttatcacaaactccaacgttcgtcatagcctggcctccagcgagtacccagtgagaagacgtcagtgtgaagaggtagctcgtgcccttggcaaggagtcgctccgggaagtgcagttagaggaactggaggcagctagggaccttgtgtcaaaagaaggctttaggcgggctcgtcacgtagtgggcgagatccgccgtactgccgatggcgctaaggtcctctgtttgtag

SEQ ID NO: 4374 - DNA, 1269 bp, synthetic construct
  misc_feature 1..1269: note = source = /note="Description of Artificial Sequence: Synthetic coding sequence"
  source 1..1269: mol_type = other DNA
atgtgtgccccaccacgcggtgccccaccagagcacccggctcctactggcctgtgtaggtcctcttgtgccgagctgcaagccagagtcatggccgctcttcggcagccccaggttgctgaactgcttgccgaagccaggcgggcttttagagaagaattcggcgctgagccggagttggctgtttcagcccctggtcgtgtaaatctgattggagagcatacagattataaccagggattggtactccctatggccctagaattgatgacagtcttggtggggtctcccagaaaggacgggctggtgagtctcctcacaacaagcgaaggagcagacgaaccacaacggctccagtttccattgcctaccgctcagaggtctctggagcctgggactccacgctgggctaactacgtcaaaggcgtaattcagtattatccagctgctccactacctggtttttccgcagtggtcgtgtcctcagttcctcttggcggtggtctttcttctagcgcttcactggaagtcgcgacctacacatttttgcagcagctgtgcccagacagtgggaccatcgctgcacgcgctcaagtctgtcagcaggctgaacactcatttgcaggaatgccttgtggaatcatggaccagtttatttcgctcatgggccaaaaaggccacgcccttctcattgattgtcgaagcctcgaaacgagtttggttccgctctctgatccaaagttggccgtgttaatcaccaacagtaatgttaggcacagcctggctagttcagagtatcctgtacgcagacgacagtgtgaggaagtggcccgagcactcggaaaggaatcccttcgcgaggtgcagctggaagagttggaggcagctagagacctggtctctaaagaaggcttccgacgtgccaggcacgtggttggtgagatccggaggactgctcaggccgcagccgctttacggcgtggagattacagagcatttggtcgactgatggtggagtcccacagatccctgcgcgacgactatgaagtgtcctgccccgaacttgaccagttagtggaggccgcactggctgtccccggagtctacgggtcccgtatgacaggagggggattcggcggttgcaccgtgactctcctggaggcttctgctgcaccccatgctatgcgacatattcaggaacactacgggggaactgccacattctatctgagtcaggccgcagatggtgccaaggtgctgtgcctgtag

SEQ ID NO: 4375 - DNA, 1179 bp, synthetic construct
  misc_feature 1..1179: note = source = /note="Description of Artificial Sequence: Synthetic coding sequence"
  source 1..1179: mol_type = other DNA
atggctgctctcagacagccacaggttgcggagctcctggcagaggctcggcgtgccttccgggaagagttcggggcagagcctgaactagcggtgagcgctcccggaagagtgaacctgatcggagaacatactgattacaatcaaggcctagtgctgccgatggcacttgagctgatgaccgttttggtgggcagccctagaaaagatggacttgtttcactgttgaccacatccgaaggcgctgatgagccccaacgcctgcaatttccccttcctacagctcagaggagtctggagcctgggaccccacgctgggcaaattacgtgaaaggagtgatccagtattaccccgctgctccacttcctgggttcagtgcggtggttgtatcaagtgtgccactaggcggtggcctgtccagctctgcctcattagaagtggctacctataccttcttacagcagttatgccccgatagtggcacaatcgcggctcgggcacaggtgtgccagcaggctgagcactccttcgccggtatgccctgcggcatcatggaccagttcattagtttgatgggacagaaaggacatgcactgttgatcgattgccgatcactggagacctccctcgtcccactgtccgaccccaagcttgcagtgcttataaccaactccaatgttcggcacagtttggctagtagtgagtatcccgtccgaagacgtcagtgtgaagaggtggcgagagccctcggcaaagaatcactgagggaggtgcagctcgaagagctcgaggctgctcgggacctggtcagtaaggaaggctttcgcagggctcgacatgttgtcggtgagatccggaggacagcacaagctgcagccgcactcagacgaggcgactacagggccttcggcaggctgatggtggagtcccatcggagccttcgcgacgattatgaggtcagctgccccgaactcgaccaactagtcgaggctgcattagcagtacctggggtgtacggctctaggatgactggcggaggatttggtggatgtacagtgacactcttggaagccagcgctgcacctcacgccatgcgccacatccaggagcactacggaggcactgccacattctacctcagtcaggccgcagatggcgcaaaagtgctctgtctgtag

SEQ ID NO: 4376 - DNA, 1569 bp, synthetic construct
  misc_feature 1..1569: note = source = /note="Description of Artificial Sequence: Synthetic coding sequence"
  source 1..1569: mol_type = other DNA
atggcagcagtggtggctgctacgcggtggtggcaactgctgctagtgctgtcggccgctgggatgggggctagcggcgctcctcagccacctaatatcctgttactgctaatggacgacatgggatggggtgatctcggagtgtatggggaaccgagcagggaaacccctaacctcgacagaatggcagctgagggcctgttattccctaatttctatagcgccaatcctctctgcagtccctcaagggccgcattactgaccggacgtctgcctatccgtaacgggttttataccacgaatgcccatgccaggaacgcatatactccccaggagatcgtggggggaatacccgacagtgagcagctgttaccagagcttctgaagaaagcgggttacgtgtccaagatcgtcgggaaatggcatctgggtcacagaccccagtttcatccactgaagcatggatttgacgaatggtttgggtcaccaaattgccattttggcccttacgacaataaagcccgtcctaacatacccgtgtaccgggactgggagatggtcggtaggtactatgaagaatttcctattaaccttaagactggggaggccaacttgacacagatttatctgcaagaggcactcgatttcattaagaggcaagctaggcatcacccattcttcctgtactgggctgtggacgcaactcatgcacccgtctacgctagcaagcccttcctaggtacttcacagagaggaaggtatggcgatgcagtgagggaaatcgatgacagtattggaaagattttggaacttctgcaagatctgcatgtggcagacaacactttcgtgtttttcacatccgacaacggcgcagctttgatctccgctcccgagcagggcggtagcaacgggccttttctgtgcggaaaacagactactttcgagggcggaatgcgcgagcctgcgttagcatggtggcccggtcacgtgaccgcaggccaggtatcccaccagctgggctctatcatggaccttttcaccacgtccctggctctggctggactgactcccccaagcgatagggccattgacggtctcaacttgctgccaacacttttgcagggcagactgatggatcggcctatcttctactataggggtgatacattgatggccgctactctgggtcaacacaaggcacatttttggacatggactaattcgtgggaaaattttagacaagggattgatttttgtcccggacagaatgtctcaggagtcactacccataatctggaagatcacaccaaattgccactgatatttcatctcggccgagatcccggagagcgattcccactgtcatttgcttctgcggagtaccaggaggcactgtcaagaatcaccagcgtcgtgcagcagcaccaggaggctctggttccggcacaaccgcaacttaatgtttgtaattgggcagtcatgaactgggctccccctggctgtgagaagctcgggaaatgtctgacgccacccgaatctatacctaagaagtgcctatggagtcattag

SEQ ID NO: 4377 - DNA, 261 bp, synthetic construct
  misc_feature 1..261: note = source = /note="Description of Artificial Sequence: Synthetic coding sequence"
  source 1..261: mol_type = other DNA
atggctgcagtggtggccgcaactcgctggtggcagctcctgctggtgctgagcgccgcaggcatgggggctagcggagcaccacaaccacccaacattctgctgctgctaatggatgaccggggtcgccattgtagccaggatggttatcccagcgctatggcctctaccccacctacgcccatgccggaaacgcctactcacaggagaagactttgggctgcctcacaaacaagaagttccagttgccggtcattttag

SEQ ID NO: 4378 - DNA, 1344 bp, synthetic construct
  misc_feature 1..1344: note = source = /note="Description of Artificial Sequence: Synthetic coding sequence"
  source 1..1344: mol_type = other DNA
atggccgctgtcgtagcagcaacgagatggtggcagctcctgctggtgctgtccgccgctgggatgggggctagcggcgctcccggacagcgagcgtacacccctcaagaaattgtcggtggcatacctgacagcgagcagcttctaccagagttactcaagaaggccggatacgttagcaaaattgtaggaaaatggcacctcggtcatcgcccacagttccatcctctgaagcatggctttgacgaatggttcggctcaccaaactgtcatttcggcccatacgacaataaggccaggcccaatattcctgtgtaccgtgattgggagatggtcggccgttactatgaggaattccccattaacttaaaaaccggagaagccaatttaacacagatttacctccaggaagcactcgacttcatcaaaaggcaggctcggcatcacccattttttctgtactgggccgttgacgctactcatgcccctgtgtatgccagcaaaccatttctcggaacctcccaaaggggccgttatggagatgcggtgcgggagattgacgattctattggaaaaatattggaactgcttcaggacctgcacgtggccgataatactttcgtgtttttcacctcagataatggcgctgcccttatttccgctcccgaacagggcggttcaaatggcccattcctttgtgggaaacagactacttttgagggcggtatgagggagccagcattagcttggtggcctggtcatgtgacagccggtcaggttagtcaccagcttggctccatcatggatcttttcactacttctctggctctggccggacttacaccaccctccgacagggccattgacggtctgaatctgttacctacactgcttcagggaaggttaatggataggcccattttctattataggggagacaccctgatggcagctacgctgggtcaacacaaagctcatttctggacctggaccaacagttgggagaatttcaggcaggggattgatttttgcccgggtcaaaacgtgagcggtgttacaacacacaatctggaggaccacaccaagcttcctcttatcttccatttgggcagagatccaggggagcgcttccctctgtccttcgcaagcgccgaatatcaggaagccctgtctaggatcaccagcgtagtgcagcaacatcaggaggcgcttgtgcctgcacaacctcagctgaacgtttgcaattgggcagtgatgaattgggcacctcctggttgcgagaaactcggaaagtgtctgacgccgcctgagtctatccccaaaaaatgcctctggtctcactag

SEQ ID NO: 4379 - DNA, 1140 bp, synthetic construct
  misc_feature 1..1140: note = source = /note="Description of Artificial Sequence: Synthetic coding sequence"
  source 1..1140: mol_type = other DNA
atgagcaggtccggcaccgacccccagcagaggcaacaagcttctgaggctgatgccgcagccgctacattccgagccaacgatcaccagcatatccgttataatccccttcaagatgaatgggttctggtatcagctcaccggatgaagcggccttggcagggccaagtcgagcctcagctcctcaaaacagtgcctcgtcacgacccccttaatcccctttgccccggagcgatacgggctaatggggaagtaaatcctcagtatgactccacatttcttttcgataatgattttcccgcacttcagcctgacgccccttcaccaggaccatccgaccatcctctgtttcaagccaagagtgctcggggtgtgtgtaaggttatgtgcttccatccttggtctgacgtgaccctccccttgatgtctgtgccagaaataagagcagtagtcgacgcctgggctagtgtgacggaagaacttggtgcacagtatccttgggttcagatttttgaaaataaaggcgcaatgatggggtgtagcaatccacacccccactgtcaggtttgggcctctagtttcctgcctgacatcgcccagagagaggagcgaagtcagcaggcctacaagtcgcaacacggtgaaccactccttatggaatatagtcgccaggagctgctcaggaaggagcgcctggtccttactagtgaacactggctggtcctcgtgccattttgggcaacatggccgtaccaaacgctgctgctgccaagacgccatgtgaggcgcctacctgaactcacacctgcagagcgggatgatctcgccagcatcatgaagaaattgctgaccaaatacgataacctttttgagacaagcttcccatattcaatgggttggcacggtgcccctactggaagcgaggcaggagccaattggaaccactggcagctgcatgctcactactatcctccactgttgaggtcagctactgtcagaaagttcatggtggggtacgaaatgctcgctcaggcccaaagggacctgacccctgagcaggcagccgagaggttgagggcattaccggaggttcactaccatttaggccagaaggaccgtgaaactgccactatcgcttag

SEQ ID NO: 4380 - DNA, 813 bp, synthetic construct
  misc_feature 1..813: note = source = /note="Description of Artificial Sequence: Synthetic coding sequence"
  source 1..813: mol_type = other DNA
atgacactctcaactctttgcgtactggggccaagtgaacccaccgagtcaaaggtaatgtgctttcatccgtggtctgacgtgactctccctctgatgagcgttccagagatccgagctgttgttgacgcgtgggcttcagtcaccgaagagctcggcgcacagtatccctgggtccagatattcgagaacaaaggtgccatgatgggatgttctaacccccacccgcattgccaagtgtgggcctctagtttcttaccggacatcgcccagcgggaagaaagatctcagcaggcatacaagagtcagcatggagagcctctgttaatggagtactcaagacaagagttactcaggaaagaaagactcgtactgacttcagaacattggctagtgttggtgcccttctgggctacctggccctatcagactctactcctgcccagaagacacgtgcgacgacttcccgagttgacacctgctgaacgcgacgatctcgccagcatcatgaaaaaactgctgacaaagtacgataatctgttcgaaacaagctttccctactccatgggttggcacggggctcccactgggtccgaggctggagccaattggaaccattggcaattacatgctcactattaccccccactgctgcggagcgcaaccgtacgaaagttcatggtgggatacgagatgctggcacaagcgcaacgggatcttacccccgaacaagcagctgagcgtctcagagccttgccggaggtccactaccacctcgggcaaaaggaccgcgagacggcaaccattgcttag

SEQ ID NO: 4381 - DNA, 255 bp, synthetic construct
  misc_feature 1..255: note = source = /note="Description of Artificial Sequence: Synthetic coding sequence"
  source 1..255: mol_type = other DNA
atgagcaggagcggaaccgatccccagcagagacagcaggcttcagaagcagacgctgctgcggcaacattcagggccaatgaccaccaacacattcgctataaccccttgcaggacgagtgggtgcttgtgtcagcgcacaggatgaagcggccatggcagggacaggtggagccccagcttctcaagacagtcccaaggcacgatccgctcaaccccctctgtcccggtgctatcagggccaacggagagtag

SEQ ID NO: 4382 - DNA, 2229 bp, synthetic construct
  misc_feature 1..2229: note = source = /note="Description of Artificial Sequence: Synthetic coding sequence"
  source 1..2229: mol_type = other DNA
atgagccctcagaaacgagtgaagaatgtccaagctcagaaccgcacatcccagggcagtagttccttccagaccaccctttctgcctggaaagtcaagcaggatccctcgaatagcaagaatatcagtaaacacggccagaacaaccccgttggagactacgaacatgcagatgatcaggcagaggaggatgcgctacaaatggcagtgggatatttcgaaaaaggcccaatcaaagcttcgcaaaataaggacaaaacactcgaaaaacacttgaaaaccgtcgaaaatgtagcctggaagaatggattggcttccgaagagatcgatatcttgctgaacattgccctctccggcaagtttggaaatgccgttaacacccgcatactcaagtgcatgatccccgctacagtgatttccgaggattcggtggtgaaagccgtttcatggctgtgcgttggcaagtgttcaggtagcacgaaggtactgttctatagatggttagtggcaatgtttgattttattgacaggaaggaacagatcaacctcctttatggcttctttttcgctagtctgcaggacgacgcactgtgcccttacgtgtgccatctactgtatttactgacaaagaaagagaacgtcaaacccttcagagtccggaaactcctcgatctacaagctaaaatggggatgcagccccatctccaggcactgctgagtttatataaatttttcgcaccggctttgatctcggtctcccttccagtgcgaaagaagatttacttcaaaaactctgagaatctctggaagaccgcacttcttgccgtaaaacaaagaaaccgtggcccatctcccgaaccactgaaacttatgctgggtcccgcaaatgtgcgacctctcaaaaggaaatggaactcgctcagcgtcatcccagtcctaaacagttcatcgtacacaaaggaatgcggaaagaaggaaatgtcacttagcgattgcctcaaccgcagtgggtcgtttccactggagcagctgcagagttttccgcagctgttacaaaatattcattgtctcgagctccctagccagatgggtagcgtgctgaataattctctgcttctgcattacattaactgcgtgagagacgaaccagtgttactgcggttctactactggctgtctcaaacacttcaagaagagtgcatttggtacaaagtgaataactatgaacacggtaaggaattcaccaatttcctagacaccataatccgtgcagagtgctttctgcaggaaggcttttacagttgcgaagctttcttgtacaagtcattacccttgtgggacggcctttgttgcaggagccagttcctccagctggtcagttggatacccttttcttctttctccgaggtgaagcccctgctcttcgaccacttagcacagctcttcttcacttccactatctacttcaagtgttccgtgttacagtctcttaaagaattgctgcaaaattggctcttatggctgagcatggatatccacatgaagcccgtgaccaattctcccttggagaccacacttggtgggagtatgaactctgtgtccaaattgatccattacgtgggttggctaagcaccacagcaatgagacttgagtcaaacaatacttttctgctgcactttatattggatttctacgagaaagtgtgcgacatctacattaactataatctcccgctggtagtgttgttccccccaggaattttctactctgccctgctatctctagatacttccatactaaatcaattatgtttcatcatgcaccgctacaggaagaacctcactgctgccaaaaaaaacgaattagtgcagaagacaaagtctgagttcaacttctctagcaagacctatcaagaatttaatcactaccttacttctatggtcggatgtctttggacaagtaagcccttcggtaaaggcatttacatcgacccagaaattctcgaaaagacaggagtggccgaatacaagaactccctaaatgttgtccaccatccatccttcttgagctatgcagtatcgtttctgcttcaggggaaaaagtggtcctggtaccttgactacttgtttagccaagggctacaggggttgaagctgttcattaggagctccgttcatcactcctccattccacgtgctgagggtatcaactgcaataaccaatactag

SEQ ID NO: 4383 - DNA, 636 bp, synthetic construct
  misc_feature 1..636: note = source = /note="Description of Artificial Sequence: Synthetic coding sequence"
  source 1..636: mol_type = other DNA
atgaagttgtgggatgtagtggccgtgtgtctagtcttattgcacactgccagcgcattccctcttcccgcagggaagcggccacctgaagcccctgcggaggatcggtccttgggacgacgcagggcgcctttcgccttgtcgtcagattctaatatgcccgaagactacccagaccagttcgatgacgtcatggatttcatccaagcaaccatcaagcgcctgaagcgttcccctgacaaacaaatggctgtgctcccaaggcgggagcgtaatcgtcaggctgccgcagctaaccccgaaaacagtagggggaagggaagaagaggccaaagaggaaagaaccgcggatgtgtactgactgcaattcacctcaacgtgaccgatctggggttgggatatgagacaaaggaggagttaatctttagatactgctcaggttcgtgtgatgctgctgagactacttacgataaaatcttgaagaatctgagtcggaaccgcagattagtaagcgataaagtgggccaggcgtgttgccggcctattgcatttgacgatgacctgtccttcttggacgataacctcgtctaccacatcctgcgcaaacacagcgctaagagatgtggctgtatctag

SEQ ID NO: 4384 - DNA, 558 bp, synthetic construct
  misc_feature 1..558: note = source = /note="Description of Artificial Sequence: Synthetic coding sequence"
  source 1..558: mol_type = other DNA
atgaaactttgggacgtggtcgcagtctgtttagtgcttctccatacagcatctgcgttcccactgcctgcagccaatatgcccgaggattatcctgaccagtttgacgatgtaatggactttattcaggccaccatcaagcgtctgaagcgaagtcctgataaacagatggcagtcctacctcgtagagagcgcaatagacaggctgcggctgccaatcccgagaactctaggggaaaaggcaggcggggacagcgaggaaaaaaccggggatgtgtgcttaccgccatccacctgaacgtaactgatcttggactggggtatgagacaaaagaggagctgatttttaggtactgctctgggtcgtgcgatgccgctgaaacaacctatgacaagatcctaaagaacttatcccgtaaccgcagactcgtaagtgacaaggtgggccaggcttgttgtcggccaatcgccttcgatgacgacctgagtttcctcgacgacaacctggtgtaccacattctgagaaaacacagcgctaagagatgcgggtgcatttag

SEQ ID NO: 4385 - DNA, 687 bp, synthetic construct
  misc_feature 1..687: note = source = /note="Description of Artificial Sequence: Synthetic coding sequence"
  source 1..687: mol_type = other DNA
atgcaaagtcttcccaactcgaatggcgctgctgctgggcgagactttaagatgaaactgtgggacgtggtggcagtttgcctggtgctgctccatactgcgagcgcctttcccctcccagccggaaagagaccaccggaagccccagctgaggatcgatccttggggcgtcgccgtgcgccatttgcgctgtcttcagattctaacatgcccgaggactaccccgaccagttcgatgacgtcatggattttatacaggccactatcaaacggctgaagcgttctccagataaacagatggccgttctccctaggcgcgagcgaaacagacaggcagcagcagccaatccggagaactcaaggggcaagggcaggcgcggacagcgtggaaaaaaccgcggatgtgttttaaccgccatccacttgaacgttaccgaccttggcttggggtatgagacaaaggaggagcttattttccggtactgttccgggtcttgcgacgccgcagaaaccacgtatgacaagattttgaagaacctcagccgcaatagaagactggtgagcgataaggtggggcaggcctgttgcaggcccattgcattcgacgacgacctcagctttctggacgataatctggtataccatattcttaggaagcattccgcaaaaagatgtggctgtatttag

SEQ ID NO: 4386 - DNA, 186 bp, synthetic construct
  misc_feature 1..186: note = source = /note="Description of Artificial Sequence: Synthetic coding sequence"
  source 1..186: mol_type = other DNA
atgaaactttgggacgtcgtcgcggtgtgcctggttctgttgcacaccgcttccgcctttcccctgcctgccgcaaacatgcccgaggactatcctgaccaattcgacgatgtaatggatttcatacaggccactatcaaacgtcttaagcggagccccgacaagcagatggcagtcctaccctag

SEQ ID NO: 4387 - DNA, 186 bp, synthetic construct
  misc_feature 1..186: note = source = /note="Description of Artificial Sequence: Synthetic coding sequence"
  source 1..186: mol_type = other DNA
atgaaactttgggacgtggtcgccgtgtgtctggtgctgttacatactgcttctgctttcccgctgccggctgctaacatgcccgaggattaccccgaccaattcgacgatgtgatggattttatacaggcaaccattaaaagactgaagcggtcccccgacaagcagatggctgtgctcccctag

SEQ ID NO: 4388 - DNA, 558 bp, synthetic construct
  misc_feature 1..558: note = source = /note="Description of Artificial Sequence: Synthetic coding sequence"
  source 1..558: mol_type = other DNA
atgaagctatgggatgtcgtcgccgtgtgtctcgtgctgctccacactgcgagcgctttccctcttcccgcagcaaacatgccagaggactaccccgatcagttcgatgacgtgatggacttcatccaggccacaatcaaaagactcaagcgctcaccagacaaacagatggccgtcctgccgcgacgggagaggaataggcaggcagctgctgctaacccagagaactccagaggtaaggggagacgtggccagaggggtaagaatagagggtgtgtgctgactgcaatccacttgaacgtgacggatttgggcctgggctatgaaactaaggaagagctcatttttagatactgtagtggatcctgcgatgctgcagagactacgtacgacaaaattttgaaaaacctctctcgtaacagacggcttgtttctgataaggtcggtcaggcttgctgtcgacccattgctttcgatgacgatctctcattcttggatgacaatctcgtctaccatatcctgcggaaacatagcgccaaaaggtgtggctgcatctag

SEQ ID NO: 4389 - DNA, 609 bp, synthetic construct
  misc_feature 1..609: note = source = /note="Description of Artificial Sequence: Synthetic coding sequence"
  source 1..609: mol_type = other DNA
atgcaatccttgccaaactccaatggcgctgccgctggacgagacttcaaaatgaagctgtgggacgtagttgccgtctgcctggtcctgctgcatacggcctcggcatttcccctgcccgctgccaacatgcctgaagactatcctgatcagttcgatgacgttatggacttcattcaagctacaattaaaagattgaagagatcccccgacaaacagatggccgtgctgcccagacgcgagcgaaaccggcaggccgcagccgcaaaccccgagaatagtaggggtaagggacgacggggtcagagaggtaagaaccgtggctgtgttctgaccgcaatacatttgaatgtgactgatctgggactaggctatgagactaaagaagagttgatcttccggtattgtagcggttcttgtgatgccgctgagaccacttacgacaagatcttgaaaaatctttcacggaaccgaagacttgtcagcgacaaggtgggacaggcgtgctgccgcccaatagcttttgacgatgatctgtcttttctagatgataacctagtttatcatatactccgcaagcattctgcgaagcgttgtggatgtatctag

SEQ ID NO: 4390 - DNA, 543 bp, synthetic construct
  misc_feature 1..543: note = source = /note="Description of Artificial Sequence: Synthetic coding sequence"
  source 1..543: mol_type = other DNA
atgaaatcaatttacttcgtggccggtctttttgtgatgttggttcagggaagttggcagagaagcctccaagacaccgaggagaagagcaggtcctttagtgcatctcaggctgatccactgtccgaccctgaccaaatgaacgaagacaagaggcactctcagggtaccttcactagtgattactctaagtacttagactctcgccgagcgcaggatttcgtgcagtggttaatgaacactaagagaaatcgaaacaatatcgctaaacggcatgacgagttcgagcgccacgccgaagggacgtttacttcagacgtttccagctacttggagggacaggccgctaaggagttcatcgcgtggctggtcaaagggcgaggtagaagggacttccccgaagaggtggcgattgttgaagagcttggcaggcgtcatgcagatggctccttcagcgatgaaatgaacaccatcctggataatttggctgcacgagactttatcaactggctgatccagacaaaaatcaccgatcgaaagtag

SEQ ID NO: 4391 - DNA, 543 bp, synthetic construct
  misc_feature 1..543: note = source = /note="Description of Artificial Sequence: Synthetic coding sequence"
  source 1..543: mol_type = other DNA
atgaagtcgatttacttcgtggccggtctcttcgtgatgcttgtccagggttcctggcagagatcgctgcaggacaccgaagagaaatctcggtctttttctgcttctcaagccgaccccctgtccgaccctgatcaaatgaacgaagataagaggcactctcagggcacttttactagtgattactctaaatacctggatagcaggagggcccaggattttgtccaatggctgatgaacaccaaaaggaacagaaacaatatcgcaaaaagacatgatgaattcgaaaggcacgcagagggcacattcacctccgacgtaagctcttacctggagggccaagccgcaaaggaattcatcgcctggcttgtgaagggcaggggaagacgcgactttccagaggaggtggcaattgtagaggaactgggtaggaggcacgctgatggatctttctccgacgaaatgaacacaatccttgacaatctagcagcgagggattttattaactggctgattcaaacaaaaattactgatcggaagtag

SEQ ID NO: 4392 - DNA, 2262 bp, synthetic construct
  misc_feature 1..2262: note = source = /note="Description of Artificial Sequence: Synthetic coding sequence"
  source 1..2262: mol_type = other DNA
cgcgcacctgatcggagaggctctccaaggcttgcatccaccagactaggcgctcttaggctgcggccaagccgacgcgtgcccgctcgtgcgccagctcccgcacaagcccctctgccacttggacctaggttactggggttgcggaggaacatggctgcacccatgacccctgctgcacggcctgaagattatgaggctgcactgaatgcagccttagccgatgtccccgagctagcccgtctcttagagattgatccctacctgaagccctatgctgtggacttccagagacgttacaagcagttcagccaaatcctgaaaaacattggcgagaatgagggaggtattgacaagtttagcaggggctacgagtccttcggagtgcatcggtgtgccgacggaggcctgtactgcaaagaatgggcgccaggagccgagggcgtattcttaaccggggacttcaatggctggaaccccttctcatacccctacaagaagctagactacggcaaatgggagctgtatataccccctaaacagaataagtctgtgttagtgccacatggcagcaagctgaaagtggttatcacgtccaagagtggcgaaatcttgtaccgcataagtccttgggcgaagtacgtggtcagggagggggacaacgtgaattatgattggattcactgggatcccgaacactcgtatgaattcaagcatagtcggccaaagaagccacgtagtttacggatttatgaatcccacgtcgggatttcttctcatgaggggaaggtggccagctataagcacttcacatgcaacgtgcttccacgaatcaaaggacttgggtacaactgtatccagttaatggcgattatggagcacgcatactatgcttcattcggatatcagatcacctcattcttcgctgcgtcctcccggtatggcactcctgaagagctccaggagctagtcgatactgctcactcaatgggcatcattgtgctgttggacgtggtgcatagccacgcttctaaaaattcggctgatgggctcaatatgtttgatggaactgatagctgttatttccattccggcccaagagggactcatgatctgtgggatagccgacttttcgcttattcttcttgggaaatcttacgatttctgctgagcaatattagatggtggttggaggaatacaggtttgatggctttcggtttgacggagtgacttccatgctgtatcaccatcacggcgtgggccaagggttcagcggtgactatagcgaatatttcggactccaagtggatgaagacgcccttacttacctgatgctggccaaccatctggtgcataccctgtgtcccgatagcatcacgatagcggaggacgtgtctggtatgcctgccctatgcagcccgatctcacagggtggaggaggctttgactaccgcctcgctatggctattcctgataaatggatccaactgctaaaagagtttaaggacgaggattggaatatgggcgacatcgtctatacactgacgaaccgcaggtatctcgaaaagtgcatcgcctatgccgaaagccacgatcaagccctggtcggggataagagcctggcattttggctcatggacgctgaaatgtacacaaacatgtcagttctgactccgtttaccccagttatcgaccggggtattcaactccacaaaatgatcaggttgatcactcacgggctaggaggggaaggatatctgaactttatgggtaatgaatttgggcatcctgaatggctagacttcccacgcaaaggcaataacgaatcctatcactacgcccgtagacagtttcatctaacagatgatgaccttctgcgctacaaattcctcaataacttcgaccgagatatgaaccggctggaagagaggtatggttggctcgcggctccccaagcgtacgtgtcagaaaaacacgaaggcaacaagatcattgctttcgagcgggctgggcttctttttatattcaatttccatcccagcaaaagttataccgactaccgcgtgggcactgctctccccggaaaatttaagatcgtgctggattccgacgcggctgaatacgggggacaccaacgcctcgaccattccaccgacttcttcagcgaggcctttgaacataacggaagaccctatagcctgctggtgtacataccatcacgggttgcactcatcctccaaaacgtggacctgcccaattag

SEQ ID NO: 4393 - DNA, 2109 bp, synthetic construct
  misc_feature 1..2109: note = source = /note="Description of Artificial Sequence: Synthetic coding sequence"
  source 1..2109: mol_type = other DNA
atggcagctccaatgacccctgccgctcgacccgaagattatgaggccgctctcaatgcagctttggctgacgtacctgaattggcccgattgctcgaaatagatccatatctgaaaccttacgccgtggactttcaacggagatataagcaattcagtcagatcctcaaaaatattggggagaatgaggggggtatagacaaattcagccgtgggtacgagagcttcggcgtccacagatgcgctgacggtgggttatattgcaaggagtgggcgccaggcgctgaaggcgtgtttttaaccggggacttcaacggatggaatccattcagttacccctacaaaaaactggactacgggaagtgggagctgtatattccgccaaagcagaataagtccgttctcgtccctcacggtagtaagctgaaagtggtcatcacttctaagagcggcgaaatcctctaccgaattagcccctgggccaagtacgttgtaagggagggcgacaacgtgaattacgactggattcactgggacccagaacactcctacgaattcaagcattcgcgccctaagaagccacggagtcttcggatttatgagagccacgtcgggatctccagtcacgaggggaaagtggcaagttacaagcattttacttgcaatgtgttacctcgcattaagggcctcggctataattgcatacagttgatggctatcatggagcatgcctactacgcttctttcggttaccagattacgagtttttttgctgcgagcagcagatatggcaccccagaagagctccaggaactggtagatacagctcactctatgggcattatcgtgctcttggatgttgtgcactcccacgcctctaagaacagcgcagacgggcttaatatgtttgacggtacagactcctgctatttccacagtggccctaggggtacccatgatctgtgggattctagactgttcgcctattcttcatgggagatccttagatttctcctcagtaatattcgctggtggctcgaagagtataggtttgacggattccgcttcgacggcgtgacctccatgttgtatcatcaccacggcgtcggacagggcttttcaggggattactctgaatactttggcctgcaggtggacgaagacgccctcacttatttgatgctggcaaatcacctggtgcacaccctgtgccccgattctattaccatcgccgaagatgttagcggaatgcccgcactctgctcccctatcagccaaggcggtgggggtttcgactacaggttggctatggctatcccggataagtggatccagctgctcaaagaattcaaagatgaggactggaacatgggggacatcgtctataccttgacaaatcgcaggtacctcgaaaaatgcatcgcgtacgccgaaagccacgaccaggccctggtcggcgacaaatccctcgccttttggttaatggatgcagagatgtacaccaacatgtccgtcctgacccccttcacaccagtgattgacagagggattcagctgcacaagatgatccggcttatcacccatggattgggtggggaagggtatttaaactttatgggaaatgaatttggccacccagaatggctagacttccctagaaagggaaacaatgagagttaccactacgcacggcgtcagttccatctgaccgatgatgatctcttgcgatacaaatttctcaataatttcgatcgcgacatgaatcggcttgaggagagatatggttggctcgcagcacctcaagcatatgtgtcagagaagcacgagggtaataagatcattgccttcgagagggccggactgcttttcattttcaactttcatccttcgaaaagctataccgactacagagtcggaactgcgctgccaggcaaatttaagatcgttttggactctgacgctgcggaatacggcggacatcaacgcttagaccacagcaccgattttttcagcgaggcgtttgagcacaacggcaggccctacagcttgctggtatacataccatcccgcgtggctctgatcctgcaaaatgtagacttaccaaactag

SEQ ID NO: 4394 - DNA, 1398 bp, synthetic construct
  misc_feature 1..1398: note = source = /note="Description of Artificial Sequence: Synthetic coding sequence"
  source 1..1398: mol_type = other DNA
atggctatcatggagcacgcatattatgccagtttcggatatcagatcacaagcttctttgcggcaagcagccggtacggaacacctgaagaactgcaggagttagttgacaccgctcattcaatgggcatcatcgtgctcctggatgtagtccattcccacgcttctaaaaactccgcagatggtcttaatatgtttgacgggacagattcctgctactttcatagcggccctagggggacccatgacctctgggactctcgcttatttgcttactcatcctgggagattttacgattcctgctctcaaacatccgctggtggctggaggaatacagattcgacggatttcgtttcgacggggtgacaagtatgttgtaccatcaccacggagtaggccagggattttctggcgattattcagagtacttcggccttcaagtggacgaggatgctctgacataccttatgctggccaatcacctggtccataccttatgccccgactctattacgatcgcggaagacgtatcgggtatgcccgcactctgctcacccatttcgcaaggcggtgggggatttgattatagactggccatggcaatacccgacaagtggatccagttgctcaaggaattcaaggacgaagactggaacatgggagatattgtttataccctaacaaaccgaaggtatttagagaagtgtatagcatacgccgaaagtcacgatcaggcactggtgggagataagtctcttgccttctggcttatggacgccgaaatgtacaccaatatgtccgtccttacgcctttcactcctgtaatagatcgcggtattcagctccataagatgattaggttgatcactcatggattgggtggggaggggtatctgaattttatgggaaatgagtttggtcatcccgagtggctggacttcccaaggaagggtaacaatgaatcatatcactacgctcggaggcaatttcacctgacagacgatgacttgttgaggtacaagttccttaataatttcgatagagatatgaatcgcttggaggaaaggtacggctggctggccgcaccccaggcctacgtttctgaaaagcatgagggcaataaaatcatcgcatttgaacgcgctggactgctgtttatctttaatttccacccttccaaaagttacactgactaccgcgtggggacagccctacctggcaaattcaagattgttcttgattcagatgccgctgagtatggcggtcaccaacgcctggaccatagcaccgacttcttctcagaggcattcgagcataatgggaggccctattctctgcttgtttacatccccagcagggtcgcacttattcttcaaaacgtcgatctgccaaattag

SEQ ID NO: 4395 - DNA, 1074 bp, synthetic construct
  misc_feature 1..1074: note = source = /note="Description of Artificial Sequence: Synthetic coding sequence"
  source 1..1074: mol_type = other DNA
atggaggagggcatgaacgtgctccacgactttggtatccagagcacccattacctgcaggtgaattaccaggattctcaggactggtttatcctggtctctgttatagccgacctgagaaacgcgttctacgtgctgtttcccatttggttccatctccaggaagcagtgggaattaagcttttgtgggttgcagtgattggagactggctgaatctggtgtttaagtggatcttattcggccagcgcccatactggtgggtgctggacacagactactacagcaacacatcagtgcccctgattaaacaattccctgtgacttgtgagaccgggcctggcagtccatcaggccacgcaatggggaccgccggagtctattacgtcatggttacaagcacattgtcaatttttcaggggaagataaaaccgacataccgcttcaggtgcctgaatgtgatcctatggctcggattctgggccgtgcagctgaacgtatgcctctcacgtatctatcttgctgctcactttcctcaccaggtagtggccggagtgctctctggtatcgctgtagccgagacctttagccatattcatagcatttacaatgcttcccttaagaagtacttccttatcactttctttctcttcagctttgctatcggattttatctgctgttgaaaggcttgggggtggatctattgtggacactcgaaaaggcccaacgatggtgcgaacagccagagtgggtgcacatagacacaacaccatttgcatccttactaaagaatctgggcacactcttcggcctaggactagccctgaatagttcgatgtaccgcgaatcatgcaaggggaaattgagcaagtggctcccatttcgcctcagctcgattgtggcaagtttagttctgctgcacgtgtttgatagcctcaagcccccttctcaggtagagctcgtattctacgtcttgtctttttgcaaatcagcagtggtgcctctggccagcgtatctgttattccatattgtcttgcccaggtcctggggcagccgcataagaagagcctctag

SEQ ID NO: 4396 - DNA, 2859 bp, synthetic construct
  misc_feature 1..2859: note = source = /note="Description of Artificial Sequence: Synthetic coding sequence"
  source 1..2859: mol_type = other DNA
atgggcgtcagacaccctccttgctcacacaggctgctcgccgtttgtgcgctcgtgtcacttgctaccgcggcactactaggacacatcctcctgcacgactttttgctggttccgagggaactgtcaggatctagccccgtgctggaggaaacccatccagcccatcagcagggcgctagccgtccaggccctagggacgcccaggcgcatcctgggcgtcctagagctgtccctacacagtgtgacgtgccgccaaactccagatttgactgcgccccagacaaagccatcacgcaggaacagtgcgaagcccgtggctgctgctacattcctgcaaagcagggtctgcagggcgcacaaatgggacagccctggtgcttcttcccacccagctatccatcttataaactggagaatttatccagtagtgaaatggggtacactgcgactctcaccagaactacaccaaccttctttccaaaagatattctgacactgaggctggacgttatgatggagacagaaaatcgccttcacttcacgataaaggacccagctaacagacggtacgaggttcctcttgagacccctcatgtccatagtcgcgctccttcacctctgtatagcgtcgagttctccgaggagccatttggagtgatcgtgcgaaggcagctggatggtagggtgctgctgaatactacagtggctcctttattctttgcagatcagttcctgcagctctccactagtttgccaagtcagtacatcacgggcctagcggagcacttaagcccattgatgctttctacgtcatggacccgaatcactctgtggaacagagacctggcccctaccccaggagctaacctgtacggtagccaccctttctacctcgccttagaggatgggggttccgcccatggagtctttctgctgaactccaacgcaatggatgtggtgctgcaacctagccccgctctgagctggagatccaccgggggaatcctggacgtatacatttttttagggcctgaacccaaaagtgtcgtgcaacagtatctagacgtggttggctaccctttcatgcccccttactgggggttgggattccacctctgccgatggggctactctagtactgcaatcacccgtcaggtcgtagaaaatatgacgagggcccattttcccctcgatgtgcagtggaatgacctggactatatggacagcagaagagacttcacctttaacaaggacgggtttagggatttcccagctatggttcaagagcttcaccaagggggacgtagatatatgatgatcgtggaccccgcaattagcagctctggccctgccggaagctacagaccttatgatgaagggctacgcagaggcgtgttcattactaacgaaaccggacagccactgattggcaaagtgtggcccggttctactgcctttccagatttcactaaccccactgccctggcctggtgggaggacatggttgcagagttccacgatcaggtgccattcgacggaatgtggatcgatatgaatgagccatcaaattttatccgtggcagcgaagacggctgtcctaataatgagctggagaatcctccttacgtgccaggtgtggtcgggggtactctccaggctgcaacaatctgtgcctcttctcaccagttcctgtctactcactacaaccttcataatctctatggtttaaccgaggctatcgctagtcaccgcgcacttgtgaaggccaggggaacccgccctttcgtcatttccaggtctacattcgccggacacggacgatacgcagggcactggaccggggacgtctggtcgtcttgggaacagctggccagctcagtgcctgagatcctgcaatttaacctgctcggcgtgcccttagttggcgctgatgtctgcggctttctcgggaataccagcgaagagttatgtgtccgttggacccagttgggcgctttctaccctttcatgcgaaaccataattctctcctgtccctgccacaagaaccatactccttctcagagccagctcagcaggcgatgcggaaggcgctgaccctgaggtacgcattactcccgcacctgtatacactgtttcaccaggctcacgtggccggagaaacagtggcacgccctctttttctggagttccctaaggactctagcacctggaccgtcgaccaccagcttctctggggggaggcacttcttataactcccgtgctacaggccggaaaagctgaagtgaccggctacttcccactcggcacctggtatgatctgcaaaccgtacccgtcgaggctctggggagcctaccaccgcctccggctgctcccagggagccagccattcacagcgagggtcagtgggtcacactgcctgcgccattggacacaatcaacgtgcaccttagggcaggttatattatccccttgcaaggacctggcctgacaacaacagaatcgagacagcagcccatggccctcgctgtagccctgacaaaagggggagaagcacgcggtgaacttttctgggatgatggcgaaagtttggaggtgctggaacggggtgcctacacacaggttatcttcctggccaggaacaacaccatcgtcaacgaactcgttcgggttacaagtgaaggggcaggcctgcagttgcaaaaagtcactgtgcttggggtcgccacagcccctcagcaggtgttatccaatggcgtgccagtgagcaacttcacatactcccctgacactaaagtgttagacatttgcgtttccctgctaatgggtgaacagtttcttgttagttggtgctag

SEQ ID NO: 4397 - DNA, 2859 bp, synthetic construct
  misc_feature 1..2859: note = source = /note="Description of Artificial Sequence: Synthetic coding sequence"
  source 1..2859: mol_type = other DNA
atgggggttcggcacccaccatgtagccaccgattacttgccgtttgcgcactggtatcactggccaccgccgctttactgggtcacattttacttcacgattttttactggtccccagagagctctcagggagtagtcccgtattagaggaaactcatcccgcacaccagcagggagctagtcgcccaggccctcgggacgcgcaggcacatcctggtcggcctcgtgcagttccgactcaatgtgacgtgccgccaaatagtaggtttgactgtgccccagacaaagcaatcacccaagagcagtgcgaggccagagggtgttgctatatcccagctaagcaaggattgcaaggggctcagatgggccagccctggtgcttctttcccccaagctatccaagctataagctagagaacctgagttcatccgagatgggctacacagccacacttactagaaccacccctacttttttccctaaggacatcttgacccttaggttagatgtaatgatggaaaccgaaaacaggctccattttaccatcaaagatcccgcaaaccgccgatacgaagtgcctctcgagacaccacacgtccatagcagagccccttctcctttgtattctgtagagttctcagaggaaccattcggcgtcatcgtgcgcagacagctagatggaagggtattgctaaacaccaccgtagcacccctgttcttcgcggaccagttcctccagcttagcaccagcttgccctctcagtatattaccgggctggcagagcatttatctccgctgatgctgagtacctcttggactcggatcaccctatggaatcgcgacttagcacctacccctggagccaatctgtacgggtcccatccattctatcttgccctggaggacggcggatcagctcacggcgtgtttttactcaattcaaacgcgatggatgtcgtactgcagcctagccccgcactatcatggaggtccaccggcggaatccttgatgtatatatctttcttggacccgagcccaagtctgtggtgcagcaatatctggacgtggtgggatacccctttatgcctccatactgggggcttggcttccacctttgccggtggggctacagctctaccgcaattacacgccaagtcgtagagaatatgactagggcccatttcccattggatgtccagtggaacgacctggactacatggatagccgtcgggacttcacgtttaacaaagacggcttccgggattttcctgctatggtccaggaactgcaccagggcggacgcaggtacatgatgattgtggatcccgcaattagctcatccggtccagccggaagctatcgaccatacgatgagggcctgcgacgcggagtgttcatcacaaatgagacaggccaaccgttaattgggaaggtgtggccaggctccacagcattccccgacttcacaaaccccaccgccctggcttggtgggaagacatggtcgcagagttccatgaccaggtcccctttgatggtatgtggatcgacatgaacgaacctagcaatttcatccgcggtagtgaggacggctgccctaataatgagttggaaaacccgccatatgtccccggtgtggtggggggaactctgcaggctgcaactatctgtgcctcttcccatcagtttttaagcacccattacaacctgcataacctttacgggttgacagaggctatcgcttctcacagggccctggtgaaagcacgaggaaccagaccattcgtgatttctagatccacatttgctggacacgggaggtatgccggtcattggacaggcgacgtgtggtctagttgggagcagctggcgagttctgtgcctgagatattgcagtttaacttgctcggcgtacccctagtgggcgctgatgtgtgcgggtttctcggcaacacgagcgaggagctgtgtgtccgctggactcaactgggtgccttctacccttttatgcgcaatcacaactccctcctttccctgcctcaggagccatacagtttttctgagcccgcacagcaggccatgcgaaaagccctgaccttgaggtatgcccttcttccccacctctacaccctcttccatcaagcgcacgtggcaggcgaaacagttgcaagacctctgtttctagagtttcccaaagattcatctacctggaccgtagaccaccaactgctgtggggggaggcccttcttataacgcccgtattgcaggccggtaaagccgaagtcacgggctacttccctctgggcacttggtatgatctccaaacagttcccgtggaggcccttggtagtctgccaccgcctcctgctgcgcctcgagaaccagcgattcactcagagggccagtgggttacattaccagccccactcgataccattaacgtgcacctgcgggctggatatattatccctctccaaggccctgggcttaccaccaccgagagccgccagcagccaatggcgctggcggtcgccctgaccaagggaggcgaagctagaggcgagctgttctgggatgatggcgagtctttggaagttctagaacggggtgcctacacgcaggtgatctttctcgccaggaacaacactatagtaaacgaactcgtgcgggtcacctccgagggagcaggtctccagctccaaaaagtcacagtgctgggagtagcgaccgctccccagcaggtgctttccaatggtgtccctgtctccaacttcacgtattcgccagacaccaaggtgcttgacatttgcgttagcctcctgatgggtgagcagtttttagtttcttggtgttag

SEQ ID NO: 4398 - DNA, 1611 bp, synthetic construct
  misc_feature 1..1611: note = source = /note="Description of Artificial Sequence: Synthetic coding sequence"
  source 1..1611: mol_type = other DNA
atggaattctcgtcaccctctcgggaagaatgccccaaacctctctctcgcgtatcgatcatggctggcagtttgacaggcctactgttgctgcaagcagtgagttgggcgtctggcgcacggccttgcattcccaagagcttcggctactctagtgtggtgtgtgtgtgtaacgctacgtattgcgattcattcgaccccccaactttccccgctctggggacgttctcaaggtacgaatccacgagaagcggacgcaggatggagctgtccatgggcccaatccaggcaaaccatacaggcactggcctgctgcttacgctccagccagagcaaaagtttcagaaggtaaaagggtttggtggggctatgacagacgccgcagccctcaatatcctggccttgtccccaccggctcaaaatctgttgctcaagagctacttcagtgaggaagggattggatacaatattattagagtaccgatggcatcatgtgacttttctatcagaacctacacttacgcggacactcctgacgactttcagctccataatttctcactgcccgaggaggacacgaaactaaaaatccctctcatccaccgcgctttacagctggcccagcgtccagtgtccttgctggccagcccgtggacatctcccacttggctgaagactaacggtgcggtcaatgggaagggctctctgaagggccagccaggggatatttatcatcaaacatgggcgcgatactttgttaagttcctggatgcttatgccgagcacaaacttcagttttgggcagtgacggcggagaacgagccctcagccggactgttgagcggataccctttccagtgtctcgggtttactccagagcatcagagagatttcatcgcccgagatctgggaccgaccctggcgaactcaacccatcataacgtgcgtctgctcatgctagatgatcaaaggttactattgccacactgggcaaaggtagttttgacagaccccgaagccgctaaatacgtgcatgggattgctgtgcattggtatctggattttctcgcacctgcaaaggccacactgggagaaacacatcgtctgtttcctaatacgatgctgtttgccagtgaagcatgcgtcggctctaagttctgggagcagagcgtgaggctgggctcttgggacagaggaatgcaatattcacacagcataatcacaaacctgctgtatcacgttgtggggtggaccgattggaatttggctctcaacccagagggagggcctaattgggtgcggaactttgtcgactcccctatcattgttgatattacaaaggacacattctacaaacagccaatgttttaccatctcggccacttcagcaagttcatccccgaggggtcccaacgcgttggcctcgtcgccagtcagaagaacgatcttgatgccgttgctctcatgcaccccgatggcagtgccgtagtggtggtcttgaatagaagctctaaagacgttccacttacaatcaaggatcctgcagtgggcttcctggaaaccatcagccccggatacagcattcacacctatttgtggcgacggcagtag

SEQ ID NO: 4399 - DNA, 1611 bp, synthetic construct
  misc_feature 1..1611: note = source = /note="Description of Artificial Sequence: Synthetic coding sequence"
  source 1..1611: mol_type = other DNA
atggaattttcctcaccttcgcgggaggagtgccccaaacctctgtctagggtatcgatcatggctggtagtctaaccggacttttgctgctgcaggcagtcagttgggccagtggagctcgtccatgtattcccaaatcctttggctacagctctgtcgtttgcgtgtgcaatgccacttactgcgacagttttgaccctcccaccttccccgctctgggtacgttctcaagatacgagagcacccgtagtgggagaaggatggagctgtccatgggtcccatccaggctaatcacacagggactgggctgctgttgacacttcaaccagaacaaaagttccagaaggtaaaaggattcggtggcgcaatgactgacgccgcagctctgaacattctggcgctttctcctcccgctcaaaatctgcttctcaaatcctatttcagcgaagagggcatagggtataatattatccgggtacctatggcctcgtgcgacttttccataaggacttacacatatgccgatacccccgacgactttcaactgcacaatttcagtttgccggaagaagataccaaacttaaaatccccctcatccacagggcacttcagctggcccaacgacctgtgtctctgttggcttcgccctggacatctcccacctggcttaagactaatggcgctgtcaacggcaaaggatcacttaagggacagccaggcgatatctatcaccagacctgggccaggtatttcgtcaaatttctcgatgcctacgctgaacacaaactgcagttctgggccgtcacagccgaaaatgagcctagcgccggtctgctatctggctatccttttcaatgtttagggtttaccccagaacaccaaagggactttatagcgagggacttaggccctactctggctaattcaactcaccataacgtgcggctgttgatgcttgacgaccaaaggcttctgttaccgcactgggctaaagtggtcctaaccgaccctgaggccgctaagtatgtgcacgggattgctgtacattggtatctcgattttctcgctccagctaaagccacattgggtgagacccaccgactctttccaaacactatgctgttcgcctctgaggcctgtgtcgggagcaagttctgggaacagagtgtgaggctcggatcctgggacagggggatgcaatacagtcatagtatcattaccaatctgctctatcatgtcgtggggtggaccgactggaaccttgcactcaacccagaaggcggtccaaattgggttaggaactttgtggatagccccatcattgtggatatcaccaaagataccttttataaacagccgatgttttatcacttgggccatttctcaaagttcataccagagggctcacaacgggtgggccttgtcgcttcacagaagaatgatctagacgccgtcgctttgatgcatcccgacggcagtgctgttgtcgtagtactcaataggagcagtaaggatgtgccattgacaatcaaggatcctgccgttggtttcctcgagaccatctcgcccggatattcaatccacacatacctttggcgacgacagtag

SEQ ID NO: 4400 - DNA, 1566 bp, synthetic construct
  misc_feature 1..1566: note = source = /note="Description of Artificial Sequence: Synthetic coding sequence"
  source 1..1566: mol_type = other DNA
atggagttttcaagcccttcgagggaggaatgtcctaagcccctgtcccgggttagcataatggccggttcactgacaggcctcctcctgctgcaagcggtgtcttgggccagtggcgcaaggccatgtattcctaaatcttttgggtacagttctgtagtttgtgtatgcaatgcgacatactgtgatagtttcgaccctccgacatttccagcccttggaacatttagcaggtacgagtctactaggagtggccgtcgcatggagttgagcatgggacctatccaagccaaccatacaggcactggtttactactgactctgcagcccgacgccgctgccttaaacatcttggccctgagtccacccgcacagaaccttctcctcaagtcttacttcagtgaagagggaatcggctataatatcatccgcgtgcccatggcaagctgcgatttttctatcagaacttatacttatgcagatacccccgatgacttccagctacacaactttagtctgcccgaagaggatacgaagctgaaaatcccgctgatccatcgggctctgcagctggcccaacgccctgtttccctcctggcatctccgtggacatcccctacatggttgaaaacgaatggagccgtgaatggaaagggctcacttaaaggccagcccggtgacatatatcatcagacctgggctcgttattttgtcaagttcctggacgcgtacgccgagcacaaattacagttttgggctgttacagctgagaacgagccgtccgcagggctgctaagcggttatccatttcagtgcttaggcttcacccccgagcaccaaagagattttatcgctagagatttgggccctacactagcaaactcaacgcaccacaacgttcgtttgttaatgttagacgaccaaaggctgctgctgccgcactgggctaaagttgtgctgactgatcccgaagccgctaagtatgtacacggaattgccgtccactggtacctggactttctagccccagctaaggctacactcggcgaaactcaccgtctgtttcctaatacaatgctctttgcctccgaggcctgtgtagggtctaagttttgggaacagtcagtgagattggggtcttgggaccgaggcatgcaatatagccattccatcatcaccaacctgctgtatcacgtggtggggtggacggactggaatctggcacttaaccccgaaggaggaccaaattgggtgaggaactttgtcgattcgccaatcatcgtcgacatcacaaaggatactttttacaagcagccaatgttctatcatctggggcatttctccaaatttattcctgaagggtctcagcgcgttgggctggtggcttcccagaaaaatgatctggacgctgttgccttgatgcaccctgacggcagcgcggttgtcgtggtgctgaatcggagcagtaaggatgtgccactgacaattaaggaccctgctgtgggattccttgagaccatatcccctggttatagcatccacacatacctatggagacggcagtag

SEQ ID NO: 4401 - DNA, 1464 bp, synthetic construct
  misc_feature 1..1464: note = source = /note="Description of Artificial Sequence: Synthetic coding sequence"
  source 1..1464: mol_type = other DNA
atggagttctcaagtcctagtcgggaggaatgcccaaagccactttccagagtgtccatcatggccggttcactcactggacttctcctattacaggcggtctcatgggcttccggcgctcgcccatgtatcccaaagtcctttggatatagctctgtggtttgtgtctgcaacgccacgtactgcgatagtttcgatccaccgacattcccagctctgggaaccttctccaggtacgagagtacaagaagcggcaggcgtatggagttgtctatgggaccaattcaggcaaaccacaccgggacaggcataggatataatatcatccgggtaccaatggcatcatgcgacttttcgatcaggacctatacttatgctgacacccctgacgactttcagctgcacaactttagcctgcctgaggaggataccaagctcaagattccactgattcacagagcccttcagctcgcacagcgtcccgtgtctctcctggccagcccctggacttccccgacttggctaaagaccaacggggctgtcaacgggaaaggctccctaaagggacaacccggagacatctaccatcagacctgggcccgttatttcgtcaagttcctagatgcatacgcggagcacaagttgcagttctgggccgtgaccgcagagaatgaacccagcgctgggctgctaagcgggtatcctttccaatgcctcggttttacaccggaacatcagcgagacttcattgccagggacttaggcccaaccctggctaactctacccatcacaacgttagacttctgatgcttgatgaccaaagactgttgctgccccactgggcaaaggtggtgcttaccgatccagaagctgccaagtacgtgcatggcatcgccgttcattggtacctggactttttggccccagctaaagctaccctgggagagacacaccgcctgttccctaacacaatgttgttcgccagcgaagcgtgcgtgggaagcaagttctgggagcaaagcgttcgacttggtagctgggacaggggcatgcagtatagccacagtattataaccaacctcttgtatcatgttgtggggtggacagactggaacttggctctgaatccggagggaggccctaattgggttcggaacttcgtcgatagcccaattattgtcgatattactaaagataccttttacaaacagcctatgttctatcacttagggcatttcagtaaatttattccagaaggttctcaaagggttgggttggtggctagtcagaagaacgatctggacgctgttgcactgatgcatccagacggatccgctgttgtcgtggttctgaatcgttcttctaaagacgtgcctctgactatcaaggatcccgctgttggtttcctggagaccatctcccccggatactccatccacacttacttgtggcgacgacagtag

SEQ ID NO: 4402 - DNA, 1350 bp, synthetic construct
  misc_feature 1..1350: note = source = /note="Description of Artificial Sequence: Synthetic coding sequence"
  source 1..1350: mol_type = other DNA
atggagctaagcatgggacctattcaggccaatcacacaggcactggtttgctcctgaccctgcagcctgaacagaagtttcaaaaggtcaaagggtttggtggggcaatgaccgacgctgctgcattgaacatactggctctttccccacccgctcagaatctgcttttaaaaagttacttctctgaagagggaatagggtataacatcatccgggtgccaatggcatcttgtgatttcagcataaggacatatacctatgccgatactcccgacgacttccagctgcacaatttctcccttcccgaagaagatacaaagctgaaaattccattgatccaccgcgctctgcaactcgctcagcggccagtgtctttactggcatccccctggacttctccaacctggctaaaaacaaacggcgctgtgaacggcaaaggctctctaaagggacagcctggagacatctatcaccagacatgggcccgttacttcgttaagttcctggatgcttatgcagagcacaagctgcagttttgggccgtgaccgcagagaacgaaccatccgcaggactgctgtcagggtacccttttcagtgcctggggttcaccccagaacaccagcgcgacttcatagccagagacctgggaccaaccctggccaattctacccaccataatgtgcggcttctgatgctggatgaccagagattgctcctgccccactgggccaaggtggtgctgacagatcctgaagccgctaagtatgtgcatggaatcgctgttcactggtacctggattttcttgccccagccaaagcgaccctgggtgagactcatcgcctattcccgaacaccatgctgtttgcttccgaggcatgtgtgggtagtaagttctgggaacagtccgtgagactcgggtcttgggaccgtggtatgcaatattctcatagcatcatcacaaacttactctaccacgtcgttggatggactgattggaatctggctctgaatcctgagggtggacccaactgggttagaaacttcgttgatagtcctattatagtggacattacaaaggacactttttacaagcaaccaatgttttatcacctggggcacttctctaaattcatccctgaggggagtcaaagagttggactggttgcctcccagaaaaatgacttggatgccgtggctctgatgcaccccgacggaagcgcagtggtggtcgtactgaaccggagcagtaaggacgtccccttaaccatcaaggaccctgccgtcggctttttagaaacaattagccctggatactctatccatacatatttatggagacgccagtag

SEQ ID NO: 4403 - DNA, 1482 bp, synthetic construct
  misc_feature 1..1482: note = source = /note="Description of Artificial Sequence: Synthetic coding sequence"
  source 1..1482: mol_type = other DNA
atgaccttgcgaggatggtcatttcaggtcttgcccgagtctaacgccacatattgtgatagtttcgatccaccgaccttccctgctcttggaacattcagccgctatgagtctactcgcagcggcagacgcatggagttgtctatgggcccaatccaggccaatcacacaggaaccggcctgctgctcacactgcaaccagagcagaagtttcagaaggtgaaggggttcgggggagccatgactgacgccgctgcattgaatatactggctctgagcccacccgctcaaaatctgctgttaaagtcgtacttctcggaggaaggcatcggatacaatatcattcgggtacccatggcatcctgcgacttctctatccgaacctacacctacgccgacaccccagatgacttccagttgcacaatttctcgctccccgaggaagacaccaagttgaagatcccactgatccaccgcgcactgcagctcgcacagcggccagtcagcctgctcgcctctccatggaccagtccaacttggttgaaaaccaatggcgctgtgaatgggaagggcagtctgaagggacagcccggagacatctatcaccaaacatgggcaaggtacttcgttaaatttctggatgcatatgcggagcacaagctgcagttctgggccgtgacagcagagaatgaaccatctgctggactgcttagtggatatcccttccagtgcctgggcttcacccccgagcaccagcgagacttcatagcgagagatctgggaccaacactggctaactccactcatcataatgtcagactgctcatgctggacgaccagaggctgctgctgcctcattgggcgaaagtcgtgctcaccgatcccgaagcagccaagtacgtgcatgggatcgcagtccactggtacctagactttcttgcccctgctaaagctaccctgggggaaacacatcgtctgtttcctaataccatgctgttcgccagcgaggcctgcgtggggagcaaattttgggagcagtccgtaagattaggttcttgggatcgtggaatgcagtactctcacagcattattacaaatttactgtatcacgttgtcggatggacagattggaatctggcgctgaaccctgaaggaggccctaactgggtgcggaacttcgtggactccccaattatcgtagatattacaaaggacaccttctataagcagcctatgttttatcacctgggccacttcagtaaattcattcccgaaggctctcagagggtaggcctcgtagcaagtcagaagaatgacctcgacgccgtcgcgctgatgcatcctgacggctccgccgtcgttgttgtcctgaaccgctcttctaaagacgtgccgctgaccatcaaagaccccgctgtaggattcctggaaaccatttcacccggatacagtattcatacatacttatggcggagacagtag

SEQ ID NO: 4404 - DNA, 1272 bp, synthetic construct
  misc_feature 1..1272: note = source = /note="Description of Artificial Sequence: Synthetic coding sequence"
  source 1..1272: mol_type = other DNA
atggagttcagcagtccgagcagagaggagtgtcctaaacctctctctagggtcagtatcatggccggatcattaaccggcttgctacttctgcaagctgtcagttgggcctcaggtatcggctacaacatcatcagagtgccaatggcctcatgcgacttctcaatcaggacttacacctacgccgacacacctgatgattttcagcttcacaacttttctctgcctgaagaagacactaagttgaaaatcccactgattcaccgcgctcttcagctcgctcagagaccggtgtccctgcttgcaagcccatggacttcccctacatggctaaagaccaacggtgctgtgaacggtaagggtagtctaaaaggacagcccggagacatctatcatcagacatgggctaggtatttcgttaaatttctggatgcttacgcagaacataagttacagttctgggcggtcactgcggagaacgaacctagcgctgggctgctgtctggatacccatttcaatgcctcgggtttacgccagaacaccaacgggacttcatcgccagagacctgggacccactctggcaaatagcacccaccataacgtaagactgttgatgctggatgaccagcgtcttcttttgcctcactgggccaaagtggttcttacagatcctgaggcagccaagtatgttcatgggatagccgttcactggtatctcgatttcctggctcctgcaaaagcaacgcttggagagacccaccggttgtttcccaacacgatgctgtttgcaagcgaggcctgcgtcggttctaagttctgggagcagtccgtgagattgggctcgtgggacaggggaatgcagtatagccactcaatcatcacgaatctgctctatcacgtagtgggctggactgactggaacctagccctcaatcccgaaggaggacccaactgggtccggaattttgtggacagtcctatcatcgtggatatcactaaggatacattctataagcaaccaatgttctatcaccttggccacttttctaagtttataccagaaggctcacagagagtcgggcttgtcgcatctcaaaaaaatgatcttgacgctgtcgctctgatgcaccccgacggctccgccgtggttgtcgtgttaaatcggagttccaaggatgttcccctcacaatcaaggacccggctgtcgggttcttggagacgataagcccgggatactcgatccatacctacctgtggcgacggcagtag

SEQ ID NO: 4405 - DNA, 2112 bp, synthetic construct
  misc_feature 1..2112: note = source = /note="Description of Artificial Sequence: Synthetic coding sequence"
  source 1..2112: mol_type = other DNA
atgctacgtgggcgttccctcagcgttactagtttgggcggactgccccagtgggaagtcgaagagctgcctgtggaggagttgttattgtttgaggtggcttgggaagtaacgaacaaggtgggcggtatttacactgtgattcagactaaggcaaagacaactgcggatgagtggggcgaaaattactttcttatcggcccatactttgaacacaatatgaagacccaggtggagcagtgtgagccagtgaatgatgccgtccggcgtgcggttgatgcgatgaacaagcacgggtgtcaggttcacttcggtagatggctcatcgaaggtagcccttacgttgtcctttttgacataggatacagtgcctggaacctcgatcgctggaagggagacttatgggaggcttgtagcgtaggaatcccttatcacgatagggaggctaatgacatgctaattttcggcagtctgacagcctggttcctgaaggaggtcacagatcacgccgatggcaagtatgtggtggcccagtttcacgaatggcaggccggaattggccttatcctttcccgcgcacgtaaactccctatagccaccattttcaccacacatgccacccttctgggtcgttatctctgcgcagctaatatcgatttttacaatcacctggataagtttaacatcgataaggaggcaggcgagaggcagatataccatcggtattgcatggaacgcgcaagtgtgcactgtgctcacgtgttcacaaccgtgtctgaaattacagcgatcgaggcagaacacatgcttaagaggaaacctgatgtggtcacacctaatgggctaaacgttaaaaaattctccgcagtccacgaattccaaaatctccatgcgatgtacaaagcgaggatacaggacttcgtccggggacatttctatggccacctcgatttcgatctggaaaagaccttgttcctctttatcgcaggccgatacgagttctcaaataaaggcgcagacatattcctagaatctttgtccaggctgaattttctgcttcggatgcataaatccgatatcaccgttatggttttcttcattatgccagctaaaacgaacaacttcaatgtggagacacttaagggccaggcggtccggaagcagctgtgggatgtggctcattctgtcaaggagaagtttgggaaaaagttgtacgacgctctcctgcgcggagagatccctgacctgaatgacattctggaccgagatgatctcacaatcatgaaaagggctattttctcaacccagaggcagtctctgccacccgtcaccacccacaacatgatcgacgattctaccgatcccatcttgagcacaattcggaggatcgggctgttcaacaaccgaacagatagggtgaaagtaattttgcatccagaatttctgtcctctacctcgcctctgctacccatggattatgaagagttcgtgcgaggatgccacctcggggtcttccctagttactacgagccctggggctacacgccggcagagtgtacagtcatgggcatccccagtgtaaccactaacctgtctggcttcggctgttttatgcaagaacacgttgcagaccccacagcttatgggatctatattgtcgatcgtcggttcagatctccagatgactcatgtaaccaactcacaaaatttctgtacggtttctgtaagcagagcaggaggcagcgcattatccagcgcaatcggacagagaggctctcggacctgctggactggcggtatctaggcagatattaccaacatgctagacatttgaccttaagccgcgcttttcctgataagtttcatgtcgagctcacgagtccccctaccaccgaggggtttaaatatccacggccaagttctgtgccaccatctccaagtggctcccaggccagtagtccccaaagcagcgatgtggaggatgaagtcgaggacgaaagatatgacgaagaagaagaggccgagagagatcggctcaatattaaaagtccattttcactatcccatgtgccccatgggaaaaaaaaactgcatggagaatacaaaaactag

SEQ ID NO: 4406 - DNA, 351 bp, synthetic construct
  misc_feature 1..351: note = source = /note="Description of Artificial Sequence: Synthetic coding sequence"
  source 1..351: mol_type = other DNA
atggactattacagaaaatacgctgccatcttcctcgtcactttgtccgtttttctgcatgtcctgcacagcgccccagacgttcaggactgccctgagtgtactttgcaggagaaccccttcttctctcaacccggagcacctatcctgcagtgtatgggctgttgtttttcaagggcatacccaacccctctccggtcaaagaagaccatgctggtgcagaagaatgtcacttctgaaagcacctgttgtgtggcgaagagctacaatagagtgaccgttatgggaggtttcaaagtggaaaatcacacagcctgccactgctctacatgttactaccacaaatcttag

SEQ ID NO: 4407 - DNA, 654 bp, synthetic construct
  misc_feature 1..654: note = source = /note="Description of Artificial Sequence: Synthetic coding sequence"
  source 1..654: mol_type = other DNA
atggctactgggtcacggaccagcctcttactcgcctttggactgttgtgcctgccctggttgcaggaaggcagtgcattccccacaattccactcagccggctgttcgataatgcgatgcttcgggcacacagactccaccagctggcctttgatacttaccaggaattcgaggaggcctacatccccaaagaacagaaatatagcttcctccaaaaccctcagacttccctgtgcttctcggaatctattcccaccccaagtaaccgcgaggagacgcaacagaagagcaacctggagctgttgcggattagcctgctcttgatacagtcctggttagagcccgtgcaattccttagaagcgttttcgcgaattcactggtgtacggcgctagcgactctaacgtgtatgatctgctgaaagacttggaagaaggcattcaaaccctgatgggcaggctggaggacggttccccccgaacaggtcaaatttttaagcagacctacagcaagtttgatactaactcccataacgatgacgctctgctgaaaaactatggtttgctttactgtttcagaaaggacatggacaaggtggagacatttctgcggatagtgcaatgccgctctgtggaggggtcttgtggtttctag

SEQ ID NO: 4408 - DNA, 369 bp, synthetic construct
  misc_feature 1..369: note = source = /note="Description of Artificial Sequence: Synthetic coding sequence"
  source 1..369: mol_type = other DNA
atggctactggttcccgcaccagcctgctgctggcattcgggctgctgtgtctcccctggttgcaagagggttccgcatttccaacaattcctctgagccggctctttgataacgctatgttgcgggctcaccgactccatcagctggccttcgacacctatcaggaatttaggttagaagacggatcccccaggaccggacaaatctttaagcagacctactctaaatttgacactaactcccacaatgatgatgcactcctgaaaaattacggactgctttattgtttcagaaaggacatggacaaggtcgagacgttcctcagaattgtccagtgtcggtcggtcgaggggtcttgtggattctag

SEQ ID NO: 4409 - DNA, 534 bp, synthetic construct
  misc_feature 1..534: note = source = /note="Description of Artificial Sequence: Synthetic coding sequence"
  source 1..534: mol_type = other DNA
atggccactggctcaaggaccagcttactgcttgctttcgggttgctgtgcctgccatggctgcaggaagggagcgctttccccactattcctctgtctaggctgtttgacaatgctatgctgcgcgcacacaggctgcaccagctggccttcgatacataccaggagttcaatctggagctgctaaggatctccctcctcttaattcagtcatggctggaaccggtgcaatttttgaggtctgtcttcgccaatagtctcgtctatggcgctagcgactccaacgtgtacgacctgctcaaagatctggaagaaggcattcagactctgatgggtcggctcgaagatggctctccacgaacaggtcagatcttcaagcagacatactcaaagtttgacacaaactctcacaatgatgacgctctgctgaagaattatggcttactgtactgctttcgcaaagatatggacaaagttgagaccttcctgcgcatcgtccagtgccgcagcgtagaagggagttgtggcttctag

SEQ ID NO: 4410 - DNA, 609 bp, synthetic construct
  misc_feature 1..609: note = source = /note="Description of Artificial Sequence: Synthetic coding sequence"
  source 1..609: mol_type = other DNA
atggccaccgggtcacgaactagtctgcttctcgcatttggtctgttgtgtctcccatggttacaggaaggaagtgccttccccaccatacctctgtcaaggctctttgacaatgccatgctgagagctcacaggctgcaccagctggcctttgacacctaccaggagttcaacccacagacgtcgctatgctttagtgagtccattcctactcctagcaaccgagaggagactcagcagaagagcaacctggaattgctgcggatttcgctgttactgattcaatcctggctcgagccagtgcaattcctgagatctgtttttgctaacagcttggtttacggagccagtgactctaacgtttacgatctcctaaaggacctggaagaagggatccagacccttatggggagactagaagacggctcaccaaggaccggccaaatctttaagcagacctattctaagtttgatactaacagtcacaacgacgacgcgctgcttaagaattatggcttgctctactgttttcgcaaagatatggacaaggtcgagacttttttacgtatcgtgcagtgtcgatcagttgaggggtcctgtgggttttag

SEQ ID NO: 4411 - DNA, 771 bp, synthetic construct
  misc_feature 1..771: note = source = /note="Description of Artificial Sequence: Synthetic coding sequence"
  source 1..771: mol_type = other DNA
atggccgctggcagccgaacctccctactcctcgcctttggccttctctgcctttcatggctgcaagaaggttctgcattccccaccatcccgctgagtcgactttttgataatgccatgctaagggccagacggctctaccagctcgcttatgacacctatcaagagttcgaagaggcctatatcctgaaagagcagaagtatagctttctgcagaatccgcagaccagcctttgcttcagcgagtctattccaaccccatccaatagagtaaagactcagcagaagtccaacctagagctgctgaggatcagtctactgctgatccagtcttggctcgagcccgttcaattgctcaggtccgtgttcgctaattctctggtgtacggagcttccgactccaacgtgtatcgacacctgaaggatctggaagagggcattcagaccctgatgtgggtaagagtcgccccagggatccctaacccgggtgccccactggcaagcagagactggggagagaagcactgttgcccactgttcagttcgcaggcacttacacaggagaattccccatatagttcttttcctttggtgaaccctcctggtctcagcctgcagcctggtggagaggggggaaaatggatgaatgagcgagggcgagagcagtgccctagcgcctggccattgctgctgtttttacacttcgcggaggcaggccgatggcagccaccagattgggcagatctacaaagcgtgttgcaacaggtatag

SEQ ID NO: 4412 - DNA, 654 bp, synthetic construct
  misc_feature 1..654: note = source = /note="Description of Artificial Sequence: Synthetic coding sequence"
  source 1..654: mol_type = other DNA
atggctgccggatccagaacttctttgttactcgcgttcggactgctgtgcctgtcctggttacaggaaggctctgcattccccacaattccattatcccgtctgtttgataatgcaatgctgcgggcaagacgcctgtaccagctggcctacgatacctaccaggagttcgaagaggcttacatcctgaaagaacagaagtatagctttttacagaatccacagacttccctgtgtttctccgagagcatcccaactccgtccaatcgagtgaaaacgcagcaaaaatctaatttggaactccttcgtatctcgctcctattaatacagagctggctcgaacccgtgcagctgttacggtcagtttttgcgaatagccttgtctacggcgcttctgacagcaatgtttaccgacatctcaaggatctggaggagggtattcagactttaatgtggcgactggaagacggcagtccccgtacgggtcagatcttcaatcagagttattcaaaatttgataccaaatcgcataacgacgacgctctcctgaaaaattatggtctattgtactgcttccgcaaagacatggataaggtggagactttccttcggattgttcagtgcagatctgttgagggctcttgtgggttttag

SEQ ID NO: 4413 - DNA, 609 bp, synthetic construct
  misc_feature 1..609: note = source = /note="Description of Artificial Sequence: Synthetic coding sequence"
  source 1..609: mol_type = other DNA
atggctgccggatctcggacctctctgttgcttgctttcggcttgttatgcctatcttggctgcaagaaggcagcgccttcccaaccatccccttgagcaggttattcgataatgctatgctgcgggctagaaggctgtatcaactcgcctatgatacctatcaagagtttaatccccagacctccctgtgtttctctgagagtatccctacaccaagcaatcgcgttaagactcagcaaaaatcgaacttggagcttcttaggatctcgttactgctgatacagagctggctcgagcctgtgcaactgcttaggtcagtctttgctaattccctggtgtatggcgcatccgatagtaatgtgtataggcatcttaaggaccttgaagaaggtatccaaactctgatgtggaggttagaagacggctcaccgcgaactggtcagatttttaatcagagctactcaaaattcgatacgaaatctcacaacgacgacgccctgcttaagaactacggccttctgtactgtttccgaaaagatatggataaagtcgagacgtttctaaggatcgtgcagtgccgatctgtggaaggatcatgcgggttctag

SEQ ID NO: 4414 - DNA, 738 bp, synthetic construct
  misc_feature 1..738: note = source = /note="Description of Artificial Sequence: Synthetic coding sequence"
  source 1..738: mol_type = other DNA
atggctgcgggttctagaacgtctctgctgctggctttcggcctcctgtgcctttcttggcttcaggaagggtccgcattccccacaattcccctcagccgcctgttcgacaatgcgatgttgagagcccgacgtctatatcagctggcgtacgatacataccaagaatttgaggaggcctacatcctgaaagagcagaagtattcatttctgcagaatccccagactagcctgtgtttcagtgaaagtatcccaactccttccaatcgggtgaagacccagcagaagtccaacctagagctgctcagaatcagcctcctgctgatccagagctggctagagcctgtgcagcttctgaggtccgtcttcgcaaatagcctggtttatggcgcttctgactccaacgtgtatagacatcttaaagacctggaggaaggcatacagactttgattggctggaagatggcggctcctggtttaggaagaagtagtatctcacccacggcttctctgactcaaaaccgcacgacaatgacccactgctcccgcacgaccggttgctccacggccagcggacgtacctggactcgaagtcgccactcgtgcgccagttgttcagctgcactttggcgcgctgctgtggcctctagctgcccaggtggtatcccagttacccctccccaatgcttatcctggtcttggaaggtgctcttgcaatgccctcccgctctttcatag

SEQ ID NO: 4415 - DNA, 753 bp, synthetic construct
  misc_feature 1..753: note = source = /note="Description of Artificial Sequence: Synthetic coding sequence"
  source 1..753: mol_type = other DNA
atggagaaaggtccagtgagagccccagcagagaaaccacggggagccagatgctcaaatggcttcccagagcgggacccccctagaccaggaccatctcgcccagccgagaagcccccacggcctgaggctaagagtgcccagcctgcagatggttggaaaggagagcggccaagatctgaggaagataatgagctgaacctgccgaatctcgccgctgcctactctagtatactgtcttcactcggagagaatccccagcgccaaggtctgctcaagacaccatggagggcagcctctgctatgcaattttttacgaagggataccaggagacgatcagtgatgtgctgaacgacgccatctttgacgaggaccacgatgaaatggtaattgtgaaagatatcgatatgttttcaatgtgcgaacaccatctggtgcctttcgtcggcaaagtgcacattggctatctgcccaacaaacaggtgctggggctatcaaaattggccagaatcgttgagatctactctcgcaggctgcaggtccaggaacgcctgacaaagcagatagccgtcgccatcacggaggccctcagacccgcaggagtgggggttgttgttgaggcaacccacatgtgcatggtcatgagaggggtgcagaagatgaactccaaaaccgtgacctccaccatgctgggcgtttttcgagaggacccaaaaacacgcgaggaatttctaacacttatccgtagttag

SEQ ID NO: 4416 - DNA, 693 bp, synthetic construct
  misc_feature 1..693: note = source = /note="Description of Artificial Sequence: Synthetic coding sequence"
  source 1..693: mol_type = other DNA
atggaaaagggccctgtgcgggctccagccgagaaacctaggggggctagatgtagcaacggttttcctgaaagggacccccctcgtccagggcctagccgcccagcagagaaaccacctcgacctgaggccaaaagtgcacaacctgctgatggttggaagggcgaacgccctcgcagcgaggaagacaacgagctgaatttgccaaatttggctgccgcatactccagtatcttgagcagcctcggcgaaaacccacagaggcaagggctcctgaaaaccccctggcgggctgcctccgccatgcagttcttcacaaaggggtaccaggagaccatcagtgacgtgctaaatgacgcgattttcgacgaggaccacgacgagatggtgatcgttaaggatatagacatgttctccatgtgcgagcatcatctcgtcccattcgtgggtaaagttcacatcggatacctgcctaacaaacaagttctgggcctttccaagctggcacgcatcgtcgagatttactctagaagactgcaggtgcaggaacggctcacaaaacaaatagccgttgcaatcaccgaggctctgcggccagctggggtgggggtggttgtggaggcaacaaagtctaacaagtacaataaagggctatcctacttcttactcgccacctttctgtggcagtattag

SEQ ID NO: 4417 - DNA, 753 bp, synthetic construct
  misc_feature 1..753: note = source = /note="Description of Artificial Sequence: Synthetic coding sequence"
  source 1..753: mol_type = other DNA
atggagaaaggacctgttcgcgcaccggcagagaaaccaaggggcgctaggtgcagcaatgggttcccagaacgcgacccgccaagaccagggccttcccgtccagccgagaaacccccacgcccagaagcaaagagcgcacagcctgccgatggctggaaaggcgagcgaccccgtagtgaggaggataatgagctaaatctcccaaatttggctgctgcctattcgtcaatactcagcagcctcggcgaaaatcctcagcggcagggtctcctgaaaacaccttggcgcgctgcaagtgcaatgcagttttttaccaaaggatatcaagagactatctccgacgtgctgaacgacgctatctttgatgaggatcatgacgagatggtgatcgttaaagatatcgatatgttctccatgtgcgaacaccacttggttccgttcgtgggtaaggtgcacattggctacctccccaacaaacaagtcctgggtctgtccaaactggccagaattgtagaaatctacagccgacgcctccaggtacaagagcggcttacgaagcagattgccgtggccataacagaagccctgcgccctgctggcgtgggtgtggtcgtcgaggcaactcacatgtgcatggtaatgcggggagttcagaagatgaactccaaaactgtgacttccacgatgctgggagtcttccgcgaggacccgaagactagggaagagttcctcaccttgattcggtcctag

SEQ ID NO: 4418 - DNA, 642 bp, synthetic construct
  misc_feature 1..642: note = source = /note="Description of Artificial Sequence: Synthetic coding sequence"
  source 1..642: mol_type = other DNA
atggaaaaaggccctgtgcgcgctcctgccgaaaaaccgagaggagcgagatgttccaatggcttcccggagagagacccaccaagaccaggtccctccagaccagccgagaaacctccccgaccggaggcaaagagcgcccagccagccgatggctggaaaggagaacgacccagatccgaggaggataatgagctgaatttgccgaatctggctgcagcctacagttccatcctcagtagcctaggcgagaatccgcagaggcagggcctgctgaagactccttggcgagcagcttcggccatgcagttctttaccaaggggtatcaggagaccatatccgatgtcttaaatgatgccattttcgatgaggaccacgatgagatggtcatcgtaaaggacatcgacatgttctcaatgtgcgagcaccacctggtccctttcgtggggaaggtgcacattggctacctgccaaataagcaggtgctgggattgtccaagctggccaggattgttgagatttattcccgccgtctgcaggtacaggaacggctcacaaagcagatcgctgtggcaattaccgaggcactgcgtcctgccggagtcggggtggtggtggaagcaacatctgccgaaccctag

SEQ ID NO: 4419 - DNA, 702 bp, synthetic construct
  misc_feature 1..702: note = source = /note="Description of Artificial Sequence: Synthetic coding sequence"
  source 1..702: mol_type = other DNA
atggagaaaggcccagtgagagcccctgctgagaaaccaaggggcgctcgctgcagcaatggcttccccgagagggaccctcctcgaccaggcccttcccggcctgccgaaaaacccccaagaccggaggccaaaagtgcccaacccgcagatggttggaagggcgagcggcctcgatcagaggaggacaatgagctcaacttaccaaatttggccgctgcctactcaagtatcttgagttccttgggcgaaaatccccaacgccaaggcttactcaaaaccccatggagggctgcttcagctatgcagtttttcaccaaaggttaccaggaaactataagtgacgtcctgaatgatgccattttcgatgaagaccacgatgagatggtaatcgtgaaggatattgacatgttctctatgtgcgaacaccacctggttcccttcgtggggaaggtccacatcggctatctgccaaacaagcaggttctcgggttgtcaaagcttgccagaatcgtggagatctactcgagaagactacaggtccaggagaggcttacaaaacagatagccgtggccataactgaggccctccggccagctggagttggcgttgttgtggaagcgaccaaatcaaacaagtataacaagggcctatcccccctgttatccagctgccacttatttgtggctatcctgaagtag

SEQ ID NO: 4420 - DNA, 1014 bp, synthetic construct
  misc_feature 1..1014: note = source = /note="Description of Artificial Sequence: Synthetic coding sequence"
  source 1..1014: mol_type = other DNA
atgggcccaagggccaggccagctctccttctgctgatgcttctgcagactgccgtcctccagggccgtctcttaagatcacattcacttcattacctgttcatgggcgcatctgaacaagatttagggctgtcgctgttcgaggccctgggctacgtggatgatcagctctttgttttctatgatcatgaaagccgaagagtcgaaccgcgaacaccttgggtctcaagtcgaatttcatctcaaatgtggctacagttatcacagtctctgaagggttgggaccatatgttcactgtggacttttggaccataatggagaatcataatcatagtaaagagagccacacacttcaggtaatcctgggatgcgaaatgcaagaagacaattcaacagaggggtactggaaatacgggtacgacgggcaggatcacttagagttttgtccggacactctggactggagagccgctgaaccacgggcttggccaaccaaactggagtgggagaggcacaaaatccgcgctagacaaaatagggcatacttggagcgggactgccccgcacagctccagcaactgctggagctcggcaggggcgtgttggaccagcaggtccctcccctcgtcaaggtgactcaccacgtgacctcatcagtcaccaccctcaggtgtcgcgcacttaactattatccacagaatatcactatgaaatggctcaaggacaagcaaccaatggatgctaaggagttcgaaccaaaggatgtactcccaaacggggatggaacctaccagggatggataactcttgctgtgccccctggcgaggagcagcgttatacctgccaggtcgaacatcccggtctcgatcaacccttgattgtgatttgggaacccagtccatccggcaccttggtcatcggagtcatctcgggaatcgctgtgttcgttgtcatcctcttcatcggcattctttttatcatcctgcgcaagcgccaggggtcctctttctag

SEQ ID NO: 4421 - DNA, 771 bp, synthetic construct
  misc_feature 1..771: note = source = /note="Description of Artificial Sequence: Synthetic coding sequence"
  source 1..771: mol_type = other DNA
atgggccctcgtgcacgacccgcactgttgctcttgatgctgctccagacagctgttttgcagggcagactgcttcgctcacactccttgcattatttgtttatgggggcaagcgaacaggacctgggccttagtctgtttgaggcactgggttacgtggatgaccaattgtttgtgttttacgaccacgagagtagaagagttgagccgaggacaccctgggtgagttcccgcatctcctctcaaatgtggctgcagctgtcacagtccttgaagggatgggatcacatgttcactgtcgacttctggaccatcatggaaaaccacaaccactctaaggtccccccactagttaaggtcacccaccatgtgacatcgagtgttacgacactccgatgcagagcgctaaattactacccacagaacataaccatgaaatggctcaaggacaaacagcccatggacgccaaggaattcgagcccaaagacgtgctgcctaatggcgatgggacgtaccagggctggatcactctggccgtcccccctggcgaagagcagaggtatacttgtcaggtggagcatccaggtctcgatcagccacttatagtcatctgggagccctcacctagtggtaccctggtaattggagttatctctggtattgcagtcttcgtggtcattctgttcatcggaatccttttcattattctgaggaaacggcagggatctcgcggagcaatgggccactacgtcctggcagaacgcgagtag

SEQ ID NO: 4422 - DNA, 729 bp, synthetic construct
  misc_feature 1..729: note = source = /note="Description of Artificial Sequence: Synthetic coding sequence"
  source 1..729: mol_type = other DNA
atgggaccccgtgcgaggccggctctgctcctgctaatgctgttacagacagcagttttgcagggtcgacttttgcgaagccactcattacattacctgtttatgggcgcttccgaacaggacctggggttgagtctgtttgaggccctggggtatgtggatgaccaactgttcgtcttctacgaccatgaaagtcggcgagtggagcccagaacgccatgggtgagttcaagaatcagctctcagatgtggttgcagctgagccagtcactgaagggctgggatcacatgtttacagtggacttttggaccatcatggagaaccacaatcatagcaaggttacgactctgaggtgccgcgcactcaactattatccccaaaatatcactatgaaatggctgaaagataagcagccaatggacgccaaagaattcgaacctaaggatgtactccccaacggggacggcacctaccagggttggataacactggctgtgcctccaggcgaggagcagcggtatacatgtcaggttgaacacccaggcctggatcaaccactgattgtgatctgggaaccctccccctcgggaactcttgtgatcggtgtgatctccgggattgctgtttttgtcgtgatcctttttatcggaatactctttattatcttgaggaaaaggcaggggtcacggggtgcgatggggcattatgtgctggccgaaagggagtag

SEQ ID NO: 4423 - DNA, 783 bp, synthetic construct
  misc_feature 1..783: note = source = /note="Description of Artificial Sequence: Synthetic coding sequence"
  source 1..783: mol_type = other DNA
atgggcccaagagcacgtccagccttgctcctccttatgctgctgcagaccgcagtgctgcagggtcgcctgctgcagtctcataccctgcaggttattctcgggtgtgagatgcaggaggacaatagcaccgagggatactggaagtatggatacgacgggcaggatcacctagagttctgcccagatacccttgactggcgtgccgctgagcctcgagcctggcctactaaattggagtgggagcgccataaaatcagagcccgacagaatagagcttatctagagcgcgattgtcccgcacagctgcagcagctgctcgagctgggcagaggcgtgttggaccagcaggtgcctcctcttgttaaggtcactcatcatgttacctccagcgtgacgaccctgcgttgcagagccctgaattattacccccagaacattactatgaagtggttaaaagataagcaacctatggatgctaaggaattcgagcccaaggatgtcctgccaaacggcgacggcacttaccagggttggataactttggctgtgcccccaggtgaagaacagcgctatacctgtcaggttgaacatccaggattagaccagcccctaattgtgatatgggagccatcaccgtcaggcactctggtgatcggtgtgatctccggcattgccgtttttgtcgtgatcctttttatcggcatcctgttcataatcctaagaaagcggcagggtagccgaggagcgatgggccactatgttctggcagaacgagaatag

SEQ ID NO: 4424 - DNA, 231 bp, synthetic construct
  misc_feature 1..231: note = source = /note="Description of Artificial Sequence: Synthetic coding sequence"
  source 1..231: mol_type = other DNA
atgggcccacgtgccaggcctgcattactcctgctaatgttgctccaaactgcagtgctgcaaggaaggcttcttcaaccatcaccaagcggaacactggtcattggagtaatctctggaattgcggtcttcgttgtgatcctcttcatcgggatcctgtttattatcttacgcaaacgtcagggaagtaggggggcaatgggtcactacgtcttggcggaacgggagtag

SEQ ID NO: 4425 - DNA, 507 bp, synthetic construct
  misc_feature 1..507: note = source = /note="Description of Artificial Sequence: Synthetic coding sequence"
  source 1..507: mol_type = other DNA
atggggccacgagctaggcctgcgcttctgctgttaatgctgctgcaaaccgccgtgttacaaggcaggttgttgcttcctccactcgtaaaagtgacgcaccacgtgacctcaagtgtgacgacgttgcgctgccgggctctcaactattacccccaaaacatcaccatgaagtggcttaaggataagcagcctatggacgcgaaggagtttgagcctaaagacgtgctccctaacggggatggaacctaccaggggtggatcacgttggccgtgccgcctggtgaggaacagcgctacacttgtcaggtagagcatccaggactggaccagcccctcatcgttatttgggagccttcacccagcggcaccctcgtgatcggggtcatttctgggattgccgtgttcgtggtgatcctcttcatcggcattctattcattattctgaggaagagacagggaagtagaggggctatgggccattatgtgttggccgagcgcgaatag

SEQ ID NO: 4426 - DNA, 1047 bp, synthetic construct
  misc_feature 1..1047: note = source = /note="Description of Artificial Sequence: Synthetic coding sequence"
  source 1..1047: mol_type = other DNA
atgggcccacgcgcaagacccgctctcctcctgctcatgctgctgcagaccgctgtcctacaaggaagactgctcagatcgcacagtcttcattacctgttcatgggtgctagcgaacaagatctggggctcagtctgttcgaggcgctgggctacgttgacgatcagctcttcgttttttacgatcacgagagtcgcagggtggaaccgaggaccccatgggttagttctcggatttctagccagatgtggttgcagctctcccagagccttaaggggtgggaccatatgtttactgttgatttctggaccatcatggagaaccacaaccacagtaaggagtcccacactctgcaggtcatcctggggtgtgaaatgcaagaggataattcaactgaaggatactggaaatatgggtacgacggccaagatcatctcgaattctgtcctgacacgctagattggagggctgcagagccaagagcatggcctaccaaactggaatgggagaggcacaagatccgagctcgccaaaaccgcgcatatctcgaacgggattgccccgcacaacttcagcagctgcttgaattggggcgaggtgtcctggatcagcaagtgccccctcttgtaaaagtgacccatcatgtaacgagcagcgtcacaactctgagatgcagggcgctcaactattaccctcagaacatcacgatgaaatggctgaaggataaacagccaatggacgccaaagagttcgagccgaaggacgttctcccgaacggggacggaacataccagggttggataacactggcggtgccccctggggaagagcagaggtacacctgtcaagtggagcaccccggactggaccagcctctcatcgtgatatgggaaccgagcccttcaggcaccttagtcatcggcgtcatctcgggaatcgcagtatttgtggtcattctgttcatcgggatactgttcattattttgcgcaagagacaggggtctagaggagccatgggtcattatgtgcttgccgagcgcgagtag

SEQ ID NO: 4427 - DNA, 978 bp, synthetic construct
  misc_feature 1..978: note = source = /note="Description of Artificial Sequence: Synthetic coding sequence"
  source 1..978: mol_type = other DNA
atgggcccacgggcacggcctgctctgctgctgctgatgctgctgcagaccgcggtgctccaaggcaggctgctgcctctcggttacgtggacgatcaactgtttgtgttctatgaccacgagtcgaggcgggtggagcccaggaccccatgggtttcaagcaggatcagcagccaaatgtggctccaattgagccagtcgctaaaaggatgggaccacatgtttacagtagatttttggacaataatggaaaaccacaaccattctaaggagagccataccttgcaggtgattctcggctgcgaaatgcaggaggacaactccacagaagggtactggaagtatggttatgacggccaagaccacttggagttctgcccagatacccttgattggagggctgcagagccaagagcctggccaaccaaactcgagtgggaaaggcacaaaatacgagccagacagaaccgagcgtacttagagcgggactgtcccgcacagctgcagcagctgttggagctgggcaggggtgtgctggaccagcaagttcctcccttagtgaaagttacccatcacgtgacaagttcggtgactactctacggtgtcgggctctgaattactatccccagaatatcaccatgaagtggttaaaagacaaacagccaatggacgctaaggaatttgaacccaaagatgtcctgccaaacggagacggaacttaccaaggatggattacgttggcagtgcccccaggggaggagcagcgttatacctgccaagttgaacaccctggccttgaccagcctttaattgtcatctgggagccaagcccatctggaaccttggtgatcggcgttatctccgggatcgccgtgtttgtggtaatcctgttcattggtatcttatttatcatcctgagaaagcgtcagggctctcgaggcgcaatgggacattacgttctggcagagcgcgagtag

SEQ ID NO: 4428 - DNA, 1005 bp, synthetic construct
  misc_feature 1..1005: note = source = /note="Description of Artificial Sequence: Synthetic coding sequence"
  source 1..1005: mol_type = other DNA
atggggccacgcgcacggccagctctcctgctgctgatgctgttacagactgctgtgttgcaggggcgactgctgaggtcccatagtttgcactacctgtttatgggggctagcgaacaggacctcggcctgagcctttttgaagcgcttggctacgtggacgaccaactcttcgtcttctacgaccacgaatcccgacgagtcgaaccccgtacgccgtgggtgtcatcccgcatcagcagccaaatgtggctgcagctgtcccagtcactcaagggatgggaccacatgtttaccgtcgacttctggacgatcatggagaatcataaccacagtaaggagagccataccctccaggtaattctggggtgtgaaatgcaggaggataactccacagagggttactggaagtacggctatgatgggcaggatcacctggaattttgtccggatactcttgattggagagctgcagaacctagagcatggccaaccaagttagagtgggagagacataagattagagccaggcagaatcgcgcatacctggagcgagactgtccggcacagctccaacagttgcttgaactgggcaggggggtgttagatcaacaggtaaccactctgcggtgtagagccctgaactactatccacagaacatcacaatgaagtggctgaaagacaaacaacctatggatgccaaagagttcgaaccaaaagacgtgctgcccaacggagatggcacgtatcaaggctggattacccttgctgtacccccaggagaggaacagcgctatacttgccaggtcgaacaccctgggctggaccaaccactgatcgttatctgggagccttccccttccgggaccctagtgatcggagtaattagcggtattgccgtcttcgtggtgatcctgtttattggtatcctgttcataatacttaggaagcgacagggttctcgcggagcaatgggacattatgtcctcgctgaacgagagtag

SEQ ID NO: 4429 - DNA, 1038 bp, synthetic construct
  misc_feature 1..1038: note = source = /note="Description of Artificial Sequence: Synthetic coding sequence"
  source 1..1038: mol_type = other DNA
atgggcccaagagctcggcctgcattgcttctgctaatgctgctgcagaccgctgtgctccagggcaggctcctgagaagtcactcccttcattatctgtttatgggagccagcgagcaggacctgggcttgagcctgttcgaagcactcggttatgtggacgaccagcttttcgtgttctatgaccacgaatctagacgcgtcgagcctcgcaccccgtgggtcagttccaggatctcatctcaaatgtggttacagctctctcagagccttaaggggtgggatcacatgttcacagttgacttctggactatcatggaaaatcacaaccacagtaaggagtcccataccctacaggtaattctcggttgtgagatgcaggaggataattctaccgagggatattggaagtacggctacgatggacaggaccatttggaattctgcccagacacgctggattggagggccgctgagccaagggcctggcctacgaaattagaatgggagagacataaaatcagggctcgacaaaatcgcgcttatctcgagcgtgattgtccggctcagctgcagcagttactggaattgggcaggggggtgttagatcagcaggagggatccgagtcttcaagcttgcctggcaaagtcacaacacttaggtgcagggccttaaactattacccccaaaatatcaccatgaaatggcttaaagacaaacaacctatggacgctaaagagtttgaacctaaggacgtcctgccgaacggggatggaacgtaccagggctggatcaccctggctgtgccacctggagaggagcagagatatacttgccaggtcgagcaccccggattggatcaaccactgattgtaatctgggaaccctcacccagcggcactcttgtgattggggtgatttccgggattgccgtgttcgttgtgattctcttcatcggtatattgtttattattctcaggaagcgacaggggagtaggggtgccatgggccactacgtgctcgcagaacgggagtag

SEQ ID NO: 4430 - DNA, 741 bp, synthetic construct
  misc_feature 1..741: note = source = /note="Description of Artificial Sequence: Synthetic coding sequence"
  source 1..741: mol_type = other DNA
atgggtcccagggccaggccggctcttctgctgcttatgctgctccagacagcagtgttacagggtaggctgttacagtcccatactttgcaggtcatactgggctgcgaaatgcaagaggacaattctaccgagggctactggaagtacggttacgatggccaggaccatctcgaattttgccccgatactctcgactggcgtgctgccgagccgagggcatggcccacaaaactagaatgggagaggcacaagatccgagcgagacaaaacagggcctacctggaaagagattgtcctgctcagctccaacagttactggagctcggtagaggagtgttagatcagcaggtcacaacgctgagatgtagggccctgaattattacccccagaatattacaatgaagtggctgaaggacaaacagcctatggatgctaaggaattcgagccgaaggacgtgctgcctaatggggatgggacttaccagggatggatcaccctcgccgtccctcccggtgaggagcagcggtatacctgtcaggttgaacatccagggcttgaccagcctctgatcgtgatttgggagccttctcctagcggcacgttggtgattggagtaatctctggtatcgccgtcttcgtcgttattctttttatcggtattttgttcatcattctccgcaagagacagggtagtaggggagccatgggccactatgttttggcggagcgggaatag

SEQ ID NO: 4431 - DNA, 486 bp, synthetic construct
  misc_feature 1..486: note = source = /note="Description of Artificial Sequence: Synthetic coding sequence"
  source 1..486: mol_type = other DNA
atgggtccacgcgcaagaccagccctgctgctgctgatgttactccagaccgcggttttgcaaggacgcctcctgcgctcacacagtctgcattatcttttcatgggggcttccgaacaggacctcgggctatccctgtttgaagccctggggtatgtggacgaccagttgtttgtgttttatgaccacgaatctaggcgggtcgagcctagaacaccgtgggttagctcgagaataagtagccagatgtggcttcagctttctcaatcactgaagggctgggaccacatgttcacggtggatttctggacaatcatggagaaccataatcacagtaaggaaagtcacacactacaggtgatcctaggatgtgagatgcaggaggataactccacagagggatactggaagtacgggtacgacggccaggtgctgcaggacactatttatagctctgaagtcagctcattggggatcaaattctag

SEQ ID NO: 4432 - DNA, 366 bp, synthetic construct
  misc_feature 1..366: note = source = /note="Description of Artificial Sequence: Synthetic coding sequence"
  source 1..366: mol_type = other DNA
atggaaaatcacaaccacagcaaagaaagccataccctgcaggttattttgggatgtgaaatgcaagaggacaacagcacggaggggtactggaagtatggttacgacggccaggatcacctcgaattttgtcctgatacgctggactggcgagcagctgagccacgcgcatggcctaccaaactcgagtgggagcgtcataaaatcagagctagacaaaacagggcttatctcgaacgtgactgccccgcacagttgcaacagctgttagagctgggcagaggcgtactcgatcagcaggtaccaccactggtaaaggtgacccaccatgttagccatccggctcagccctccaaagagagctag

SEQ ID NO: 4433 - DNA, 1281 bp, synthetic construct
  misc_feature 1..1281: note = source = /note="Description of Artificial Sequence: Synthetic coding sequence"
  source 1..1281: mol_type = other DNA
atgggagaacctggccagtctcccagcccgcgtagctcacacgggtctcctccaactctctccaccctcacccttctgctactgctttgtggacacgcacactcccagtgtaagattctccgttgcaacgctgagtacgtctccagcaccctgtccctgcgcggaggcggatcgtctggtgcactccgtggcggaggtgggggaggccgaggcggtggcgtgggatccgggggtctgtgtagggccttgagatcttacgccctctgcacaagacgcaccgcccgtacttgtcggggtgacctcgccttccacagcgccgtgcatggaattgaggatctcatgattcagcacaattgcagtcgacaaggacccactgcaccaccaccaccacgcggacccgctctgccaggggcaggttcaggattgcctgccccagatccctgcgattacgagggcagattttctcggctgcacggacggcctccgggttttctccattgcgctagcttcggggacccacatgtccgatcgttccatcatcattttcacacctgccgagttcagggtgcgtggcctcttttggataacgacttcctttttgtccaggctacaagctcacccatggccctgggagctaatgccactgccacaaggaagctgacaatcatttttaaaaatatgcaagagtgtattgaccagaaagtctaccaggccgaggtggacaacctccctgtagcattcgaggacggcagcatcaacggaggtgataggcctggtgggagcagcctgagtattcagacagccaatccgggtaaccatgtagagatccaggccgcttacataggcactacgatcatcatccgccagaccgctggacagctgagcttcagcatcaaggtcgcagaggatgtggccatggccttcagcgcggaacaggacctccaactgtgcgtcggcggatgcccaccgtcccagaggttgtctagatccgagagaaaccggagaggggcaatcactattgatactgcacgtagactgtgtaaggaaggcctgcctgtggaggacgcttatttccactcctgcgttttcgatgtgctgatttccggggatccgaacttcaccgttgccgcacaggccgctctcgaggatgcccgagcttttcttcctgatctcgagaagcttcatctcttcccatctgacgccggagtgcctctgagcagcgcgaccctgttagcgcctctgctaagcggtctgttcgttctctggctgtgtatccagtag

SEQ ID NO: 4434 - DNA, 942 bp, synthetic construct
  misc_feature 1..942: note = source = /note="Description of Artificial Sequence: Synthetic coding sequence"
  source 1..942: mol_type = other DNA
atgatccagcataactgcagtcgccaaggtcctactgccccaccacccccacgcggacccgcactccccggagccggtagcggattacccgctcctgatccatgcgactatgaggggcgtttctcacgattgcatggtcgtcccccaggctttcttcattgtgcctcattcggcgacccacatgtccggtcttttcaccaccacttccatacatgtcgtgttcagggcgcttggcctctgctcgacaatgatttcctatttgtccaagccacctccagccctatggcgcttggcgctaacgccactgctacccgcaaactcacaattattttcaagaacatgcaggagtgcattgatcagaaagtatatcaggccgaggttgataacttaccggtggctttcgaggatggctccattaatggaggggatcgaccgggaggatcctccttgagtattcaaacagcaaaccctggcaaccacgtcgagattcaagccgcttatatcggaacgactatcatcatcaggcagaccgctggacaattgtctttttctataaaggtggctgaggacgtggcgatggcttttagcgcagagcaggatctccagctgtgtgtcggaggctgcccgccatcacaacgactcagcaggagcgagaggaaccgtagaggtgccattactatcgacacagccaggcgactttgtaaagagggcctgccagtcgaggatgcgtatttccacagctgcgtgtttgacgtcctcatttcgggtgaccccaatttcaccgtcgcagcccaggctgccctcgaggacgctcgcgctttcttgcccgacttggagaagctgcatctctttcccagtgatgccggtgtccccctctcaagcgccactttattagctccactcctgtctggtcttttcgtgctgtggctttgcatacaatag

SEQ ID NO: 4435 - DNA, 282 bp, synthetic construct
  misc_feature 1..282: note = source = /note="Description of Artificial Sequence: Synthetic coding sequence"
  source 1..282: mol_type = other DNA
atgggggaaccgggtcagagtccatctccaaggtcaagtcatgggtctccacctacactttctacactgacgcttctcctactcctttgcgggcacgcccatagtcagtgtaagatcctgcgctgcaatgcagagtacgtatccagcacattatctctgagaggcggaggctcaagtggcgctctgcgcggaggcggtgggggtggccgaggcggaggcgtggggtccggaggactgtgtcgggcattgaggagctacgccctgtgcacgcgaaggacttag

SEQ ID NO: 4436 - DNA, 603 bp, synthetic construct
  misc_feature 1..603: note = source = /note="Description of Artificial Sequence: Synthetic coding sequence"
  source 1..603: mol_type = other DNA
atgcaggaatgtattgatcagaaagtgtatcaagcggaggtggataatctccccgtggcatttgaagatggatctatcaacggcggagatcgaccgggtggcagctctctatcaattcagaccgcaaatcctggaaatcatgtcgaaatccaagccgcatatattgggactacgataataatccgacagacagctggtcagttgagcttctctattaaggtggctgaagatgtggctatggctttttctgctgagcaggacctgcagctgtgtgtgggtggatgcccaccatcccagcgcctgtccagatcggagcgcaaccggcgtggtgcaatcacaatcgataccgcccgaagactatgcaaagagggactgcccgttgaagatgcttactttcactcctgtgtatttgacgttctgatctcgggggacccaaactttactgtggctgcccaggcagccctcgaagacgctagggcctttcttcccgatctggaaaaactgcacctgtttccttccgacgcaggggtgcctctctcctcagcaacacttctggcccctctgctgagcggtctattcgtgttgtggctttgtatccaatag

SEQ ID NO: 4437 - DNA, 603 bp, synthetic construct
  misc_feature 1..603: note = source = /note="Description of Artificial Sequence: Synthetic coding sequence"
  source 1..603: mol_type = other DNA
atgcaggaatgtatagaccaaaaggtgtaccaggccgaagttgacaatctgccggtcgcgttcgaggacgggtccattaatggcggagatcggcctgggggatcatccttatccatccagacagctaaccctggtaatcacgtcgagatacaggcggcttatatcggtacaacaattattatcagacagacggctggccagttatcattctcgattaaagttgctgaagacgtcgcgatggcttttagtgcggaacaggaccttcaattgtgcgtgggaggctgcccaccgtcccaaaggctctcgagatccgagagaaatcggagaggtgctatcacaatcgataccgcgcgtcgactctgcaaggaaggcctgcccgtagaggatgcctacttccactcttgcgtgtttgatgtgcttatctctggcgaccccaatttcacagtcgccgctcaggctgctctggaagatgctagagcttttctccccgatctggagaaattgcacctattcccctccgacgccggagtgcctctttcctctgccactttgttggcgcctttactgtctgggctgttcgtgctctggctttgtattcagtag

SEQ ID NO: 4438 - DNA, 603 bp, synthetic construct
  misc_feature 1..603: note = source = /note="Description of Artificial Sequence: Synthetic coding sequence"
  source 1..603: mol_type = other DNA
atgcaagagtgcatagaccagaaagtgtaccaagccgaggtcgataacctccccgtggcgttcgaagacgggtcaattaacggaggggataggcctggcggatcctctctttcaattcagaccgctaaccccggaaaccacgtcgaaatccaagcggcatacattgggactactatcatcattaggcagactgctggacagctgtcatttagtatcaaggtggcagaagacgtggcaatggccttctccgccgagcaggatcttcagctctgtgtcgggggatgccctccctcacagcggctctccagaagcgaaagaaatcgccgaggagcgatcacaatcgacactgcacgcaggctatgtaaggaaggacttcctgtggaagacgcctattttcatagttgtgtgttcgatgtcctgatctcaggagaccccaattttaccgtagccgcacaggctgctctagaggatgccagggccttcctgcccgatttagagaagctccacctctttcccagcgacgcaggtgtcccactctcgtcagcgacgttgctggcccctttgcttagcggactgtttgttttgtggttatgtatccagtag

SEQ ID NO: 4439 - DNA, 603 bp, synthetic construct
  misc_feature 1..603: note = source = /note="Description of Artificial Sequence: Synthetic coding sequence"
  source 1..603: mol_type = other DNA
atgcaggagtgtatcgatcaaaaagtttaccaggccgaggttgacaaccttcctgtcgccttcgaggatggcagtattaatggcggagaccgacctggcggatccagcttgagcatccaaacagcaaatcccggaaatcacgtggaaattcaggctgcgtatattggaacaaccatcattataaggcagacagccggtcagttaagcttctcgatcaaagtggcagaggatgttgcaatggccttctcagcagaacaggatcttcagctctgtgtcggtggctgtccccctagtcagcgcctgtcccgatctgaaagaaacagaaggggcgcaatcacaatcgatacagccaggagactgtgcaaagagggtctgcccgtggaggacgcatatttccacagctgcgtgttcgacgtattaatctccggtgatccgaacttcactgtggccgctcaggctgccttagaagatgcacgtgcctttctccccgatctggagaagctgcatctgtttccttcggacgccggagtccctctctcctctgccaccctactcgcacccttactgtccggtctgtttgtgctatggttgtgcattcagtag

SEQ ID NO: 4440 - DNA, 1905 bp, synthetic construct
  misc_feature 1..1905: note = source = /note="Description of Artificial Sequence: Synthetic coding sequence"
  source 1..1905: mol_type = other DNA
atgccctccgacctcgcaaagaagaaggccgctaagaaaaaggaggcggctaaggccagacagaggccacgcaagggtcatgaggaaaacggcgacgtggtgactgagcctcaggtcgccgaaaagaatgaagctaatggtagggagactactgaagtagaccttctaacgaaggaactggaggacttcgaaatgaagaaagcagccgcacgcgcagttactggcgtcctagcctcccacccaaactcaaccgacgtgcatatcattaatctcagcctgacattccatggccaggaactcttatcggataccaaactggaactcaatagcggacgcaggtatgggttgatcggactaaacggaattggaaagtccatgctcttatccgcaattggaaagagagaagtgcctatccctgaacatatcgacatttaccatctgacaagagagatgccgccaagcgacaaaacacctctccattgtgtgatggaagtggatacagaacgggcaatgcttgagaaggaagccgagcggctagcacatgaggacgctgaatgcgagaaattgatggaattatatgaaagactggaagaactcgatgctgataaagccgaaatgagggcctcccgcattctgcacggacttggctttacccccgctatgcagaggaaaaaactgaaggatttcagtggcggatggagaatgcgggtggcgctagcacgcgctctcttcattaggccgttcatgttgctgctggatgaaccaacaaaccacctggatctagatgcctgtgtttggctcgaagaggagctcaagacctttaaaagaatcctggtcttggtgagccatagtcaggatttcctgaatggcgtctgcactaatatcattcatatgcataataaaaaactgaagtactacacgggcaattatgatcagtacgttaagacccggttagagttagaagaaaaccagatgaagcgatttcattgggagcaggatcaaatagcccacatgaagaactacattgccagattcggacacggctcagctaaactggccaggcaggcccagtctaaggaaaaaacacttcagaaaatgatggcctccggactcacagaacgggtggtctccgataaaaccctgtcattctattttcctccgtgtgggaagataccccctccggtaattatggtccagaatgtgtcctttaagtatactaaggacggcccttgcatttacaacaacctggagttcggtatcgacctagatacccgggtggcactggtggggccaaatggagcgggtaaaagtacgctcctcaagctcctgaccggcgaattactcccaactgatggcatgatcagaaagcactctcatgtgaagattggcagataccatcagcacttacaggagcagctcgatctggacctgtccccgttggagtacatgatgaagtgctacccagagatcaaggagaaagaagagatgagaaagataattggcagatacggtctgacaggaaagcaacaggtatcgcctatccggaacctgagtgacggacagaaatgtagagtatgtctggcctggcttgcttggcaaaacccacatatgctcttcctggacgagccaacaaatcacctggacattgaaacaattgatgcactggcggatgccatcaacgagtttgaagggggtatgatgcttgtgagccacgatttccgccttatccagcaggttgcccaggagatatgggtgtgcgagaaacagaccatcacaaaatggcctggtgatatactggcctataaggagcatttaaagtcaaaactcgtcgacgaggagcctcagctgactaagaggacgcataacgtctgcacccttacactggcgtcattgcctcgcccatag

SEQ ID NO: 4441 - DNA, 555 bp, synthetic construct
  misc_feature 1..555: note = source = /note="Description of Artificial Sequence: Synthetic coding sequence"
  source 1..555: mol_type = other DNA
atgtgggtaaccaagcttcttcctgcgttactgttacagcacgtcctcctgcacctactccttctgccgattgccattccatacgcggaaggccagcgtaaacgcaggaacactatccacgaatttaagaaaagcgctaaaaccactctcattaaaatagatccggcactcaaaattaaaacgaagaaagtcaatacggctgatcagtgcgcaaatcggtgcaccaggaataaaggcctgccttttacatgcaaagcatttgtttttgataaggccaggaaacagtgcctctggttccctttcaacagcatgtccagcggagtgaagaaggaattcggacacgagtttgacttatatgagaacaaggactatattaggaattgtataataggtaaaggcagatcatacaaggggaccgtatcgatcacaaagagcggaatcaaatgccagccatggtcttctatgatcccccacgaacactcaggaggcgatgactgtctggtagaaagtaccttttattctattcccttctgggggcataactcagctagatag

SEQ ID NO: 4442 - DNA, 891 bp, synthetic construct
  misc_feature 1..891: note = source = /note="Description of Artificial Sequence: Synthetic coding sequence"
  source 1..891: mol_type = other DNA
atgtgggtgacaaagctattacccgcattgctcctccaacatgtgctgctccatctgcttctactgcccatagccataccctacgccgagggacaaagaaagcgaagaaatactattcatgagttcaaaaagtcagccaaaaccacactgataaaaatagaccctgctctgaaaatcaaaaccaagaaagttaacactgctgatcaatgtgctaaccggtgtaccaggaataaaggcctgcctttcacgtgtaaagcctttgtcttcgataaggcgcgaaaacagtgcctgtggttccccttcaactcaatgtcaagcggggtgaagaaagagttcgggcacgaattcgatctgtatgaaaacaaggactacataagaaactgtatcattggaaagggtcgttcgtacaagggcactgtgagcatcacaaaaagtggaattaaatgtcaaccctggtctagcatgatcccgcacgaacactcctttctgccatctagctatcgtggcaaagatctacaagaaaattattgtcggaacccacggggtgaggagggaggtccatggtgtttcactagtaatcccgaagtccggtacgaggtttgcgacatccctcagtgctcggaggtggagtgcatgacatgtaacggcgaaagttaccggggactgatggatcacaccgagagcgggaaaatatgccagaggtgggatcaccagacacctcacaggcataagtttctgcctgagcgttatcctgacaagggatttgacgacaactactgcagaaacccagacggccaacccaggccttggtgttacaccctcgatccacacacaagatgggaatattgtgctatcaagacctgcggcgatatcacctgggccttgaactag

SEQ ID NO: 4443 - DNA, 426 bp, synthetic construct
  misc_feature 1..426: note = source = /note="Description of Artificial Sequence: Synthetic coding sequence"
  source 1..426: mol_type = other DNA
atgtgggtgacgaaattgctgcctgctctcctgctgcagcacgtactgctccacttgcttttattgcctattgccatcccctacgctgaaggacagcggaaaaggagaaacaccattcatgaatttaagaagagtgccaagacgacactgatcaagatcgaccccgctctgaagattaaaactaaaaaggtgaataccgccgatcaatgtgcaaatcggtgtacccggaacaagggactcccctttacctgtaaagcattcgtgtttgacaaggcgcgtaagcagtgcttgtggtttccatttaatagcatgtcctcgggtgttaaaaaagaatttggtcacgagttcgacttatacgagaacaaagattatatcaggaactgtatcatcgggaaaggtagatcatataaaggcacagtatcttag

SEQ ID NO: 4444 - DNA, 357 bp, synthetic construct
  misc_feature 1..357: note = source = /note="Description of Artificial Sequence: Synthetic coding sequence"
  source 1..357: mol_type = other DNA
atgtgggtaactaagttactgcctgcactgctactccaacacgtgctattgcatctgctcctcctgcccatcgcgatcccctatgcagaagggcagcgcaagcgccgaaatactatacatgagttcaaaaagtccgcaaaaaccactctaattaagatcgatccagcgctcaagataaaaaccaaaaaagtgaatactgccgatcagtgcgcaaacagatgtaccaggaataaaggcctcccttttacctgcaaggccttcgtgtttgataaggcaagaaagcaatgtctgtggttcccttttaacagcatgtctagtggagtgaaaaaagagtttggccacgaattcgacctgtag

SEQ ID NO: 4445 - DNA, 633 bp, synthetic construct
  misc_feature 1..633: note = source = /note="Description of Artificial Sequence: Synthetic coding sequence"
  source 1..633: mol_type = other DNA
atgtgggtgactaaattactccctgcactcctgctgcagcacgtcctcttacacctcctccttcttccgattgccatcccatatgccgaaggtcagaggaagcgcaggaataccatacatgaattcaagaaatctgctaaaacaacactcattaagatagaccccgctctgaagatcaaaacgaagaaagtgaatacagctgaccaatgcgccaatagatgtactcggaacaaagggctaccattcacctgcaaggccttcgtgttcgataaggcaaggaagcagtgtttgtggtttcctttcaacagcatgagctccggtgtcaaaaaggagttcggccatgaattcgacttgtacgaaaacaaggattacatccggaactgtatcatcggaaaaggacggagttacaagggtactgtaagcattacgaagtccggtatcaaatgtcagccctggtccagcatgatcccgcacgaacacagcttccttccttcctcctataggggcaaagatctgcaggaaaactactgcaggaaccctagaggggaggaggggggtccctggtgttttaccagtaaccccgaggttcggtacgaagtttgcgacatcccccagtgctccgagggaaagtag

SEQ ID NO: 4446 - DNA, 873 bp, synthetic construct
  misc_feature 1..873: note = source = /note="Description of Artificial Sequence: Synthetic coding sequence"
  source 1..873: mol_type = other DNA
atgtgggtgactaaattgctcccggcactcctactgcaacacgtgctgctccatctcctgctgcttcccatcgccatcccctatgctgaagggcaaaggaaacggcgaaatacaattcacgaattcaagaagtccgcaaaaactacactcatcaaaatcgatccggcattaaagattaaaaccaagaaagtgaacacagcagaccagtgcgccaacagatgtacgaggaataagggcctgccattcacttgtaaagcatttgtgttcgacaaggctaggaaacaatgtctgtggttccccttcaattctatgtcatcgggagttaaaaaggagtttggtcacgagttcgacctgtacgaaaacaaggactacatccgaaactgtattatcggtaaagggagaagctataaaggaaccgtttcaatcaccaaatcaggaattaagtgccagccatggtcatccatgatccctcatgagcatagtttcttaccctcgtcctatcgtggcaaagaccttcaggagaattattgtaggaatccacgaggtgaggagggaggcccatggtgctttaccagcaaccctgaggttcggtatgaagtgtgcgacattccccaatgctcggaggtggagtgtatgacttgcaatggagagtcgtacaggggactgatggaccacacagaatcagggaaaatttgccagcggtgggaccatcagacgccacaccgacacaaattcttacctgagcgctaccctgataaaggctttgatgataactattgccgcaaccccgacggacagcccagaccttggtgctacacactcgacccccacacaaggtgggagtattgcgccattaagacttgtgaaacttag

SEQ ID NO: 4447 - DNA, 858 bp, synthetic construct
  misc_feature 1..858: note = source = /note="Description of Artificial Sequence: Synthetic coding sequence"
  source 1..858: mol_type = other DNA
atgtgggtcaccaaattattacccgcacttctgctccagcacgtacttctgcaccttctcctccttccaatcgccattccatacgccgagggtcagcgcaagaggagaaacaccatccatgagttcaaaaagtctgcaaagaccactctcatcaagatcgatcctgccttgaaaattaagaccaaaaaggtaaacacggccgatcagtgtgccaatagatgcaccaggaataaaggtctacctttcacatgtaaggccttcgtcttcgataaggcgagaaaacagtgcctgtggttcccttttaatagtatgagttccggtgtgaaaaaggagttcgggcatgaatttgacctgtatgagaacaaagattacattcgtaattgcatcatcgggaagggtcgatcgtataaaggtaccgtgagcattaccaaaagcggcattaagtgccaaccttggagctccatgatcccccatgaacatagctatcggggaaaagatctgcaggaaaattactgtagaaacccacgcggtgaggaggggggtccttggtgctttacttccaaccctgaagtgcgttacgaagtatgtgacatcccacagtgttcagaggttgagtgtatgacttgcaacggggagtcataccgcggtctgatggatcacacagaaagtggaaagatttgccagaggtgggaccaccagacgccacaccgtcataaatttttacctgagcggtatcctgacaaaggcttcgacgacaattactgtaggaatccagatggacagccgcgaccctggtgctatacactcgacccccacacaagatgggagtactgcgccattaagacctgcgagacctag

SEQ ID NO: 4448 - DNA, 2172 bp, synthetic construct
  misc_feature 1..2172: note = source = /note="Description of Artificial Sequence: Synthetic coding sequence"
  source 1..2172: mol_type = other DNA
atgtgggtgaccaagctactgccggctctgctactacagcacgtgctgcttcatctgctgctcctgcctatcgccatcccatacgcagaggggcagcgcaaaaggcgtaatactattcacgagttcaagaaatcagccaagacaacactaatcaagatcgatccagccctgaagataaagactaagaaggtcaacactgctgaccagtgcgctaaccgctgtactaggaacaaagggctgcctttcacctgcaaagctttcgtatttgacaaagccagaaaacagtgcctatggtttcccttcaactccatgagctctggagtgaagaaggagttcggacacgagtttgacctgtacgaaaataaggattacattcggaactgtatcatcgggaaaggcagatcctacaagggaaccgtctccatcacaaagtcggggatcaagtgtcagccctggagctccatgattccccacgagcactcctaccgaggtaaagatctccaggagaactattgtaggaaccccagaggagaggagggcggaccctggtgttttacgagcaatcccgaggtcaggtacgaggtgtgcgacatcccccagtgttcagaggtggagtgcatgacctgcaatggggaaagttatcggggtctgatggaccacaccgaaagcggcaaaatttgccagcgctgggatcaccagaccccgcatcggcacaaattccttccagagcgatatccagacaaaggtttcgacgacaattactgccgaaatcccgatggccagccacgaccttggtgctacacacttgatccacatacgagatgggaatactgcgcaattaagacctgcgcggataacactatgaacgatacggatgtgccccttgaaacgaccgaatgcatccagggacaaggcgaaggctacagaggcacggttaataccatctggaacgggatcccctgccaacgttgggacagtcagtacccccatgaacacgatatgacccccgaaaactttaagtgtaaggatctccgcgaaaactattgtcgcaaccctgacggatcagagagcccatggtgtttcactaccgacccaaacatcagggttgggtactgctcccaaattccaaattgtgacatgtctcatggtcaagactgttatcggggaaacggcaaaaactatatgggcaaccttagtcaaacacgaagtggtcttacctgttccatgtgggacaagaatatggaagatcttcaccgccacatattctgggagcctgatgctagtaagctgaacgagaattattgtcggaacccagacgatgatgcgcacgggccttggtgttatactggcaaccctttgatcccatgggattattgccccataagccgctgcgaaggagatacgactcctaccattgtcaatctggaccaccccgtcattagctgtgccaaaactaaacagttacgcgtcgtgaatggtatccctacacggactaatatcggctggatggtatctctgaggtaccgaaacaaacatatctgcgggggtagcttgataaaggagtcttgggtcctcacagcgaggcagtgcttcccgagcagagacctcaaagactacgaggcgtggctcgggatccacgacgtgcatggcaggggtgatgaaaaatgcaagcaagtcctgaatgtgtcacagcttgtgtatggacccgagggctcagatctggtgctcatgaaactggctcggccagccgttctcgatgactttgtgtcaactatcgatttgccaaactatggctgcactatcccagagaagacgtcctgttcagtctacggatggggctacacgggtctgatcaactacgacggcttgttgagagttgcgcatctgtatatcatgggcaacgaaaaatgttcccagcatcataggggtaaagtgacccttaacgagtctgagatctgcgctggcgcagagaagattggttccggcccatgtgagggcgattacggaggccctttggtctgtgagcagcacaaaatgaggatggttctgggtgttattgtcccgggacgcggatgcgccatccccaaccggcctggtatcttcgtccgggtcgcttattatgccaagtggatccataagatcatcctcacctacaaggtccctcagtcatag

SEQ ID NO: 4449 - DNA, 363 bp, synthetic construct
  misc_feature 1..363: note = source = /note="Description of Artificial Sequence: Synthetic coding sequence"
  source 1..363: mol_type = other DNA
atgaatggtgaggaaaagtcgtgctctggctacggcggaccggatgccatggatggcaagctggtctcctcagacgatgacgatttcatcgtgaagcgggaacacacgagggcctccgggataagaaaggcggtactgtctggacccggtcaatctgccgaaaacgaaaccgaccaggtgaattttcgcgagattccacccagatgctatcctaaacatgcaaaggcatgtatctactttacatacaaagtgcattattctaactcatccacggagatcccagaattcttgaccgccctggaagtgctgatggcttctgactttctggatatttacatcttcctcttttttctttttttttag

SEQ ID NO: 4450 - DNA, 255 bp, synthetic construct
  misc_feature 1..255: note = source = /note="Description of Artificial Sequence: Synthetic coding sequence"
  source 1..255: mol_type = other DNA
atggctctctctagccagatctgggccgcatgtctgctgcttctattactgctagcctctctaacttccggttctgtgttcccacaacagaccggacagctcgctgaactacagccccaggacagagcaggggcaagagcgagctggatgcccatgtttcagcgcaggcgacgtagagacacacactttcctatctgtattttctgttgcggctgttgccatcgatcgaagtgtggcatgtgctgcaagacatag

SEQ ID NO: 4451 - DNA, 1422 bp, synthetic construct
  misc_feature 1..1422: note = source = /note="Description of Artificial Sequence: Synthetic coding sequence"
  source 1..1422: mol_type = other DNA
atggccgttatggcccctagaaccttggtgcttcttttgagtggcgctctcgcgctgacccaaacttgggctgaggtgcaactcgtggaaagcggaggtggcctcgtgcaaccagggggaagcttgcggctaagttgtgctgcgagcggctttaatattaaggacacttatatccactgggtgagacaagccccaggaaaaggactggaatgggttgccagaatctaccccaccaacggatacacacgatatgccgacagtgtcaagggaaggttcacaattagtgccgatactagtaagaatactgcttacttgcagatgaatagcctgcgagccgaagacacggcagtttactactgttcccggtgggggggtgatgggttctacgcgatggattattggggccagggcaccctggtgacagtatcctcggccagcactaaggggcctagtgtattccctctagcccctagcagcaagtcgacatccggcggaacagccgcattggggtgcctggtgaaagactacttccccgagcccgtgacagtgtcttggaactctggcgcactgacatccggcgtgcacacatttcctgctgttcttcaaagttccggactctatagtctctcttcagtggttacggtaccctccagttccctgggtactcaaacttatatctgcaatgtgaatcacaagcccagcaatactaaggtggataagaaggtggagcccaaaagttgtgacaaaacacacacgtgccccccatgccctgcacctgagctgctggggggaccttccgtctttctcttcccccctaaacctaaggacacccttatgataagtagaacaccagaggtgacctgcgtagtagttgacgttagtcatgaggatcctgaagtgaagttcaattggtacgtggacggagtggaggttcataacgcaaaaaccaaacctcgcgaagagcaatataattctacatacagagtggtatcggttctgacagtcctgcatcaggactggctgaacggtaaggaatataaatgtaaggtctctaataaggctttgccagcaccaatagagaagacaatatccaaggccaagggtcagccaagagagcctcaggtctacaccttgccaccctcgcgggacgaactcacaaaaaatcaagtgagtctcacatgcctcgtcaaaggattttaccccagcgatattgctgtagagtgggagtccaacggccagccagagaataattacaagaccacaccgcctgtattggattcagacggatcttttttcctgtattctaaattgactgtggacaagtcgagatggcagcaaggaaacgtgttttcatgcagcgtaatgcacgaggccttgcataaccactacactcagaagtccctgagcctctcacctggctag

SEQ ID NO: 4452 - DNA, 717 bp, synthetic construct
  misc_feature 1..717: note = source = /note="Description of Artificial Sequence: Synthetic coding sequence"
  source 1..717: mol_type = other DNA
atggcagtaatggctcccagaacactggtcttgctcttgagtggcgctctcgcactcactcagacatgggctgatatccagatgacacagagtccctcttccttatcggcctcggtgggcgaccgggttacgatcacttgtcgcgctagtcaggacgttaatactgccgtcgcatggtaccagcaaaagcctgggaaggcgccaaagctgttgatatattctgccagttttctgtattccggcgtgccatccagatttagcggaagcagaagtggaacggactttacgctgactatttctagtttacaacctgaagactttgctacctattactgccagcagcactataccacgcccccaacttttgggcaggggaccaaagttgaaatcaaacgcacagtcgccgctccatccgttttcatctttcctccctcagacgagcagctgaagtctggaaccgcatccgtggtgtgcctgttgaacaacttttatccacgggaggccaaggtgcaatggaaggtcgataacgctcttcagagcggcaatagccaagagtcagtgacagagcaggactctaaggactccacttattcgctgtcttcaacgctgaccctgtccaaagctgattatgaaaagcataaagtctacgcctgcgaggtgacgcaccagggattgtcgtcgcccgtcacaaagagcttcaaccgcggagaatgctag

SEQ ID NO: 4453 - DNA, 657 bp, synthetic construct
  misc_feature 1..657: note = source = /note="Description of Artificial Sequence: Synthetic coding sequence"
  source 1..657: mol_type = other DNA
atggccactcggtctcccggtgtagtgatatctgacgatgagcctgggtatgaccttgacttgttttgcatccccaaccattacgccgaggacctagagagggtcttcatccctcatgggttaatcatggatcgcacagagcgactagcgagggacgtcatgaaggaaatgggcggtcaccacatagttgcactgtgtgttctaaaagggggatacaagttttttgctgatctgctggactacatcaaagctttgaatagaaactcagatcggtccatcccgatgactgtggacttcatccgacttaagagttattgtaacgatcagtctaccggcgatattaaagtgatcgggggagatgatttgagtacacttaccggcaaaaacgtactgattgtggaagacattatcgacaccggtaagactatgcagaccctgctgtcccttgttcggcaatacaacccgaaaatggtgaaagtagctagcctcctggtcaagcggactcccagatcagtggggtacaaaccagactttgtagggttcgaaatccctgataaattcgtggtgggttacgcactggattacaacgaatattttcgggacctgaatcatgtctgcgtgatatctgagactgggaaggctaagtacaaagcctag

SEQ ID NO: 4454 - DNA, 657 bp, synthetic construct
  misc_feature 1..657: note = source = /note="Description of Artificial Sequence: Synthetic coding sequence"
  source 1..657: mol_type = other DNA
atggcaacaagaagtcctggggtggttataagtgatgacgagcccggatacgacctggacttgttttgcatcccaaatcactatgctgaggatttagagcgagtgttcattccacacggattgatcatggacaggacagagaggttagctcgtgatgtgatgaaagaaatgggcggacaccacatcgtcgcactctgcgtgttgaagggcggttataagttctttgcagacctactcgattatattaaggccctgaatcggaattctgatagaagcattcccatgaccgtagattttatcaggctgaagtcctactgtaacgaccagtccactggtgatattaaggtgattgggggtgacgacctctctaccctcaccggcaagtcccgtctgctagccgaggacattattgacacaggcaagaccatgcagacactgctgagcctcgtgcgccagtataaccctaagatggtgaaggtggcctccctcttagtgaaacgtacaccaagatctgtcgggtataagccggatttcgtgggctttgagattccggacaagtttgtcgtgggctacgcgttggattataacgagtactttagagatctaaaccacgtgtgtgttatctctgaaactggcaaggccaagtataaggcgtag

SEQ ID NO: 4455 - DNA, 1653 bp, synthetic construct
  misc_feature 1..1653: note = source = /note="Description of Artificial Sequence: Synthetic coding sequence"
  source 1..1653: mol_type = other DNA
atgcctcctcctcggacaggccgaggtctgctgtggctggggctcgttctgagctccgtgtgcgtcgctctgggctctgagacgcaggccaattcaaccactgatgcactcaatgtactcctgatcatcgtggacgatctgcgtccttcacttggctgttatggcgataaactggtccgtagccctaacatcgaccagcttgcttctcactcattattgtttcagaatgccttcgcccagcaggctgtttgtgccccatcaagagtcagttttctcacagggagaaggcccgatacaacacgtttgtacgactttaatagttactggcgcgtacacgcaggcaacttttcaacaattccacagtatttcaaggagaacgggtacgtaaccatgtccgtggggaaagtcttccatcctggcatatcttctaaccacaccgatgattccccatactcctggagcttcccaccttaccacccatcctcagaaaagtatgagaatactaagacctgtcggggacccgatggtgagctgcacgcgaatctgctgtgtcccgtcgacgtgttggatgtgccggaaggcacactgcctgacaagcagtccacagagcaggctatccagcttctggaaaaaatgaagacaagcgccagtccatttttcctggctgtggggtaccacaaaccgcacattcctttccggtaccctaaggagtttcagaagctctaccctctggagaatatcacactggccccagatcctgaagtccctgacggtcttcccccagtggcctacaacccttggatggatattcgccagagagaggatgttcaggcactgaacattagtgtcccctacggacccattccggttgattttcaacgtaagatccgacagagttactttgccagcgtgtcttacctggatactcaggtgggccgtctgctgtccgctctggatgatctgcagttggccaactctaccattatagccttcaccagcgatcacggctgggcactcggtgagcacggagagtgggcgaagtactcgaacttcgacgttgctactcacgttccgcttattttttatgtacctggaagaacagcttcactgccggaagccggtgaaaaactgttcccctacctggacccattcgattcagcatcacagctaatggagccgggtagacagagcatggatctcgtggaactggtgtctctgttcccaacactcgctggattagctgggctacaggtaccccctagatgccccgttccatcttttcacgtcgagttgtgcagagaaggtaagaacttgctgaagcattttaggtttcgcgacctggaagaggacccttacctgcccggtaacccacgggagctgatcgcgtactcacaataccctcggccaagtgacatcccccaatggaacagtgataagccctcactgaaagacattaagatcatgggctactccattagaacaatcgactacagatacacagtgtgggtcggcttcaaccctgatgagtttctcgcgaatttctctgacatccacgcgggtgagttgtacttcgtggattccgatcctctgcaggaccataatatgtacaatgatagccagggaggtgatctcttccaattgctgatgccctag

SEQ ID NO: 4456 - DNA, 1032 bp, synthetic construct
  misc_feature 1..1032: note = source = /note="Description of Artificial Sequence: Synthetic coding sequence"
  source 1..1032: mol_type = other DNA
atgccaccacccagaacaggaagaggccttctgtggctgggactcgtgctgtctagcgtgtgcgtcgctctcggtagcgaaacccaggctaatagcacaaccgacgctctaaacgtgttactcatcatagttgacgatttgcgcccatccttagggtgctatggcgacaagctggtacgcagccctaacatcgaccagctggcctctcattctcttctgtttcagaacgcgttcgctcagcaggcagtttgtgcgccaagcagggtaagctttctaactggacgcagaccggacacgaccagactgtatgacttcaactcttactggagggttcatgcaggcaacttttcaaccattcctcagtactttaaggagaatgggtatgtcactatgtctgttgggaaggtgtttcatccgggtatctcaagcaaccacacagatgactccccttattcgtggtcattccccccatatcacccttcaagcgaaaagtatgagaatacaaagacctgtcgaggacccgacggtgagttacacgccaacttactgtgtcctgtggatgttctggacgtgcctgagggcactcttcccgacaaacagtccaccgagcaggccatccaactgctggagaagatgaagaccagtgcgagccccttcttcctcgccgtagggtatcataagccacacattcctttcaggtatccaaaagagtttcaaaaattgtacccactggagaatattacacttgcgccagatccagaagtccctgatggcctgcctcctgtcgcgtacaatccttggatggacattagacagagagaggatgtgcaggctctgaacatctctgtgccttatgggccaataccggtggatttccagcgcaagatcagacagagctattttgccagcgtaagctacctggacacacaggttggtcgtctcctgagtgctcttgacgacctacaactggccaactcaactattatagcctttacgtccgaccacggttttctcatgcgaaccaacacgtag

SEQ ID NO: 4457 - DNA, 939 bp, synthetic construct
  misc_feature 1..939: note = source = /note="Description of Artificial Sequence: Synthetic coding sequence"
  source 1..939: mol_type = other DNA
atgccgccaccacgcacaggaagaggactgctgtggttgggtcttgtgctgagtagcgtttgtgtggccctggggtcagagacacaagccaatagcactaccgatgccctcaatgtgttgctgataattgtagatgatctgagaccttctctggggtgctatggcgataagctggtgagaagccccaacattgaccagttggcatctcactcactcctgttccagaatgccttcgctcagcaggcggtgtgtgccccttctcgggtttcttttctaacagggagacggcctgacacaactagactgtatgacttcaactcctattggcgggtccatgcaggtaattttagcacaatccctcagtacttcaaggaaaacggttacgtaactatgtctgtgggtaaagtgtttcacccagggatatcgagtaaccataccgatgacagcccgtactcctggtcctttccgccataccacccaagctcagaaaaatacgaaaacactaaaacctgcagaggcccagacggagagctgcacgccaatctcctatgccctgttgacgttttagatgtcccggagggaactctgccagataagcagagtactgagcaggccatccagcttctcgagaagatgaaaacctcagcctcgcctttctttctggctgttggatatcacaaacctcatattcccttccgctacccaaaggagttccagaagctgtatccgctggaaaacattactctggcccctgatccagaggtccccgacgggctcccaccagtagcctataacccttggatggacatcaggcagagagaagacgtacaggcccttaatatctccgtcccgtacggacccattcctgtcgatttccaggaggaccagagtagcactggattcagactcaagacctcatccacaaggaaatacaagtag

SEQ ID NO: 4458 - DNA, 540 bp, synthetic construct
  misc_feature 1..540: note = source = /note="Description of Artificial Sequence: Synthetic coding sequence"
  source 1..540: mol_type = other DNA
atgccacctccccgtaccggacgcggactcctatggctgggattggttctgagtagtgtctgcgtcgccctcggctcagagacccaggctaactcaaccacagacgccctaaatgttctgttgatcattgtagatgatctccggccatccctcgggtgctacggggacaagctggtgagatcaccaaatattgaccagctagcttcacacagcctcctttttcaaaacgcctttgcccagcaggccgtgtgcgctccttctagagtcagcttcctcaccggcaggcgtcctgatactacacgtttgtatgactttaacagttactggcgcgttcacgccggaaactttagcactatcccgcagtacttcaaggagaacggctatgttactatgtcagtcggcaaagtgttccatccaggtaccgccccatgccccgaatccggattttcatggttcgtcgtatctgaatcttcgatcccaatcctggggatggggttgtcattgcagagccctctgcttgcagggagggtcccacgttag

SEQ ID NO: 4459 - DNA, 261 bp, synthetic construct
  misc_feature 1..261: note = source = /note="Description of Artificial Sequence: Synthetic coding sequence"
  source 1..261: mol_type = other DNA
atgccgcctccacgtaccggaagaggactgctgtggctgggcctcgtgctctctagcgtgtgcgtggctctcggtagtgagacacaagctaattcaactactgatgcattaaacgtgctgctgatcatcgtggatgacctgcgccctagtcttgggtgttatggggacaaactcgttcgctcaccaaatattgaccagttggcctctcattccctgctgttccagaacgcattcgcccagcaagcggtgtgtgctccttag

SEQ ID NO: 4460 - DNA, 462 bp, synthetic construct
  misc_feature 1..462: note = source = /note="Description of Artificial Sequence: Synthetic coding sequence"
  source 1..462: mol_type = other DNA
atggatttggttgagctagtttccctgttcccaacactggcgggtctggccggtctccaggtcccaccacgatgccctgttccgagcttccatgttgagctctgtcgggaagggaaaaatctcctaaaacacttcaggttcagagacctcgaagaggacccttatctccctggaaatcctagagagttgatcgcctattctcagtacccccgacccagtgacatcccacagtggaatagcgacaagccgtcactgaaagacattaaaatcatgggatatagcatcagaacaatcgactacagatacactgtttgggtgggatttaatccagacgaattcctggccaatttttccgacatccacgccggagaactgtactttgttgacagtgatcccctgcaggaccacaatatgtacaatgattcccagggtggggatcttttccagctgctcatgccctag

SEQ ID NO: 4461 - DNA, 1020 bp, synthetic construct
  misc_feature 1..1020: note = source = /note="Description of Artificial Sequence: Synthetic coding sequence"
  source 1..1020: mol_type = other DNA
atgaagacatccgcctctcctttcttcctcgcggtcggatatcacaaaccacatatcccctttcgctatcctaaagaattccagaagctgtaccctctagagaatatcacgctggcccctgaccctgaagtaccagacggcctgccccctgtggcttataacccatggatggatataaggcagcgggaggacgttcaagctttaaatatttctgtgccatatggacctatccccgtggactttcagaggaaaatcagacagagttatttcgcctctgtttcctacctcgacacccaggtgggcaggctacttagcgccctggatgacctccaactcgccaattccactatcatagccttcacgagtgaccacggttgggctttaggcgagcacggcgagtgggccaaatattctaatttcgacgtggccacacacgtacctcttatcttctacgtcccaggcaggaccgcctcattacccgaggccggagagaagcttttcccatacctggatccttttgatagcgcgtcccagttgatggagccagggagacagtccatggatctcgtagagctagtcagcttattccccaccctggccggattggccggactgcaggtgcccccaaggtgtcctgtcccttcattccatgtagagctgtgcagggaaggcaagaatttgttgaagcacttccggtttagggatctcgaggaggacccctacctgcctggtaatcctcgagagttaatcgcgtattcgcaatatcctcgcccatctgacatacctcagtggaactccgataaaccctccctcaaagacataaagattatgggatactctatccggactatcgactataggtatactgtttgggtcggtttcaaccctgatgagtttctcgccaacttctcagatatacatgcgggagaactgtatttcgtggactctgatccattgcaagatcacaacatgtacaacgattctcaggggggagacctctttcagctactgatgccatag

SEQ ID NO: 4462 - DNA, 1962 bp, synthetic construct
  misc_feature 1..1962: note = source = /note="Description of Artificial Sequence: Synthetic coding sequence"
  source 1..1962: mol_type = other DNA
atgagaccattgagaccaagggcggcattactagcattgctagcttcactgttggccgcaccaccggtggctcccgctgaagctccacatttagtacacgtggatgcagcaagggccttgtggcctctgcggagattctggaggtcgaccgggttctgcccacccctcccacactcacaggcagaccagtatgtcctgtcttgggaccaacagctaaatcttgcatacgtgggagctgtaccacacagaggtatcaagcaggtacgtacacattggctgctcgaactcgtgacgacacggggatctaccggcaggggtctgtcatataatttcacgcacctggatgggtacctggacctgctcagagagaatcagctgctcccaggctttgagcttatggggtcagcttctggacacttcacagatttcgaagacaagcagcaggtgtttgaatggaaggatctcgttagttcattggcacgcaggtacatcggaagatatggcctggctcatgtctctaagtggaactttgagacgtggaacgagcctgaccaccacgattttgacaatgtgtccatgacaatgcagggatttctcaattactatgatgcatgttctgaaggcctgcgcgctgcatctccggcactgaggttagggggacctggggactctttccacacccctcccaggagtccactatcctggggccttttgaggcattgccatgacggcactaactttttcaccggtgaggcaggcgtccggttggattatatttcacttcaccggaagggtgcacggtctagcataagtattctcgaacaagagaaggtcgtggcccagcagattaggcaattatttcctaagtttgccgacacccccatctacaacgacgaagccgatcctctcgtaggttggtctctcccccaaccatggcgagcagacgtgacctacgccgctatggtcgtcaaagtgattgcacaacaccagaatctcctacttgccaatacaacgagcgcattcccctacgcactgctgagtaacgataacgcatttctgtcctaccacccacacccatttgctcagcgcaccctaaccgcaagatttcaagtgaataatacccgacctccccacgtgcaactcctccgaaagccggtcttgactgccatggggctgctggctttgctggatgaggagcagctctgggccgaggtctcacaagcaggcaccgtgctggactccaaccacacggtgggagtgttagctagtgctcacaggccccagggcccagccgacgcctggagggcagctgtgctcatttatgcgtctgatgatacacgggctcaccccaatcggtccgtcgcagtgacactgaggcttaggggggttcctcccggacctggactggtgtatgtgacaagatacctagacaatgggctgtgtagccctgacggagaatggcggagacttggacgtcctgtgttccctacagctgaacaattccgaaggatgcgggctgcggaggacccggtggctgcggctcccagacccctgcccgctggcggacgactcacgctcagacctgctttgaggttgccgtcactccttctcgtgcatgtgtgcgctaggcctgagaagcctcctggacaggtgactcggctccgggcactacccctgacccaggggcaattggtgctggtctggtctgacgaacacgttggcagcaaatgcttgtggacgtacgagatccagttttcacaggacggaaaagcgtatactcccgttagccggaaaccgagcaccttcaacctgtttgtgtttagtcctgacaccggcgcagtcagcggcagttacagagttcgcgctctggactactgggccaggcccggtccctttagcgacccagtgccttatttggaggtgccagtccccaggggacccccatcacctgggaacccatag

SEQ ID NO: 4463 - DNA, 2028 bp, synthetic construct
  misc_feature 1..2028: note = source = /note="Description of Artificial Sequence: Synthetic coding sequence"
  source 1..2028: mol_type = other DNA
atgcggcctctcagacccagagcagccctccttgcgctgcttgccagcctgcttgcggctccgcctgtggcccctgcagaagctccccaccttgtccacgtggacgccgctcgagccttatggcccctccgcagattctggcggagcacgggtttttggggtagcaccggacggggactgtcgtacaacttcacgcacctggatggatacctggatctcctgcgggaaaatcaattactgccgggattcgaactaatggggagcgcctccggccactttaccgatttcgaggacaagcagcaggtgttcgaatggaaagatctcgtttctagcctcgcacgcaggtatatcggtcgctacgggctggctcacgtgtctaagtggaactttgaaacttggaatgaacctgaccatcacgattttgataacgtgtccatgactatgcagggctttttgaactactacgatgcatgcagcgagggactgcgggcagcttctccggctttgagattggggggtcctggggattcgttccatactccgcctcggagtcccttgtcgtggggcttgctacgccactgtcatgacgggactaacttcttcactggtgaggccggtgtgcgactggactatatctccctccatagaaaggtccgaccggcaccgccatccgctcctgtgttttgtgcactgtcccggtgcgccccaggtagagctgatcccggtggcgctgaagctgcccctcctgccggatgtgcacagctgcatttgcaccccggagccggagaaggacgcagggccgctgaccccgcagccctcccacaggtccgaggacatccccacctgcagcgacggggaggccctgccggagggttggtgcctgctacggccgttgagggaggacgggacctacgcggtcatggtggggagggcggtcctgcccagcggcctgctagaccacctgcgaccttcttaccaaggcgggaccgtagggcggtggcggcacccccagggcctagctgcccaggacatccccaggtaatcgcacagcaccagaatttactcttggcaaacactacctctgcatttccttacgccttacttagcaacgacaatgcatttttatcataccacccccatcccttcgcacagagaaccctgacagctaggtttcaagtcaataataccaggccgcctcacgtccagctgctgagaaagcccgtgctgacagcaatgggactgttggcgcttttagatgaggagcagctatgggcagaagtgtctcaggctggaactgttctcgacagcaatcacacagtcggtgtcctcgcttccgcgcataggccccagggcccagctgacgcctggcgtgctgccgtcctcatctacgcgagcgatgacaccagagcccacccaaaccgctctgtggctgtgaccttacgcctgcgtggggtgcctccgggtcccggactcgtgtatgtaactaggtatctggacaacggactctgtagccccgatggggaatggaggcgattggggaggcccgtgttcccgacagctgagcagtttcgcaggatgagagcagctgaagaccccgtcgctgccgcaccgaggcctctccccgctggaggacgccttacgttgcgccctgcattgcggctgccttcccttctgctcgtgcacgtgtgcgcacgaccagagaaacctccgggtcaagttacccgactgcgtgctctgcccctgacccaaggccagctcgttttggtgtggagcgatgaacatgtgggatcgaaatgtctgtggacttacgagatccagttttcacaggacggcaaggcctatacgcctgtttcgcgcaaaccctccaccttcaacctgttcgtgttttcccctgacactggagccgtgagcggcagctatcgggtgcgcgcactagattattgggccaggcctggaccctttagcgacccggtcccttatctcgaggttcctgttcccaggggcccaccatcacccggaaacccgtag

SEQ ID NO: 4464 - DNA, 603 bp, synthetic construct
  misc_feature 1..603: note = source = /note="Description of Artificial Sequence: Synthetic coding sequence"
  source 1..603: mol_type = other DNA
atggcactttggatgaggctcctgcccctgctcgcacttctagccctttggggaccagatcctgctgcagcttttgttaatcaacatctgtgcgggtcacatctggtcgaggccttgtatcttgtgtgcggggaacgtggtttcttctacacccccaaaaccagaagagaagccgaggatctccaggccagcgcactttcactgagttcctcaacgtccacctggccagaggggcttgatgccacggcgagagccccacccgcattagtggtaaccgccaatatcggccaggctggcggttcctccagtagacagtttagacagcgggctttgggcacaagcgatagtcctgtcttgttcatacactgccccggagcagcaggaacagcccaagggcttgagtaccgtgggaggagggttactacggagctagtttgggaagaagtggatagcagcccacagccacagggctcggagtcattaccagctcaaccgcctgcacaaccggcacctcagcccgagccacagcaagccagggaaccttctcctgaagtatcatgctgtggactctggccacggaggcctcagcgatcacagaactag

SEQ ID NO: 4465 - DNA, 333 bp, synthetic construct
  misc_feature 1..333: note = source = /note="Description of Artificial Sequence: Synthetic coding sequence"
  source 1..333: mol_type = other DNA
atggccttgtggatgcgcctactgccgcttcttgcacttctggccctgtggggcccagatcctgctgctgcgttcgtgaatcagcatctctgcggtagtcacctcgttgaagcattatatctcgtatgcggagagcggggattcttctatacaccgaagacacgcagagaggccgaagatctccaggtgggtcaggtggaactaggaggcggaccgggagccggatcgttacagccactggctctggagggttcactgcagaagagaggcatcgtcgagcagtgttgtacgtctatctgcagcctgtatcagcttgaaaattactgtaactag

SEQ ID NO: 4466 - DNA, 333 bp, synthetic construct
  misc_feature 1..333: note = source = /note="Description of Artificial Sequence: Synthetic coding sequence"
  source 1..333: mol_type = other DNA
atggcactctggatgagattgttgcccttgctggctctgctggctctttgggggccagacccagccgctgccttcgtgaaccaacacttgtgcggatcccacctggtcgaggccttgtatctcgtttgtggagaaaggggctttttctacacgcctaagactcgacgggaggcggaggatctgcaagtgggccaggtggaactgggtgggggtcctggcgcaggttctctgcagccactggcgctggaaggatcgttacagaaaagaggaatagtggaacaatgttgcaccagtatctgttctctgtaccagctggagaactactgcaactag

SEQ ID NO: 4467 - DNA, 333 bp, synthetic construct
  misc_feature 1..333: note = source = /note="Description of Artificial Sequence: Synthetic coding sequence"
  source 1..333: mol_type = other DNA
atggctctgtggatgagacttttgccgctgttggccctactggccctctggggtcctgacccagccgcagcttttgtgaaccagcacctctgcgggtcacatttggtggaggccctctacctggtttgtggggaaaggggattcttctatacgccaaaaaccaggcgagaggctgaagacttgcaggttggccaggtagaactgggcggtggaccgggagccggaagcctgcagcccttggccctggaggggagcttacagaaacgagggatcgtggaacagtgctgtaccagtatctgttctctatatcagcttgaaaattattgtaactag

SEQ ID NO: 4468 - DNA, 297 bp, synthetic construct
  misc_feature 1..297: note = source = /note="Description of Artificial Sequence: Synthetic coding sequence"
  source 1..297: mol_type = other DNA
atggctctttggatgcgacttctaccgctgttggcactgttggctctctggggcccagaccctgcagccgctttcgtgaatcaacacctgtgcggcagtcatttggtggaagcgctatacttggtgtgtggcgaacgtgggttcttttatacgcctaagactcgcagggaagcggaggatctgcagggaagcctccaaccactcgccctggaaggttcattgcagaaaaggggaattgttgagcagtgctgtacgtccatctgttctttgtaccagctagaaaattactgtaattag

SEQ ID NO: 4469 - DNA, 333 bp, synthetic construct
  misc_feature 1..333: note = source = /note="Description of Artificial Sequence: Synthetic coding sequence"
  source 1..333: mol_type = other DNA
atggcactttggatgcggctcctgcctctgcttgccttgttagcgttgtgggggcctgaccctgcagctgcattcgtgaaccaacatttatgcggctcccatctcgtggaagctttgtacctggtttgcggagaacggggtttcttctataccgacaagacacgccgagaggcagaagaccttcaagtaggtcaggttgagttggggggaggaccgggagccggatccctccagccactggcccttgaagggagcctgcagaagaggggaatcgttgaacagtgctgtacttcaatttgcagcctgtatcagctggaaaattactgcaactag

SEQ ID NO: 4470 - DNA, 333 bp, synthetic construct
  misc_feature 1..333: note = source = /note="Description of Artificial Sequence: Synthetic coding sequence"
  source 1..333: mol_type = other DNA
atggcgctatggatgcgactgctgcctctgctggcactgcttgccttgtggggtccggatcctgccgcagccttcgtcaaccaacatctttgtggatcgcacttggtggaggccctgtatctggtgtgtggggagcgtggctttttctatacccctaagacccgcagggaagctgaggatcttcaagtggggcaggtcgaattggggggaggccctggtgcgggttcactacagccactcgccctcgaaggaagcttgcagaaacgcggtattgttgagcagtgttgcacatcaatatgcagtctctaccaactggaaaattactgcggttag

SEQ ID NO: 4471 - DNA, 333 bp, synthetic construct
  misc_feature 1..333: note = source = /note="Description of Artificial Sequence: Synthetic coding sequence"
  source 1..333: mol_type = other DNA
atggccctttggatgagactgttacctctactggccttactggccctctggggccctgaccccgcagccgcattcgtgaagcaacacctctgcgggtcccatctggtggaggctctgtatctcgtgtgcggtgagcggggattcttttatactcctgaaaccaggagggaggccgaggatctccaggtcggccaggttgagctagggggaggcccaggcgcaggatctctccagccattagcactggagggatctctgcagaagcgaggcatcgttgaacagtgttgtaccagcatctgtagtctctatcagttggagaattattgcaactag

SEQ ID NO: 4472 - DNA, 333 bp, synthetic construct
  misc_feature 1..333: note = source = /note="Description of Artificial Sequence: Synthetic coding sequence"
  source 1..333: mol_type = other DNA
atggcactgtggatgcgcctgttaccactgctggccttgcttgctttatggggccctgatccagccgctgccttcgttaaccaacacctgtgcggaagtcacctggtggaggccctttatttggtgtgcggtgagaggggatttttctacacgaaaccaacgcgcagagaggctgaagacttgcaggttggccaggttgagttggggggtggtccgggagctggatccctgcagcccctggcactggagggctcccttcaaaaaaggggcattgttgagcagtgttgtacctccatatgctccctatatcagctggagaattattgtaattag

SEQ ID NO: 4473 - DNA, 570 bp, synthetic construct
  misc_feature 1..570: note = source = /note="Description of Artificial Sequence: Synthetic coding sequence"
  source 1..570: mol_type = other DNA
atggctttaagttttagtctcctcatggccgttttggtgctctcatataagagcatttgcagcttgggctgcgatctcccacaaactcatagtctggggaacaggagagccctcattttgctaggacagatgggaagaatttcacctttctcttgcctgaaagacagacacgacttcagaatacctcaggaagaattcgatggaaatcagttccagaaagcacaagctatctctgtgctgcatgaaatgattcagcagacatttaatctgtttagtacagaagactcctcagccgcttgggagcagagtctgctcgagaaattctctactgagctatatcaacagctcaacgatctagaagcgtgcgtcatccaggaggttggggtggaagagaccccgcttatgaatgaggacagcattctggctgtacgcaaatacttccagaggatcaccctgtacctcattgagcgcaaatatagcccgtgtgcctgggaggtcgtgagagccgagattatgcggtcattgagtttctcaaccaacttgcagaaaagactgaggaggaaagattag

SEQ ID NO: 4474 - DNA, 573 bp, synthetic construct
  misc_feature 1..573: note = source = /note="Description of Artificial Sequence: Synthetic coding sequence"
  source 1..573: mol_type = other DNA
atgatggcaagcccctttgccttgctcatggccttagtggtcctgagctgcaaatcttcttgctcattggggtgcgatctgcctgagactcacagtctcgataaccgacgaactctgatgctcctggcccagatgtcccggatctccccttccagctgtctcatggaccgtcatgactttggctttcctcaagaagagtttgacggaaaccagtttcagaaagccccagccattagcgtcctgcacgagctgatccaacagattttcaatctgtttaccactaaggactccagcgccgcttgggatgaagacctgctggacaaattctgtaccgaactttaccagcagcttaacgacctagaagcttgcgtaatgcaagaagagcgggtgggtgagacccctctcatgaacgctgacagtatattggccgtcaagaaatattttcgacgcatcacactgtacctgactgagaagaaatattcgccatgtgcttgggaagtagtccgggctgaaataatgcgatcactctccctgagcacgaacttgcaggagcggctgcgtcgtaaagagtag

SEQ ID NO: 4475 - DNA, 570 bp, synthetic construct
  misc_feature 1..570: note = source = /note="Description of Artificial Sequence: Synthetic coding sequence"
  source 1..570: mol_type = other DNA
atggctctgccttttgccttaatgatggccctggtcgtcctctcttgcaagtcgagctgctcactgggctgcaatttgagccagacgcattctttaaataatcggcgtacactgatgttgatggcacagatgagacggattagccctttctcttgcttgaaggaccgccatgattttgagttcccccaggaagagtttgacggaaaccagttccagaaagctcaggccatcagcgtgctgcatgagatgatgcagcagacgttcaatctgttttccacaaaaaactctagcgctgcttgggacgagaccctgcttgagaaattttatattgaactgtttcagcaaatgaacgacttggaagcttgtgtgattcaagaggtcggcgtggaggagacaccattgatgaatgaagactctattcttgcagtgaagaaatactttcagcgaataaccttgtatctgatggaaaaaaaatattctccctgcgcatgggaagttgtcagagctgagatcatgcgttccctatctttcagcacaaatctccagaagaggctaaggcggaaagattag

SEQ ID NO: 4476 - DNA, 570 bp, synthetic construct
  misc_feature 1..570: note = source = /note="Description of Artificial Sequence: Synthetic coding sequence"
  source 1..570: mol_type = other DNA
atggccctgtccttcagcctcctgatggctgtgctggtcctatcctacaagagcatctgctcgctcggatgcgacctgcctcagactcattctctgggaaacagaagagctctcattttgctagcacagatgggcaggatcagccattttagctgtttgaaggacagatatgacttcggcttcccccaagaggtgttcgatgggaatcagtttcaaaaggcgcaagctatctctgcatttcacgaaatgattcagcaaaccttcaacctcttcagcacaaaagactcaagcgcggcttgggacgagactctgctggacaaattttacattgaattgttccagcagctgaatgacctggaggcttgcgtgactcaagaagtgggcgtagaagagatcgccctcatgaacgaagattccattctcgctgtgcgaaagtattttcagcgtatcacactctacctgatggggaagaaatattccccgtgtgcctgggaagttgtccgggcagaaattatgcgaagcttttccttttccacaaacttacaaaaaggactccgacggaaggactag

SEQ ID NO: 4477 - DNA, 570 bp, synthetic construct
  misc_feature 1..570: note = source = /note="Description of Artificial Sequence: Synthetic coding sequence"
  source 1..570: mol_type = other DNA
atggcactgtccttcagtttattaatggctgtgctggtgctgtcttacaagtctatttgctccctcggatgcgatcttccccagactcactcactaggaaaccggagagctctcatcctactcgcacagatgggtcggataagccctttctcatgcctcaaagatagacacgactttggactgccacaagaagagttcgatggcaaccagtttcaaaaaacccaggctatttccgtgctgcacgagatgatccagcagacctttaatctgttctctaccgaagacagttcagccgcatgggagcagtcactcttagagaaattctcgactgagctctaccagcagctgaacaatctggaagcttgtgttatccaggaggtgggtatggaagaaacacccctcatgaacgaagattctatcctggcggtgaggaaatacttccaaaggatcaccttgtacctcaccgagaagaaatactccccatgcgcgtgggaggtggttcgggcagagattatgaggtcactgagtttcagtacgaaccttcagaagatactaagaaggaaagactag

SEQ ID NO: 4478 - DNA, 567 bp, synthetic construct
  misc_feature 1..567: note = source = /note="Description of Artificial Sequence: Synthetic coding sequence"
  source 1..567: mol_type = other DNA
atggccctgacattcgccctgctggttgcattactggtgctgtcttgcaaatccagttgcagtgttgggtgtgacctgcctcagacccattccctgggttcccgcagaacactgatgctgctcgcccagatgagaagaatttctctgttctcatgcctcaaagacagacatgatttcggcttccctcaagaagagttcggcaaccagttccagaaagctgagaccatccctgtcctgcacgagatgatccagcagattttcaatctgttcagcaccaaagactcatctgccgcatgggacgaaaccctcctcgacaagttctacaccgagctgtaccaacagcttaacgaccttgaggcctgcgtcattcagggtgttggcgtgaccgagactccgcttatgaaagaggatagtatcctcgcagtgaggaaatacttccagaggattaccttatatttgaaggaaaaaaagtacagcccctgcgcctgggaagtggtgagggctgaaattatgaggtccttctcactgtccactaacttgcaggaaagtctgaggtccaaagagtag

SEQ ID NO: 4479 - DNA, 570 bp, synthetic construct
  misc_feature 1..570: note = source = /note="Description of Artificial Sequence: Synthetic coding sequence"
  source 1..570: mol_type = other DNA
atggctctttccttttctcttttgatggccgtgctggtgctgagctataaaagcatttgcagcctgggatgtgacttaccacagactcatagtctcggcaataggcgggctctgattctcctcgctcagatgggtcgcatcagtcccttttcctgcttgaaggatcggcacgactttggctttccccaggaagagtttgacggcaatcagttccagaaagcacaagcaatatccgtgctacacgagatgattcagcagacatttaatctcttcagtacaaaagattctagcgccacgtgggagcaaagtctccttgagaaatttagtacggaactcaaccagcagctgaacgatctggaggcctgcgtcatccaagaggttggtgtggaagaaaccccattaatgaatgttgatagtattcttgcagtgaaaaaatatttccagcgcattaccctatatttgactgagaaaaaatattccccatgcgcttgggaagtcgtgagggccgagattatgcggagcttttcactctctaaaatttttcaggagcggcttcgacgcaaagagtag

SEQ ID NO: 4480 - DNA, 570 bp, synthetic construct
  misc_feature 1..570: note = source = /note="Description of Artificial Sequence: Synthetic coding sequence"
  source 1..570: mol_type = other DNA
atggctctgagcttcagccttcttatggcggtgctggtgctgtcctataaatccatttgcagcctcgggtgcgatctgccacagacacactctctgggcaatcgtcgcgcactgattctgctagcgcagatgggccgtattagtcactttagctgcttaaaagatcgacatgacttcggcttccccgaggaggagtttgatggtcaccagttccaaaaagcccaggcgattagtgtgttgcacgagatgatccagcagactttcaatctcttttccaccgaagacagcagcgcagcatgggagcaaagtcttctggagaagttttcaaccgaactgtaccaacagttaaatgaccttgaagcttgtgtgatccaggaagtaggggtggaggaaacccccctgatgaacgaagattcaatccttgcggtgcggaaatacttccaaagaattaccctgtacctcacagaaaagaaatactctccatgcgcctgggaagtggtgagggcagaaatcatgcgatcattaagcttcagtacaaacctccaaaagcgcctacgcaggaaagattag

SEQ ID NO: 4481 - DNA, 570 bp, synthetic construct
  misc_feature 1..570: note = source = /note="Description of Artificial Sequence: Synthetic coding sequence"
  source 1..570: mol_type = other DNA
atggcattaccttttgtgttattgatggcactggtagtcctgaactgtaagtcaatctgtagccttgggtgcgatcttcctcagactcattccctttctaaccggagaaccctgatgattatggcccagatggggcgaatcagcccattctcctgtctcaaggacaggcacgatttcgggttcccacaggaagaattcgacggcaaccaatttcagaaagctcaggccatcagtgtcctgcacgagatgattcagcaaaccttcaacttgttcagcacaaaggactcaagcgccacttgggacgagacactcctcgataaattctacacggagctctatcagcagctaaacgacctggaggcttgcatgatgcaggaagttggagtcgaagatacccccctcatgaatgttgacagtatcctcaccgtcaggaagtactttcagagaattacactgtacctgactgaaaaaaaatattcgccttgtgcctgggaggtggtacgcgcagagatcatgagaagctttagtctgtctgcaaacctgcaggaacggctgcggaggaaggagtag

SEQ ID NO: 4482 - DNA, 570 bp, synthetic construct
  misc_feature 1..570: note = source = /note="Description of Artificial Sequence: Synthetic coding sequence"
  source 1..570: mol_type = other DNA
atggccctgcctttcgccctgcttatggccttggtggtcctctcttgtaaatctagctgtagtcttgattgcgatctgccccagacccattctctggggcaccgccgaacaatgatgctgttagcgcaaatgagaagaattagtttattctcttgtctcaaggatcgtcacgactttcgatttccgcaggaagaatttgacggtaatcagttccagaaagccgaagcaatctctgtgcttcacgaagtgatccagcagacctttaacctattttctaccaaggattcttctgtggcctgggacgagcggttactcgacaagttgtataccgagctataccagcagctgaacgacctggaagcctgcgtgatgcaggaagtgtgggtagggggaacgcccctgatgaatgaggattctatattggccgtcaggaagtactttcagcgcatcactctttacctaacagaaaagaagtactctccctgtgcgtgggaggtggtgcgggcagaaatcatgagaagcttcagcagcagcagaaacctccaggaaagacttcggaggaaagaatag

SEQ ID NO: 4483 - DNA, 570 bp, synthetic construct
  misc_feature 1..570: note = source = /note="Description of Artificial Sequence: Synthetic coding sequence"
  source 1..570: mol_type = other DNA
atggctcggtctttttcgttgctgatggtggtactcgttctaagttacaagagcatttgctcactcgggtgtgatcttccacagacccattctttgagaaatagaagggcactcattctcctcgcccagatgggcagaatttcccctttttcctgcctgaaggataggcatgaatttaggtttccagaggaggaatttgatggtcatcaatttcaaaaaactcaagccatttctgtgctgcacgaaatgattcagcagactttcaatctgttttccacagaagactcgtcagctgcctgggaacagtccctcttagagaagtttagtactgaactgtatcagcagcttaatgacctcgaggcctgtgtgatccaagaggttggcgtagaggagactccgctgatgaatgaggacttcatactggccgtgcgaaagtacttccagcgcataacactatatttgatggagaagaagtattccccatgcgcatgggaggtggttcgggcagagattatgcggtcctttagtttctcaaccaacttgaagaaggggctgcgcaggaaggattag

SEQ ID NO: 4484 - DNA, 570 bp, synthetic construct
  misc_feature 1..570: note = source = /note="Description of Artificial Sequence: Synthetic coding sequence"
  source 1..570: mol_type = other DNA
atggccctgacattctacctgcttgtggcacttgttgtgctctcttataagtcattctcctcattaggctgcgacttgcctcagacccactcactaggaaatcgaagagccctgatcttgttagcccaaatgaggagaattagcccttttagttgtctgaaggaccgacacgacttcgagttcccccaggaggaattcgatgacaagcaattccagaaagctcaggccattagcgtgttgcacgagatgattcaacagacttttaatctctttagcactaaggattcatccgcagcactcgatgagactttgctggacgagttttacatagagttggatcagcagttaaatgatttagagagttgcgtgatgcaggaagtgggggtcatagaaagtccactgatgtacgaggatagtattttggcggttaggaaatattttcaacgtatcacattgtatctgactgaaaagaagtattctagctgcgcctgggaagtggtccgcgctgaaataatgaggtccttttctttgagcattaatctccagaaaaggctaaaatcaaaggagtag

SEQ ID NO: 4485 - DNA, 564 bp, synthetic construct
  misc_feature 1..564: note = source = /note="Description of Artificial Sequence: Synthetic coding sequence"
  source 1..564: mol_type = other DNA
atgacaaataaatgccttctgcagatcgccctcttactgtgcttctccaccacagccctctccatgagttacaacctgctgggcttcctgcagcgctctagcaacttccagtgtcaaaagctgctctggcagcttaacgggaggcttgaatactgcctcaaggatagaatgaacttcgacatcccagaggagataaagcagctgcagcaatttcagaaagaagacgcagcacttaccatttatgagatgttgcagaacatcttcgccattttcagacaggacagcagctctaccggctggaatgagactatcgtagagaatctgcttgccaacgtctatcatcagatcaaccacctgaaaaccgtgctagaagaaaaattggagaaggaggattttacacgcggaaagctcatgtcatcccttcatctcaagcgctattatggtaggattctacactatctgaaagctaaagagtacagccattgcgcctggacgattgtgcgggtggaaatcctgaggaatttttatttcataaatcggctcacgggttatcttcggaactag

SEQ ID NO: 4486 - DNA, 537 bp, synthetic construct
  misc_feature 1..537: note = source = /note="Description of Artificial Sequence: Synthetic coding sequence"
  source 1..537: mol_type = other DNA
atgcattcttctgctctactgtgttgcctggtcttactgaccggcgtgagggctagtccaggccaaggtactcaaagcgaaaactcatgcacacactttcctggcaacttgccaaatatgctgcgtgaccttcgggacgcattcagtagagtgaagacattcttccagatgaaagatcagctagacaatttgctccttaaggaaagcctgctggaagacttcaaagggtatctcgggtgccaggcactgtctgagatgatccagttttacctggaggaggtgatgcctcaggcagagaatcaggatcctgacattaaggcacacgtcaattccctcggtgaaaatctaaaaacactgcgactccgcttgagaaggtgccatcgattcctgccatgtgaaaacaagtccaaagccgtagaacaggttaagaacgccttcaataagctgcaggagaagggcatctacaaagctatgagcgaattcgatatattcatcaattatatcgaagcttacatgaccatgaaaattcgaaattag

SEQ ID NO: 4487 - DNA, 489 bp, synthetic construct
  misc_feature 1..489: note = source = /note="Description of Artificial Sequence: Synthetic coding sequence"
  source 1..489: mol_type = other DNA
atgaggagtagcccagggaacatggagcgcatcgtgatctgtctgatggtgatcttcctggggactctggtgcataaaagctctagtcagggtcaggaccggcatatgattcggatgaggcagttaatcgacattgtggaccagctaaagaattatgtaaacgatttggtccctgaatttctccccgctccagaagacgtggagactaactgtgaatggtccgcgttcagttgtttccaaaaagcacagctgaagtccgccaatactgggaataacgagaggatcatcaacgtctcaataaaaaagcttaagcgcaagcccccatccacgaatgccggtcgacggcagaagcacaggttgacttgcccatcttgcgattcctacgaaaaaaagccgccaaaggagtttcttgagaggttcaagagcctacttcagaagatgattcaccaacatctctccagtagaacccacggtagcgaggactcctag

SEQ ID NO: 4488 - DNA, 534 bp, synthetic construct
  misc_feature 1..534: note = source = /note="Description of Artificial Sequence: Synthetic coding sequence"
  source 1..534: mol_type = other DNA
atgttccacgtgtcattccgctacatcttcggcctgccgccacttatactagtgttacttcccgtggccagctccgactgtgatatcgagggtaaggacggaaaacaatatgagtcggtgctgatggtgagcattgaccaactgcttgattctatgaaagagatcggatccaattgtctgaataatgagttcaacttttttaaacgacatatatgcgatgccaataaagaaggaatgttcctgttccgggctgcacggaagctccgacagtttttgaaaatgaatagcacaggggatttcgacctccatttactgaaagtttctgagggcacaactatactgcttaactgcactggtcaggtcaaggggcgtaagccagctgccctgggggaagctcagcctacgaaatcgcttgaggagaacaagtcactcaaggaacaaaagaagctcaatgatctttgcttcctcaagcgcttgctgcaagagatcaagacatgctggaacaagatcttgatgggcaccaaggaacattag

SEQ ID NO: 4489 - DNA, 216 bp, synthetic construct
  misc_feature 1..216: note = source = /note="Description of Artificial Sequence: Synthetic coding sequence"
  source 1..216: mol_type = other DNA
atgttccatgtgagtttccgctacattttcggcctgccacctctcattttggtgctgctccctgtggcaagcagcgactgtgacattgaaggtaaggacggaaagcagtacgaaagtgtgctcatggtgagcatcgatcagctcttaaatcaaccttataagaaaaaagagaaacgcacagaacgcaagcaacagtcagccatgtccaacaactag

SEQ ID NO: 4490 - DNA, 393 bp, synthetic construct
  misc_feature 1..393: note = source = /note="Description of Artificial Sequence: Synthetic coding sequence"
  source 1..393: mol_type = other DNA
gttagcttccgatacatctttggtcttcctccactgatcctggtgctattaccagtggcttcgagtgactgtgacattgaggggaaggatggaaaacagtatgagagcgttcttatggtcagtattgaccaattattagactcaatgaaagagatcggctctaactgtctgaacaatgaatttaatttctttaaacggcatatttgcgatgcaaataaagtgaaggggaggaagcccgcagctctcggcgaggcccagccaactaagtctttagaagagaacaagtctctgaaggagcagaagaaactgaatgacctttgcttcctcaaacgtttgctacaggagataaaaacctgctggaataaaatcctcatgggcactaaggaacactag

SEQ ID NO: 4491 - DNA, 216 bp, synthetic construct
  misc_feature 1..216: note = source = /note="Description of Artificial Sequence: Synthetic coding sequence"
  source 1..216: mol_type = other DNA
atgttccatgtgtcatttcgatatatcttcggcctaccacctttaatactggttctgctacccgtagccagttctgactgtgacatcgaaggcaaagacggaaaacaatatgaatccgtattgatggtgagcatcgaccaattactgaaccaaccatataaaaagaaagaaaagaggactgaacgcaaacagcagtcagcgatgtccaacaactag

SEQ ID NO: 4492 - DNA, 114 bp, synthetic construct
  misc_feature 1..114: note = source = /note="Description of Artificial Sequence: Synthetic coding sequence"
  source 1..114: mol_type = other DNA
atgtttcatgtctccttccgctacatcttcggcctgccaccgctgatcctggtgctcttgcctgtagccagcagcgactgtgacatcgaagggcagcacgaaaggaattggtag

SEQ ID NO: 4493 - DNA, 402 bp, synthetic construct
  misc_feature 1..402: note = source = /note="Description of Artificial Sequence: Synthetic coding sequence"
  source 1..402: mol_type = other DNA
atgttccatgtttcgttcagatatatcttcggcctccctcccctcatcttagttctactgccggtggcctcttccgactgtgacattgaaggaaaggatggaaaacagtatgagtcagtcctcatggtgagcatagatcagctgctcgacagcatgaaagaaatcggcagtaactgcttgaataacgaattcaatttctttaagcggcatatttgtgatgctaataaggtgaagggccgaaaacctgctgcgctaggcgaggctcagccaaccaagtcacttgaggagaataaatctcttaaggagcagaaaaaactgaatgatctgtgctttctgaaaagacttctccaggagataaaaacttgctggaacaagatactaatgggcactaaggaacactag

SEQ ID NO: 4494 - DNA, 114 bp, synthetic construct
  misc_feature 1..114: note = source = /note="Description of Artificial Sequence: Synthetic coding sequence"
  source 1..114: mol_type = other DNA
atgtttcatgttagctttaggtatattttcgggcttccacctctgatcctggtccttctcccagtggcttcatctgattgcgacattgaggggcaacacgaaagaaattggtag

SEQ ID NO: 4495 - DNA, 195 bp, synthetic construct
  misc_feature 1..195: note = source = /note="Description of Artificial Sequence: Synthetic coding sequence"
  source 1..195: mol_type = other DNA
atgaaagaaattggttcgaactgcctgaataacgagttcaacttttttaaaagacacatatgtgatgctaataaggaggaaaacaagagcctgaaagagcagaagaaattgaatgatctgtgcttcctgaagcggctgctgcaggagatcaaaacttgttggaacaagatcctgatgggcacaaaggagcattag

SEQ ID NO: 4496 - DNA, 2643 bp, synthetic construct
  misc_feature 1..2643: note = source = /note="Description of Artificial Sequence: Synthetic coding sequence"
  source 1..2643: mol_type = other DNA
atggcggagctgtaccgagtgctagaggccggaaaaatcgggatcttcgagagtccaacgggaacgggcaagagtctttcattaatctgtggggcactgtcttggctacgcgacttcgaacagaagaaacgagaggaggaggctcgattacttgagaccgggactggccctctacacgacgagaaggacgaatctctctgcttatcttccagctgcgaaggcgcagccggtacacctaggcctgccggagagcccgcatgggtaacacagttcgtgcaaaaaaaagaggaaagagatcttgttgatcggcttaaagctgagcaggcgagacggaagcagcgagaagagcgcctccagcagctccagcacagagtgcaactgaagtacgccgctaaacgcctgcgacaggaggaggaagaacgtgaaaacttactgagactgagcagggaaatgcttgaaaccggtcctgaggccgagcggctagaacaactggagtcaggcgaggaagaactcgttctggctgagtatgagtccgatgaggagaagaaggtggcttcccgcgtggacgaagatgaggatgaccttgaagaagaacatatcacaaaaatctattattgctcccggacacattcccagctggcccagttcgtgcatgaggttaaaaaatcgccctttggcaaggatgtgcgactggtgtctctgggaagccgccaaaatctgtgcgtgaatgaggatgtgaagtcactcggcagcgtccaactcatcaacgacaggtgtgttgatatgcagaggtccagacacgaaaagaagaagggcgctgaggaggaaaagccaaaacggcgacgtcaagagaagcaggctgcgtgccccttctacaaccatgaacagatgggccttctgcgagatgaagcactggctgaggtcaaggacatggagcagctgctggccctgggcaaggaagcccgagcctgcccttactacggaagcagactagccattccagccgctcaactggtggtgctgccgtaccagatgcttctgcacgccgctactcggcaggccgcaggcatcagattgcaagaccaggtggtgattatcgatgaagcacacaacctgattgataccatcaccggtatgcatagcgtggaggtgagcggttcccaattatgccaggcgcactcgcagctcttgcaatacgtggagcgatacggaaagcggctgaaggcgaagaatctaatgtacttgaagcaaattctgtatttgctggaaaagtttgtagccgttctcgggggaaacattaaacagaatccaaatacgcagtccttgtctcagacaggaacagaactgaagacaatcaatgacttcttattccagtctcagattgataacattaatcttttcaaggttcagagatattgcgaaaagagtatgattagccgcaaattattcggcttcaccgaaagatatggagccgttttttcttcacgagagcagccaaaacttgcgggattccagcagtttctccaaagcctgcagcctagaacaactgaggcactggcagcccctgccgacgagtcccaagccagcaccttgcgcccagcctccccccttatgcatatccagggattcctagccgcactcaccactgcgaatcaagacgggagggtgatcttatccaggcagggctccctgtcccagtcgacactaaagtttctcctattgaatcctgcagtgcacttcgcacaggttgtgaaggaatgtcgcgcagtagtcatcgcgggaggcacaatgcaacctgtgtccgattttcggcagcagcttctggcttgtgctggcgttgaggccgaaagagtcgtcgagtttagctgcgggcacgtgattcctcccgacaacatccttccactagttatctgtagcgggatctctaaccagcctctggagttcactttccagaagcgcgagttgccgcagatgatggacgaagtcggtcgaattctgtgtaacttatgcggggtggtgcctggcggtgtggtctgcttcttccccagctacgagtacctccgccaggtccatgcacactgggaaaaagggggtttactgggacggctggccgctaggaagaagatctttcaggagcctaaatccgctcaccaggtggaacaggtccttctcgcctactcaaggtgtattcaggcatgcggacaggagcggggtcaggtcacaggggctctgctgttaagtgttgtgggtgggaagatgtctgaggggatcaatttctccgacaatttggggagatgtgttgtcatggtgggcatgccgtttccaaacatccgcagcgccgagttacaggaaaagatggcataccttgaccagacactgccacgcgctccaggccaggccccaccaggcaaggcgctggttgaaaacctatgcatgaaggccgtgaatcagtcgataggccgtgcaatcagacaccagaaagattttgcctcagtggtcctcctggatcagcggtacgccagacctccagtcctcgctaaactgcccgcttggattcgagctcgcgtcgaagttaaagctaccttcggccctgctatagccgctgtacagaaattccatcgggagaagagcgcttcatcctag

SEQ ID NO: 4497 - DNA, 738 bp, synthetic construct
  misc_feature 1..738: note = source = /note="Description of Artificial Sequence: Synthetic coding sequence"
  source 1..738: mol_type = other DNA
atgaagaaaacacagacctggatactcacatgcatctatttgcagctgctcctgttcaaccctctagtaaaaactgagggaatttgccgaaatagggtgacaaataacgttaaggatgtaaccaaattggtcgccaatcttcccaaagactatatgataacactgaagtacgtgcctggaatggacgtgctgccttcacactgttggatcagcgaaatggtggtccagctttccgactctctgacagatctcctggataagttttctaatattagcgaggggctgagcaactatagcatcatcgacaagttggtcaacatcgtggatgatctggtcgagtgcgttaaggaaaatagcagtaaggacctcaaaaaaagtttcaagtccccggagcctcgcctgtttaccccagaagagtttttcagaatcttcaatcgttcaattgatgcatttaaagacttcgttgtggcttcagaaacaagcgactgtgtggtctcgagtaccctcagtcctgagaaaggtaaggccaagaatcctcctggggattcaagtctacactgggctgccatggcactgccagctctgttctctcttatcataggttttgcatttggcgctctgtactggaagaagcgccagccttcccttactcgggcagtagagaatatacaaattaacgaggaggacaacgagatctctatgttgcaggaaaaggagagagaattccaagaggtttag

SEQ ID NO: 4498 - DNA, 93 bp, synthetic construct
  misc_feature 1..93: note = source = /note="Description of Artificial Sequence: Synthetic coding sequence"
  source 1..93: mol_type = other DNA
ggaatggatgtgctgggaaggccaaagatccccctggagacgcccgcatatactggacagccctggcattgtcagcattgcttcctcttgtag

SEQ ID NO: 4499 - DNA, 3039 bp, synthetic construct
  misc_feature 1..3039: note = source = /note="Description of Artificial Sequence: Synthetic coding sequence"
  source 1..3039: mol_type = other DNA
atgcccgcatctgcaccacccagacgccctaggcctcccccaccctcgttgagcctgctgctggtgctcctggggctcggcggacggaggttgagggcagaacctggagatggtgctcaaacctgggctagattcagtaggcctccagcccctgaggccgctggcctattccaggggacttttcccgacggatttctgtgggcagtgggcagcgccgcttaccagacagaaggcggatggcagcagcacggcaaaggcgcatccatttgggatacttttacgcaccacccattggctccacccggagactctaggaacgcctctctacccctgggagcgccaagccccctgcagccggctacgggagacgttgcctctgactcctataacaacgtgttccgggataccgaggccctgcgggagttgggggtgacacattaccggttcagtatttcatgggcacgggtcctgccgaatggatcagcaggcgtgcccaaccgagagggcctgaggtattacagacggcttctcgagcggttgagggaactgggagtccagccagtcgtaaccttgtaccactgggatctgccacagaggttacaagatgcttatggcggatgggctaatcgggcacttgcagatcacttccgggattatgcagaactctgtttcagacattttggtggtcaagtaaaatactggattaccatcgataatccatacgtggtagcttggcacggttatgccactggacggctggctccagggatacgcggatcccctcgcctcgggtatctcgtggcccataacttactcctggcgcacgccaaggtctggcatctctacaatacgagctttcggcctactcaaggagggcaggtctcaattgccctgtcttcacactggattaatcctcggcgaatgaccgaccactctataaaggagtgccaaaagtctcttgatttcgttctcggctggtttgccaagcctgtgttcatcgatggggattacccagagtctatgaagaataacctgagcagcattttgcccgattttaccgaatcagagaagaaattcataaagggtactgccgacttttttgccctgtgctttggtccgactttatcattccaactgctcgatccgcacatgaaattccggcagctggagagccctaatctgaggcagctgttgtcttggatagacctggaatttaaccatccacagatctttattgtagagaatggctggttcgtgtccggtactaccaagagggacgatgccaagtacatgtattatctgaaaaagttcatcatggaaactctgaaggctatcaaattggacggagtggatgtcattggctacaccgcttggtctttgatggatgggtttgaatggcaccggggatattctatacgccgaggcctgttttatgtcgatttcctgagccaggacaagatgctgctgcccaagagctcagcgctcttttaccagaagcttatagagaagaacggatttccaccattacctgaaaatcagccactggaagggacattcccttgcgatttcgcgtggggggtcgttgacaactatatacaggtcgataccactcttagccaatttacagacttaaatgtgtacctctgggatgttcatcattcaaagcgtctcatcaaggtggacggagtcgtgactaagaaaaggaaaagctactgtgtggactttgcagctatacagccacaaatcgcactgctacaagagatgcacgttactcatttcaggtttagcttagactgggctctgatattgcccctcgggaaccaatctcaagtcaatcacaccattttgcagtattacaggtgtatggctagcgaactcgtgcgtgtcaacattactccagtggttgccctctggcagccgatggctcccaaccaaggcctgccccgactcctggccaggcagggcgcttgggaaaatccgtatacagcactggctttcgctgagtacgcaaggctctgcttccaggaattaggacatcacgtgaaactctggattacgatgaatgagccctataccagaaacatgacttacagcgcaggccacaatcttttaaaggcccacgcactcgcctggcatgtctataatgagaagtttaggcacgctcagaatggaaagatctccatcgccctccaggctgattggatagagcccgcatgcccattctctcagaaggacaaagaggtggctgaaagggtgctagagtttgatattggttggctggccgagcctatattcgggtccggggattacccctgggtgatgcgcgactggctgaatcagcggaacaatttcctgctcccatacttcaccgaggatgaaaaaaagctcattcagggtacattcgattttctcgcgttgtcccactacacgacaatactcgtggactctgagaaagaagacccaatcaagtataatgattatctagaggttcaggagatgactgacatcacctggttgaattctccttctcaggtggccgtggtgccctggggactccgaaaagtgttgaattggttaaaattcaagtacggcgatctaccgatgtatatcattagtaatggcattgacgatggcctgcacgccgaagatgaccaactcagggtatactatatgcagaattacatcaacgaggctctgaaggcacacattttggacgggatcaacctatgtggctacttcgcctactccttcaatgataggactgctcctcgatttggcctgtataggtatgccgctgaccagttcgaacctaaggcatcgatgaagcattatcgtaaaattatcgacagcaacgggttcccagggccagagaccttggaaaggttctgcccagaggagtttaccgtatgtaccgaatgctccttttttcatactagaaagtcactcctggcttttatcgcatttctgttttttgcatctattatcagccttagcttgattttctactacagcaaaaaaggacggaggtcatacaagtag

SEQ ID NO: 4500 - DNA, 729 bp, synthetic construct
  misc_feature 1..729: note = source = /note="Description of Artificial Sequence: Synthetic coding sequence"
  source 1..729: mol_type = other DNA
atgaccgaccatagcatcaaggagtgtcaaaagtctctggactttgtcctcggttggtttgcaaaacccgtgttcatcgatggcgactatccagaatcaatgaaaaataacttaagctcgatcctgccagacttcactgaaagcgagaaaaagttcattaagggcactgcagatttctttgcgctgtgtttcggacctacacttagcttccaactgttagacccgcacatgaagtttaggcagttggagtctcccaacctgcgacaactgttgagctggatcgatctggagttcaaccacccccagattttcattgttgagaatgggtggtttgtctcagggacaactaagcgggacgatgctaagtacatgtattatctgaagaagtttataatggaaaccctcaaggcaataaagctggatggtgtggacgtcattgggtacactgcatggtccttgatggacggatttgagtggcatcggggttatagcattcggaggggtctgttttatgtggacttcctctcgcaggacaaaatgctgctccccaagtcatctgccttgttctaccagaaattgatcgagaagaatggatttccacctttacctgagaatcaaccgcttgaaggaacattcccgtgcgattttgcgtggggcgtggtagacaattacattcaggtgtctcaattaaccaagcccatctcttctttgacaaagccctaccactag

SEQ ID NO: 4501 - DNA, 1440 bp, synthetic construct
  misc_feature 1..1440: note = source = /note="Description of Artificial Sequence: Synthetic coding sequence"
  source 1..1440: mol_type = other DNA
atgcgccaaccacctggagagtcggatatggccgtatctgacgcactactgcctagtttctccacatttgcctcgggccctgcagggagggagaagactttgaggcaggcgggagcacctaataacagatggagggaggaattaagccatatgaaacggctaccaccagtgttgccagggcgaccttatgacctggcagccgcaacagtcgcaactgatctagagtccgggggagcaggagcagcttgtggcggtagcaacctggccccactgcccagaagagagactgaggagtttaacgacctcctggacttagattttatcctgtctaattctctgactcatcctccagaaagcgtcgccgcaaccgtttctagctcagctagtgcttccagtagctcctcccctagttcttcgggacccgcaagcgctcctagcacttgttccttcacctacccaattagggccggtaatgatcccggtgtggcaccgggtggcacgggaggaggcctactctacgggagagagtccgctccccctcccactgcaccattcaaccttgctgatatcaatgatgtaagccctagtggcggtttcgtagccgaactgctgcgtcccgagctggacccagtatatatcccaccacaacagccacagccgccaggcggtgggctgatgggcaagtttgtgctcaaagcttcactatccgcgccaggctcggaatacggatctccatctgttatctctgtaagtaaaggcagcccggatggttcccaccctgtcgtggtggccccatataatggaggaccacctcggacttgccctaaaattaagcaggaggcagtctcaagctgtacccacttaggggctggccctcccttaagcaatgggcataggcctgctgcccacgacttccctcttggcaggcagctgccctcccgcaccactcctacgttgggactggaagaggtgctgagttcacgtgattgccaccccgcactcccgttgccacctggcttccatccgcatccagggccaaattatccatccttcctgccagatcagatgcaacctcaggttccaccgctgcattatcaggagttaatgcccccaggatcatgcatgcccgaggagcctaaacctaaacgcggacggagaagctggcccagaaagagaaccgctacccacacgtgtgattacgccggatgcggaaagacatataccaaatcctcacacttgaaggcccacctacgcacgcacacaggggaaaagccgtaccactgtgactgggacggatgcggatggaagttcgctcgtagcgacgagctcactaggcactataggaaacatacagggcacagaccttttcagtgtcagaaatgcgatcgggcattttccagatctgaccatttggcgctccacatgaagcgccacttttag

SEQ ID NO: 4502 - DNA, 699 bp, synthetic construct
  misc_feature 1..699: note = source = /note="Description of Artificial Sequence: Synthetic coding sequence"
  source 1..699: mol_type = other DNA
atggctgtgagcgacgctctcttgccgagtttcagtaccttcgcaagcggaccagccggtcgggagaagacgctacggcaagccggagccccaaacaacaggtggcgggaggagctgagccatatgaaacgtctaccgccagttctcccaggcaggccatatgacctcgcggctgcaaccgtcgcaactgacttagagtccggaggtgcaggcgctgcctgcggcggaagtaatctggccccactgcctcggagggagacagaagagttcaacgacttgctcgatctggacttcatcctttcaaactcgctgactcaccctcccgagtccgtggccgcaactgtttcctccagcgcatccgcgtctagcagctcaagcccctctagttcaggcccagcttctgcgcctagcacttgctcatttacctaccccatccgggctggcaacgaccccggtgttgctcccggaggaacagggggagggctcctgtatggaagggagtctgcaccccctccaacggccccattcaatttagccgatataaatgacgttagtcctagtgggggatttgtcgcagagctccttagaccagagttagatccggtatatatacctccgcagcagccacagcccccagggggagggctgatgggaaaatttgtcctaaaagcaagtctgagcgctcctggatctgaatag

SEQ ID NO: 4503 - DNA, 69 bp, synthetic construct
  misc_feature 1..69: note = source = /note="Description of Artificial Sequence: Synthetic coding sequence"
  source 1..69: mol_type = other DNA
atgaggcagccacccggtgagagcgatatggcagtaagtgacgcgctattaccctcattcagtacatag

SEQ ID NO: 4504 - DNA, 117 bp, synthetic construct
  misc_feature 1..117: note = source = /note="Description of Artificial Sequence: Synthetic coding sequence"
  source 1..117: mol_type = other DNA
atgagacagccgcctggggagagcgatatggccgtaagcgacgccttgctgccctcctttagcacatttgccagcgggcctgccggtcgcgagaagactctccggcaggccggttag

SEQ ID NO: 4505 - DNA, 1323 bp, synthetic construct
  misc_feature 1..1323: note = source = /note="Description of Artificial Sequence: Synthetic coding sequence"
  source 1..1323: mol_type = other DNA
atggggcctccgggtagtccatggcaatgggtaacactgttgctgggcctattgctgcctcctgcggcacccttctggcttctgaatgtgctgttcccacctcacacaacacctaaggcagagctgtccaatcatacgagaccggtgatcctagtccccggttgtctgggcaatcaacttgaggctaaactcgataagccagatgtagtaaactggatgtgctataggaagaccgaagacttcttcaccatctggctggatctgaatatgtttttgcccctgggggttgactgctggatagacaacacaagggtggtctacaatagaagttcaggacttgttagcaacgcccctggggtacagattcgcgtacctgggttcggcaaaacctactctgtggaatatctggacagctcgaagctggctgggtatctccatacactggtccaaaacttagtcaacaacggatacgtgagagacgaaacagtgcgcgctgctccatacgattggaggttggagcctggacagcaagaggagtattatagaaaacttgccggactcgtggaggagatgcatgctgcatatggcaagcccgtgtttcttatcggccacagtcttggatgcctccacttgttgtatttcttgctccggcaaccacaggcctggaaggacaggtttattgacggcttcatcagcttaggcgctccttggggagggagcataaagcctatgttggtactcgctagcggagacaaccagggcatccccattatgagtagcattaagcttaaggaagaacagcgaattacaactactagcccatggatgtttccaagtagaatggcatggccagaggatcacgtgttcatctccacgcccagcttcaactatacaggccgtgactttcagaggttctttgctgaccttcatttcgaagaagggtggtatatgtggctgcagagtagggatctgttagctgggctgccggctcccggtgtggaggtttactgcctgtacggagttggattgcccacaccgagaacctatatttacgatcacggcttcccttataccgatccagtgggagtcctctacgaggacggtgatgatactgtagcgactcggtccaccgaactgtgtggcctatggcagggccgacagccacaacccgtgcacctcttacccttacatggaatccagcacctgaatatggtgttctctaatctgacactggagcatatcaatgcaatcctgcttggagcctacaggcagggaccccctgcaagtcccacagcaagcccagagcctccacctcctgaatag

SEQ ID NO: 4506 - DNA, 753 bp, synthetic construct
  misc_feature 1..753: note = source = /note="Description of Artificial Sequence: Synthetic coding sequence"
  source 1..753: mol_type = other DNA
atggctgataacttttccttgcatgatgctctcagcgggtccgggaatccgaatcctcagggctggccaggcgcatgggggaaccagcccgctggggctggcggatatcccggagcttcctaccctggggcataccccggacaggctccgcctggcgcttacccaggccaggcccctcctggcgcataccctggggctcccggagcctacccaggagcacccgcacctggggtgtaccctggaccaccttcagggcctggagcatacccttccagcggtcaaccttccgcaaccggagcgtatcccgcaactggaccttacggagccccagcaggcccattgattgttccttataatctgccattaccagggggagtggtacctagaatgctgatcactatacttggaacagtaaagcctaacgctaatagaattgctctggatttccaacggggaaacgacgtggctttccactttaatcctcgctttaatgagaacaatcgacgggtgattgtgtgtaacaccaaactcgacaacaactggggcagagaggaaaggcaatccgtgtttccttttgagtcaggcaagccattcaaaatccaggtgctggttgaacctgatcactttaaagtggctgtaaacgatgcccaccttctccagtataatcacagggttaagaagcttaatgagatatctaagctgggcatttccggggacatcgaccttacgtctgccagttacaccatgatttag

SEQ ID NO: 4507 - DNA, 630 bp, synthetic construct
  misc_feature 1..630: note = source = /note="Description of Artificial Sequence: Synthetic coding sequence"
  source 1..630: mol_type = other DNA
atgggatctgttagtaaccagcagttcgcgggtggatgtgccaaggctgctgaagaggcccctgaggaggctccggaggacgctgccagagctgccgacgagccccagttactgcacggagcgggaatatgcaagtggttcaacgtgcgcatgggtttcggtttcctcagcatgactgctagagctggggtggcgctggatcctccagttgacgtattcgtccatcagagcaagctacatatggaaggcttcaggtccttgaaggaaggagaagctgtcgagtttacatttaagaagtccgctaagggcctcgaatctattagagtcacagggcctggaggagttttctgtatcgggtctgagcgacgcccaaagggaaagtcgatgcagaaaagaaggtctaagggcgacaggtgctacaactgtggtggactggatcatcatgccaaggagtgtaaactccccccacagcccaagaaatgccacttctgccaatccatctctcacatggtggccagttgcccgctcaaagcccaacaaggaccatccgcccaaggcaaacctacgtacttcagagaggaagaagaggagattcacagcccaacgctgctgcccgaagcgcaaaactag

SEQ ID NO: 4508 - DNA, 630 bp, synthetic construct
  misc_feature 1..630: note = source = /note="Description of Artificial Sequence: Synthetic coding sequence"
  source 1..630: mol_type = other DNA
atgggaagcgtttccaaccagcagtttgccggtggctgcgcaaaggctgcggaggaggcgcctgaggaagctccagaagatgccgcacgcgcagcggacgaacctcaactccttcatggtgctggtatttgtaagtggttcaatgttagaatgggatttgggttcttaagtatgaccgccagagctggggtagcactggaccccccagttgacgtatttgttcatcaaagcaaactccacatggaagggttccgatcgctcaaagagggggaggccgtcgaattcacattcaaaaagagcgcgaaaggccttgagagtattagagtcaccgggcctggtggagtgttttgcataggtagcgaaagacgaccaaaggggaagtctatgcagaagaggcgctcaaagggcgatcggtgctataattgcggcggacttgaccaccacgcaaaagagtgcaagctgcccccacagcccaagaaatgccacttttgtcagtctatttcacacatggtggccagctgcccactgaaggcgcagcaggggcctagtgcgcagggcaaacccacctacttccgggaggaggaggaagagattcactctcccaccctgctccccgaagcccaaaattag

SEQ ID NO: 4509 - DNA, 660 bp, synthetic construct
  misc_feature 1..660: note = source = /note="Description of Artificial Sequence: Synthetic coding sequence"
  source 1..660: mol_type = other DNA
atgaagatgcgcttcctcggcctggtcgtgtgtctggtcctttggaccctacactctgagggttccggcggaaagctgacagctgtggatccagagacgaatatgaatgtgagcgagatcatttcttattggggcttcccatccgaagagtatctggtggagaccgaagacggctacatcctttgtttgaataggatcccccatggtcgaaagaaccactcagataaaggccctaagcccgtcgtgtttctgcagcacggcctgcttgccgattcatccaactgggtcaccaacttggcaaacagtagtctgggcttcatcctggccgacgccggtttcgatgtgtggatggggaacagcaggggtaatacatggtcccgtaagcacaaaacactgagtgtatcacaagatgagttctgggcgttttcctacgacgagatggccaagtacgacctccccgcatccataaatttcatcctgaacaaaaccggccaggagcaggtctactacgtagggcactctcagggaacaactatcggatttatcgctttttcacagatacctgaactggccaaaagaatcaaaatgttcttcgcactcggtcccgtcgcaagtgtagccttctgcaccagtccaatggcaaagttaggtcgcctgtag

SEQ ID NO: 4510 - DNA, 1200 bp, synthetic construct
  misc_feature 1..1200: note = source = /note="Description of Artificial Sequence: Synthetic coding sequence"
  source 1..1200: mol_type = other DNA
atgaaaatgcgattcctcggtttggtggtgtgcttggtcttgtggacactgcattccgaaggatccgggggaaaactgactgccgtggatcctgagacgaacatgaatgtgtctgagataatctcctactggggattcccctctgaggaatacctcgtggagactgaggatggctacatcctttgcctgaacaggattccccatggtcgtaagaatcatagtgataaagggcctaagcctgtggtgttccttcagcacgggctccttgctgactcgagcaattgggtaacaaatctggctaactcaagcctcgggtttattttagctgacgcaggcttcgacgtgtggatgggcaatagcagagggaacacatggtctcgaaaacataaaacactgagcgtctcccaggacgaattctgggcctttagctacgacgaaatggccaagtacgatctgccagcaagcatcaactttatcctgaataaaacagggcaggaacaggtctactatgttgggcattcccaaggaaccaccattggcttcatcgcattcagccagattcctgagctggctaagaggatcaagatgttttttgcgttaggccctgtcgcttcagttgcgttttgcacatcacctatggccaaactgggcagattacctgatcacctgattaaagatctttttggtgataaggagttcctcccccaaagcgcctttttaaaatggttagggacacatgtatgcacccatgtgatactaaaagagctgtgcggaaatttgtgcttcctcctatgcggtttcaacgaaagaaatctaaatatgtcacgcgtcgacgtgtataccacccatagtccagccggaacttccgttcagaacatgttgcattggtcccaggcggtgaaatttcagaagttccaggcctttgactggggctcatcagcaaaaaattacttccattacaatcaatcatacccaccgacttataacgtaaaggatatgctagttccaacggctgtctggagtggtggacatgattggctggccgatgtgtatgatgtgaacatactacttactcagattactaatttggttttccatgagtctatccctgagtgggagcacctcgactttatttggggactggacgccccttggcgactgtacaataagatcataaatctcatgcgaaaataccagtag

SEQ ID NO: 4511 - DNA, 1074 bp, synthetic construct
  misc_feature 1..1074: note = source = /note="Description of Artificial Sequence: Synthetic coding sequence"
  source 1..1074: mol_type = other DNA
atgaagctgcggaccctcgcggtttctgccaccgtggtcaaggacggggtcagcggcgtgtgctcttttagatgtagtgacgtgtcaggcgttttgccctcaggcccaaaaccggtagtgttcctccaacatgggcttcttgcagacagctccaactgggtgaccaatctggccaacagctccttgggattcatactggctgatgccggattcgacgtctggatgggaaactcaagagggaacacttggagccgtaaacacaaaactctgtctgtgtctcaggatgaattctgggcttttagctacgatgaaatggccaaatacgatctgccagcatctatcaattttattctgaataaaactgggcaagaacaggtttattacgtaggacattctcaggggacgacaatcggctttatcgctttcagccaaatccccgaactagccaaacgtatcaagatgttcttcgctctcgggccagtggcttccgtggccttttgcaccagccctatggccaagctggggcgactgccagaccaccttatcaaagacttattcggcgacaaggaattcctgccccagagcgcgtttctgaagtggctgggaacacacgtctgcacccatgtgatactgaaagagttatgcgggaacctttgcttcttgctgtgcggtttcaatgagcggaacctcaacatgtcaagagtggacgtgtacaccacccatagccccgcaggcacgtctgtgcagaatatgctacactggtcccaggccgttaagtttcagaaatttcaagccttcgattggggaagtagcgccaaaaactactttcattataaccaatcttatcccccaacttacaatgtgaaggatatgctggtgcctaccgccgtgtggtcgggaggccacgactggcttgcggatgtgtacgatgtgaatatccttctgacccagattacgaacttggtcttccacgagagcatccctgaatgggagcacttagactttatctggggccttgacgccccttggcggctctacaataaaataataaatctgatgaggaagtatcagtag

SEQ ID NO: 4512 - DNA, 1200 bp, synthetic construct
  misc_feature 1..1200: note = source = /note="Description of Artificial Sequence: Synthetic coding sequence"
  source 1..1200: mol_type = other DNA
atgaagatgagattccttggactggtggtgtgcctggttctgtggacgctgcactcggaaggctctggcggtaagctgaccgctgtggatcctgagacaaacatgaacgtgtcagaaatcatctcttattggggattcccttcggaggagtatctggtcgagacagaggacggctacattctatgcctgaacaggatacctcacgggagaaaaaatcacagcgacaagggacctaaaccggtggttttcctgcagcacggacttctagctgatagtagcaattgggtgacaaatctagcaaatagttcattagggtttattttggccgatgccggattcgacgtgtggatgggcaacagtcgcggtaatacttggtcccggaaacacaagaccttgtctgttagtcaagacgagttctgggccttttcatacgatgagatggcgaaatacgatttgccagcctcaatcaattttattctgaacaagacaggtcaggaacaagtttattacgtgggacattctcaggggaccacgatcggcttcattgcattctcccagattcccgagctggcaaaacggatcaaaatgttcttcgctctgggcccagtggcctctgttgccttttgtacgtccccaatggctaagttgggccgtcttccagatcacttgatcaaggatctgttcggagacaaagaattcctgccacagtccgctttcctcaaatggcttggtactcacgtttgtacccatgtgatccttaaggaattgtgtggaaacctgtgctttcttctgtgtggtttcaacgagaggaacttaaatatgtcccgggttgatgtttacaccacacattcacccgctggaacatcagtgcagaatatgctacactggtctcaggccgttaagttccaaaagttccaagcattcgactggggctcgtctgcaaaaaattacttccattataatcagagctatccccctacctacaatgtcaaggatatgctggtgccaaccgctgtgtggtcaggcggtcacgactggctggcagatgtctacgatgttaatatactgctgacacaaattaccaatctggtgttccatgaaagtattccagagtgggaacacctcgatttcatttggggcctggacgcaccatggcggttgtacaacaagataataaacctcatgcggaaataccagtag

SEQ ID NO: 4513 - DNA, 1032 bp, synthetic construct
  misc_feature 1..1032: note = source = /note="Description of Artificial Sequence: Synthetic coding sequence"
  source 1..1032: mol_type = other DNA
atggcttgcctggaatttgtgccctttgatgtgcagatgtgcctagaattcctcccctcagggccaaagcccgtcgtctttttacagcatggcctgctagccgattcatcaaattgggtgaccaaccttgctaactcaagccttggattcatcctggcggatgccggttttgacgtatggatgggcaatagcagaggcaatacatggtcaaggaaacataaaaccctgtcagtctctcaagacgagttctgggcattcagttatgacgagatggcaaagtatgacctgcctgcttctatcaacttcattcttaacaaaacggggcaagagcaagtgtactatgtgggtcacagtcagggtaccacaattgggtttattgctttctcacagattcccgaactggcaaagcgcattaagatgtttttcgccctcggccctgtggcgtctgtcgccttttgcacatctcccatggctaaactcggaaggctccctgaccacctgatcaaagacctgttcggggacaaagagttcttgcctcagtccgccttcctgaaatggttaggcactcacgtgtgcacgcacgtgattctcaaagagctgtgcgggaatctttgttttctcctgtgcggatttaatgagagaaatcttaatatgtcgcgggtggacgtctacacgactcactctcccgctggtaccagtgtccagaacatgctgcactggagtcaggccgtgaaattccagaagtttcaggcctttgactggggatccagcgccaaaaactattttcactacaaccagtcatatcctccgacatacaatgtgaaagatatgttggtaccaacagctgtttggtctggaggccatgactggctagcagatgtgtacgacgttaatatactgctgacacagattactaacctggtgtttcacgaatctattccagagtgggagcacctggactttatttggggactggatgctccttggcggttgtacaataagatcattaacttaatgaggaaatatcagtag

SEQ ID NO: 4514 - DNA, 1206 bp, synthetic construct
  misc_feature 1..1206: note = source = /note="Description of Artificial Sequence: Synthetic coding sequence"
  source 1..1206: mol_type = other DNA
atggcatgcttggaattcgtcccattcgatgtccagatgtgtctggagttcctgccaagtggcgagttcgtggtcctccttacttctggagtccagttacagacattcaccgtatccgtaacagaccttaagggaggcgcatccggggtggtgcgttcatcgagatgggtacggggatttacggattttcgttctaaggcggtcgatctctgtgggccaaagccagtagtgtttctgcaacatggattattagcagacagcagcaattgggtaaccaatctcgccaattcttcccttggattcattcttgccgatgctggatttgacgtttggatgggcaattctaggggcaatacttggagtcgcaagcacaaaaccctctccgtctcccaggacgagttttgggccttcagagtgcccttcctggattactcgtacgacgaaatggcaaaatatgatcttcccgcttcgatcaattttatcctgaataagactgggcaggagcaggtgtattatgtcggccactcccagggaacaactattggcttcattgctttctctcagatccccgagctggctaaaaggatcaagatgtttttcgctctgggccctgttgcatctgtcgccttctgcaccagccccatggctaaactgggcagactgccggatcatttgattaaagacctgtttggggacaaggagttccttcctcagagcgcttttcttaagtggttggggacacacgtatgtacgcatgtcatcctgaaagaattgtgtgggaatctctgcttcctgctgtgcgggtttaatgagcgaaatctcaatatgtcgcgagtggacgtctataccacacactcccccgcaggtaccagcgttcagaacatgctacactggagccaggccgtaaaatttcagaaattccaggctttcgattgggggtcttcagccaagaactactttcattataatcagagctacccaccgacctacaacgttaaagatatgcttgtgccaactgcagtgtggagcggcggacacgattggctggctgatgtgtatgacgtgaacattctgttaacacaaataaccaacctcgtctttcatgaaagcattcctgagtgggaacaccttgactttatctggggcctggatgctccatggaggttgtacaacaaaattattaaccttatgcggaaataccagtag

SEQ ID NO: 4515 - DNA, 873 bp, synthetic construct
  misc_feature 1..873: note = source = /note="Description of Artificial Sequence: Synthetic coding sequence"
  source 1..873: mol_type = other DNA
atgaagatgcgctttctgggactggtggtatgcttagttctttggacactccacagtgagggatcaggcggaaaattgaccgcggtggaccctgagacgaatatgaatgtgtccgagatcattagctactggggcttcccaagtgaagagtacctggtcgaaactgaagacggatatatcctatgtctcaatcgcatcccacatgggagaaagaatcactctgacaaaggcccaaagccagtcgtattcctgcagcacggcttgctcgcagattccagcaattgggtgaccaacctggccaattcctctctgggatttattctcgctgatgccggtttcgatgtctggatgggcaacagccgtgggaacacatggtccaggaagcataagactcttagcgtgagccaagatgagttctgggcttttagttacgatgagatggctaaatacgacctacccgcaagtatcaatttcatactgaataaaacagggcaggaacaggtttattacgtcggacactctcagggcaccactataggctttatcgcattttcccaaatccccgaacttgccaaaaggataaaaatgttctttgcgctggggcctgtagcctcagtggctttctgcacttctccaatggctaagctcggcaggttgcccgaccacctgatcaaggatctgttcggagataaagaatttcttccccagtccgcattcctgaaatggctaggcacccacgtttgtacgcacgtaattctcaaggagttatgcggaaacctctgcttcctgctctgcgggttcaacgagcggaatctcaatatgtcacgggtggacgtctatactacccactcgcccgctggaaccagcgtatag

SEQ ID NO: 4516 - DNA, 1200 bp, synthetic construct
  misc_feature 1..1200: note = source = /note="Description of Artificial Sequence: Synthetic coding sequence"
  source 1..1200: mol_type = other DNA
atgaagatgcggtttctgggactggtcgtgtgtcttgttctgtggacgctacattcagagggcagcggcggaaagttaactgccgtggatccagaaaccaacatgaatgtgagtgaaataattagttattggggatttccctctgaggagtacctggtcgaaaccgaagacgggtatatcctctgtctcaatagaatccctcatggcagaaagaatcattcggataaggggccaaaacccgttgtttttctccagcacggattattggctgactcaagcaattgggttacgaatctcgccaacagttccttgggcttcatcttggctgatgccggtttcgacgtctggatgggcaattcccggggaaacacatggagccgaaagcacaaaacccttagcgtgagccaggacgagttctgggctttctcttatgacgagatggcaaagtacgatctgccagcctccataaactttatcttaaacaagacgggtcaggagcaggtgtattacgtcgggcattcgcagggcactaccattgggtttatcgctttttcccaaattcctgaacttgccaaaagaataaagatgtttttcgccctgggcccagtcgccagtgtggctttttgtactagtccaatggctaagctggggcgtctcccggatcacctcataaaggacctgttcggcgacaaagagttcctgccccagtcagcctttctcaaatggctgggaacccatgtctgtacacatgtgatcctgaaagagctatgcggaaatctctgttttctgctctgtggcttcaatgagaggaatcttaacatgagcagagtcgatgtctacacaacacactcacctgcgggaactagcgtgcagaacatgcttcactggtcccaggccgtcaaattccagaaattccaggcattcgattggggctcaagtgccaagaattacttccactacaatcagtcctatcctcccacctacaacgtcaaggatatgttggttcccaccgctgtgtggtcagggggtcatgactggctggccgatgtttacgacgtaaacatccttctgacacagattactaatcttgtttttcacgaatcaattccggagtgggagcacctggattttatctggggcctcgatgctccttggagactctacaacaaaatcattaatctgatgcgaaagtaccagtag

SEQ ID NO: 4517 - DNA, 87 bp, synthetic construct
  misc_feature 1..87: note = source = /note="Description of Artificial Sequence: Synthetic coding sequence"
  source 1..87: mol_type = other DNA
ttgtgctttttgctctgtgggtttaacgagcgcaacctgaacatggccgtcaaattccagaagttccaggccttcgactggggttag

SEQ ID NO: 4518 - DNA, 1200 bp, synthetic construct
  misc_feature 1..1200: note = source = /note="Description of Artificial Sequence: Synthetic coding sequence"
  source 1..1200: mol_type = other DNA
atgaaaatgcgttttcttggactcgtggtgtgcttggtcctgtggaccctgcacagcgaaggctcgggcggtaaactgactgctgtagatcctgagactaacatgaacgtgagcgaaattatctcttactggggcttccctagcgaagagtatctggtagagacagaagacgggtacatcctgtgcctgaatcggatccctcatggcagaaaaaatcattctgacaagggacctaagccagtggttttcctgcagcacgggctgctcgccgactctagcaactgggtcaccaacctagccaatagttctctgggctttattctcgcagatgcgggtttcgacgtgtggatgggcaactcccgtgggaatacctggagcaggaagcataagactttatcagtgtctcaggacgaattctgggcctttagttatgacgaaatggccaaatacgatctacctgcctcgatcaattttatactcaataaaacgggccaggagcaggtatattatgtggggcatagccagggcaccaccattggctttatcgccttctcccagatcccggaattagctaagagaataaagatgttttttgctttgggcccagttgcttccgtggccttttgcaccagtcccatggccaaacttggccgactgcccgaccacctgattaaagacttattcggggataaagagttcctgcctcaaagtgcgttcctcaagtggctgggcacacacgtgtgcacccatgtgatcttgaaggagctatgtggtaatctgtgtttccttctgtgcgggttcaacgagaggaacctgaacatgtcgcgcgtggatgtatacactacccatagccccgcaggtaccagtgtccagaatatgcttcactggtcccaggccgtcaagtttcaaaaatttcaggcctttgactgggggagctcagcgaagaattattttcactacaatcagagttaccctcctacttacaacgtgaaggatatgctggtgccaactgctgtgtggagtggaggccacgattggttggcagacgtgtatgacgtcaacatcctgctaacccagattaccaacctcgtgtttcatgaatctatcccagagtgggagcacctcgactttatctggggcctggacgcgccttggcggctgtataacaagatcatcaacctcatgagaaagtatcagtag

SEQ ID NO: 4519 - DNA, 411 bp, synthetic construct
  misc_feature 1..411: note = source = /note="Description of Artificial Sequence: Synthetic coding sequence"
  source 1..411: mol_type = other DNA
atgaaaatgaggtttcttgggctcgtggtgtgtctcgtactgtggacactgcattcggaaggttctggcggaaaactgactgccgtggacccagagaccaacatgaacgttagcgagattatcagctactggggttttccttcagaagagtatctggtggagacggaagacggttacatcctctgtttgaatcggataccacatgggcgtaaaaaccacagcgacaaaggaccaaagccagttgtatttctgcaacacggcctgttggccgacagtagtaattgggtgactaacctggccaattcctctttaggatttatcctagccgatgccggtttcgacgtgtggatgggcaactccaggggcaacacctggtctcggaagcacgtcacactagaacctggctgctag

SEQ ID NO: 4520 - DNA, 1428 bp, synthetic construct
  misc_feature 1..1428: note = source = /note="Description of Artificial Sequence: Synthetic coding sequence"
  source 1..1428: mol_type = other DNA
atggagtctaaggccctccttgtacttacactggctgtgtggcttcagtccctgacagcttccaggggtggcgttgctgcagcagatcagcgacgggattttattgacattgagagtaaatttgccctgcgtactcccgaggatacagccgaagatacctgtcatttgatccctggagtcgccgagagcgtggctacctgtcatttcaaccattctagcaaaacatttatggtgatacacgggtggacagtcacaggaatgtatgagagctgggtgcccaaattagtggctgctctgtacaagagggaacctgactctaacgtcattgtcgtagattggctgtcccgggctcaagagcattaccccgtgtctgccggttataccaagctggtcggccaggatgttgctcgcttcataaattggatggaggaagagttcaattaccctctggataacgttcacctgctagggtactcactaggggctcacgctgctggaatcgcgggatcgttgaccaacaaaaaagtcaaccgaatcaccggcctcgaccctgcaggcccaaattttgagtatgccgaagccccaagcagactgtcccccgacgatgcggacttcgtggatgtgctgcacacgtttacaagaggaagcccagggagaagcatcggcatccagaagccagtgggacatgtggacatttacccaaacggcggtactttccagccagggtgtaatataggggaggccatacgggtgatcgccgaacgcggtctgggggatgtggaccagttagtgaaatgttcccatgaacgtagcatccatttatttatcgattccctcctgaacgaggagaaccccagcaaggcataccggtgctccagtaaggaggcgtttgaaaaggggctttgtctgagctgtcgaaagaataggtgcaacaatttgggatacgagatcaataaagtcagggcaaagcgttctagcaagatgtaccttaaaactagaagccagatgccttataaggtgtttcattatcaagttaagatccacttctctggaacagaatcggagacacacaccaatcaagcttttgaaatttctctttatggtacagtcgctgaaagcgaaaatattcctttcaccctgcccgaggtcagtaccaataaaacctattcctttctgatctatacagaagtcgacattggagagctgctgatgctgaagctcaagtggaaatcagacagctacttctcctggagcgattggtggagcagccccggattcgccattcagaagatcagagtcaaggccggtgaaacccagaaaaaagtgatcttttgttccagagagaaagtcagtcacttgcagaagggaaaagcccctgcggtcttcgtaaaatgtcacgataagagcctgaacaaaaaaagtgggtag

SEQ ID NO: 4521 - DNA, 348 bp, synthetic construct
  misc_feature 1..348: note = source = /note="Description of Artificial Sequence: Synthetic coding sequence"
  source 1..348: mol_type = other DNA
atggttattcacggatggactgtgactggtatgtacgagtcatgggttcccaaactcgtcgcggcactgtacaagcgagagccagattcaaacgtgatcgttgtggattggctgagcagggctcaagagcattaccccgtttctgctggctacaccaaacttgtcggccaagatgtagcgaggtttatcaactggatggaggaggaatttaactaccctttggacaatgtccaccttctgggctactctttaggcgcacatgcagccggaattgccggaagcctcaccaataagaaggttaacaggatcaccggcttggaccccgctgggccaaattttgaatactag

SEQ ID NO: 4522 - DNA, 321 bp, synthetic construct
  misc_feature 1..321: note = source = /note="Description of Artificial Sequence: Synthetic coding sequence"
  source 1..321: mol_type = other DNA
atggagagcaaggcactcctcgtcttgactctggccgtgtggctgcagtccctcaccgccagtcggggtggggttgcagccgctgaccagcgtcgcgactttattgacatcgaatcaaagttcgcccttcgcacccccgaagacacagctgaggacacctgccatctgatacccggagtagctgagagtgtcgccacttgtcacttcaatcactccagcaagactttcatggtgatccacggatggacggtaaccggaatgtatgagagctgggtgcccaagttagtagccgcactgtacaagagagagccggattcctag

SEQ ID NO: 4523 - DNA, 393 bp, synthetic construct
  misc_feature 1..393: note = source = /note="Description of Artificial Sequence: Synthetic coding sequence"
  source 1..393: mol_type = other DNA
atggaaagcaaagccctgcttgtgctgactctggccgtgtggttgcagagtctgaccgcctccaggggcggtgttgcagcggcagaccaaaggagagactttattgatatcgaatcaaaatttgctctgagaactccagaggataccgccgaggacacctgccaccttattccgggtgtcgccgaatccgtggccacttgccacttcaaccatagttcaaagactttcatggtgatacacggctggactgtcacaggcatgtacgagagttgggtgccaaagctggtcgctgcactgtataagagggagcccgactccaacgtcattgtggtggactggctgtctcgggcacaggagcattatcccgtttctgctgggtacaccaaactctag

SEQ ID NO: 4524 - DNA, 1386 bp, synthetic construct
  misc_feature 1..1386: note = source = /note="Description of Artificial Sequence: Synthetic coding sequence"
  source 1..1386: mol_type = other DNA
atggaatccaaagcactgctggtgctgacgctggccgctgcagatcagcgccgtgactttatcgatatagagtccaaatttgctctgcgcacccctgaggatactgcggaggacacctgccatctgataccaggagtggccgagagcgtggctacctgccactttaaccatagctctaagacttttatggtcatccacggatggacagtgaccggcatgtatgaaagttgggttccaaaattggttgccgctttgtacaaacgggaacccgattctaacgtgatcgttgttgactggctctcaagggctcaggaacactaccccgtgtccgcagggtatacgaagttggtgggacaagatgttgctagatttataaactggatggaggaggagtttaattaccccctggataacgtccatttattggggtattctttaggggcacacgctgcgggtatcgctgggtccttaaccaataagaaggtgaaccggatcaccggattggatccagccggaccgaacttcgagtacgcggaagctccatccaggctgtcacctgacgatgctgactttgtggacgttctccataccttcacacgcggaagcccgggtcggtcaatcggaattcagaagcctgtcggccacgtggatatctatccaaacgggggaacctttcagcccggatgtaacatcggggaggccatcagagttatcgccgaacgcggactgggggatgtggatcagctggtgaagtgtagccatgagcggagtatacatctgtttattgactctctgctaaatgaagagaatccatccaaagcatatcggtgtagcagtaaggaagcctttgagaagggcctgtgtttgagctgtcgcaaaaaccgttgcaacaacctcggatatgagattaacaaagtccgcgctaaaaggtctagtaagatgtatctcaaaacgagaagtcagatgccttacaaggtgttccattaccaagtgaaaatacacttcagcggaactgagtctgagacccacacaaaccaggcgttcgaaatcagcctctacggcacggtcgctgaatctgagaacatccccttcactctgcctgaagtctcaacaaacaagacatactccttcctcatttacacggaggtggacattggagaactgctgatgctgaagctgaaatggaaatcagacagctatttcagctggtctgattggtggtcttcaccaggctttgccattcagaaaattagggttaaggccggtgagacacagaagaaagtcattttttgctcgcgcgagaaagtttctcacctccaaaaaggcaaggctcctgctgtgtttgtcaaatgccacgacaagagcttaaataagaaatctggctag

SEQ ID NO: 4525 - DNA, 828 bp, synthetic construct
  misc_feature 1..828: note = source = /note="Description of Artificial Sequence: Synthetic coding sequence"
  source 1..828: mol_type = other DNA
atggttattcatgggtggaccgtcactgggatgtatgaaagctgggtgccgaaacttgtcgcagccttatacaagagagaaccggattccaacgttatagtggtcgactggctatctcgtgcccaggaacattaccctgtgtccgcaggttatactaagctggttggacaggacgtggcccgattcatcaactggatggaggaggaattcaactatccactggacaacgtgcacctactgggatactccctgggtgcccacgccgctggaattgcaggatctctgacaaataagaaagttaacagaattaccggcctggatccagcaggacccaacttcgagtacgcggaagcaccatctcggctgagccccgatgacgcagatttcgtggacgttctgcatacctttacaaggggaagtccagggcgttctattggcattcagaaaccggtcggtcatgtggacatttatccaaacggcggtacgtttcagccaggctgtaacatcggcgaggctatccgagtgattgcagaaagaggcttgggagatgtggatcagttggtaaagtgctcccacgagcgctctatccacctttttatcgactctctgctcaacgaggaaaaccccagcaaagcttatcgctgctcttctaaggaagcgttcgaaaaggggctctgcttgagttgccgcaagaatcggtgtaataatttgggttatgaaatcaacaaagtgcgagccaagaggtctagcaaaatgtatgaggattcattttcagatgcactgcaaagcctgcctctgccttctaaggactccttcttctgggactag

SEQ ID NO: 4526 - DNA, 2079 bp, synthetic construct
  misc_feature 1..2079: note = source = /note="Description of Artificial Sequence: Synthetic coding sequence"
  source 1..2079: mol_type = other DNA
atgggcccttggggctggaagctcaggtggactgtcgccctcctgctggcagctgccggaaccgctgtgggagatcggtgtgagcgcaacgaattccaatgtcaagatggcaaatgtatcagctacaagtgggtgtgtgatggctcagctgagtgtcaggacggcagcgacgagagccaggagacatgcctgtccgtcacttgcaagagtggagatttttcctgcggcggacgggtgaacaggtgcatccctcagttctggagatgcgatggccaagtggattgcgacaatggaagtgacgagcagggatgtctgaccctgtgcgaaggccctaataagtttaaatgccacagcggggagtgtattaccctggataaagtgtgcaacatggcacgagactgtcgggactggagcgacgaacccataaaggaatgtggcaccaacgaatgcctggacaacaatggtggctgttcccacgtctgtaatgacctaaagattggctacgaatgcctgtgccctgatgggttccagttggtggcccaacgcagatgtgaggatatagacgagtgtcaggaccccgacacctgctcccaactctgcgtcaacttggagggcggatataagtgtcagtgtgaagagggcttccaactcgacccacatacaaaggcttgcaaggccgtgggcagcatcgcctatctctttttcactaatcgacacgaagtgcggaagatgacgttagatcgatcggaatacaccagcttgatacccaaccttcggaacgtggtggccttagatacagaggtggcatccaacagaatctactggtccgatctgagtcagagaatgatctgtagcacgcaactcgatcgcgcacacggcgtgtcatcttatgatactgtcattagtcgcgatatacaggccccagacggccttgccgtcgactggatccactcaaatatctattggaccgacagtgtgcttggcaccgtgagtgtggccgacacaaaaggggtgaagcgaaagaccttatttcgggaaaacgggtctaagccgagggctatcgtcgtcgatcccgtgcacggcttcatgtactggactgattggggcacacctgcaaaaattaagaaaggaggactgaatggcgttgacatttactcactggtgactgaaaacatccagtggcctaacggcataaccctggatctactgagcggcaggttatactgggtcgattcaaagctgcactcaatcagtagtattgatgtaaatggtggaaatcgcaaaaccatcctggaagatgagaagaggcttgcccatccttttagcctggccgtgtttgaggataaggtgttctggacagatataataaacgaggcaatcttctctgccaacaggctgaccgggtccgatgtgaacctcttagcagagaatctcctgtcacccgaggacatggtgctatttcataacttaacacagcccaggggagtcaactggtgtgagcggaccactctcagcaacggaggatgccagtatctctgtctccccgctccgcaaattaatccacattctcctaagttcacatgcgcatgcccggatggaatgctgctggccagggatatgaggtcctgtttgactgaagccgaagctgccgtggcaacccaggagactagcaccgtgcgtctcaaggtttcttccacggcagtacggacgcaacatactaccacgcggcctgtgccggatacgtcacgcctgccaggtgccacgcctgggctcactactgtggaaatcgtcactatgagccatcaggcgttaggggatgtggcgggtcggggaaatgagaagaagccaagctccgtgagagcactttctattgtcttacccattgttctgctagtgttcctgtgcttaggtgtgtttctcctgtggaagaattggcgtctgaaaaacattaactccattaactttgataatcctgtgtatcaaaaaacaacagaggatgaagtgcacatttgccataaccaggatggctacagttatcctagcagacaaatggtatccctggaggacgacgtggcctag

SEQ ID NO: 4527 - DNA, 2460 bp, synthetic construct
  misc_feature 1..2460: note = source = /note="Description of Artificial Sequence: Synthetic coding sequence"
  source 1..2460: mol_type = other DNA
atgggaccgtggggctggaaactgaggtggaccgtggctctgcttctggccgcagccggaacagccgtgggcgaccgctgcgagaggaacgagttccagtgccaggacgggaagtgcataagttataaatgggtctgcgacgggagtgcagaatgtcaggatggttcggatgaaagtcaggagacttgttctcccaaaacatgtagccaggacgagtttaggtgccacgatggcaaatgcatctcgaggcagtttgtgtgcgactccgaccgcgattgtttggatgggagtgacgaggcctcttgccctgttctgacttgtgggccagcctccttccagtgcaattctagcacctgcatcccccaactgtgggcctgcgacaatgatccagactgtgaggatggcagtgacgagtggccacaacggtgtcgcggtctgtacgtcttccagggcgactcctcaccctgctcagcgtttgaattccactgtctctctggtgagtgcattcactccagttggagatgcgatgggggacccgattgcaaggataaatccgatgaggagaattgtgccgtggctacttgccggccagacgagttccaatgctcagacggaaactgcatccacggatcccgccagtgcgaccgggagtacgactgtaaagatatgtcggatgaagtgggatgtgtgaacgtgacgctgtgcgagggcccaaataaattcaaatgccattccggtgagtgcatcacattagataaagtgtgcaacatggccagagattgtcgtgattggagcgatgaacccataaaggaatgtgggaccaacgaatgcctagataataatggtggttgttcccacgtctgtaacgatctaaagatcggttacgagtgcctgtgtccagacgggtttcagttagttgcacaacgcagatgtgaggacatcgacgaatgtcaggaccccgatacctgttcacaactctgtgtcaacctggaaggcggatataagtgccagtgtgaggagggttttcagctcgatcctcacactaaggcatgtaaagcagtgggaagcatcgcgtatctttttttcaccaaccgtcatgaggtgaggaagatgacactcgatagatcggaatacacgtccctcattccaaacctaaggaatgtggtggccttagataccgaggtggccagcaatcgtatctattggtctgatctgtcacagcggatgatttgctctacgcaactggacagagcacacggagtgtcctcatacgacaccgttattagtcgcgacattcaggctcctgacggtctggccgtcgactggatacacagcaatatttattggacagactcagttctgggcactgtaagcgtggccgacacaaaaggggtaaaacggaagaccttgtttcgggaaaacggtagtaaaccccgtgctatagtcgttgatcccgtccacggcttcatgtactggactgactgggggactcctgctaagatcaaaaaaggcggattaaatggagtagatatctactctctagtaacagagaacattcaatggcccaacgggatcaccctggacctgttgtcgggtcgtctgtactgggtggattctaagctgcatagcatctccagcattgatgtgaacggaggtaacagaaagaccatcttggaagacgagaagaggctcgctcacccattcagcctggctgtctttgaagataaagtattctggactgacataattaacgaagcgattttcagtgccaacaggcttacgggatctgatgtcaatctgctggccgagaacctgctctcccctgaggacatggtgctgtttcataatctcactcaacctaggggggtgaactggtgtgagaggaccaccttatccaatggcggttgtcaatacttgtgtctgcccgcaccgcagatcaatccgcactcacctaagttcacttgtgcctgccccgacggaatgttgcttgcgagggatatgagatcctgccttaccgaggctgaggccgcagtcgctacacaagaaacatcgacggtaaggttaaaggtgagtagtaccgcagtcaggacccaacacaccacgacgcgccctgttcctgatacctcccgtctgccaggggcaaccccaggcctcaccaccgtcgaaattgtgaccatgtcccaccaagcactcggtgatgtggccggacgaggtaacgaaaagaagccctcaagtgtcagagcactgtcgatcgtgctgcctattgtcctgctcgtgttcctgtgtctgggggtcttcctgctctggaaaaattggagattgaagaacatcaattctatcaacttcgacaatcctgtctaccagaaaacaacagaagacgaggttcacatctgccataatcaagacggttatagttatcctagcagacagatggtcagtcttgaggatgacgtcgcctag

SEQ ID NO: 4528 - DNA, 2049 bp, synthetic construct
  misc_feature 1..2049: note = source = /note="Description of Artificial Sequence: Synthetic coding sequence"
  source 1..2049: mol_type = other DNA
atgggcccttggggctggaaactacgctggaccgtggccctgctgctcgctgccgcagggaccgcagtgggtgatcggtgtgagcgcaatgaatttcagtgccaggacggaaaatgtatttcatacaagtgggtttgtgacggcagcgccgagtgtcaggatggaagcgatgagtctcaggaaacctgcctatccgtgacatgtaagtcaggggatttctcctgtggcggacgggttaatcggtgcataccccagttttggcgttgcgatgggcaggtggattgcgacaacggcagtgacgaacaaggctgtcccgttgccacatgcaggcctgacgaatttcagtgcagcgatggaaactgcattcacggatcccgccagtgcgatcgcgaatacgactgcaaggatatgagcgatgaagtcggatgtgtgaatgtaactctgtgcgagggtccaaataaatttaagtgtcatagcggcgagtgtatcaccctcgataaagtttgtaatatggcgcgtgattgcagagattggagcgacgagcctattaaggagtgcggaacaaatgagtgcctggataacaatggaggctgctcacatgtgtgcaatgacctcaagattggctacgagtgcctgtgcccagatggtttccaactggtagcgcagagaaggtgcgaagacatcgacgaatgtcaagaccctgacacctgctcccaactgtgcgttaatctggagggcggatacaagtgccagtgcgaggaaggctttcaactggaccctcatacaaaggcatgtaaggcggtaggcagcatcgcttatctgtttttcaccaaccgtcacgaagttcggaaaatgaccctcgaccgatccgagtacaccagcctaatccccaatctcagaaatgtggtcgctctggacaccgaggtcgcatcaaataggatttactggagcgatctgagccagcgcatgatctgctctactcagctggatcgggctcatggggtatcctcgtatgatacagtcatctcgcgagatattcaggcgcctgacggccttgctgttgactggatacacagcaacatatactggactgatagcgtgctgggcaccgtgagtgtggccgatacgaagggtgtgaagaggaaaacactgtttagagagaacggtagcaaacctcgcgctatcgtcgtggacccagtgcatggattcatgtattggaccgactgggggacccccgctaaaatcaagaaaggaggactcaacggcgtggacatctacagcttggttactgaaaatatccagtggcccaacggcatcaccctggatctgttaagtggccgtctgtactgggttgactctaaactccatagcatatcttccatcgacgttaatggtggcaatagaaagacaatcctggaggacgaaaagcggcttgctcatcccttttccctcgccgtgttcgaggacaaggttttttggacggatatcattaatgaagctatcttctccgccaatcgtcttacggggtccgacgttaaccttctcgcagaaaatctgctgtcaccagaagacatggtgctgtttcacaatctcacacaacccagagaagccgaagccgcagttgccacgcaggaaacctctacagttcgtttgaaagtttcctctaccgccgtgcgcactcagcacacaaccacaagacccgtgccggacacttcacgactgccaggcgctactccaggacttacaacagtggagatcgtcaccatgtcccatcaggccctgggcgatgttgccggtcgcggaaatgagaaaaaaccaagctccgtccgagcactatctatcgtgcttcccatcgtgctgctggtgtttctgtgtctgggcgttttcctcctgtggaagaactggagactgaagaacatcaacagtattaacttcgataacccggtctaccagaaaaccaccgaggatgaggtgcacatttgccacaaccaagacggatactcttacccaagtcgccaaatggtgtctctggaagacgacgtcgcgtag

SEQ ID NO: 4529 - DNA, 2577 bp, synthetic construct
  misc_feature 1..2577: note = source = /note="Description of Artificial Sequence: Synthetic coding sequence"
  source 1..2577: mol_type = other DNA
atgggaccctgggggtggaaacttagatggactgttgctctcctgctcgccgcagctggaaccgctgttggagacagatgcgaacggaacgaatttcagtgccaggacgggaagtgtatctcttacaagtgggtctgcgatggctccgcagagtgccaggatggatccgatgagagccaggagacctgcttgtcagtcacgtgtaagagcggtgacttctcatgtgggggacgggtaaaccgctgtatacctcagttctggcggtgcgacggccaagtagattgcgacaatggcagtgacgaacaaggctgccccccaaaaacctgcagccaagatgaatttcggtgccatgacggtaagtgcatttcgagacagtttgtgtgtgacagtgacagagactgtctggatggttctgacgaagcctcctgcccggtcctgacatgcggaccggcatcgtttcaatgtaatagttctacatgcataccgcagctatgggcttgcgacaacgatcctgattgcgaagacggttccgacgagtggcctcagcgatgtcgaggactgtacgtattccagggagactctagtccatgttccgcttttgaatttcactgtttgagtggggaatgcattcatagctcttggagatgtgatggaggcccagattgcaaggataagagcgacgaggagaattgtgctgtggctacctgccgacctgatgagttccagtgttcggatggaaattgcattcacggaagcagacaatgcgaccgcgagtatgactgtaaggatatgagcgacgaggtggggtgcgtcaacgtaaccctttgtgagggccctaataaattcaagtgccattccggcgagtgtatcaccctggacaaggtgtgtaacatggcccgagactgcagggattggtctgatgaacctatcaaggagtgcggaaccaacgaatgcctggataacaacggaggctgcagccacgtttgtaacgacctgaagatcggctacgagtgtttgtgccccgacgggttccaactcgttgcccaaagaagatgcgaggatattgatgaatgtcaggatcccgatacctgttctcagctgtgtgtgaatctggagggaggatacaagtgccagtgcgaagaagggtttcaactcgacccccatacaaaggcgtgtaaggcagtcggcagtatcgcctatctttttttcactaataggcatgaagtgcgaaaaatgaccctagaccggagcgagtacacctcgctgatccctaatttacgtaacgtcgttgcccttgacaccgaggtcgcatccaacaggatctattggagcgatcttagccagcgaatgatttgtagcacgcaactggatagggctcacggagtcagtagttacgacactgtgatcagtcgagatattcaggccccagatggccttgccgtggattggattcattccaacatatactggaccgactcagtgttggggactgtgagcgtggctgacactaaaggagtcaagcgcaagacactattcagagaaaacgggtctaagccgagagctatagtggttgatcctgttcatgggttcatgtactggacggactggggcactccggcaaagatcaagaagggaggacttaatggagtggatatatattcactggtaacggagaacatacagtggcccaatggcatcactcttgatttactctccgggcgtctgtactgggtcgatagcaagctgcattccattagtagtatcgacgtgaatggtggcaatagaaagactattttagaagatgaaaagcgcctcgcccatccgtttagcttggctgtgtttgaggacaaggtcttctggacagacattattaacgaggccattttttccgcaaatcgtctcaccggcagcgatgtgaacctcctggccgagaaccttttgagccccgaggatatggtcctgttccataatctgactcagcctcgaggagttaattggtgcgaacgtactacacttagtaacggcggttgccaatatctgtgcctcccagctccacagattaatccacactcacctaaattcacatgcgcctgtccagacggtatgttactagccagagatatgagatcttgccttaccgaggccgaggccgctgttgctacccaagagacctcaaccgtgaggctaaaggtttctagtactgctgtgaggactcagcataccaccacccggccagtcccagacactagtcggctgcccggagcaaccccagggctgacaaccgttgagatcgttaccatgtcccaccaggcacttggagacgttgcgggacgagggaatgagaaaaagccgagtagtgttagggctctcagcattgttctgcccattgtgctcttggtgttcttgtgcctgggcgtattcctgttgtggaaaaactggcgactaaaaaatattaatagcattaactttgacaatccagtctaccagaagactactgaagatgaggtccacatctgccataatcaggatggctattcttatccttccatggtgtccctggaggacgacgtcgcttag

SEQ ID NO: 4530 - DNA, 2583 bp, synthetic construct
  misc_feature 1..2583: note = source = /note="Description of Artificial Sequence: Synthetic coding sequence"
  source 1..2583: mol_type = other DNA
atgggaccctgggggtggaaactgcgctggactgtcgccctgctgttagccgctgctgggaccgcagtaggcgatcgatgtgaacggaatgaatttcagtgccaggacggtaaatgtatctcctataagtgggtctgcgatggtagcgccgaatgtcaagacgggagtgatgaatctcaggagacttgtttatctgtgacatgcaagtccggcgacttttcttgtggcggaagagtgaaccggtgtatcccccagttctggaggtgcgatggacaggtagattgcgataacgggtcggatgaacagggctgtcctcccaagacatgtagccaggatgaattccgatgccacgacggcaagtgtatttcacggcagtttgtgtgtgactctgatcgcgattgtcttgatggttctgacgaagcaagctgccccgtgctaacttgcggccctgcaagtttccagtgcaattcctctacatgtatcccccagctgtgggcttgtgataacgatccagactgtgaggacggatctgatgaatggccccagcgatgtagggggctgtacgtgtttcagggtgattcaagtccatgctctgcgtttgaattccattgccttagtggtgagtgcatccactcatcgtggcggtgtgacgggggaccagattgcaaggataagtcggatgaggaaaactgtgccgtggcaacttgccgtcccgatgaatttcagtgtagcgatggaaactgcattcatggatccaggcagtgtgatcgcgaatacgactgcaaagacatgagtgatgaggtgggttgtgtcaacgtgactctttgcgagggtccaaataagtttaaatgccattccggcgagtgtataacactggataaagtgtgcaacatggcacgggactgccgcgattggtccgatgagccaattaaggagtgcggcaccaatgagtgtctcgacaacaacggaggttgttcccatgtctgcaacgacctcaagataggttacgaatgtttatgccctgatggctttcagctggtggcacagcgaaggtgcgaagacatcgatgagtgtcaagaccctgacacctgcagccaactgtgtgttaacctcgaaggaggctacaagtgtcagtgcgaagaggggttccagctggaccctcacacaaaggcctgcaaggccgtgggaagtatcgcgtatttgtttttcactaaccgccacgaggtgcggaagatgactctcgaccgtagcgagtatacttcattgatccccaacctcaggaacgtagtcgccttagatactgaagttgcttccaacagaatatactggagtgatctttcacagcgtatgatttgcagcacgcagttagatcgtgcacacggagtgagctcatacgatactgtgatcagtcgtgatatccaggccccagacggactagcggtggactggatccattcaaacatctattggacagacagtgtgttaggcacggtcagcgttgctgacaccaaaggcgtcaagaggaagactttgttccgcgaaaacggaagcaaaccgagggctatcgtggttgaccccgtgcatggtttcatgtattggacggactggggaacccctgctaagatcaagaaagggggactgaacggcgtggacatctatagtttggtaaccgaaaacattcagtggccaaatggcattacgctcgatcttctgtccggccgattatattgggtggattccaagctgcattctatttcaagcattgatgtcaatggtggtaatcgcaagactatcctggaggacgaaaagaggctggcacatccctttagcctggccgtgtttgaggataaggtcttttggacagacatcattaatgaggcgatcttcagcgctaatcgcctgactggatcagatgtcaacctgctagccgagaacctcctgtctcccgaagacatggtactgtttcacaacctgacccaacctagaggcgtgaactggtgtgagcgcaccacgctctccaacgggggatgccagtacctgtgtcttccagctccgcagatcaaccctcattctcccaaattcacatgcgcgtgccccgacggcatgttactcgcccgagatatgagatcttgtctgaccgaggccgaggctgccgtcgccacccaagagacatctaccgtgcgactgaaggtgtcttctacagcggtgcggacacagcacacaacaacgagacccgtgcccgatacctccagattgcccggagcaacccccggtctgacaaccgtagagatcgtgacaatgtcccaccaggccctgggagacgtggctggcagaggaaacgaaaagaagcctagtagtgttcgtgccctgtccatcgtccttccaattgttctgctggtattcctctgtctcggggtgtttctgctttggaaaaactggaggctgaagaatataaactccattaattttgataatccagtctatcagaagaccactgaggacgaagtccacatctgccataaccaggatggctattcctaccctagcagacaaatggtgtctctggaagatgatgtggcttag

SEQ ID NO: 4531 - DNA, 2220 bp, synthetic construct
  misc_feature 1..2220: note = source = /note="Description of Artificial Sequence: Synthetic coding sequence"
  source 1..2220: mol_type = other DNA
atgggaccttgggggtggaagctgcggtggactgttgccctcctactggccgctgctgggactgccgtaggtgacagatgcgagcgaaacgactttcagtgcaattcatccacttgtataccccagctttgggcatgcgataatgacccagattgcgaagatgggagtgacgagtggccacaacgatgcaggggcttgtacgtgttccagggagacagcagcccctgctccgccttcgagtttcattgcttgagtggcgagtgcatccactccagctggagatgtgacggaggtccggactgcaaggacaaaagtgacgaagaaaactgtgcagtggccacatgccggccagacgaattccagtgctcggatggtaattgcatccacggaagcagacaatgtgaccgggagtacgactgcaaggatatgtctgatgaagtgggttgcgtgaacgtcactctgtgtgaaggacctaacaagtttaagtgccattcaggggagtgcattacccttgataaggtgtgcaatatggctcgggactgtagagactggtccgacgagccgatcaaggagtgtggcacaaatgagtgcctcgataataacggcggatgcagtcacgtatgcaatgacctgaaaatcgggtacgagtgcctgtgtccagatggcttccagttagtcgcacaacgtcgatgtgaggatatcgacgagtgccaggatccagacacgtgctctcagttatgtgttaatttggagggcggttacaagtgccaatgcgaggagggtttccagctggatccccatacgaaggcatgtaaggcagtggggagcatagcctacctgttctttactaatcggcacgaagtgcggaagatgaccttggacagatcagagtacacatcactgattcccaacctccgcaacgtggtcgcgttggatacagaggtggcatcaaaccgcatatactggtcggacctttcgcagagaatgatctgctccacccagctcgatagagcacacggagtctcttcctacgataccgtaatttccagggacattcaggccccagatggtctggcggtggattggatccactctaatatctactggacagacagcgttctcggaacagtcagcgtggccgatactaagggggtaaagagaaaaactctgtttagggagaatgggtctaaaccaagagccatagtagtggatcctgtacacggtttcatgtactggacagactggggaacacctgccaaaattaaaaagggcggattaaatggtgtcgacatctacagtctggttactgagaacatccagtggcctaatggtattactttggacctactcagcggacgcctgtactgggttgattccaaactccactccatatcttcgatagacgtgaatggagggaatagaaagaccattttggaggatgagaagagacttgcccacccattctcactcgctgtgttcgaagataaagtgttttggacagatatcattaacgaggctattttcagcgcaaatcggttaacagggtctgatgtcaacctgctggcagaaaatctcctttcgccggaagatatggtactctttcacaacctaacacagccaagaggagtaaactggtgcgagcggacgacgcttagcaacggaggttgccagtacttgtgtctccccgctccacagatcaaccctcattctccaaaattcacctgcgcatgtcccgacggcatgctgctggccagagacatgcggagctgtctgacagaagctgaagcggcagtggccacccaagagacctcgactgttaggttgaaagtatcttctacggctgtgaggacacagcacaccaccaccaggcctgtaccagatacttccagactacccggagctactccaggcctaacaaccgttgaaattgttacgatgtcacaccaagcacttggagacgtggctggtcgcggtaacgagaagaaaccatcctctgtgcgagccctgtcaatagtgctccccatcgtcctgctggtgttcctgtgtctgggcgttttcctactgtggaagaattggaggctcaaaaatataaattccatcaactttgacaatcctgtataccagaagactactgaggatgaagtacatatctgtcataatcaggatggatactcctaccctagccgtcagatggtttcactcgaggacgatgttgcttag

SEQ ID NO: 4532 - DNA, 2838 bp, synthetic construct
  misc_feature 1..2838: note = source = /note="Description of Artificial Sequence: Synthetic coding sequence"
  source 1..2838: mol_type = other DNA
tgaggtaggccaggcgtacctccgaggttcttatcacaacgcagacggcaggtaccagggcctcgctctcgactaagggacattcatgaaagccctagtgtcatcctggggcctcctggagaagtacccggattccggtgtgcactgtggagacacctaaggccgcatttggtcttaggtggtgccctagcacccccagcaccaatcaagtttaccgagggtcctccagctacattaaaggcctccgttccttatgaagtagagacactgccacaaaatctgcccgcaccaccatggtcagcagccgagatcttctcgcacgtcggtgaccgttgtgagcggaacgagtttcagtgccaagacgggaagtgcatctcttataagtgggtttgcgatgggagcgccgaatgccaggatggttcagatgaatctcaggagacctgcctcagcgtaacctgcaagagcggcgacttcagctgtgggggtcgagttaacaggtgcattccacaattctggcgttgcgatgggcaagtggattgcgacaatggatccgacgagcaaggatgcccacccaagacgtgctcccaggatgagtttaggtgccatgatggaaagtgcatcagcaggcagttcgtctgcgactccgacagggactgtctggacggctccgacgaggcctcctgcccggtcctgacctgcggacccgcatcatttcagtgtaacagcagtacctgtattccgcagctctgggcttgcgataacgaccccgattgcgaagatgggtctgacgagtggccgcaaagatgtcgcggtttgtacgtctttcagggcgattctagtccctgtagcgcctttgagttccattgtctatcgggcgaatgtatccactccagttggagatgcgacgggggtcctgactgcaaggacaaatccgatgaagaaaactgtgcggtggcaacttgtaggccagatgaatttcagtgttcggatgggaattgtattcatggatcaagacagtgtgaccgggagtatgattgcaaagacatgtctgacgaagtgggttgcgttaatgttacattatgcgaaggtcccaataaattcaagtgtcactctggagagtgtattaccctcgataaagtgtgcaacatggcccgtgactgtcgggactggtcggatgagccaatcaaggagtgtggtacaaatgagtgccttgacaataacggcggatgttcccatgtgtgcaacgacttgaaaattggttatgagtgcctgtgccccgacgggttccagttggtagcacagcggaggtgcgaggatatagacgagtgccaggatcccgatacctgcagtcagctttgtgtgaacctcgaagggggttataaatgccagtgcgaggaagggtttcaacttgatccacatactaaagcatgtaaagctgtgggttctatcgcctatttgttcttcacaaaccggcatgaggtacggaaaatgacccttgaccggtccgagtatactagcctgattcccaacctcagaaatgtggtggcactagataccgaagttgctagcaacaggatctactggagtgatctcagtcagagaatgatatgcagcacacagttagatagggcacacggcgtgagttcgtacgacaccgtgatttctagagatatccaagcccctgatggactcgcagttgactggatccactcaaacatttactggaccgactccgtgctgggaacggtgagtgtggctgacacaaagggagttaagaggaaaaccctattcagggagaatggctctaaacccagggccatcgtagtggaccccgttcatggctttatgtactggactgactgggggacacctgccaagataaagaagggaggcctgaacggcgttgatatttactccctcgtgacggagaatatccagtggcccaacgggatcaccctggatctgttaagcggaaggttgtactgggtagacagcaaacttcattccatctcaagcattgacgtcaacggcggaaatagaaagactatccttgaggatgagaaacgcctcgcacacccattcagcctcgctgtctttgaagataaagttttttggaccgatatcatcaatgaagcgatcttctccgccaaccgcttaactggttctgatgttaatttgctggcggagaatctgctctctcctgaggacatggtactcttccacaatctgacccagccccgaggggttaattggtgcgaacggaccactctgtctaacggcggttgtcagtacttatgcctgcctgcgccacagataaatcctcatagccccaaatttacctgcgcttgcccagacggtatgcttctggccagggatatgaggagttgtttaactgaagcggaggccgctgtagccacccaagagaccagcacagtgcggctgaaggtgtcctccacagcagtgcggactcagcatacaacgactcggccagtgccagacacgtccagattaccaggtgccacacccggattgaccactgtcgagattgttaccatgagccatcaagctctgggggacgtggcagggaggggcaatgaaaaaaagccgtcttccgtcagagccctctcgattgtgctaccaattgtgctgctggttttcctgtgtcttggagtgtttctcctgtggaagaactggcgactgaagaacatcaactcaattaacttcgataaccccgtgtaccaaaaaactactgaggacgaagtccacatctgtcataaccaggacggctacagctatccaagtaggcagatggttagtctcgaagatgacgttgcatag

SEQ ID NO: 4533 - DNA, 1770 bp, synthetic construct
  misc_feature 1..1770: note = source = /note="Description of Artificial Sequence: Synthetic coding sequence"
  source 1..1770: mol_type = other DNA
atgtcacgacgactgctgcccagggctgagaaacgcagacgcaggctggagcaaagacagcagcccgatgaacagcgtcggcgttccggggcaatggttaagatggccgctgcaggaggcggaggcggagggggtaggtattacggtggaggcagcgaaggtggcagagcgcctaaaagactcaaaaccgataacgctggcgatcagcacggaggcggaggcggaggcggtgggggagcgggagccgctggaggtggaggcggaggcgaaaactacgatgaccctcataagacacccgcaagcccggtggtgcatatccggggattgattgatggcgtcgtggaggccgacctcgtggaagcactccaggagttcgggccaatcagctacgtagtggtgatgccaaagaaaagacaggccttggtcgaattcgaagatgtgctcggagcctgcaacgccgtaaactacgccgctgataatcagatctatatagccggacatccagccttcgtcaattattcaacctcacagaagatatccagacctggagactctgacgactctaggtcagtgaacagcgtgctcctgttcactatcctgaatccaatctactcaatcactacagacgtcctgtatacgatctgcaatccgtgcggcccagtgcagcgcatcgtgatctttcggaagaacggtgtccaggctatggtagagttcgactctgtgcagtctgcgcagcgagccaaagcctctctaaatggggcagatatctactccgggtgttgtacattaaaaatcgaatatgccaagcccaccaggctgaatgtctttaaaaatgaccaagacacctgggattatactaatcctaatctctccgggcaaggggacccaggctcaaaccctaacaagagacagcgccaacctcctctcttgggagatcaccctgcagaatacggaggtcctcacggtggctatcacagccactatcatgacgaaggctacgggcctccaccaccccactatgagggacggcgtatgggcccacccgtgggaggacaccgtcggggaccatcgcggtacgggccacagtatgggcacccccctcctccacctcctccgccagagtacgggccacatgccgactctcccgttttaatggtgtacggcctggatcaaagtaaaatgaactgtgatcgggtgtttaacgtgttttgtttgtacggcaacgtggaaaaagttaaattcatgaaatcaaagcccggagcagctatggtcgagatggccgacggatacgccgtggatcgagccatcacccacctgaataacaatttcatgttcggacagaaactcaacgtctgtgtgtccaaacagcctgcgatcatgcctgggcagagttacggattggaggacgggagttgctcatacaaagatttcagcgagagcagaaacaataggttctccactcccgagcaggccgcaaagaaccgcatccaacacccgtccaacgtgctgcattttttcaacgctcctctggaagttacagaagagaacttcttcgagatctgcgatgaactgggggtgaaacgccctagctccgtgaaggttttcagcggaaaaagcgaacgatccagcagtggccttctcgagtgggaaagcaagtccgacgccttagagactctggggtttttgaatcactatcagatgaagaaccccaatggaccttacccttacaccttgaagctttgtttttccacagcccagcacgcttcctag

SEQ ID NO: 4534 - DNA, 540 bp, synthetic construct
  misc_feature 1..540: note = source = /note="Description of Artificial Sequence: Synthetic coding sequence"
  source 1..540: mol_type = other DNA
atgggtcgtcccggattgggagccgctgttagcgatctgggagaagctgtgagtctgagtcaaggcttgttgttgttactattattgtcgatgggcggtgcgtgggcatcacgtgagcccctgcgtccatggtgtcaccctattaatgcaattctggctgtcgagaaggaaggatgtccagtctgtatcaccgtgaacactaccatctgtgctggctactgcccaactatgatgcgagtgttacaggccgtgcttccccctcttccccaggtggtgtgcacataccgggacgtcaggtttgagagcatcagactcccaggatgcccacggggagtcgaccccgtagtgagctttccggtggccctaagttgcagatgcggcccttgtagacggagtaccagcgattgcggcggacctaaagaccacccattgacgtgtgatcaccctcagcaggcctcgagctcttctaaggatcccccacgctcactcccttcgccttccaggttgctcgaacctgatacgccaatactcccgcagtag

SEQ ID NO: 4535 - DNA, 294 bp, synthetic construct
  misc_feature 1..294: note = source = /note="Description of Artificial Sequence: Synthetic coding sequence"
  source 1..294: mol_type = other DNA
atgcaattgggtacagggttactgttggccgcagtgttgagtctgcagttagctgcagcggaagccatctggtgccaccagtgcaccggattcggcggatgtagccatgggtcccgctgcctgagggactccacacattgtgtgacaacagcaacgagggtcctgtcgaatacagaggatctgcccttggtaacaaagatgtgtcatataggctgtccagacatcccgtcattggggctgggcccatacgtgagcattgcttgctgccagacctccctttgtaaccacgactag

SEQ ID NO: 4536 - DNA, 2058 bp, synthetic construct
  misc_feature 1..2058: note = source = /note="Description of Artificial Sequence: Synthetic coding sequence"
  source 1..2058: mol_type = other DNA
atgcccgcatacactcatgcgagtcccatacataacacgcacaaaccctatgagtgcaaggaatgtggtaaatactttagttgtggaagcaatctgatacagcatcagagtattcataccggtgagaaaccttacaaatgcaaagaatgtggaaaggccttccaactccacattcagctcactcggcaccagaagtttcataccggggagaagacatttgagtgcaaagaatgtggaaaggcctttaacctacccacccaactgaacagacataagaacatacatactgtcaagaaactctttgagtgcaaggaatgtggcaaatcctttaatcgaagttctaacctgacacaacaccagagcatccacgcaggagtgaagccctaccaatgcaaggaatgtggaaaagcattcaaccgtggctctaatctgattcagcaccagaagatccacagcaacgagaagccgttcgtctgcagggagtgcgaaatggcgttccggtaccactatcagcttattgagcactgccgtattcacactggcgagaagcctttcgagtgcaaagagtgtcgaaaagctttcaccctgctgactaagctggtacgtcaccagaaaatacacatgggagaaaaaccctttgaatgcagggaatgtggaaaagccttctccctcctgaatcaactgaatcgccacaagaatatccatactggagaaaaacccttcgagtgcaaggagtgcggaaagagtttcaacagaagcagcaacctgatccagcatcagagcattcatgctgatgtgaagccatacgaatgtaaagaatgtggtaagggattcaaccgaggcgctaatttaatccagcatcagaaaatccattccaacgaaaaaccttttgtgtgccgtgagtgtgagatggccttccgatatcactaccaactgatccagcattgccagatccacactggcggaaagcccttcgaatgtaaggagtgcggaaaagcattctctctgctgactcaactcgctaggcacaaaaacattcacacgggggaaaagcccttcgagtgtaaagactgcggcaaggcctttaaccgcggaagcaacctggtccaacaccaaagtatccatactggggagaaaccatatgaatgcaaagagtgcggtaaagccttcaggctgcacctacagctcagtcagcatgagaaaacccatactggtgagaagcctttcgagtgtaaggagtgtggtaaattcttcaggcgcggatccaatcttaaccagcaccgcagcattcataccggcaagaagccgttcgagtgcaaagaatgcggcaaagctttcaggctgcacatgcacctgatccgtcaccagaagtttcacaccggtgagaagccctttgaatgcaaggagtgcggcaaagccttcagtctacatactcaactaaatcatcataaaaatattcacacaggagaaaagcccttcaagtgcaaggagtgtggtaaatcttttaacagggtcagcaacctggtgcagcaccagtccatccacgcaggggtgaaaccgtatgaatgcaaagagtgcggcaaaggattcagccgcgtttctaatctcatacagcatcagaagacacattcctctgccaaaccgttcgtgtgtaaggagtgcaggaagacattccgctaccactaccaacttactgaacactaccgtattcatacaggagaaaagccattcgagtgtaaagaatgtgggaaggcctttgggttgcttacacagctggcccaacatcagataatacacactggcgagaaaccttttaaatgcaaggaatgcggtaaagcctttaatcgcggatccaaccttgtccaaccacagtcgattcacaccggtgagaagccctatgagtgtaaggagtgtggcaaagcctttcggctgcacctccagctatcgctgcaccagaaactggtccaggtgcgcaatccgctgaatgtcagaaatgttggccagccatcagacatttctagtaacctcttgaatatccggaagttcatcctcggttag

SEQ ID NO: 4537 - DNA, 564 bp, synthetic construct
  misc_feature 1..564: note = source = /note="Description of Artificial Sequence: Synthetic coding sequence"
  source 1..564: mol_type = other DNA
taacggggaggaggggatagctatggcgttctgctgtcaaacgcacttgccaggctgcgcggattcaaggatcacttcactttctgtcagcaactgaatatttcgatctgtccactgtcacagacagctgcacgatttcaagtaatcgtttacaaccccctgggaaggaaggttaactggatggtgcggctccctgtctccgaaggcgtgtttgttgtcaaggacccgaatgggcgaactgttcctagtgacgtggttattttcccatccagcgatagtcaagcccatcccccagaactgctgttctctgcatcactgccggcattggggttctctacgtactccgtggcccaggtgccacgctggaagccgcaggccagagcccctcagcccatcccgaggcggtcctggtccccagcgctgacaatcgaaaacgagcacatccgggctacctttgaccccgacacagggctcttgatggaaatcatgaacatgaaccagcagctgctgctgccagtaagacagacattcttttggtataacgcttcgatcggcgataattag

SEQ ID NO: 4538 - DNA, 3036 bp, synthetic construct
  misc_feature 1..3036: note = source = /note="Description of Artificial Sequence: Synthetic coding sequence"
  source 1..3036: mol_type = other DNA
atgggggcatatgctagagcctccggcgtgtgtgcgcgtggatgcttggattctgccggaccgtggaccatgagcagagcgttaagaccgccactcccgcctttgtgtttttttctgttgctgcttgctgccgcaggtgcccgagcaggaggatatgagacttgtcctaccgtgcagcctaacatgctcaacgtgcatctgctgccgcatacccacgatgatgtggggtggctgaaaactgtggaccagtacttttatgggattaaaaatgacattcagcacgccggtgttcaatatattcttgattctgtgatttccgccctcttagcagatcccactcgaaggtttatatacgttgagatcgctttcttctcaaggtggtggcaccagcagacaaacgctacacaggaggtggtaagggacttggtgcgccagggacgcctagagttcgctaatggtggatgggttatgaatgatgaagcagcaacccactacggggctattgtagaccagatgacactggggctgaggttccttgaagatacctttggaaatgacggtcgaccgagggtggcctggcacattgacccatttgggcactctagagagcaagcaagcttgttcgctcaaatgggctttgacggctttttctttgggaggctggattatcaggataaatgggtcaggatgcagaagctggagatggagcaggtgtggcgcgcttcaacatcactcaagccgcctacagccgacctgttcaccggcgttctgcccaatggttacaacccacccaggaacctttgttgggatgtcctttgtgtagatcagcctcttgtggaggatcccagaagccccgagtacaacgccaaggagctggtcgactactttctgaacgttgccacagcgcagggcagatactaccggaccaatcacacggtgatgaccatgggcagcgacttccagtatgagaacgccaatatgtggtttaagaacttggacaaattgattcgcctggtgaacgcacagcaggctaaggggtcgagcgtccatgtgctctactcaactcccgcatgttatctatgggagttaaacaaggccaacctaacatggagcgtaaagcatgatgatttctttccatatgccgatgggccacatcaattttggacaggctatttttctagcagaccagcactcaagcggtacgagagactgagttataatttcttgcaagtatgtaaccagttggaggccttggtgggattagccgctaacgtgggcccatatggatctggagattctgctcccctgaacgaagccatggcggtgctgcagcaccatgacgctgttagtgggacctcgcgtcaacatgtggccaatgactatgccagacagcttgcagcaggctggggcccatgtgaggtcttgctttcaaatgctctggccagactccgcggtttcaaggaccacttcacattttgccagcagctgaatatctctatatgccccctctcacagaccgccgctaggttccaggtcattgtgtataatcccctcgggaggaaggtcaactggatggtgcggctgccagtgagcgaaggagtatttgtagtgaaggacccaaacggaaggacagtgcccagcgatgtagtcatctttccgtctagcgatagtcaggctcatcccccagagctgctgttctcagcctcgctccctgccttgggcttctccacttattcagtggcacaggttcctagatggaaacctcaggcaagggctccacagccaattccaagacgatcatggagccctgctctcaccatcgaaaacgaacacatacgggctacattcgaccctgacaccggccttcttatggagattatgaacatgaaccagcagttgctgctgccagttcgtcagaccttcttttggtataatgcctccatcggggataatgaatcggaccaggcttccggagcttacatctttcgtcccaatcagcagaaacccctgccggtatctcggtgggctcagatacaccttgttaaaacacccctggtgcaggaggtccaccaaaacttcagtgcatggtgttcacaggtcgtacgcctgtacccgggtcagcgacacctggagctggagtggagtgtgggaccgatccccgtaggcgacacttgggggaaggaggtcatttccaggtttgacacaccactggagaccaaaggacgattttacacagatagtaacggtagggagatactggaaaggcgacgcgattaccgtccgacatggaagctgaatcaaacagaacccgttgctggcaattattatcccgtcaacactaggatttacatcacagacggcaatatgcagctcacagtgttaacagaccggagccagggtggctcctccttgcgtgatggatctctcgagctgatggtacaccgcagactgctcaaagacgatggaaggggcgtttccgagcctctgatggagaatgggtctggcgcatgggtgcgtgggaggcatctggtgctattggatacagctcaggcagccgctgccggacataggctcttggccgaacaggaggttctggccccacaggttgtgttagcaccgggtggcggagccgcttacaacttaggcgctcccccaagaacgcagttttcaggactacgccgtgaccttccgccttccgtccatcttctgaccctggcatcttggggccctgagatggtgctcttacgccttgagcatcagtttgcggtgggagaggactctggcagaaatctgtcggctcccgtgactctgaatctcagagatctgttcagcactttcacgattacacgccttcaggagaccactctggtggcgaaccagctgcgggaggcggctagtaggctgaaatggacaactaacaccggccctacacctcaccagaccccctaccagctggatccagctaacatcacactagagccgatggaaattcgcacatttctcgcttctgtgcagtggaaagaggtggacggttag

SEQ ID NO: 4539 - DNA, 2853 bp, synthetic construct
  misc_feature 1..2853: note = source = /note="Description of Artificial Sequence: Synthetic coding sequence"
  source 1..2853: mol_type = other DNA
atgctaaatgtacacctcctgcctcacactcacgacgacgtgggctggctgaaaactgtcgatcagtacttttatgggatcaaaaacgacattcagcacgctggcgtccaatacatactggacagtgtgatttccgcactgcttgccgatccgacacgaagatttatttatgtggaaatcgccttttttagccgttggtggcatcaacagacaaatgccacgcaagaggttgtccgggacctggtgcgacaaggacggctagaattcgctaatggcggttgggtaatgaatgacgaagctgctactcattacggggcaattgtggatcagatgactcttggactgaggtttctcgaggataccttcggcaatgatggtcgccctcgagtggcatggcatatagatccgtttgggcacagtcgcgaacaagcgtcactgttcgcccagatgggttttgacggattcttttttggtcgattagactatcaggacaaatgggttcgcatgcagaagttggaaatggagcaggtgtggcgcgcatcgacttcactgaagcccccaacagcagatttgttcaccggcgtgctgcccaatggctataacccacctagaaatctgtgttgggatgtgctctgcgtagaccagccactcgtggaagatcctcggtcccccgaatataatgccaaagaactggtggattatttcctgaacgtcgctacagctcagggacggtactatcgcacgaatcacacggtgatgaccatgggaagtgattttcagtacgaaaacgccaatatgtggtttaagaatctggacaaactgatcagactggtgaacgcacagcaggcaaagggaagctcggtccacgttttgtattccactcccgcttgttacttgtgggaactgaacaaagcaaacttgacttggtccgttaagcacgacgatttctttccatatgccgacggcccacaccagttttggactggctactttagttctcgcccagctctgaaacgctatgagcgcctgagttacaactttctgcaagtttgcaatcagttggaggcccttgtcggactggcggcaaatgtgggcccttatggatcgggcgacagtgccccactgaacgaggctatggctgtgttacagcatcacgacgctgtgtctgggacaagccgacaacacgtggctaacgactacgcccgtcagctggccgctggttggggcccatgtgaggtccttctaagcaacgcactcgcacgcctcaggggcttcaaggaccacttcacattctgccagcaattaaacatatcaatatgtccgctcagccagactgccgcacgttttcaagtgatcgtatacaaccctttgggtcgcaaggtgaattggatggtccgcctgcccgtcagtgagggtgtctttgtggtgaaggatccaaatggcaggactgtgccaagcgacgtggtgatctttccgtcctccgattcccaggcccacccgcctgagttactgttttccgcttcactacccgcactggggttttccacctacagcgtggcgcaggtgcccaggtggaagccccaggctagagcccctcaacctatccccagacgatcttggagcccagccctgaccattgaaaatgaacacatccgcgcaactttcgaccccgacacaggcctactgatggaaataatgaatatgaaccagcaactccttctcccagtgcggcagacttttttttggtacaatgcgagcattggagacaatgaaagcgaccaagcctccggagcttacatttttagaccaaatcagcaaaagcccctaccagttagtcgttgggctcagattcatcttgtcaaaaccccattagtccaggaggtacatcaaaatttctccgcttggtgctcccaggttgttagactatatcctggacagcggcatcttgaactggagtggagcgtggggccaatccctgttggggatacgtgggggaaggaagttattagtcgctttgatacacctctggaaacaaagggacggttttacaccgattctaacgggagggaaatactcgaacgtaggcgcgactatcgacctacgtggaagcttaaccagaccgagccagtcgccggaaattactatcctgtcaacacccgcatttacatcacagatgggaacatgcaactcacagtgctgactgatagaagccaaggtggcagctcgctgcgggacgggagcctcgagttaatggtacaccgcagacttcttaaggatgacggaagaggagtgtccgagccactgatggagaatggatccggagcttgggtacgtggtcgacatctggttctgctggatacggcacaggccgcagcagcaggccacaggttgctcgccgaacaggaggtcttagcccctcaggtcgtgttagctcctggcggaggagctgcctataatctgggcgctcctccaagaactcaattcagcgggctgcgacgcgacctgccaccctctgtgcacctgctgacattggcctcgtggggcccagaaatggttctgctgagactagagcatcaatttgccgtgggggaggatagcggcaggaacctgtctgccccagtaactctgaatctcagggacctgttctcaactttcactatcactcgcctccaagaaacaacattggtggcgaatcaattgcgggaggccgcttctcgactgaaatggacaacgaatactggcccaactccccatcagaccccctatcagctggaccccgcaaatattacgctggagcccatggaaatccgaacttttctggctagcgttcagtggaaggaagtcgatgggtag

SEQ ID NO: 4540 - DNA, 882 bp, synthetic construct
  misc_feature 1..882: note = source = /note="Description of Artificial Sequence: Synthetic coding sequence"
  source 1..882: mol_type = other DNA
atgggattcccagccgcagcactcctctgcgcactctgctgcggacttctggccccagcagctagggccggatacagcgaagaacgctgtagctggcgcggatcgggtctaactcaagaaccaggcagcgtaggacagttagctttagcttgcgctgaaggtgcggtcgaatggttgtacccggctggcgcattgagattaacactgggcggacctgatcccagagcaagaccaggtatagcctgccttagacctgtgcgcccatttgcaggggcacaggttttcgccgagcgggcaggcggagcccttgagctcctcctggcagaagggccaggcccagctggagggaggtgtgtgcgatggggacctcgtgaaaggcgagcattgtttctgcaggccacaccccatcaggatatttcgagacgtgtggcagcctttcgtttcgaattacgtgaggacggtagacccgagctaccacctcaggcacacggcctcggggtagacggggcttgcagaccttgttccgatgccgagctgctgctggccgcttgtacgagcgacttcgtcattcacgggattatccacggagtgacccatgacgttgagctccaggagagcgtgattactgttgtggctgccagggtcttgagacagacaccgccattgttccaggcagggaggtccggtgaccaaggactgacctccattcgaacccccctgcgctgcggcgttcatccagggccagggaccttcctctttatggggtggtcgcgttttggtgaagctcggctaggatgcgcaccgcgatttcaggaatttcgtcgcgcatacgaggcggcaagggctgcccacctgcacccttgtgaggtcgcattgcattag

SEQ ID NO: 4541 - DNA, 708 bp, synthetic construct
  misc_feature 1..708: note = source = /note="Description of Artificial Sequence: Synthetic coding sequence"
  source 1..708: mol_type = other DNA
atggagcaggatgatccagtggaggcactcaccgagctgagggaacgacgcttgggcgctctggagctactgcaggcagctgccggatcagggctcgccgcttacgccgtgtgggcactgctgctacagcccggattccgcagggttccgctccggttgcaagtgccatatgtaggagcctcagcgagacaggtggagcatgtgctgtcactgctccgaggacgcccaggcaagaccgtggacctcggatccggagatggaagaatcgtgctcgccgctcacaggtgtggcctccgcccagccgttggctatgaactgaacccttggttggtggcgctggcgagactgcatgcctggcgggctggatgtgccggttcagtgtgctacaggaggaaggacctctggaaggtgagcctcagggattgcagaaacgtgtccgtttttctggctccctccgtcctacctttgctcgaagacaaactgcggaccgaattgccggctggtgctagagtggtgtcaggcaggtttcccttaccaacgtggcagcctgtgactgcggtgggagaaggattggatcgggtctgggcttatgatgttcctgagggaggccaggctggcgaagccgcttccagcaggatccccatccaggcagctccaggtccctctagcgctccgatccctggaggattaatttcacaagcgtcttag

SEQ ID NO: 4542 - DNA, 2253 bp, synthetic construct
  misc_feature 1..2253: note = source = /note="Description of Artificial Sequence: Synthetic coding sequence"
  source 1..2253: mol_type = other DNA
atgttacgggctaagaaccagctattcctattatctcctcactacctgcgccaggttaaggaatcatccggatcacgactaatccagcaaagacttttacatcaacagcagccactgcatccggaatgggcggcactggctaaaaaacagttaaagggcaagaaccctgaagacctaatttggcatactccagaaggtatatcaatcaagcctctatattccaagcgcgacaccatggatctcccagaggaactgcccggtgtgaagccctttaccagaggtccctatccaactatgtatacgtttaggccttggaccattaggcagtacgcagggttttccaccgtcgaggaatcgaataaattctacaaagataatataaaagcgggacagcaggggctctccgtggccttcgacctggcgactcacaggggctacgatagcgacaaccccagggtgagaggagacgtagggatggcaggggtcgctatcgacaccgtggaagacacaaagatcctgtttgatggcattcccttagaaaagatgtctgtgagcatgacaatgaatggggcagtcatacctgttcttgccaacttcatcgttactggtgaggagcagggagtgcctaaagaaaagctcaccggtacaatccaaaatgacattctaaaggagtttatggtcagaaacacatacatatttccacctgagccttccatgaaaatcatcgccgatatattcgagtacaccgccaagcacatgcctaagtttaacagcatctccataagtggctaccacatgcaggaagctggagcagatgccattttggagctcgcttatactctagcagacggcctggagtacagtagaactgggctgcaggcgggtctgactattgatgagttcgcaccccgtcttagttttttctggggcataggcatgaacttctacatggaaatcgcaaagatgagggccggacggagactgtgggctcatctcattgaaaagatgtttcaacctaaaaactcaaagtctttgctcctcagagctcactgccagaccagtggttggagcctgaccgaacaagacccctataacaatattgtgcggacagccatcgaagcaatggccgcagtgtttggcggaactcagagcctacataccaatagcttcgatgaagccctgggcctgccaacagtcaagtccgcacggatcgcgagaaatacccagattatcatccaggaagagagcggaatacctaaggtagcagatccctggggcggatcgtacatgatggagtgcctgacaaatgatgtgtacgacgccgctctgaaacttattaatgagatagaagaaatgggaggaatggcaaaggccgttgcggagggaatacctaagctcaggatagaagaatgcgccgcaaggcgccaagcacgcattgattcaggctctgaggtgatcgtgggcgtcaataagtaccagctcgaaaaggaggatgctgtggaagtgcttgctatcgacaacacatccgtgcgcaatcgtcagatcgagaagctgaagaaaataaagagtagtcgggatcaggcgctggccgaaaggtgcctggctgcactgactgagtgcgcagctagcggtgacggcaatatcctggcgcttgccgtggacgccagccgggcacgctgtacggtcggcgagattacggatgccctgaaaaaagttttcggcgagcataaggccaatgacagaatggtgagcggcgcatatcgtcaggagtttggtgagagcaaggaaatcactagcgcgatcaagagggtccacaagttcatggaaagagaggggcgacggcctaggctcctagtcgcgaagatgggacaggacgggcatgacaggggtgccaaggtcattgcaaccggctttgcagaccttgggttcgacgtggacatcggccctctctttcaaaccccaagagaggtcgctcagcaggcagttgatgcagatgtgcacgcagtaggaatatccaccctggccgcagggcacaagactttagtgcccgagctcattaaagagctaaacagtttaggccgacctgacattctagtgatgtgcggcggtgtgattcctcctcaggactacgaatttctgttcgaagtgggagtatcaaacgtgtttggcccaggtactaggatccccaaggctgcagtgcaagtactggatgacatagagaaatgcctggagaaaaaacaacaatctgtttag

SEQ ID NO: 4543 - DNA, 594 bp, synthetic construct
  misc_feature 1..594: note = source = /note="Description of Artificial Sequence: Synthetic coding sequence"
  source 1..594: mol_type = other DNA
accaggtacctcgccagatgcacagtcggcgagataactgatgcacttaaaaaggtcttcggtgagcacaaggccaacgatagaatggtgtcaggggcataccggcaggagttcggcgagagtaaagagattaccagcgctatcaaaagggtccacaaatttatggagagggaaggcaggcggccacgacttctcgtggctaaaatgggccaggatggtcatgacagaggtgccaaggtaatcgcaacagggtttgcggatctggggttcgacgtcgacatcgggcctctcttccaaaccccgagggaggtggcccaacaggcagtcgacgctgacgtccacgctgttggcattagcactctggcagccggacacaagacactagttcctgaactcatcaaggagttgaactcgctgggcagacccgatatcctagttatgtgtggtggggtgattcctccccaggactacgagtttctcttcgaggtcggagtcagcaatgttttcgggccaggcacaagaattccaaaagctgccgtgcaggtgctggatgacatagagaaatgcctggagaaaaaacagcagtccgtgtag

SEQ ID NO: 4544 - DNA, 2685 bp, synthetic construct
  misc_feature 1..2685: note = source = /note="Description of Artificial Sequence: Synthetic coding sequence"
  source 1..2685: mol_type = other DNA
atgattctcctagccgtattgttcctgtgtttcattagctcttattcagctagtgtcaaaggccacacaacaggcctatcactcaacaacgacaggctgtacaaactgacttatagcactgaggtgctcctagaccgcggaaagggaaagttacaggattctgtggggtacagaatatcaagcaacgtggatgtggcgctcctgtggaggaaccccgacggagacgatgaccaactgattcaaatcactatgaaagacgtgaatgttgagaacgtgaaccaacaaagaggagagaaatctatctttaagggcaagagcccttcaaagattatgggcaaggagaatctcgaagctctgcagaggccgactttgctccacttaatacacggcaaggtgaaggaattctacagttaccagaacgaggcagttgcgattgagaacattaagagaggactcgcctcacttttccaaacgcagcttagcagtggcaccaccaacgaggtagacatctctggtaattgcaaagtgacttatcaagctcaccaggataaagtgataaagatcaaagccctggattcgtgtaaaattgcacgcagtggttttactacccccaaccaagtgctgggggtgtcctccaaagccaccagcgttacaacctataagatagaagattcctttgtgatcgccgtgctcgctgaggaaacgcataattttggcctgaatttcctgcaaaccattaaaggaaaaatcgtctctaagcagaaactggaactaaaaaccacagaagctgggcctaggctgatgagtgggaaacaggctgcagccataataaaggccgtcgactcaaagtatacagcaatccccatcgtaggtcaggtgtttcagtcccattgcaagggctgtccttcccttagtgagctgtggagaagcaccagaaaataccttcagcctgacaatttgtcaaaagctgaggccgtgagaaacttcctggcgttcatacaacatctcagaaccgccaagaaggaagagatattgcagattttaaagatggagaataaggaagtgttgccgcagctagtcgacgccgtaacctcggcccagacctctgatagtttggaagctatcttggattttctggattttaagtccgacagtagcatcatccttcaggagcggtttctttacgcttgcggtttcgcctcacacccaaatgaagaactcctcagggcacttatcagtaaatttaaagggtccatcggttccagcgatattcgagaaacggtgatgatcatcaccggcacattggtcagaaagctgtgccagaacgaggggtgcaagttaaaggcggtggtggaggccaagaaactgatattgggtggcctggaaaaagcggagaaaaaggaggacaccagaatgtatctcctcgccctaaaaaacgcactgctgcctgagggcattccttccctgctgaaatatgcagaagcgggagagggccctatttcacacctcgccaccactgctctgcaaagatacgatctgccgttcatcaccgacgaggtgaaaaaaaccctcaatcgaatctaccatcaaaacaggaaggtgcatgagaaaaccgttagaacggccgctgccgcaatcattttgaacaataacccatcctatatggacgttaagaatattttgctatcaatcggtgagctgcctcaggagatgaataagtacatgctggctattgtgcaagacattctccgcttcgagatgccggcatccaaaatcgtgcgcagggttctgaaggagatggttgcccacaattacgatagattctcgcggtctgggtccagctcagcttatacgggctatattgagcgctcccccaggagtgctagcacgtacagcctggatatactgtactctggatccgggatactccgtcgctcgaacctaaacatatttcagtacataggtaaggccggactgcatggtagccaagtcgttattgaggcccaggggcttgaggctctcattgccgcaaccccggacgaaggagaagagaatctggattcctatgctggaatgagcgctattctttttgacgtgcagttgagacccgtaactttttttaacggatacagcgatctcatgtcaaaaatgctctccgcctctggagaccctatatctgttgttaagggactgattttactgatcgatcacagccaggaattgcagcttcaaagcggcctcaaggccaacatcgaggtccagggaggtctcgcaattgacatctccggagccatggagttttctctttggtatagggaaagtaaaactcgtgttaagaatagggtaacggttgtgattacaaccgatataaccgtcgatagctcttttgtcaaggccggacttgagacctccaccgagaccgaggcaggactggagtttattagcacggtgcagttcagtcagtatccattccttgtgtgcatgcagatggataaggatgaagctccctttcgccagtttgagaagaaatacgagaggctgagcacagggcgagggtatgtgagtcaaaagcggaaggagagtgtactcgccggatgtgaattccctcttcatcaggagaatagcgaaatgtgcaaggtggtgttcgcgcctcagcccgatagtacttcgagcggttggttttag

SEQ ID NO: 4545 - DNA, 2685 bp, synthetic construct
  misc_feature 1..2685: note = source = /note="Description of Artificial Sequence: Synthetic coding sequence"
  source 1..2685: mol_type = other DNA
atgatcctcctggcagtcctgtttctgtgcttcatcagctcatactcagcttctgtgaaaggtcacaccactggactcagcctcaacaatgataggctctacaaattgacatactcaactgaggtgctgctcgacagaggcaagggcaagctacaggacagcgtgggttatagaatctcatcaaacgttgatgtcgccctgctgtggcgcaacccagacggcgatgatgaccagctgatccagataactatgaaggacgtaaacgtggagaatgttaaccagcagaggggagagaaaagcatattcaaaggaaagagtccttcaaagattatgggaaaggagaaccttgaggctctccaaagaccaactttacttcatctgattcatggcaaagtgaaagagttttacagctatcagaatgaagccgtggctattgaaaatattaagagggggctggcttccctcttccagactcaactttcctccggcaccacaaatgaagtggacataagtggcaactgcaaagtgacttatcaggcccatcaggacaaggttattaagatcaaagctcttgacagctgcaaaatagctcgtagcggctttaccactcccaaccaggtgctgggggttagttccaaagcaaccagcgtaacaacttacaagattgaagactctttcgtgatcgcagtactggcagaagagacacacaacttcggtctgaattttttacaaactattaaagggaagatcgtgagcaaacaaaagctagagctgaagacgacggaagccggtcctaggctcatgagcggaaagcaggcagccgcaatcattaaggcagtggactccaaatacactgccatacccatcgttggacaagtgttccagtcccactgtaagggctgcccttctctgtcggaactgtggcgcagcaccagaaagtatctccagccggataatctcagtaaggcagaagcagtccgaaactttcttgcattcatccagcacttgcgcactgccaaaaaagaggaaatcttgcagattttgaagatggaaaataaggaagtacttccgcagctcgttgacgccgtgacgagcgcgcagacatccgattctcttgaggccatcttggatttccttgactttaagtctgactcatccatcatcctgcaggaacgatttctttacgcttgtggttttgcctctcatcctaacgaggaactgttacgcgctctgattagtaagtttaaagggagcattgggtcatctgacattcgcgagacagtcatgatcatcactgggaccttggtgcgtaagctttgtcagaatgagggctgcaaactcaaagctgtggtcgaggccaaaaaactgatccttggcggattggaaaaggccgaaaagaaggaggacacccgtatgtatctgctggccctgaaaaatgcattgttacccgaggggataccatctctgctcaaatacgctgaagccggagaggggccaatttcccacctcgccaccacagcccttcagaggtatgacctgccctttattaccgatgaggtcaagaagacccttaacagaatttaccaccagaaccggaaggtgcatgaaaaaacggtgaggaccgctgccgcagccattattctcaataataatcctagctacatggatgtgaaaaatatcttactctccatcggggaacttccacaggagatgaacaaatatatgctcgctatagtccaggacattctgagatttgagatgccagcatccaaaatcgtccggagagttctcaaggaaatggtcgcacacaactatgacagattctcaagatcaggctccagcagcgcctatacaggttatatcgaacggagccctcggtccgcctcgacctactctctggatatcctctattcgggtagcggcattctgagaaggagtaatctcaacattttccaatacataggcaaagctggcctgcacggctcccaagtagttatagaggctcagggcctggaggcgctgatcgccgctacccctgatgaaggggaagagaacctggattcctatgctggtatgtcagccatcctatttgatgtacagcttcgccctgtcacattcttcaatggttacagtgacctcatgagcaaaatgctttctgccagcggggaccccattagcgtggtgaagggtctgatcctgttgatcgatcacagccaagagctgcagctgcagtccgggctgaaagctaacatcgaggtccaagggggattggcgattgacatttccggggctatggagttcagcctatggtatagggagtctaaaacccgcgttaaaaaccgagtaaccgtcgtcatcaccacagacatcacagttgacagctctttcgtgaaagcagggcttgagaccagcaccgaaaccgaggcagggctggagtttatttcgaccgtccaattctcacaatacccatttctagtttgcatgcagatggataaggatgaagcccctttcaggcagtttgagaaaaaatacgaaagactgtctaccggaaggggatacgtgtcccagaaaaggaaggaatcagtcctcgctggttgtgagttccctctccaccaggagaatagcgaaatgtgtaaagtcgtctttgcgcctcagcctgactctacttctagtggctggttctag

SEQ ID NO: 4546 - DNA, 537 bp, synthetic construct
  misc_feature 1..537: note = source = /note="Description of Artificial Sequence: Synthetic coding sequence"
  source 1..537: mol_type = other DNA
atggcaagggctccattgcgaccagagaatactatcgtccggggttccgcaaaccagtgtcaagatacctaccgagcagaggagctgactgggcacaccacaggcctctcccttaacaacgacaggttatataagctcacttattccacagaagttctcctcgatcggggaaaggggaagctccaggactctgtcggatatcgaatctctagcaacgtggacgtggcccttctctggcgcaatcccgacggagatgatgatcagttgattcagatcaccatgaaagatgtcaacgtcgagaacgtgaatcagcagagaggtgaaaagtcaatttttaaaggcaaatctccaagtaaaattatgggtaaagaaaacctggaggctctgcagcgccctaccctgctgcatctgatacatgggaaagtcaaagaattctatagttatcagaacgaggccgtggccattgagaacatcaaaaggggactcgcatctttgttccagacacagctttcctctgggaccacaaatgaggtctag

SEQ ID NO: 4547 - DNA, 1551 bp, synthetic construct
  misc_feature 1..1551: note = source = /note="Description of Artificial Sequence: Synthetic coding sequence"
  source 1..1551: mol_type = other DNA
atgattctgctggctgtgcttttcctgtgcttcattagctcctactcagccagtgtgaagggccatacaacagggctgagtcttaataacgacagactgtataaactcacctactccaccgaggtgttactcgaccgaggtaagggaaagcttcaagactccgtcgggtaccgcatctcctcaaatgtcgatgtggcgcttttatggcggaatcccgacggcgatgacgaccagctcattcagattactatgaaggatgttaatgtcgagaacgtgaaccagcagcgcggagagaaaagcatcttcaagggcaagtctcccagcaagatcatgggcaaagaaaatttggaagcgctgcaaaggccaacacttctccacctgattcatggcaaggttaaagagttctattcttatcagaacgaagctgtggccatcgagaacattaagcgcggactggcgagccttttccagacccagctgtctagtggaactacaaacgaggtggacatttctgggaattgtaaggtaacataccaggctcatcaagataaagtaatcaagatcaaagcgctcgattcatgtaagatcgcccgaagtggatttaccacgcctaaccaggtattgggtgtttcatccaaagccacgagcgtaaccacctacaagattgaggacagttttgttattgcagtgctggcagaggagacccacaactttggtttaaattttttacaaacaatcaaggggaagatcgtgtctaagcaaaaactggagctgaaaaccacagaggctggtccgcgtttaatgtccggaaagcaggccgctgcaattatcaaggcagtggactcgaagtacaccgctatcccaattgtcggccaagtgtttcagtcgcattgcaaaggatgcccctctctgtcggagctgtggaggtccactagaaagtatctgcagccggacaatctctccaaagctgaggccgtgagaaacttcctggccttcatccagcacctccgcacagcgaagaaagaagaaatcctgcagatcctgaaaatggagaacaaggaagtcctaccacagctggtggatgcagttacctccgcccagacttcggacagtttggaagcaattttggacttccttgattttaaatccgactctagcatcattttgcaggagcggtttctttatgcctgcggttttgcttcgcaccctaatgaagagctactcagagctctgatctctaagtttaagggctcaattggtagcagtgatatccgggaaaccgttatgattattacaggaacattggtgagaaaactctgtcagaatgaaggatgtaaactgaaagccgtggtggaggcaaaaaaactgatcttgggcggactcgaaaaagccgaaaagaaagaagatacacggatgtatctcctggctctgaagaatgctcttctcccggagggcataccctctttactaaagtatgccgaagctggtgaagggccaataagccatcttgcgacgactgctctccagaggtacgacctgttccacaattag

SEQ ID NO: 4548 - DNA, 3771 bp, synthetic construct
  misc_feature 1..3771: note = source = /note="Description of Artificial Sequence: Synthetic coding sequence"
  source 1..3771: mol_type = other DNA
atgctgttcaagcttcttcagcgacagacttacacatgtctgtctcatcgctacggtttatacgtctgcttcctcggagtggttgtgactattgtgagcgccttccagtttggggaggtggtcttagagtggtcacgggatcaataccatgtactgtttgactcctatagggacaacatcgctgggaagagctttcaaaacagactgtgcttacccatgcccatcgacgttgtgtatacatgggtgaatggaactgatctggagctgctaaaagaactgcagcaggtccgcgaacagatggaagaggagcaaaaagccatgcgcgaaatacttggaaaaaatacgactgaacccacaaaaaagtccgagaagcagttagagtgtctcctgacccattgtatcaaggtccctatgttggtgctcgacccagcgctgcccgcaaatattacacttaaggacttgccctccttgtatccatcattccactcggcgtccgatatattcaatgttgctaagccaaaaaatccctcaaccaatgtgtccgtggttgtgtttgacagtaccaaagatgtcgaagacgcccactccggattgctgaaagggaattctaggcagactgtttggcggggataccttactacagataaggaagtgccagggctggtgttgatgcaagacctggcattcctgagcgggttcccaccaaccttcaaagaaacaaatcaattaaagacgaagctaccagaaaacctttcaagcaaagtgaagctcctccaactgtatagcgaagcctccgtggccctgctcaagctaaataatccaaaagatttccaggagctgaataagcagacgaagaagaacatgactatcgacggcaaggaactgactatttcaccagcttatctgttgtgggaccttagcgcaatttcccagtcaaagcaggatgaggacatatccgcgtcccgatttgaagacaacgaggagctgaggtattcactgcgcagcattgagcgacacgcaccctgggtcaggaacatatttatcgtgactaatggtcagatccccagctggctgaatcttgataaccctagggtaaccatcgtcactcaccaggacgttttcaggaatctgtcacacctgccgacgttcagtagcccagccatcgaatcccatatccaccggattgaaggtctatcccagaagttcatctacttaaacgatgacgtaatgttcggtaaggacgtgtggcctgacgacttctactcccacagtaaggggcagaaagtgtatttgacatggccggtacccaactgtgcagaaggctgtcctggcagttggattaaagacggttattgcgacaaggcttgtaataattccgcttgtgactgggatggcggtgactgtagcggcaacagcggaggtagccggtatatcgccggtggaggaggaaccgggagcatcggggtcggccagccctggcagtttggtggtggcatcaacagcgtcagctactgtaatcagggctgtgcgaacagttggttagccgataaattttgtgaccaggcctgtaacgtgttgtcttgtggctttgacgccggagactgtggccaggaccacttccacgaattgtataaagtcatcttactaccaaatcagacccattacattatccctaagggggaatgcctgccatactttagctttgcggaagttgcaaagaggggcgtggaaggtgcgtacagtgataatccgataatccggcacgccagcattgcgaataaatggaagactattcacttaatcatgcattctgggatgaatgctacaacgattcattttaacctgacctttcagaatactaacgatgaggagttcaaaatgcagatcactgtggaagtcgacacaagggaaggtcccaaattgaattcaacagctcagaagggctatgagaatctcgtgtcccccatcactttgctccccgaggccgagatcttgttcgaggatatccccaaggaaaagcgttttcccaagtttaagcgccatgacgtgaacagcacccggcgtgcccaggaggaggttaaaattccactggtgaatattagcctcctgccgaaagacgcccagctgtccctgaacacattggatctccagctcgagcatggagacatcaccttgaaaggctataacctgagtaaatctgcactgctacggtcctttctcatgaattcacagcacgcaaaaatcaaaaatcaggcaattatcaccgatgaaactaacgactctcttgtcgccccacaggagaaacaggtgcataagtccattttacccaactccctgggtgttagcgagcggctgcagcgcctgacgttccccgctgtgtcggtgaaagtcaatggacatgaccagggacagaaccctccactggaccttgagactacagcgcgattccgagtcgagactcacacccagaaaactataggtggcaatgttaccaaggaaaaacctccatctctgatcgttcccctggaaagtcaaatgaccaaagagaagaaaatcacaggtaaagaaaaggaaaatagcagaatggaagaaaacgccgagaaccacatcggggttaccgaagtgctcctcggtagaaagctacagcactacacagattcatacctgggcttcctcccatgggagaaaaagaagtatttccaagacctgttggacgaggaagaatcgcttaagacgcagctagcttactttaccgacagtaagaacactgggagacagctgaaggacacattcgcagacagcctgcgctatgtcaataagattctcaattctaagtttggcttcacctccagaaaggtcccagcccacatgcctcacatgattgataggattgtgatgcaagaattacaggacatgtttcccgaggagttcgacaagacaagctttcacaaagtgcggcattctgaagacatgcaatttgccttctcctatttctattacctcatgtcagctgtgcagccccttaatattagtcaagtcttcgatgaggttgacacggatcagtcaggcgtcttatccgatcgtgagatccggacgctcgctactagaatacacgaactgccgctgagtcttcaggacctcactggacttgagcacatgctgataaattgctccaagatgctgcccgctgatataacccagctcaacaatatacctccgacacaagagtcttactacgatccaaatctgccccctgtaacaaaaagtctcgtcactaattgtaagcccgttacagacaagattcataaggcatataaggataaaaacaaatatagatttgagatcatgggcgaagaggagatcgcctttaagatgattaggacaaacgtatcccacgttgtgggacagctggacgacatacgaaagaatcccaggaaattcgtgtgccttaacgacaatatcgatcacaaccataaagatgcgcagaccgttaaggccgttttgagagacttctacgaaagcatgtttcccattcctagtcagtttgagttgcctcgagaatatcgtaatcggttcctgcacatgcatgagctgcaagagtggcgtgcttacagggataagctgaagttctggacccattgcgtgcttgcgaccctcattatgttcaccatcttctccttctttgctgagcagctcatcgctcttaaaagaaaaatctttcctcgtcggagaatacataaggaagcgtcccctaataggattcgggtgtag

SEQ ID NO: 4549 - DNA, 1473 bp, synthetic construct
  misc_feature 1..1473: note = source = /note="Description of Artificial Sequence: Synthetic coding sequence"
  source 1..1473: mol_type = other DNA
atgctgtttaagctgcttcagcgacagacctacacatgcttaagccaccggtacgggctatacgtatgctttttaggtgtggtcgtcacaattgtgagcgccttccagttcggcgaggtggtacttgaatggtcgcgtgaccagtatcacgtgctgtttgactcttacagggacaatatcgccggaaagtccttccagaatcggttgtgcctgcccatgccaatcgacgttgtgtacacatgggtcaacggaaccgacctggaattattaaaggaactgcagcaggtgcgggagcagatggaagaggagcagaaggcgatgagagaaatccttggcaagaacacaactgaacccactaagaaatcagaaaaacagctcgaatgtcttcttacacattgtatcaaagtgcccatgctggtgctggatccggcattaccagctaacatcactctgaaagatcttccaagtttgtatccttcctttcattccgcatctgatatcttcaatgtggctaaacctaaaaacccgtccaccaatgtatccgtggtggtgtttgactccaccaaagacgtcgaagacgcacattcaggcctgctgaaaggaaactctcgacagactgtgtggcgagggtaccttacaactgataaagaagtcccgggactcgtcctgatgcaggatctggccttcctatctggcttcccaccaacatttaaagaaacaaaccagctaaaaactaagcttccagaaaatctgtcgtccaaggtcaaattgctgcagctttactctgaagccagcgtcgctctgctcaagttgaacaatccaaaggactttcaggagctcaataaacagaccaagaagaacatgacgatcgacgggaaggaactgaccatttcgcctgcatatcttctgtgggacctcagtgctatttcccagagcaaacaagacgaggacatcagtgcaagccggttcgaagataacgaggaacttaggtacagtctgaggagcattgagagacacgccccttgggtccgcaacatcttcattgttaccaatggacaaatcccctcttggttgaacctcgacaaccccagagtgaccattgtcacccaccaggacgttttcagaaacctatcgcatctgccaacattttcttcacccgcaatagaaagtcacattcaccgtattgaaggtctttcccagaagtttatctacctgaatgacgatgttatgttcgggaaggacgtatggcctgatgatttttatagccactccaagggccaaaaagtgtatctgacctggcctgttcctaactgcgcagagggctgcccaggcagctggatcaaggacggctattgcgacaaagcttgcaacaactcagcttgtgattgggacggcggtgattgttctggaaaagatgtgttaaattgtaactctttcatattcatggaatatttcctccttaaccattactag

SEQ ID NO: 4550 - DNA, 1605 bp, synthetic construct
  misc_feature 1..1605: note = source = /note="Description of Artificial Sequence: Synthetic coding sequence"
  source 1..1605: mol_type = other DNA
atggccacagcactcatggccgtcgtactccgcgctgctgccgtggctccccgactaaggggacgcggaggcaccggcggagccaggagattgtcatgcggagccaggcgcagagccgcaagaggtacttctcctggccgaaggctttctactgcgtggtcacagccccagccaccgccagaagagtacgcgggagctgatgacgttagtcaatcccctgtagctgaagaaccttcctgggtgccctcaccaaggccgccagtgccacatgagagcccagagcccccaagtggccgtagcttagtgcaacgagatatacaggccttcctgaatcagtgtggagcttcgcccggagaagccagacactggttgacccaattccagacttgccaccatagtgccgacaagccgttcgcagtcatcgaggtcgatgaggaggtcctgaaatgtcagcagggagtgtcttcgttggcgtttgccttagcctttttacagcgaatggacatgaaaccgctggtcgtactcggcctaccagccccaacagcacccagcggctgcttgtcattctgggaagcgaaagcccagctggctaagtcctgtaaagtcctggtggatgcccttaggcacaacgccgcagcagcagtgcctttcttcggcggtgggtccgtcttgcgggcagctgaaccagcgcctcacgcatcctacggcggtatcgtcagcgtggaaactgatctgttgcaatggtgcctggagtccggcagcattcctatcctctgtccgatcggtgagacagctgccagaaggtccgtcctgctcgactcactagaggtgacggcatctctcgctaaagcactgcgacctacaaagattatcttccttaacaatacaggaggtctccgtgacagctcccataaagttctttcaaacgtgaacttgcccgcagacctggatcttgtgtgtaatgctgaatgggtgtctactaaggaacgccagcagatgagactaatcgtggacgtactatcaaggctgccccaccattcgtccgccgtcatcacagctgcctccacactgctgactgagctttttagcaataagggcagcggaaccttattcaagaatgccgaacgtatgttaagggtcaggtctctggataagctggaccaagggcgtctagtggaccttgtgaacgccagctttgggaagaaactgcgggatgactaccttgctagtctcaggccgagactccactccatctacgtcagcgagggatacaacgccgcagccattctgacaatggagccagttctggggggaacgccctacctggataagttcgtggtcagctctagccgccaaggccagggctccggtcaaatgctatgggagtgtcttaggcgggatctccagaccctgttttggcggagcagggtgactaaccccattaacccttggtacttcaaacattccgatggatcctttagcaataagcagtggattttcttttggttcggacttgcagatatacgtgactcctacgagctcgtgaatcatgcaaaagggttgcctgactcctttcacaagcctgctagtgaccccggtagctag

SEQ ID NO: 4551 - DNA, 1107 bp, synthetic construct
  misc_feature 1..1107: note = source = /note="Description of Artificial Sequence: Synthetic coding sequence"
  source 1..1107: mol_type = other DNA
atggacatgaagcctctcgtggttctgggacttcccgctcccacagcgccttccggctgcctgtctttctgggaagctaaagcacagttagccaaatcctgtaaggtgctggttgatgccctcaggcacaacgccgcagctgcagttccctttttcggcggtggttctgtgctgcgggctgccgaaccagcgccacacgcatcctacgggggaattgtgtctgttgagacagatcttctacagtggtgtttggagtcagggagtatccctatcctctgtcctattggagaaaccgctgctagacgttctgtcttgctggacagcctcgaagttacagcatccttagcaaaagccttgagaccaacaaagatcatcttcctaaataatactggcggtctacgtgactcatcccacaaagtgttaagcaatgttaatcttccagcagacctagatcttgtatgcaacgcagagtgggtgagcacaaaagaacggcaacagatgaggctgatagtggatgtactctcccgcctgcctcaccacagttctgcggtgattactgccgcaagcaccctgctcacagagttgttcagcaacaaaggaagcggcacattgtttaagaacgctgagcgtatgctaagagtaagaagcttggataagctcgatcagggacgcctggtagatctagtgaacgctagttttggcaaaaagctgagagacgattatttggcttcccttcgccctcggctccactctatttatgtgtcagaaggttacaatgccgctgccattttgaccatggagccagtgcttggcggtacaccatatctggacaagtttgttgtaagctcttctcgacagggacagggctccggccagatgctgtgggaatgtttgagaagagatctgcagactctgttctggcggtcccgagtgactaatcctatcaacccgtggtactttaagcatagcgatggttcgtttagtaacaagcagtggatctttttttggttcggacttgccgatatacgggatagttacgagctggtcaatcacgctaagggcctgcccgatagtttccataaacccgctagtgatcccggttcttag

SEQ ID NO: 4552 - DNA, 1188 bp, synthetic construct
  misc_feature 1..1188: note = source = /note="Description of Artificial Sequence: Synthetic coding sequence"
  source 1..1188: mol_type = other DNA
atgcccggacggtcatgtgtcgcattggtactgcttgcagcagctgtgtcctgcgccgtggcccagcacgctcccccttggacggaggattgtcggaagtcaacctaccccccaagtggacccacctatcggggtgctgtcccttggtatactattaacttggacctgcccccatacaaacggtggcatgagttaatgcttgacaaggccccagttctgaaagtaatcgtgaactccctgaaaaatatgatcaatacgtttgtgccttccgggaagattatgcaggtggtggacgaaaagctgccgggtctgctagggaactttcctggtccatttgaagaggagatgaaaggaattgctgcagtgactgatatccctctgggcgagataatcagctttaatattttctatgagctgtttacaatctgtacctccatcgtggccgaggacaaaaagggtcacctgatccacggaaggaacatggacttcggcgtctttcttggctggaacatcaacaacgatacgtgggtgattactgaacagctcaaacccctcaccgtgaaccttgattttcaaaggaacaacaaaacagtgtttaaagcgtcttcgttcgccggttatgtcgggatgctgacgggctttaagcctgggcttttcagtttgactttgaatgaaagatttagtataaatggtgggtatttagggatcctcgagtggatcttgggtaagaaagatgtgatgtggattggcttcttgacccgaacagtcctcgagaattccacgtcctatgaggaggccaagaacctgctgactaagacgaagatcctggcaccagcttatttcatcctgggcggaaaccagtccggtgaaggctgtgtcattacaagagatcgcaaggaaagcttggatgtatacgagctcgacgccaagcaggggcgttggtacgtggtgcagaccaattatgaccggtggaaacatccctttttcctggatgatagacgaacaccggctaaaatgtgtttgaaccgtacatcacaagaaaatatttccttcgagacaatgtacgatgtgttaagcacaaagcctgtactcaacaaactcactgtctatacaaccctgattgacgtcacgaagggacaattcgaaacttacttgcgcgactgcccagatccttgcatcggctggtag

SEQ ID NO: 4553 - DNA, 1170 bp, synthetic construct
  misc_feature 1..1170: note = source = /note="Description of Artificial Sequence: Synthetic coding sequence"
  source 1..1170: mol_type = other DNA
atgaattgttgtattggacttggcgaaaaggctagaggtagtcacagggcctcctacccttcacttagcgctctcttcacagaggcgagcatcctgggcttcggcagttttgctgtcaaggctcagtggaccgaggattgtcggaaatctacttatccgccaagtggcccaaccgtgtttcctgccgtgattcgctacaggggagccgtgccatggtacaccattaacctggaccttcccccttataagcggtggcacgaactgatgttggacaaagccccagtacctggactcctcggaaattttccagggccatttgaagaagagatgaagggaatcgccgcagtgacagacatcccgctgggcgagatcattagcttcaacatcttttatgaacttttcaccatctgcacaagtatcgtggcagaagataaaaaaggacacctgatccatgggagaaacatggatttcggggtctttctgggttggaacataaataacgacacttgggtcattaccgagcagctaaaaccgctgactgtgaacttggatttccagcggaacaataagaccgtttttaaggcaagctcatttgcaggctacgtgggaatgctcactggttttaaacccggacttttcagcctcaccctcaatgagagattttctatcaatgggggttatctgggtatcctggagtggattttaggtaagaaggatgtaatgtggattggctttcttactaggaccgtgctagaaaacagtactagctacgaggaggcaaagaatctcctgacaaaaacaaagattctcgccccagcgtatttcatcttggggggtaaccaaagtggtgaaggctgcgtcattacaagagacaggaaggaatccttggacgtatatgagctggacgccaagcaagggaggtggtatgtggtgcagactaactacgaccgatggaaacaccctttttttctagacgatcggaggaccccagcaaagatgtgtttaaatcggacttcacaggagaacatttccttcgagaccatgtatgatgtactgagtactaagcctgtgctcaataagctcacggtctataccaccctcattgatgtcactaaaggacagttcgaaacctatttgcgtgattgccctgatccgtgcatcggatggtag

SEQ ID NO: 4554 - DNA, 1236 bp, synthetic construct
  misc_feature 1..1236: note = source = /note="Description of Artificial Sequence: Synthetic coding sequence"
  source 1..1236: mol_type = other DNA
atgaattgctgcatagggttgggagagaaggcgaggggctcccatcgcgcatcgtaccccagcttgtccgccctctttacggaggccagcatcctcgggttcggatccttcgcagttaaagcccagtggacggaggactgcagaaaaagtacctatccaccatcaggaccaacttatcgaggagcagttccctggtacaccatcaacttagacctgcccccatataagaggtggcatgaactgatgttggataaggctcctgtgcttaaggtgatcgttaatagtttgaagaacatgataaatacatttgtcccatctgggaaaatcatgcaggttgtcgacgagaagttaccgggtttgttaggaaatttccctggaccctttgaagaggaaatgaaaggcattgcggcagttaccgatattcctcttggcgagataatttcctttaacatattttacgagctgtttactatttgtacctctatcgtagcagaagataagaaagggcatctcatccatgggcgtaacatggatttcggtgtctttctggggtggaatatcaacaatgacacatgggtgattactgagcaactcaagcctttgacggtgaacttggatttccagcgcaacaacaagacagtcttcaaggcttctagtttcgccggatatgttgggatgcttacggggttcaaacctggattgttcagcctgacactgaatgaaagattttcaatcaacggaggctatttgggcatacttgagtggattttgggtaaaaaggacgttatgtggataggatttttaacaaggacagtgttggaaaacagcacatcttatgaggaagcaaaaaatcttttaactaagacgaagattctggcgccagcgtactttatcctgggcggaaatcagagcggcgaagggtgtgtgattacgagggacagaaaagagtctctggacgtgtatgagctggacgcgaagcagggccgttggtacgtggttcagacaaactacgatcggtggaagcaccccttcttccttgacgatcgaaggacccccgctaagatgtgcctgaatcgaacgagccaggagaatatctcttttgaaaccatgtatgacgttttatctacaaagcccgtgctgaataagctgacagtgtatactactctgattgacgtaacaaaaggccagttcgagacctacttgagggactgtcccgacccatgtatcggatggtag

SEQ ID NO: 4555 - DNA, 918 bp, synthetic construct
  misc_feature 1..918: note = source = /note="Description of Artificial Sequence: Synthetic coding sequence"
  source 1..918: mol_type = other DNA
atgctcgacaaagcccctgtccttaaggtcatagtcaatagcctcaaaaacatgatcaatacattcgtaccgagcggcaagatcatgcaggtggtggacgaaaaattacctggtttgttgggtaattttcctgggccattcgaggaggagatgaagggcatcgccgctgtgacagacatacctttaggccacctgatccatgggcgtaatatggattttggcgtcttcctgggctggaatatcaataacgatacatgggttataaccgaacagctgaagccacttaccgttaatcttgacttccagagaaataataagacggtctttaaagctagctccttcgcaggttacgtcggcatgctcacgggtttcaagcctggcctctttagcttgaccctgaacgagcgattctcgataaacggcggatacctgggcatcttagaatggatcctagggaagaaagacgttatgtggatcgggtttctgacccgtacagtgttggaaaactcaacatcctatgaagaggcaaagaatcttctgactaaaacgaaaatcctggcgccagcctacttcatactcgggggtaatcagtctggggaaggatgtgtaatcactcgagacaggaaagagtccctggatgtgtacgagcttgatgctaaacagggcagatggtacgtagtccagaccaactatgaccggtggaagcaccctttcttcctggatgatagacggactcctgcaaagatgtgtctgaatagaacgtcccaggagaatatcagcttcgaaaccatgtatgacgtgctatcaactaaacccgtcctgaataaactgactgtttacaccacgctgatcgacgttacaaagggacagttcgagacataccttcgcgactgtcccgacccttgcatcgggtggtag

SEQ ID NO: 4556 - DNA, 1113 bp, synthetic construct
  misc_feature 1..1113: note = source = /note="Description of Artificial Sequence: Synthetic coding sequence"
  source 1..1113: mol_type = other DNA
atgcctggtaggagctgtgttgccctggttcttctggctgctgccgtcagctgtgccgtggcccaacatgctcccccttggactgaggattgccgtaagagcacctatcctccctctggtccgacctatcgtggagcagttccctggtacacaatcaatctcgacctgccgccttataaaagatggcacgagctaatgctggataaggccccagtgctcaaagtcatcgtaaatagcttgaagaatatgatcaacacctttgttccatctgggaagataatgcaagtggttgacgagaagctccctgggctgctcggcaacttcccgggaccgtttgaagaggagatgaaggggatcgctgccgtcaccgatatcccactgggtcacctaatccacgggaggaatatggacttcggcgtgtttctcgggtggaacataaataacgacacctgggtgattacggaacagttaaaaccgctcacggtcaacttggacttccagagaaacaacaaaaccgtattcaaggcctcctctttcgccggatatgttggtatgctgactggcttcaaaccgggattgttctcattgacactgaatgagcgcttctcaataaacgggggatacctaggcatactcgagtggatcctcgggaaaaaagatgtcatgtggattgggtttctgacacggactgttctggaaaattcaaccagctacgaagaggcaaaaaacctcctgaccaagacgaagatactagctcccgcttactttatactgggtggcaaccagtcaggggagggctgtgtgattacccgcgatagaaaggaatctctggacgtctacgaattggatgccaaacaagggaggtggtatgtcgtacagacgaactacgatagatggaagcaccctttcttcctcgatgaccgcagaacacctgcaaagatgtgcttgaatcgaacctctcaggaaaatatttccttcgagaccatgtatgatgttctgtctaccaaaccagtcctcaacaagttaacggtatacacgaccctcatagacgtgacaaaggggcagtttgaaacctacctaagggactgtccagacccctgcatcggttggtag

SEQ ID NO: 4557 - DNA, 405 bp, synthetic construct
  misc_feature 1..405: note = source = /note="Description of Artificial Sequence: Synthetic coding sequence"
  source 1..405: mol_type = other DNA
atggacccgcagaccgctccctcccgcgcactcctgctcctgctctttttacacctagcttttttgggcggacgaagtcacccattaggaagccctggtagcgcatctgacctggagacgtctggcctccaagaacagcgaaatcacctccagggcaaacttagcgaactccaggtggagcagacgagcctggagccattacaggaaagcccacgacctacaggcgtgtggaagtcacgcgaagttgccacagagggaatccgcggtcacagaaagatggtcctgtacactctgcgggcacccagaagccctaaaatggtgcagggctccgggtgcttcggtagaaagatggaccgcatttcctccagctctgggctgggctgtaaggtgctgaggaggcattag

SEQ ID NO: 4558 - DNA, 726 bp, synthetic construct
  misc_feature 1..726: note = source = /note="Description of Artificial Sequence: Synthetic coding sequence"
  source 1..726: mol_type = other DNA
atgtcgatgctgttttatactctaattacagcctttctcatcgggatccaggccgaacctcattcagagagcaacgtacccgctggccacacaatccctcaggctcactggaccaagttacagcattccctagatacagccctgcgcagggctcggtcagcgcctgccgctgccatagccgctcgggttgcaggacagactcgcaacatcaccgtcgatcctagactgtttaagaaaaggcgtcttaggagtcccagggtcctgttcagtacacagcctcctagggaggcagcagatactcaagaccttgactttgaggtaggtggagccgctcctttcaatcgcacgcatcggtctaagcgctcaagtagccatcccattttccatagaggggaattttccgtgtgcgatagtgttagtgtgtgggtgggggataagacaaccgctaccgacataaaagggaaagaggtaatggtgctgggtgaggtgaatattaataattctgtattcaagcagtacttctttgagacaaaatgtcgagaccctaaccctgtggactcaggctgtcgcggaatagattcaaagcactggaactcatattgcaccaccacccacacttttgtgaaagccctcacaatggatggcaagcaggcggcttggagattcattcgaatcgacactgcctgcgtatgcgtcctctctaggaaggccgtgcggcgagcttag

SEQ ID NO: 4559 - DNA, 1923 bp, synthetic construct
  misc_feature 1..1923: note = source = /note="Description of Artificial Sequence: Synthetic coding sequence"
  source 1..1923: mol_type = other DNA
atgagtgaaagaaaggaggggcgaggtaaaggcaaaggaaaaaagaaagaaaggggaagcggcaagaagccagagagcgccgcaggaagccagtctcctgccctgccccctagactgaaggaaatgaaatcccaggaaagcgctgccggatcaaagctggtgcttagatgcgaaactagcagcgagtattcgagcctccgtttcaaatggttcaaaaatggtaacgaactaaatcgcaaaaataagccgcagaacattaaaatccaaaaaaagccgggaaaaagtgagctcagaatcaataaagcgtccctcgcagatagcggggagtacatgtgcaaagtgattagtaagctgggaaatgactctgcctcagccaatatcacaattgtcgaatctaacgaaatcatcacaggtatgcccgcttctacagagggtgcttacgtgagcagcgagagcccaatcaggattagtgtttctaccgagggcgctaacacatcatcctccacctccacctctactaccgggactagtcacctcgtaaagtgtgccgagaaagaaaagacattttgtgtcaacggcggagagtgttttatggtgaaggacttgtccaatccgagccggtatctgtgcaagtgccagcccggatttaccggggctcgctgcaccgagaacgtgcccatgaaagtgcagaatcaggaaaaggcagaagaactgtaccagaaacgggtcctgactatcacgggcatatgcattgccctgctcgtggtagggatcatgtgcgtagtggcctactgcaagacaaaaaaacagcgcaaaaaactgcacgaccgcctgaggcaatctctgcgctccgaacgaaacaacatgatgaacatcgcaaacggtccccatcaccccaatcctcccccagaaaacgtgcagttagtaaatcaatacgtgtctaagaatgtgatttcctctgagcacatcgtcgagcgagaggccgaaacaagcttctcgactagtcactacacgtccacagcgcatcactcaaccactgtgacccagaccccatctcatagctggtccaacgggcataccgagtcgattttgagcgaatcccattcagtaatcgtgatgtcatcggtcgagaacagtcgccactcttcccccacaggagggcctcggggaagacttaacggaactggcggaccgagggagtgtaacagctttctgcggcatgctcgagagacccccgacagctaccgtgactctcctcatagcgaaaggtacgtgtccgccatgacgacccctgcccgaatgagtccggttgattttcatactccgtcctcccctaagagcccaccctcagaaatgagccctccagtgagttctatgaccgtatccatgccttcaatggcagtttccccattcatggaagaggaacggccactgctgctggttacgcctccaagacttagggaaaagaagtttgaccatcaccctcagcaattttcatccttccatcataacccagctcatgactcgaatagcctccccgcatcgcctctgagaatcgtggaagacgaggaatatgagactacgcaggaatacgaaccagcacaggagcccgtgaaaaagctggctaattccaggcgggcaaagaggacaaagcccaacggacacatcgcaaaccgactggaggtcgattctaacacctcctctcagtcttctaattctgagtccgaaaccgaggatgaacgggtcggtgaagacacgccatttcttggtatccagaatccactggcggcttctctcgaggctaccccagcctttaggctcgctgattcaaggacaaatcccgctggaagattcagcacccaggaggagatacaggccaggttgtcttctgtgatagcaaaccaagacccaattgccgtctag

SEQ ID NO: 4560 - DNA, 1914 bp, synthetic construct
  misc_feature 1..1914: note = source = /note="Description of Artificial Sequence: Synthetic coding sequence"
  source 1..1914: mol_type = other DNA
atgagcgagagaaaagagggtaggggtaaaggtaagggaaagaagaaagaacgcggatctggcaaaaaacctgagtctgccgcaggatcccagagcccggctctcccaccaaggctgaaggagatgaaatcgcaagagtccgctgcaggttcaaagctggtgctgcgatgcgaaacttcctctgaatattcttcccttaggtttaagtggttcaagaatgggaacgagctaaatcggaagaacaagccgcagaacatcaagattcagaagaaacccggaaaatccgagctccgaattaataaggccagcttggctgattctggggaatatatgtgtaaggttatcagcaagcttggcaatgactctgcttcggcaaacattaccatagttgaatctaacgagattattacagggatgcctgcatctacagagggagcctatgtgagctccgaatcccccatccgaatttccgtcagcacggaaggtgccaatacatcctcttcgacatcaacttccactaccggtacatcccatctcgtaaagtgcgccgagaaagagaaaacattttgcgtcaatggaggcgagtgttttatggtcaaggatttgagtaatccgtcacgctatctgtgcaagtgccccaatgaattcacgggggacagatgtcaaaactacgttatggcctctttctataaggctgaggagctctatcagaagcgtgtgctcaccattaccggcatctgtatcgcactgctggtcgtgggaattatgtgtgttgttgcttattgcaagactaaaaagcagagaaaaaaactccacgacagactcagacagtctctgagaagtgagcgcaacaatatgatgaacatcgcaaacggtccgcaccaccccaatcctccgccagaaaacgtccagttggtgaaccagtatgtgagtaaaaatgtgatttccagcgaacacatcgttgagagagaggctgagacctctttctccacaagccactacaccagcactgcccaccactctaccaccgtgactcagacacctagccactcctggagcaatgggcataccgagagcatcctgtctgaatcccactctgttatcgtcatgtcctccgtcgagaattcgcggcattcttctcctactggtgggcctcgtggcaggcttaatggaacaggtggtccaagggagtgtaacagctttctcaggcatgctagagaaactcccgacagctacagagactccccacattccgagcgttacgtgtcggccatgaccacaccagcccgtatgagccccgtggattttcacaccccttcaagtcctaagagcccgccatccgagatgagccccccagtctctagcatgaccgtgtccatgcccagtatggccgtaagcccgttcatggaagaagaacggccactactgctggtgaccccgcctcggttgcgagagaaaaagttcgatcatcacccccagcaattttcatcctttcaccacaaccccgctcatgattcaaacagtttgcccgcttctcccctgagaatcgtagaagatgaagagtatgaaacaactcaagaatacgagccagctcaggaaccggttaagaagctagccaacagtcgtagggctaagaggaccaagcccaatgggcatatcgccaacagacttgaagtggatagtaacacaagttctcagagctcaaattctgagtcagaaactgaagatgagagggtcggagaagacaccccattcctgggaattcagaaccccctggccgcatccctcgaagctacgccggcattcagactggctgattcccgcacaaatcccgctggacgcttcagtacccaggaagaaatccaggcccgattatccagtgttatcgccaaccaggacccaatcgcggtttag

SEQ ID NO: 4561 - DNA, 1836 bp, synthetic construct
  misc_feature 1..1836: note = source = /note="Description of Artificial Sequence: Synthetic coding sequence"
  source 1..1836: mol_type = other DNA
atgtctgaacggaaagaaggaaggggcaagggtaagggtaagaaaaaggagagaggcagcggaaagaaaccagaatctgctgcaggcagccagtcccctgccctgccgccacgcctgaaagaaatgaaatcccaggaaagtgcggcaggttcaaaacttgtgctcaggtgcgagacaagctcagagtatagctctcttcgatttaaatggttcaagaacggaaatgaattgaatagaaagaacaaacctcaaaatattaagatacaaaagaagcctgggaagtccgaactgagaatcaataaagccagcttagccgacagtggcgaatatatgtgtaaagttatctccaaactcggcaatgattctgcatctgctaacattactatcgtggagtctaacgctacatctacctccactacagggactagtcacttggttaaatgtgccgagaaagaaaagactttttgtgtgaacgggggagaatgtttcatggtgaaggacttgagcaacccttcccggtatctgtgcaaatgccctaacgaatttaccggggatcgctgccagaactacgtgatggcaagtttctacaaacacctggggatcgagtttatggaagccgaggaactgtatcagaaacgggtgttgaccatcaccggcatttgtatagccctgctggtggtcggtatcatgtgtgttgtagcctactgtaaaacaaaaaaacagcgtaagaagctgcatgaccgtttacggcagagcctgcgcagcgaacggaacaacatgatgaacatcgcaaacgggccacaccatccaaatcctccgcctgaaaacgtacaactcgttaatcagtatgtatctaagaacgttatcagctccgagcacattgttgagcgagaagctgagacttctttctctaccagccattacacatccaccgcacaccattccaccacagtgacccagaccccttctcactcctggtccaatgggcatacagagtccatcctttctgagtcccattcagtgatagttatgtccagtgtggagaatagccggcactctagtcctacaggcggacctaggggtagactgaatggtacggggggacctagagaatgtaattcctttctgcggcacgctagagagacccctgacagctacagggactcacctcattcggagcgctatgtgtccgcaatgacaactcctgcacggatgagtcccgtggatttccacaccccttctagtcccaagtcccctccaagcgagatgtcacctccagtgtccagcatgacagtgagcatgccctcaatggcggttagcccgttcatggaggaggaacggcctctgttactggtcacaccgcctcgcctacgcgagaagaaattcgaccaccacccccagcaatttagctcatttcaccataaccctgcgcacgatagcaacagcctgcccgcaagccccctgcgaatcgtagaggacgaggagtatgagactactcaagagtacgagcctgcccaagagcctgtcaagaagcttgccaacagtcgtagagctaaacgaaccaagccaaacggccatattgccaatagattagaagtcgactcgaacacctcttctcagtcgtccaattccgagtccgagactgaagacgaaagggttggcgaagacacacctttccttggaatccagaacccgctggccgcatctcttgaagctacccctgcattcaggctcgcagacagcaggacaaaccctgctggtcgattctccactcaggaagagattcaggccagacttagcagcgtgatcgcaaatcaggacccaatagctgtgtag

SEQ ID NO: 4562 - DNA, 1947 bp, synthetic construct
  misc_feature 1..1947: note = source = /note="Description of Artificial Sequence: Synthetic coding sequence"
  source 1..1947: mol_type = other DNA
atgagcgagcgcaaagaaggcaggggtaaaggaaagggaaaaaagaaagagcgcggttctggcaagaaaccagagtctgctgcgggatcccaatccccagcactgccgccaaggctgaaggaaatgaagagccaggaaagcgccgcaggctcaaagctagtgctccggtgtgaaacgtccagcgaatactcttccctgcggtttaagtggttcaagaatgggaatgagttgaataggaaaaacaagccacaaaatatcaagattcaaaagaaacctgggaaaagtgagttaagaattaacaaagcctccctggccgattcaggagaatacatgtgtaaggtgatttcaaaactggggaacgactcggcttctgctaatatcacaattgtcgaaagcaacgagatcattactggaatgcctgcgagcactgaaggagcttatgtgagctccgagtcaccaatacggatcagcgtgagcaccgagggcgcaaacacaagtagcagcacctctacctccaccaccggaacatcacacctggtgaaatgtgccgagaaagaaaaaactttctgcgttaatggaggcgaatgtttcatggtgaaggatctgagcaacccttcccgctatctttgtaaatgtcaacccggtttcaccggagctaggtgtacagagaatgtcccgatgaaagtgcaaaatcaggagaaacactccggcgagccatttccagaagccgaggaactataccagaaaagagtcctaactattacaggtatttgcattgccttactggtggtagggatcatgtgcgtcgtagcatactgtaagaccaagaagcaacgaaagaagctccatgaccggctccggcagtcactgaggtccgagcgcaacaacatgatgaacatagccaatggcccacatcaccctaaccctcctcctgaaaatgtgcaactagtgaatcagtacgtgagcaaaaacgtgattagttcggagcacatcgtggagagagaagccgaaacgtccttttctacctcccactatacgagcaccgcccatcacagcacaactgtgacccaaacaccatctcactcgtggtccaatggtcacacagagagcatactaagtgagagccattccgttattgtcatgagtagcgttgagaattcccgccactcctctccaaccgggggtcccaggggacgcctcaacggcaccggagggccacgcgaatgcaatagctttctgcgtcacgcaagggagacgcccgattcatatcgggattcgccacattctgaacgctatgtgtctgccatgacgacccccgctcgcatgagccctgtcgattttcataccccctcctcacccaagagcccgccatctgagatgtcacccccagtgtcttctatgactgtatcaatgcctagcatggctgtttccccctttatggaggaagaaagacctctgctgctggtgacaccgcctagacttcgggaaaagaagtttgaccaccatccacaacaattttcatcgtttcatcataatccagcacatgactctaacagcttacctgcttcgcctcttagaattgttgaagacgaggagtacgaaactactcaggaatatgaaccagcccaagagcccgtaaaaaagcttgccaattccaggagagcgaaacgaaccaaacccaatggacacattgcaaaccggctggaggtagactctaacaccagcagccagagctcaaactcagagtccgagaccgaagacgagagggtgggagaggataccccgttcctgggcattcagaatccattggcagcttcattagaagccaccccagccttccggcttgctgactcgaggacaaatcctgctggccgttttagcacccaggaggagatacaggctagactctcttcggtgatagccaaccaggatcccattgccgtctag

SEQ ID NO: 4563 - DNA, 744 bp, synthetic construct
  misc_feature 1..744: note = source = /note="Description of Artificial Sequence: Synthetic coding sequence"
  source 1..744: mol_type = other DNA
atgtccgagcgtaaagaggggcgaggcaaggggaaaggcaagaagaaggagagggggtccggaaaaaaacccgaatctgcagcagggtcacagtcaccagcgctgcccccacggcttaaggaaatgaagagccaagaaagtgcggctggttccaaacttgttctgagatgcgagacctcttccgaatatagctccttgaggttcaaatggtttaagaatggcaatgagctcaaccgtaagaacaagccacagaatatcaaaatccagaagaagcccggaaagagcgaattgcgtattaataaggcctctctagccgatagcggtgagtatatgtgtaaggtgatttccaaactggggaacgacagtgccagtgccaatataacgatcgttgagtctaacgagattatcacaggtatgcctgcctccactgagggggcatatgtctcatctgagtcaccaattcgaatatctgtgagcactgagggcgctaatacatcgtcttctacttctacatccaccacgggcactagccatctcgtaaagtgcgcggagaaagagaagacattctgcgttaatggcggagagtgctttatggtgaaggatctctctaacccttctaggtatctttgcaagtgccagccagggtttactggtgctaggtgcactgaaaatgtacccatgaaggtccaaaaccaggaaagcgcacagatgtcactactggtcattgccgcaaagactacatag

SEQ ID NO: 4564 - DNA, 1938 bp, synthetic construct
  misc_feature 1..1938: note = source = /note="Description of Artificial Sequence: Synthetic coding sequence"
  source 1..1938: mol_type = other DNA
atgtcagagagaaaagaggggagaggaaaggggaaggggaagaaaaaggaacgcggttccggcaagaagcccgaatctgcagctggatcgcagtcacccgctttgccacctagactaaaagagatgaaaagccaggaaagtgcagccggatccaagttagtgcttcgatgcgagacttccagcgaatactcgagcctgcggttcaagtggtttaaaaacggaaatgagttgaatagaaagaataagccccaaaacatcaaaatccagaaaaagccgggaaaatccgagcttcgaattaacaaggcgtcgcttgctgactctggagagtacatgtgcaaggtcatcagtaagttagggaacgatagcgccagcgcgaacattactatcgtcgaatccaacgagatcattactgggatgccagcctccacagagggagcatacgtttccagtgaaagtccgatacgaattagcgtcagcaccgaaggtgctaatacatcttcctcaacaagcaccagtacaacgggcacatcacatctggtgaaatgcgccgagaaagaaaaaactttctgtgtgaacggaggggagtgctttatggtcaaggatctgagtaatcctagccggtatctgtgcaagtgtccgaacgagtttacgggagacaggtgtcagaactacgtcatggcctcgttttacaaacacctgggaatagaatttatggaagctgaagaactctatcagaagagggtgctgacgattaccggaatctgtattgccctcctggtggtggggattatgtgcgtagtcgcttactgtaagactaagaaacagcggaaaaaactgcacgaccggctgcggcagtcgcttcggtccgagcgcaataatatgatgaatattgccaacggcccacatcaccctaatccgcctcctgagaatgtgcagctggtgaaccagtacgtgtccaagaatgtgattagtagcgagcatattgtcgaacgtgaggcagagacttctttctcaacatctcattatactagcacagcacaccatagtacgactgtcactcagaccccttcccactcctggtccaacggccacacagagtcaattctgtccgaatcccacagtgtcattgtgatgtcctctgtggagaacagtcggcattcaagccccaccgggggacccagaggcagactcaatggcactgggggtcccagagagtgcaattcttttctgcgacacgccagggagacaccggattcttaccgagactccccacactcagaacgatacgtgtctgcgatgactaccccagctcggatgtctccggtcgacttccacaccccgtctagccctaaatcgcccccatcggagatgtccccccctgtgtcttcgatgacagtctcaatgccctccatggccgtttcgccttttatggaggaagaacggccactgctactagttactccgcctcggttacgcgaaaagaagttcgaccatcatcctcagcagttctcgtcatttcaccataaccccgctcacgactcaaactctcttccggcatcccccctccgaattgttgaggacgaggagtatgagaccacacaggagtacgaacctgctcaggaacccgtgaagaagttagccaactctaggagggcgaaacggactaagcccaatggacatatcgctaaccggctggaagtggatagcaatacaagcagccaatctagcaacagcgaatctgagaccgaagatgagagagttggggaagacacccccttccttggcatccaaaaccctttagccgctagcctcgaggctacacctgcctttaggctggcggattctcgaaccaaccctgctgggcgtttcagcacccaggaggaaatacaagcgaggctgtcttcagtaatcgctaaccaggaccctatcgcggtctag

SEQ ID NO: 4565 - DNA, 1923 bp, synthetic construct
  misc_feature 1..1923: note = source = /note="Description of Artificial Sequence: Synthetic coding sequence"
  source 1..1923: mol_type = other DNA
atgtctgaaagaaaggaagggaggggcaaagggaagggtaagaagaaggagagagggtccggaaagaaacctgagtcagccgctgggtctcagtcccctgcccttcctccacgtctgaaggaaatgaagagccaggagagcgccgctggcagcaagctcgtgctgagatgcgagacatcatccgaatactcttcactacgattcaaatggttcaagaacgggaacgagctcaaccgaaaaaacaagccccagaacatcaagatccaaaagaaacctgggaaaagtgagttgcgcattaacaaggctagtctggccgattctggcgaatacatgtgcaaagtaatctcaaaactcgggaacgattctgcctcagcgaacattactatcgtggaatccaatgagatcattacgggcatgcccgcaagcacagagggcgcatatgtgtctagcgaatcgcctataagaattagcgtgtccaccgaaggcgcaaacacctctagctccacatccactagtaccacaggcaccagccacctggtcaaatgcgcagagaaggagaagaccttttgcgtgaatggcggtgaatgcttcatggtgaaagatctcagcaatcctagccggtatctctgcaaatgccagccgggattcacaggggcacggtgcactgagaatgtcccgatgaaggttcagaaccaggagaaggccgaggaattgtatcagaagagagttctgacaatcaccgggatctgcatcgccttactggtggtcggcattatgtgtgtagttgcttactgtaagactaaaaagcaacggaagaagctacacgatagactaagacagagcttacggagcgagcgcaacaacatgatgaatatcgctaatggaccccaccatccaaatccacccccagagaacgtgcaactggtgaaccagtatgtctctaagaatgtgatttcttcagagcatatagtagagcgggaggcggagactagctttagcacctctcattacacgtctacggctcatcattctacaactgtgacccagaccccaagccacagctggagcaacgggcacacagagagcatcctgtccgagtctcattccgttatcgtcatgagtagcgtggagaactcgagacacagtagtcctactggcggtcccaggggcagactcaacggcacaggaggtccccgagagtgcaactccttcctgcgacacgctagggagactcctgattcgtaccgagattctccccatagtgaacgctacgtctctgcgatgactaccccagcccgtatgtctcctgtcgactttcacacgccatcgtccccaaagagcccgcctagtgagatgtccccaccagtgagctccatgacagtgtctatgccttctatggccgtctctcccttcatggaggaggagcgcccactgctactcgttacgccgcctcgattgagggagaagaagtttgaccaccacccacagcagttctctagcttccaccacaatccagcccatgactctaattcgctccctgcaagtccactgaggatcgtcgaagacgaggaatacgagactactcaggagtatgagccagcacaggagcctgtgaagaagctcgctaattcccggagggccaagagaactaaaccaaacggacatatcgcgaacaggctggaagtggactctaatacctcctcccagagttccaactctgagtcagaaaccgaagatgaacgagttggcgaggatacgccattcctggggattcagaaccctctggctgcatctctggaggctactccagcctttaggcttgctgatagtaggacgaaccccgcagggaggttctccactcaggaggagatccaggctaggctatcctcagtcattgcaaatcaagatccaattgccgtgtag

SEQ ID NO: 4566 - DNA, 1773 bp, synthetic construct
  misc_feature 1..1773: note = source = /note="Description of Artificial Sequence: Synthetic coding sequence"
  source 1..1773: mol_type = other DNA
atgggaaaggggagggccggacgcgtgggtaccaccgcattacccccacggttgaaggagatgaaaagtcaagagagcgcagccggttctaagctggtactgcgatgcgagacttcatctgaatactccagcctcagatttaaatggtttaagaatggaaatgaattaaaccgaaagaacaagccccagaatatcaaaatccagaagaaaccaggcaagagcgagctgcgtatcaacaaggcgagcctggccgattcaggagaatatatgtgcaaggtgattagcaaactggggaatgatagcgcaagtgctaatatcactattgtggaaagtaacgcaaccagcacctccaccactgggacaagtcacttagtgaagtgtgccgaaaaagaaaagaccttttgcgtcaacggaggagagtgcttcatggtgaaggatctgtctaatccctctagatacctgtgcaaatgtccgaacgaatttacaggcgaccgctgccagaactatgtgatggccagcttttacaaacacctaggaattgaatttatggaagccgaagagctgtaccagaagagagtcttaaccattacaggtatatgtatcgctctgctagtcgtcggaattatgtgtgttgtggcatattgtaaaaccaagaagcaacggaagaagttacacgacaggctgcggcaaagccttaggtctgaacggaacaacatgatgaatatagcaaacggccctcaccatcccaatccgccaccagagaatgttcaattagtgaatcagtatgtgtctaagaacgtgatctcgagcgaacacatcgtggagcgggaagcagaaactagcttctctaccagtcattacacgtcaacggcacaccacagcaccaccgtgacacagacacctagtcactcatggagcaatggacatactgagtctatcctcagcgagagccactcagtcatcgtgatgtcatcagtggagaacagcaggcatagcagcccaaccggtggcccacgcggaaggctcaacggcactggcggacccagggagtgcaacagcttcctacggcacgctagggaaactccggacagttatcgtgatagtccacactccgagcggtatgtgagcgcgatgacaacacccgctaggatgagtcctgtagacttccatactccatccagcccaaagtcaccaccgagtgaaatgtctccccctgtgtcaagtatgaccgtttccatgccttcaatggctgtaagcccctttatggaggaagaacgcccactcctgctcgtgaccccaccaaggttacgcgagaagaaatttgaccaccacccccagcagttttcaagcttccaccataacccagcccacgattcaaactcactcccagcctcaccgctccgcattgttgaagacgaagaatatgagactactcaggaatatgagcccgcacaggaacccgtgaagaaattggcaaattcacggagggcaaagcggacaaagccaaacggtcatattgcgaaccgtctggaagtggatagcaacacctcttcccagtcatcaaattcagaaagcgagactgaggacgagagggttggggaggacaccccattcctcggcattcaaaacccactggcagcatctttagaggccactcctgctttccgcctggcagacagtcgcacaaatccagccggaaggttttcaactcaggaggagatccaggccaggctgtcctcagttattgcaaaccaggatcctatcgccgtctag

SEQ ID NO: 4567 - DNA, 1269 bp, synthetic construct
  misc_feature 1..1269: note = source = /note="Description of Artificial Sequence: Synthetic coding sequence"
  source 1..1269: mol_type = other DNA
atgaggtggagacgtgcaccaagaaggtcgggaaggccagggccacgggcacagcgccctggttctgccgcacgcagcagtcccccactgcccctgctccccctcctactgctgctgggaactgctgccctggcaccaggcgctgcagccggaaacgaggctgcacccgcaggggcttccgtttgctactcaagcccaccatccgtgggctccgtccaggagttagcccagcgcgcagccgtggtaattgagggaaaggtccatcctcagagacgccaacaaggagcactcgaccgaaaggctgccgctgccgcaggagaggctggagcatgggggggagatagggaaccacccgctgctggccctagggcccttggcccacctgctgaagaacccctacttgccgctaacggaactgtgccttcctggcctactgctccggtgcccagtgccggagagcccggtgaggaggccccatacctggtgaaagtgcatcaggtgtgggctgtgaaagccggtggattaaagaaggatagcctgctcactgtgaggttggggacatggggccatcccgcttttccatcgtgtgggcgactcaaggaagacagccgctatatattttttatggagccagacgcaaattccacatctcgcgctcccgctgcttttcgagctagcttcccaccgctggaaaccggacgaaacttaaagaaggaagtgtctagagtgctgtgcaaacggtgcgcattgccccctcggttgaaggagatgaaaagccaggagtccgcagctggctcaaaactggtcctccggtgcgagactagtagcgagtacagcagtctgcgattcaagtggttcaaaaatgggaatgagcttaacaggaagaacaaacctcagaacatcaaaattcagaaaaagcctggcaagtcggagcttcgcattaataaagcctctctagccgactcaggagaatatatgtgtaaagtgatctccaaacttgggaatgatagtgctagtgccaacattacaatcgtggagtcaaatgcaactagcactagcactaccggtacatctcatctcgtgaaatgcgcagagaaagagaagaccttttgtgtgaatggaggagagtgcttcatggttaaagacctgagcaacccgagtcggtacctgtgcaagtgtcctaatgaatttaccggggaccggtgtcagaattatgttatggcctccttttatagtacctccactccatttttgagcctcccggagtag

SEQ ID NO: 4568 - DNA, 891 bp, synthetic construct
  misc_feature 1..891: note = source = /note="Description of Artificial Sequence: Synthetic coding sequence"
  source 1..891: mol_type = other DNA
atggaaatttacagcccagacatgtctgaagttgccgcagagcgcagctccagtccatcaacccaactgtcggctgatccatcccttgacggactccccgctgctgaggacatgcctgaaccccagaccgaagatggcagaactcccggactcgtaggcctggcggtgccttgttgcgcttgtctggaggccgagcggcttcgagggtgtcttaacagtgaaaagatctgcatcgtgcccattttagcttgcctcgtgtcactgtgtttatgtatagctggtcttaagtgggtgttcgtagataagattttcgagtatgattcaccaacccacctggaccccggagggctgggacaggatcctatcatttctctcgatgctactgctgcctccgctgtgtgggtgtcctcagaagcctacacgagcccggtcagtagggctcagagcgaatccgaagtgcaggtcactgttcaaggcgataaagcggttgtcagcttcgaaccttcagccgcacctacccctaaaaatcggatttttgccttttcatttctgccgagtacagcacctagttttccttcccccacccgaaaccccgaagtgcgtacacctaagtcggctacacagccgcaaactacagagacaaatttacagactgcccctaaattgtcaactagcacttcaacgactggaactagtcatctcgtgaagtgcgcagaaaaggagaaaaccttttgtgttaatggtggagaatgcttcatggtaaaggatctttccaacccctcacggtatctgtgcaagtgtcctaatgagtttactggagatcggtgccagaactatgtgatggcaagtttctactcaacctccacgccgttcttgtcactccctgagtag

SEQ ID NO: 4569 - DNA, 1389 bp, synthetic construct
  misc_feature 1..1389: note = source = /note="Description of Artificial Sequence: Synthetic coding sequence"
  source 1..1389: mol_type = other DNA
atgtccgaacgcaaggagggacgcggtaaggggaagggcaaaaaaaaagaacgcggaagtggaaagaaacctgagtctgcagccggaagtcagtcaccagcccttcctccccgtctgaaggaaatgaaatcacaagaaagtgcagctggctcaaagctggtcctgaggtgcgagacttctagtgaatattctagcttgagatttaaatggttcaagaatgggaatgagcttaatagaaaaaataagccgcaaaatatcaaaattcagaagaaacccggaaaatccgagttaagaataaacaaggccagccttgctgattctggagaatatatgtgtaaggttatctcaaagctgggcaacgactccgcaagtgccaacatcacaatcgtggagtccaacgagataatcacaggcatgccggcatcaacagagggcgcttatgtgtcaagtgaatctcctatcagaatctccgtatcgaccgagggcgctaacacatcctcctcaaccagtacctccaccacaggcacttcccatctcgtcaagtgtgctgagaaagaaaaaaccttttgcgtaaacggaggcgaatgttttatggtgaaagatctgtcaaacccctcacggtacctctgtaaatgtcagcccggtttcacaggggcaagatgtacagaaaatgttcctatgaaggttcagaatcaggagaaggcggaagagctgtatcagaaaagggtgctcaccattacaggtatctgcatcgccctgctggtggtcgggatcatgtgcgtagttgcttactgcaaaacgaagaagcaaagaaaaaagctgcacgacaggctccggcagagcctgagatccgaaaggaataacatgatgaatattgcaaatggccctcaccaccccaatcctccccctgagaatgtgcagctcgtcaaccagtatgtgagtaagaacgtgatctcaagcgagcatatagtggaacgggaggcagaaacctctttctctacttctcactatacgtcaacagcacaccattccaccactgtcacacagaccccctcacacagctggtcgaatggccacaccgaatccattctgtccgaaagtcactccgtgatcgtcatgagcagtgttgagaactccagacatagctcacctacaggaggcccacggggaagactcaacggaaccggaggccctagggagtgcaacagcttcctacgccatgctagggaaaccccggattcgtacagagatagcccacacagcgaacgccataatcttatcgccgaacttcggagaaacaaagctcatcggagcaaatgcatgcagatacagctctctgccacccacctccggtcgtcaagcattcctcatcttgggttcatcctgtag

SEQ ID NO: 4570 - DNA, 1452 bp, synthetic construct
  misc_feature 1..1452: note = source = /note="Description of Artificial Sequence: Synthetic coding sequence"
  source 1..1452: mol_type = other DNA
atgcagatccccaaacacattagcattgaagacatcacagccacctcaaccagtaccacaggtacatcccaccttgtcaagtgcgcggagaaggagaagactttctgcgttaacggcggagaatgcttcatggtgaaagacctgagtaacccaagccgttacctgtgtaagtgcccaaacgagttcaccggcgatcggtgccagaattatgtaatggccagcttttataaggccgaagagttatatcagaaaagagttttgactataactggcatttgcatagctttgcttgtcgtggggataatgtgcgtggtcgcctattgcaagaccaagaagcagcggaagaagctccatgatagattacgccagagcctgcgctccgagcgcaataacatgatgaacattgccaatggaccccatcatcctaatccaccccctgagaacgtccagctcgtgaaccagtacgtgagcaagaacgtgatttctagcgaacacattgtggagcgggaagccgagactagtttcagcacatctcattatacctctacagcccatcactccacaaccgtcactcagacgccttctcattcgtggtccaatggacacaccgagtccatcttgtctgaaagtcactcagtcatcgtcatgtcctctgttgaaaactccaggcatagctccccaacgggaggccctcgtggcaggttgaacggtactggaggccctcgcgagtgcaacagcttcctgcggcatgccagagaaacccccgattcttatcgggacagtcctcatagcgagcgctacgtaagtgcaatgactactcctgctagaatgtcacccgtcgatttccacacaccctcgagtcccaaatctcctccctctgaaatgtctcctccagtgtcaagcatgaccgtcagcatgccctccatggctgtgtcccctttcatggaggaagagaggcctctgcttctggtaacccccccaagactgcgagaaaaaaaatttgaccaccatcctcagcagttcagttccttccaccataatccagcgcatgattccaacagcctgccagcttctccccttcgcatcgtggaggatgaggagtacgagacaacacaggagtacgagccagcacaggagcctgtcaaaaaactggctaactctcgacgagctaagagaactaagccaaacggacatattgcgaaccggctggaggttgactccaatacatcatcccagagctcgaattcggaatctgaaacagaggacgagagggtgggagaggatactcctttcctgggaatacagaatccattggcggcttctctggaggctactcctgcatttaggctggccgacagtcgaactaaccctgcaggtagattttctacccaggaagaaattcaggcacggctgtcttccgttatcgccaatcaggatcctatcgctgtgtag

SEQ ID NO: 4571 - DNA, 1263 bp, synthetic construct
  misc_feature 1..1263: note = source = /note="Description of Artificial Sequence: Synthetic coding sequence"
  source 1..1263: mol_type = other DNA
atgtcagagcgcaaagaaggcagagggaagggcaagggcaagaaaaaagagcgcggtagcggaaaaaagcctgagtccgcagccggttcacagtctcccgctttacctcccagactgaaagagatgaaatctcaggagagcgccgctggatcaaagctggtattgcgctgtgaaacctctagtgaatactctagccttcgcttcaaatggttcaagaacgggaatgaactaaatcggaaaaacaaaccgcaaaatattaagatacaaaagaaacccggtaaatccgaattacggatcaacaaggcatccctggcagacagtggggaatatatgtgtaaagtgatctccaaactcggcaacgattcagcatctgccaatatcaccatcgttgaatcaaatgagatcatcactggcatgcccgcaagcaccgaaggagcttatgtgtcctcagaaagcccgatccggatcagcgtgtccaccgagggggcaaacacttcgagctctacttctacgtctactacaggaacaagtcatttagtaaagtgtgcggaaaaggaaaaaacgttctgtgtgaacgggggagaatgtttcatggtcaaggatctgagcaaccctagccggtacctctgtaagtgccccaacgagtttactggtgatcggtgccaaaattacgtgatggctagcttctacaaagccgaggagctttatcagaagagggtcttaacgattaccgggatctgcatcgccttactcgtggtgggtataatgtgtgtagtcgcctactgtaaaacaaaaaagcaacgcaaaaagctgcacgatagactacgccagagcctacgaagcgaaagaaataacatgatgaacattgctaacggaccccaccacccaaatcctcctcctgaaaacgttcagctcgtgaaccagtatgttagtaaaaacgtgatctcatccgaacacatagttgaaagagaggcagaaacctccttttccacttcacattatactagcaccgcgcaccattccactactgtcacccagaccccatcgcacagttggagtaacgggcataccgaatcaattctgagcgagtctcacagcgttatcgtgatgtctagtgtcgaaaactctaggcacagctctccgactgggggtccacgcggaaggctgaatggcaccgggggaccaagagagtgtaactcattccttaggcatgcccgagagactcctgattcttaccgagattctccgcacagcgagcggtag

SEQ ID NO: 4572 - DNA, 1065 bp, synthetic construct
  misc_feature 1..1065: note = source = /note="Description of Artificial Sequence: Synthetic coding sequence"
  source 1..1065: mol_type = other DNA
atgttatttaatctgcgtatccttctgaacaatgccgcattccgcaatggtcataactttatggtccggaattttcgatgtggccagccactccagaacaaagtgcagcttaaaggacgtgacctgcttactctgaagaatttcaccggggaagaaatcaaatatatgttgtggttgagcgcggacttaaaatttcggattaagcagaagggagagtatctgccgcttctccaaggcaaatccctgggcatgattttcgaaaagcgcagtaccaggactcggctctcaactgaaactggcttcgcattattagggggtcatccctgtttcctgaccacacaggacattcatcttggtgtgaatgagagtctcaccgataccgcaagagtcctgagctcaatggccgatgccgtgttagcccgagtgtataagcaaagcgacctagacacactcgctaaggaagcatccatccctattatcaacggacttagtgacctttatcaccccatacaaatacttgccgattaccttactctgcaagagcactactcaagtttaaaaggtttgacgctgtcatggatcggcgatgggaataacatactccattccatcatgatgagcgctgctaagttcggaatgcatctgcaggccgctaccccaaaggggtacgaaccggacgcttctgtgacaaaactagccgaacagtacgccaaagagaatggcacgaagctcctcctgaccaacgacccgctcgaggccgcacacggaggtaacgttctgatcacagacacatggatttcaatgggccaagaagaagagaagaagaaacggctgcaagcattccaaggttaccaggtgactatgaagacagctaaagtggccgctagcgactggactttcttacattgcctgcccaggaaaccagaggaggtggatgacgaagtgttctactccccacgcagtctagtgttccctgaagcagagaaccggaaatggacaataatggccgttatggtaagccttttgactgattactcgcctcagctgcaaaagcctaagttttag

SEQ ID NO: 4573 - DNA, 348 bp, synthetic construct
  misc_feature 1..348: note = source = /note="Description of Artificial Sequence: Synthetic coding sequence"
  source 1..348: mol_type = other DNA
atgatccccgctaaagatatggctaaggtaatgattgtaatgcttgccatttgttttctgaccaaaagcgacggcaagtccgttaagaaaagatcagtctctgaaattcagctcatgcataatctgggtaagcatctgaattccatggagcgagtggagtggctgcgaaagaaattacaggatgtccacaatttcgtggccctcggggcacccctggccccaagagacgccggtagccagcgaccccgtaaaaaggaagataatgtgttggttgagtctcacgagaaaagccttggcgaggcggacaaagctgacgtcaacgtcctaacgaaggccaaatcccagtag

SEQ ID NO: 4574 - DNA, 348 bp, synthetic construct
  misc_feature 1..348: note = source = /note="Description of Artificial Sequence: Synthetic coding sequence"
  source 1..348: mol_type = other DNA
atgattcccgctaaggacatggcgaaggtaatgatcgtgatgcttgctatatgctttcttacaaagtctgatggaaagtcagtgaaaaaacggagcgtgtctgaaatccagctgatgcacaatctcggcaagcaccttaattcaatggagcgcgtagagtggttacgcaagaagctccaagacgtgcataacttcgtggcattgggcgctccactggcgcctcgtgatgctggcagccagcgacccaggaaaaaggaagataatgtactggtagaatcacatgaaaaatcattaggagaggcggataaggccgatgtaaatgttctgactaaagccaagagccagtag

SEQ ID NO: 4575 - DNA, 354 bp, synthetic construct
  misc_feature 1..354: note = source = /note="Description of Artificial Sequence: Synthetic coding sequence"
  source 1..354: mol_type = other DNA
atgtcaaccgccgtgctggaaaatccagggctgggtcgaaagctgtccgactttggccaggagacttcatacatcgaggacaactgtaaccagaacggcgctatcagcttgatcttttccttaaaggaggaagttggcgcattggcaaaagttctgcggctgttcgaagagaatgacgtgaatttgacccatattgagtcccggcctagccgcctgaaaaaggacgaatacgagttctttacacacctggacaagcgtagtctgccggctttgaccaacataatcaagattctgaggcacgacatcggcgcaactgtgcatgaattgtctagagacaagaaaaaagatacctag

SEQ ID NO: 4576 - DNA, 411 bp, synthetic construct
  misc_feature 1..411: note = source = /note="Description of Artificial Sequence: Synthetic coding sequence"
  source 1..411: mol_type = other DNA
atgtccaccgcagtccttgaaaaccctggactgggcaggaaactatcagatttcggacaggaaacgtcttacatcgaagataattgtaatcagaatggagcgatttccctaatcttcagccttaaggaagaggtaggcgcactggccaaggtactgagactgttcgaagaaaacgacgtgaacctgacccacatcgaatccagaccctctagacttaagaaagacgaatacgaattttttactcatttggataagaggtccttgcctgctcttaccaatataattaagattctgcgccacgatattggagccactgtgcatgaactgtctcgcgataagaagaaggacacagtcccctggtttcctagaacaattcaggagctggaccggttcgctaatcagatcctctag

SEQ ID NO: 4577 - DNA, 1359 bp, synthetic construct
  misc_feature 1..1359: note = source = /note="Description of Artificial Sequence: Synthetic coding sequence"
  source 1..1359: mol_type = other DNA
atgtctacagccgtgctggagaaccctggtcttggcaggaagctgagtgacttcggacaggagacttcttacatcgaagataattgtaatcagaacggcgcaatctccttgattttctcacttaaggaggaggtgggcgcactggcaaaagtgctacgactttttgaggaaaacgatgtcaatcttacacatattgagagtaggccatctcggcttaaaaaagacgaatacgagtttttcacccatctggataaacgctctttaccagcccttaccaacataattaagatcctgagacatgacattggcgctacggtgcacgagctatctcgtgacaaaaagaaggacacagtgccatggtttccccgaactattcaagaattggaccgcttcgccaatcaaattctgagctacggtgcagagttggacgctgaccatcccggtttcaaagatccagtttaccgagccagaagaaaacaatttgccgacattgcctacaattaccgacacgggcagcccatccctagggtcgagtacatggaggaagagaagaagacttggggtacagtctttaaaaccctcaagagtctctataagacacacgcctgttatgagtataaccatatcttcccccttcttgaaaagtactgtggcttccatgaggacaacataccccagttggaggacgttagccaattcctccaaacctgtacggggttcagattaagacccgtagctggtctgcttagctcacgcgactttttgggcggtcttgcattccgggtgttccactgcacacagtacatccgtcacgggagcaagcccatgtacactcccgaacccgacatctgtcacgaactgctcgggcacgtgcccctcttctcggaccggtcctttgcccagttcagccaagaaatcggcctcgcctccctcggagccccagacgaatacatcgagaagttggccacgatctactggttcactgtggaattcggcctttgcaagcagggagactcaattaaggcctacggcgcaggcttattgtcctctttcggtgagcttcagtattgcctaagtgagaaacccaagctcctcccactcgagctggagaaaacagctatccagaactacacagtgactgagtttcagccactgtattacgtggcagagtctttcaacgatgcaaaggagaaagtaagaaactttgccgctaccatcccacgcccttttagtgtgcggtacgatccctatacgcaaaggattgaggtccttgataatactcagcaactaaagattctcgcggacagcataaatagtgaaattggcatactatgcagtgccttgcagaaaatcaagtag

SEQ ID NO: 4578 - DNA, 3261 bp, synthetic construct
  misc_feature 1..3261: note = source = /note="Description of Artificial Sequence: Synthetic coding sequence"
  source 1..3261: mol_type = other DNA
atggcatgcagccccgacgccgtcgtgagcccctccagtgcttttctgcgctcgggctccgtatacgagccactgaagtccattaacctccccaggccggataacgagaccctgtgggacaaattagaccattattatcggatcgtgaaatctacactcctgctttaccagtcccccacaaccggactgttccccaccaagacgtgtggcggagatcaaaaggctaaaatccaggactccctctactgtgcagcaggagcgtgggccctggccctggcatatcggagaatcgatgacgataaagggaggactcacgaactggagcatagtgcaatcaagtgtatgcggggtatactgtactgctacatgcgacaagctgacaaggtacaacagttcaaacaagatccgaggcccacaacttgtctgcactcagtgtttaatgttcacacaggcgatgaacttctcagctacgaagaatatgggcacctgcagatcaacgcagtgtccctgtacctgttgtacctcgtcgaaatgatatctagcggactccaaatcatttacaacaccgacgaagtttcattcatccagaacctggtgttttgcgtcgagcgggtatatcgagtccctgattttggtgtgtgggaacgaggatcaaagtataacaatggttcaaccgaacttcactcatcttccgtcggactggctaaggccgcattggaggccattaatgggtttaacttgtttggtaaccagggttgcagttggtccgtgatatttgtggacttggacgcccataacaggaataggcagacgctgtgctccctgctgcctagagaatcacgctcccacaacaccgacgcggctctgttaccctgcataagctacccagcattcgccctcgatgatgaagtgcttttctcccagacactggacaaggtcgtcaggaaattgaaggggaagtacgggtttaaaagattcctgcgggatggttaccggacttctttagaggacccaaaccgatgttactacaagccagcagagataaagctctttgatgggattgagtgcgagttccccattttttttttgtacatgatgatcgatggagtgttcagaggaaaccccaaacaggtccaggagtaccaggacctattgacccctgtgctgcaccataccacagaagggtatccagtcgtgccaaaatattattatgtgccagctgacttcgtggagtacgaaaagaacaaccccggatctcagaagagatttccgtccaattgtggtcgtgatggcaagctctttttgtggggacaggctctatacattatcgctaaactgctagctgacgagcttattagtcctaaggacatcgaccctgtgcagcgctacgttcctctcaaagatcagagaaatgtctccatgagatttagtaaccagggcccactggaaaatgatcttgttgtccatgtcgcgttaatcgcggagtcacagcggctgcaggtattcctcaatacatatggaattcagactcagacacctcagcaggtggagccaatccagatatggccgcaacaggaactcgtcaaggcctatttacaactgggcatcaatgagaagctagggttgtccggcagacccgacaggccaataggttgtcttgggacctccaaaatctacaggattctaggcaaaacagtcgtgtgttatcctattatttttgacctgtccgatttctatatgagccaggacgttttcttgcttatcgatgacatcaaaaatgccttacagttcattaaacagtactggaaaatgcacggaagacccctgttcctcgtgctgatcagggaggacaacattcgcggaagcagatttaaccctatactggacatgctggccgctttgaagaaaggcatcataggaggagtgaaagtgcacgtggatcgcctgcaaacgctcatctctggcgcagtggtggagcagctcgatttcctgaggatctcagatacagaggagcttcctgaatttaagtccttcgaggagctggagcctcccaaacatagcaaggtgaaaagacaatcctccacaccatctgctcccgaactcggccagcagcctgatgtcaacatttctgagtggaaagataagcctacacacgaaattctccagaagcttaatgattgtagctgcctggcatcccaggctatcctgctgggtatcttgttaaaaagggagggccctaacttcatcaccaaggagggcacagtgtccgaccatatcgagcgagtgtaccgccgagccggaagccagaagttatggagcgtcgttcggagagctgcttctcttctatctaaggtggtggactcccttgcaccttccattacgaacgtactcgtccagggaaagcaggttacactcggagcctttgggcatgaggaggaggtgatcagtaatcctctgtcccccagggtcatccagaatattatctactacaagtgtaatactcacgatgaacgagaagccgtaattcaacaggagctggtgatccacattggctggataatatccaacaacccagagcttttcagcggtatgttaaagatcagaatcgggtggatcattcacgccatggaatatgaactccagatcagaggaggggacaagcctgccttagacctttatcaattgtcaccgagcgaagtaaaacaactactcttagatatactccagcctcagcaaaatggtcgttgttggttgaaccggaggcaaatagatgggagcctcaaccgcacacctactgggttttatgatcgggtgtggcaaattctggaacggacaccaaatggtatcatcgtggccggtaaacatttgcctcaacaacccactctcagcgacatgaccatgtatgagatgaacttctctttgttagttgaagatacactcgggaatatcgatcaaccgcagtaccgtcagatcgtggttgagttacttatggtggtgagtattgtcctggaaaggaacccggagctcgagttccaggacaaagtcgacctggaccgtctggtcaaggaggctttcaacgagttccagaaagatcagagccggctcaaggaaatcgaaaaacaggatgatatgacttcgttctacaacacaccgcctctaggcaagcgaggcacctgttcctaccttacgaaggccgtgatgaacctgttactggagggagaagttaagccgaacaatgacgacccatgtctgatcagctag

SEQ ID NO: 4579 - DNA, 1221 bp, synthetic construct
  misc_feature 1..1221: note = source = /note="Description of Artificial Sequence: Synthetic coding sequence"
  source 1..1221: mol_type = other DNA
atgacacttgatgtgggacccgaagacgagctgcctgattgggccgctgccaaggaattttatcagaagtatgacccaaaagatgtgatcgggaggggcgtttcaagtgttgtgcggagatgtgtgcatcgtgcgactgggcacgaatttgccgtcaagataatggaggtgaccgcagagcgcctcagcccggaacaattggaggaagttcgggaggctacacggagagagacccacatactccgacaggtagccggtcacccacacattattacactgatcgatagctacgagtcatccagctttatgtttctggtcttcgatctgatgcggaagggtgagttgtttgattacttgacagagaaagtggctctgtcggagaaagaaacacgcagcatcatgaggtcactcctggaggccgtgtctttcctgcacgctaataacatcgtgcaccgcgatctgaaaccagagaatatcttactcgatgacaatatgcagattcgcctgtccgatttcggcttttcgtgccacctggagcctggagaaaaactcagagaactgtgtggcacacccggatacctggctcccgagatcctgaagtgtagcatggatgagacccacccgggatacggtaaggaggtggacctgtgggcttgcggagtcattttatttaccctgctcgctggctcaccacccttttggcatagaaggcagattctcatgctaaggatgattatggagggtcagtaccagttcagctcacccgagtgggacgacagatcatccacagtgaaggacttgatctctagactcctgcaagtggacccggaggctaggttgaccgccgaacaagccctccagcacccttttttcgagcgatgtgagggtagccagccttggaatttgacgcccaggcagagattccgggtggcagtctggactgtgttggctgcaggcagagtggccctgagtacacacagagttagacccctgacaaaaaatgctctgctgcgggatccttacgcactgcggtctgtcagacacttgatcgacaactgcgcgttccggctttacgggcactgggtgaagaagggcgagcagcagaatagagccgcactgtttcagcatcgccctcccggtccttttcctatcatgggaccggaggaagaaggcgactctgccgctattaccgaagacgaagccgtgctcgtgctagggtag

SEQ ID NO: 4580 - DNA, 3708 bp, synthetic construct
  misc_feature 1..3708: note = source = /note="Description of Artificial Sequence: Synthetic coding sequence"
  source 1..3708: mol_type = other DNA
atgcgatcccgctccaattcgggcgtgaggctcgatggctatgctcgtcttgtacagcagacgatcctgtgctaccagaaccctgtgacaggtctcctgtcggctagccacgagcagaaggacgcgtgggtccgtgacaatatttacagcatcctggctgtatggggcctggggatggcctaccggaagaacgccgaccgggatgaggacaaggcgaaggcttacgaactggagcagaatgttgttaaattgatgcggggtttgctgcagtgtatgatgcggcaggtggcaaaagtggaaaagtttaagcacacacagtcaactaaggattccctgcatgcaaaatacaatacggcaacctgcggtaccgtggtcggcgatgatcagtggggtcatctgcaggtggatgcaacatcacttttcctactgtttctggctcaaatgacagcttcagggctccgcattatctttactctcgatgaggtagccttcatccaaaacctggtcttctacattgaagctgcctacaaagtggcagactacggtatgtgggaacgcggtgacaagaccaatcagggaatacctgagctaaacgcatcttctgtgggaatggccaaggcagcactggaggcgattgacgagctagatctgttcggcgcacatggcggtaggaagagcgtaatacatgttctccccgatgaagtggagcactgtcagagcattctattcagtatgttgccccgtgcctctacgtcgaaagagatcgatgctggtctcttgagcatcatctcttttcccgcatttgccgtggaggacgtgaatctcgtgaacgtaacaaagaacgagatcatctctaagctgcaaggccgttatggctgttgcagatttctgagggacggctataaaaccccccgagaagatccgaatagactgcattacgacccagccgaactcaagctgttcgagaatattgaatgtgagtggccagtcttctggacatattttatcattgacggagtgttctcaggagatgccgtccaggtgcaagagtaccgagaggctctagaagggatactgattcgtgggaaaaacgggatcaggctagtgcccgaactgtatgcagttcctccgaataaagtagacgaggagtacaaaaatcctcatacagtagaccgggtgccgatgggcaaggtaccacacttgtggggacagtctctgtacatcctgtcctcgctgctggcagagggctttctcgctgcgggagagattgatccactgaatcgtcgcttcagcaccagtgtcaagcccgacgtggtagtgcaagttaccgtgcttgccgagaataaccacatcaaagacttgcttaggaagcatggtgtgaatgtccaaagtattgcggacattcatcccatacaggttcagcctggccgaattctaagtcacatttatgccaagctcggaaggaataagaacatgaatctgagcgggaggccttaccgacatataggggtgttgggaacctccaagctgtatgtaatccgtaaccagattttcacctttaccccgcagttcactgaccaacaccacttctaccttgcgctcgataacgaaatgattgttgagatgctgcgaatcgaactggcatatctatgcacgtgctggcggatgacagggcgtcccacccttacttttccaatctcacgcaccatgctgacaaacgatggcagcgatatccactccgctgtgctgtccacgatccggaaacttgaggatggctacttcggtggcgcaagagtcaagctgggaaacctaagcgaattcttgaccacaagcttctatacgtacctcaccttcctggacccggactgtgacgagaaactatttgacaatgcatcagagggaacttttagccctgactcagattccgacctggtgggctatctggaagacacttgtaatcaggaatcccaggatgaactggaccattacatcaatcatctgctccagtctacatccctgaggagttacctaccaccattatgtaaaaataccgaggacagacacgtcttctctgcaatccattcaaccagagatattcttagtgtaatggcaaaggccaaggggttggaggtaccgtttgtgcccatgacgcttcccaccaaagtactgtctgcccaccgcaagtctctgaatctcgtagactctccacagccccttttggagaaggtgccagaatctgacttccaatggccacgtgatgaccatggcgacgttgactgcgaaaagctcgttgaacaactgaaagattgttccaatctccaggaccaagcggatatactgtatatcctatacgttataaagggaccttcctgggacaccaatctgagcggccaacatggggtgactgtgcaaaacctactcggggagctttacggcaaggccggactcaaccaagagtggggcctcattaggtatatctcaggcctgctgcgcaaaaaggtggaggtactggccgaggcttgtacagacctcctcagccaccagaaacagttaactgtgggcctgcctccagaacccagggagaagattatctctgcccctctgcccccagaagagctcaccaagctgatctacgaggctagtggtcaggacatcagtattgccgtgcttacgcaggaaatcgtggtgtatctggcaatgtatgtgcgagctcaacctagcctgttcgtcgagatgttgcgccttcgcatcgggctgataatccaggttatggccacggaacttgcacggtccctgaactgttcgggggaagaggcaagtgagtccctaatgaacctgtctccctttgatatgaaaaatctgttgcaccatattctgagcgggaaagaattcggggtcgagcggtctgtgcgccctatccatagcagcacctcatccccgactatttccatccatgaggtgggacacaccggcgtgactaagaccgaaaggagcgggattaacaggttaaggtccgagatgaagcagatgacacggaggttcagcgccgacgaacagttttttagtgtgggccaagctgcctcgtctagcgcccactccagcaagagcgccaggtcctcaaccccgtccagcccaaccggtacttcctcgtctgactccgggggtcaccacattggctggggtgagaggcagggacagtggctgcgtcgtagacggcttgatggtgccatcaatcgcgttcccgtcggattttatcagagggtgtggaagatccttcagaagtgccacggactatccatcgacggatacgtacttccttcgtctactacacgggaaatgaccccccatgaaatcaagtttgctgtgcatgtggagagcgtgcttaatagagtaccacagcccgagtacagacaactcctcgtggaagccattatggtcctgacactgctgtccgataccgaaatgaccagcatcggcggtattattcatgtagaccaaatcgtccagatggctagccagctgttcctacaagatcaggtctccataggagctatggatacccttgaaaaagatcaggcgactggaatttgccattttttttacgatagtgccccaagtggcgcatacgggactatgacatacctcactagagctgtggcttcatatttgcaggaattactacccaatagtggatgccagatgcagtag

SEQ ID NO: 4581 - DNA, 3261 bp, synthetic construct
  misc_feature 1..3261: note = source = /note="Description of Artificial Sequence: Synthetic coding sequence"
  source 1..3261: mol_type = other DNA
atggcgtgtagtcccgacgcagtggtctctccttcatctgctttcctgcgttccggttcagtgtatgaacctctgaagtccatcaacctgcccaggccagataacgaaaccctgtgggacaaactagatcattactacagaatcgtcaagtctacacttctactgtatcagtccccaaccaccggcctgttccctacgaagacatgcggaggagatcaaaaggccaaaatccaggattctctttattgcgcggcaggggcatgggccctcgctcttgcctaccgcaggattgacgacgataaaggcaggacgcacgaactggaacatagcgcaattaaatgcatgaggggaatcctgtattgctacatgaggcaggctgacaaggtgcaacaatttaagcaggatccccgtccaacaacatgtctgcattccgtcttcaatgttcacactggcgacgagctgctgtcctacgaggagtacggccaccttcagattaacgccgttagtctctacctgctgtatctggtggagatgatctcctccggtttgcagattatttataatacagatgaagtttcattcattcagaatctggtcttctgcgtggagcgtgtctaccgggtccctgatttcggtgtttgggaacggggatcaaaatataataacggcagcaccgagctgcactcatccagcgtaggtctggccaaagcggctctggaggcaattaacgggttcaatctgttcggcaatcaaggctgtagctggagcgtaatttttgtggatctggacgcccataaccgaaatcgccaaaccctgtgctctcttctgcccagggaatccagaagtcataacactgacgcagctttgctgccctgcatctcctacccagccttcgcactcgacgacgaggttctgttctctcagacgcttgacaaagttgtacggaaactgaagggcaagtacggatttaagcggtttctccgcgacggttatagaacttccctcgaggacccaaaccggtgctactacaagccagctgagataaagctgtttgacggtattgagtgtgagttccctatcttctttctctatatgatgattgatggggtctttaggggtaaccccaagcaagtccaagaatatcaagatcttctgacccccgtcttacatcacactacagaaggatatcccgtcgtgcccaagtattattatgttcctgccgacttcgtggaatacgaaaagaacaaccccggaagccaaaaacggttccctagtaattgcgggcgagacggcaagctgttcctttggggtcaggctctctacattattgccaagctgcttgcagatgagttaatttcccccaaggacattgatccggtgcagaggtatgtacctctgaaagaccagcgaaacgtgtccatgcggttttctaatcaggggccattggaaaatgacctggttgtgcacgtcgcccttattgccgagtcccagagactgcaggtattcctgaatacatacggtattcagacacagactccgcagcaggttgaaccaatccagatctggccccagcaggaactggtaaaagcgtacctgcagctgggcataaatgagaaactcgggctgtctggccgaccagaccggccaattggctgtctgggtacgtcgaagatctacaggatactggggaaaactgtggtctgctatcccatcatttttgacctctccgatttctacatgtcacaggacgtgttccttctgattgacgatattaagaacgcgctccagtttatcaagcagtactggaagatgcatggtaggcccctgttcctagtgctgatacgagaggacaatatcaggggcagccggtttaatcccatcctggatatgttagctgccctgaagaaggggattatcgggggagttaaggtgcatgttgatcggctccaaactttgattagcggagctgtggtggagcaactcgacttcctccgcatatctgacaccgaggaactgcccgagttcaagtcttttgaggagcttgagccaccgaaacattcaaaagtcaaacgtcaatcctctactccgagcgccccagaactgggccagcaacctgacgtgaatatctcagagtggaaagacaaacctacacacgaaatcctgcagaagctcaacgattgttcctgtctcgccagccaggccatactcctgggcatcctcctcaagagagaaggacccaattttataaccaaggaaggcacagtctccgatcacattgagagagtctatcgccgagctggtagccagaaactttggtcagtggttcgcagggccgcttcactgctgagcaaggtggtggattcactcgccccatccattacaaatgttcttgtgcaggggaagcaagttacacttggagctttcgggcatgaagaagaggtgatctctaaccctttaagcccaagggttatccagaatattatctattacaaatgtaacactcacgatgagcgggaggccgtgatccagcaggagctggtaatacacatagggtggattatctccaataacccagagttatttagtggtatgttgaaaattcgcatcggctggatcatacacgcaatggagtacgaactgcagatccgtggtggagacaaacctgcactagatctgtatcaattaagtccaagtgaagtgaagcagctccttctggacatactgcagccacagcagaacgggcgttgttggcttaacagaagacagattgatgggtcactgaatcgcacgcccacgggcttttatgaccgggtatggcagatcctggaacgtactcccaacggcatcatcgtcgcagggaagcacctgcctcagcagcccactcttagcgacatgaccatgtacgaaatgaatttttccttattggtggaagacaccctgggaaatatcgatcagccgcagtatagacagatcgtggtcgaactcctaatggtggtcagcatcgttctggagcggaacccagagttggaattccaggacaaagtggacctggaccggctggttaaggaggcattcaacgaattccagaaagatcagtcacggctcaaggagatcgagaagcaagatgatatgacctccttctacaataccccacctctggggaaaagaggcacatgctcctacctaactaaagctgtgatgaacttgctactcgagggagaagtaaagcccaataatgacgacccttgcctgatatcatag

SEQ ID NO: 4582 - DNA, 3282 bp, synthetic construct
  misc_feature 1..3282: note = source = /note="Description of Artificial Sequence: Synthetic coding sequence"
  source 1..3282: mol_type = other DNA
atggcgggagcagctggtctcacggccgaggtcagctggaaggtcctcgaacggagggccaggaccaaacggtcagggtccgtatatgagcccctgaagagcattaacctgccaagacccgacaacgagacactgtgggataagctggatcattactacagaatcgtgaagagcaccctgctcctgtaccaaagcccaacaacagggctgttccctaccaagacatgcggaggagaccagaaggccaagatccaggactccctttattgcgctgccggagcctgggctcttgctctcgcttatcgccgaatagacgatgataaggggcgaacacacgagctggaacattcagccattaagtgcatgcggggtattctgtactgctacatgagacaggctgacaaagtccaacagtttaagcaggacccaagaccaacgacctgcctccattctgtgttcaatgtccacactggtgatgaattactgagttatgaggagtatggtcaccttcagatcaacgcggtttcactatacctcttatacttggttgaaatgatctcgtcaggtctccagattatctacaacaccgacgaagtaagcttcatccagaacttggtcttctgcgtcgaacgggtgtacagagtgcccgattttggggtttgggaacggggatccaaatacaataatggctcaacagagctccatagtagttcggtggggcttgcaaaggcggctctggaagcgataaatggctttaatctctttggcaatcaggggtgttcctggagtgtgatttttgtcgacctcgacgcacataaccggaatcgccaaaccctgtgctccctgctcccccgtgaaagtaggagtcataataccgatgctgccctactcccctgtatttcttacccggcttttgcattggacgacgaagtgctgttcagccagacgctggataaggtagtccggaaactgaaagggaaatatggttttaaaagattcctgcgggatggctatcggacctcactggaagatcccaatcgctgctattataagccggctgagatcaaattgtttgacggtattgaatgtgaattccctattttcttcctatacatgatgatcgatggtgtgtttagagggaatcccaagcaagttcaggagtatcaggaccttctgactcccgtgctccatcatacaaccgagggttatcctgtggtgccaaaatactactatgtgccggcagatttcgttgagtatgagaagaacaacccaggttcccagaaacggttcccttctaactgtggaagggatggcaaactgttcctgtggggccaggcactttatattattgccaaattgttggccgatgagttgatatcaccgaaggatattgaccccgtgcagcgctacgtaccattaaaggaccagagaaatgtcagcatgcggtttagcaaccaaggacccctggagaatgatctagtggttcatgtcgcactgatagcggagtctcagcgattacaggtcttccttaatacatacggcattcagacccagactcctcagcaggtggaacccattcagatttggccacagcaggaactcgtgaaagcctatttgcaattgggcatcaatgaaaagttgggtctttctgggaggccggatcgtcccattggctgcttaggcacaagtaaaatataccggattctgggaaagaccgttgtgtgctatcctattatctttgacctgtcagatttctatatgagtcaggatgttttcctcctgattgacgatatcaagaatgctttgcaatttatcaagcaatactggaagatgcacggacggcctcttttcctggtcctgataagggaggataatatacgcggttctagattcaatccaatcctggacatgctggccgctctaaagaaggggatcattggtggcgtgaaggtacacgtggaccgactgcagacacttatatctggcgcagtggtggagcagctcgatttcttacgaatttcggacacagaggaactgcctgaattcaagtcctttgaagagctcgaaccacccaagcatagcaaggtcaaaaggcagtctagtacaccttctgccccagagcttggacagcagccagacgtgaacatatcggaatggaaagataagcccacccatgaaattctgcagaaactcaatgattgctcctgtcttgccagccaggctatcctgcttggcattctccttaagcgagaggggccaaatttcattactaaagaaggcacggttagcgatcacatagagcgcgtgtatcgcagagctggaagtcagaagttatggttggccgttcgctatggcgcagcctttacccagaaattctcctccagcatagcacctcatattacaacattcctggtacacgggaagcaggtgaccttgggcgcatttggacacgaggaagaagtgatctccaatcctctctctcccagggtcatccagaacattatctattacaaatgcaatactcacgacgagcgcgaggctgttatccagcaggaactggttatccatattgggtggatcatcagcaataaccccgagctcttttcagggatgctgaaaattcgtatcgggtggattattcacgccatggagtatgaattacagattcggggaggtgacaaaccagcactagacttgtatcaactcagcccttccgaagttaaacaactacttctggacatcctgcagcctcagcaaaacggcagatgttggttgaacaggcgtcagatcgatggctctctgaacaggacaccaacgggcttttacgacagagtttggcagattctggaacgcacaccaaatggcatcatagtcgccggaaagcatctaccacagcaacccaccctatccgatatgaccatgtacgaaatgaacttttccctgctggtggaagacaccctcggaaatattgatcaacctcagtaccgacaaatagtggtcgaattgctaatggtcgtgagtatcgtactggagcgtaatcccgagttagagttccaagacaaagttgacctcgacaggttggtgaaggaggctttcaatgagtttcaaaaggaccagtccagattaaaagagatcgaaaaacaggatgacatgacatctttctataacacccctcccctcggaaagcgtggcacctgttcctatctgactaaagcagttatgaatctcctcctcgaaggggaggtgaaacccaataatgatgacccgtgtcttattagctag

SEQ ID NO: 4583 - DNA, 3261 bp, synthetic construct
  misc_feature 1..3261: note = source = /note="Description of Artificial Sequence: Synthetic coding sequence"
  source 1..3261: mol_type = other DNA
atggcatgttcccccgacgcagtcgtaagcccatcaagcgctttcctgcggtccggctctgtttatgagccactgaaatccataaacctcccaagacctgataacgagactctttgggataaactggaccattactacagaatcgtgaaaagcacgcttctgctctatcagtccccaaccactggcttgttccctaccaaaacgtgtgggggagaccagaaggcgaaaatccaagatagcctctactgtgcagctggtgcctgggctctggctctcgcctaccggaggattgatgacgataaaggtcggacacatgagctggagcactccgccatcaaatgtatgcgcggaatcctctactgctatatgcggcaggctgacaaagtgcagcagtttaaacaggaccctcgtcctactacctgtctacactctgtttttaatgtgcatactggtgatgagctcctttcatacgaggaatatggtcaccttcagatcaacgctgtgtccctctatctgctctacctggtcgaaatgatctcaagcggtcttcagatcatctacaacaccgacgaagtgtcctttatccagaatcttgtgttttgcgtggagagagtgtatcgtgtgccagatttcggcgtgtgggaaagaggatccaagtacaataacggtagtacggagttacacagctccagcgttggcctagcaaaagctgctctggaggcgatcaatggattcaatctgttcggaaaccagggctgtagttggtcggtgatcttcgtcgatctcgatgcacataaccggaatcggcagacactctgttctctactaccccgtgaatctagatctcataatactgacgctgctttactgccctgtatatcctaccctgcctttgccttggatgacgaagtgttgttctcacagacgctggataaggtggttcgcaaactgaaagggaagtatggcttcaaaaggttcctgcgagatggctacagaacgtcattggaggatcccaatcgatgttactacaaaccagccgaaataaagttgtttgacggaattgaatgcgaattccccattttcttcttatatatgatgatcgacggagtgtttagaggtaatcccaaacaggtacaagagtaccaggatctcctgacgcccgtgttgcaccacactactgagggataccccgtcgtaccaaaatattactatgttccagccgacttcgttgagtatgagaagaacaatcctggctcccagaagcggttcccgtcaaactgcggaagagatggcaagctctttctttggggccaggccctttacatcattgcaaaacttctggccgacgaattgatttccccaaaagatatcgacccagttcagcgctatgtccccttgaaggaccagcggaatgtgtcaatgcggttcagtaatcaggggcctttggagaacgatctagttgtgcacgtggcactcatcgctgaaagccagcgtctgcaagtctttttgaacacatatggaatccaaacgcaaaccccccagcaggtggagcctatccagatatggccacagcaagagctagtgaaagcctacctccagctggggataaacgagaaactggggctatccggcagacctgatagacctatcggctgtctgggcaccagcaaaatttaccgtattctgggcaaaacagttgtctgctacccaatcatcttcgacctgtctgatttttacatgagccaggatgtgttcctactgatcgacgacatcaaaaatgccctgcaattcattaaacagtattggaaaatgcacggcagacccctctttcttgtgctaatccgcgaagacaacatcagagggtctcgctttaaccccattctggacatgcttgccgctcttaagaagggaattatcgggggagtgaaagtgcacgtggatcgcctccagacactgatttccggagcagtggttgagcagttagactttctacgaatttccgacactgaggagctcccagagttcaagagctttgaggagctagagccaccaaaacattccaaggtaaaaagacaatcttcaactccttccgctccagagctcgggcagcaacctgatgtgaatatcagcgagtggaaagataagccaacacacgaaatcctgcagaaactgaatgattgctcatgtctcgcgtcccaggcaattttgcttgggattctgcttaaaagggagggccctaatttcatcacaaaagagggtaccgtgtccgatcacatcgagagggtctatcggcgagccggatctcagaagctttggctagcagtccgctacggggctgctttcactcaaaagtttagctcctctattgccccacatattaccacctttttggtgcacggcaaacaggtgacactgggggcattcggacatgaggaagaggtgatatcaaacccactgtctcccagggtcattcaaaacattatatattacaaatgtaacacccacgacgaacgagaggctgtaattcagcaggaactggtcatacacatcggctggatcatcagtaacaacccagagctcttcagcggaatgctgaaaatcaggattggatggatcatacatgctatggagtacgaactgcaaattcgcggaggggataaacccgcattagatctataccagctctctccctccgaggtgaagcagttactcctggacattttgcagccacaacagaacggacgatgctggctgaataggaggcaaattgatggatcactgaacaggacacctaccggcttctacgaccgggtgtggcagatcctggaacgcacccccaacgggattatcgtggcaggtaagcatcttccgcaacagccgaccttgtccgatatgactatgtacgagatgaacttctctctgctggtagaggacacgctgggtaatatcgatcaaccccaataccgacagatagtcgtcgagttactgatggtcgtgtctatcgtcctggagaggaatccggagcttgaattccaggacaaggtagacctcgacaggcttgtgaaagaagcctttaatgagtttcaaaaagaccaaagcaggctgaaggagatcgagaaacaggacgacatgacatccttttacaacacccccccactgggaaagcgaggcacctgttcctatctcacaaaggcagtgatgaatctgctgttagaaggcgaggtaaagcccaacaacgacgacccatgtctgatttcatag

SEQ ID NO: 4584 - DNA, 1221 bp, synthetic construct
  misc_feature 1..1221: note = source = /note="Description of Artificial Sequence: Synthetic coding sequence"
  source 1..1221: mol_type = other DNA
atgactttggacgtgggacctgaggatgaacttccagactgggcagcagccaaggagttttatcagaaatacgatcctaaggacgtgattggcagaggagtgagttccgtcgtgcggagatgcgtgcaccgagcaactggacacgagtttgctgtcaaaatcatggaagtaacggcagagcgcctttcccctgaacagttggaagaggtacgggaagccacgaggagagaaactcatatactgagacaggtggctggtcatccccatattattactctgatagactcatacgaatcctcttcatttatgtttctggtcttcgatctgatgcgaaaaggggagctcttcgactatctcaccgaaaaggttgctctttccgaaaaggaaacacgtagtatcatgcgctcgctgctggaggcggtctcttttctccacgcgaacaacatagtgcaccgggacctcaagcccgagaacattctgctggacgacaatatgcaaatcaggctctctgatttcggcttctcgtgccaccttgagcccggagaaaaactccgggaactctgtggtacccctggctacctcgcccctgagattttgaaatgctccatggacgaaactcatcccggatacgggaaggaggtggacctgtgggcctgcggggtaatactttttaccctactggctggaagtcctccattctggcaccggagacaaatacttatgctgcgcatgatcatggaaggacagtatcagtttagcagtcctgagtgggacgataggtctagcactgtgaaagacctaattagcagactccttcaggtggacccagaggccaggctgacagccgagcaggccctgcagcacccattctttgagcggtgcgaggggtctcagccctggaacctcacaccccgacagcgcttcagagtcgccgtttggaccgtcctggctgcaggcagggtggctctttcaacccaccgggttcgaccgctgaccaaaaacgccttattgcgggacccctacgctctgcgttccgtcaggcatttgatcgacaattgtgcctttcgtttatacgggcactgggtgaaaaagggggagcagcagaaccgagcagctctgtttcaacaccgacccccaggaccgttccctatcatgggacccgaggaggagggggacagtgctgccataaccgaggatgaagcggtgctagttttgggttag

SEQ ID NO: 4585 - DNA, 1125 bp, synthetic construct
  misc_feature 1..1125: note = source = /note="Description of Artificial Sequence: Synthetic coding sequence"
  source 1..1125: mol_type = other DNA
atgacactcgacgtaggtcccgaggatgaattgccagactgggcggcagccaaggaattctatcaaaagtacgaccccaaggatgtcattggaaggggggtttcttctgtggtgcgtcgatgtgtgcaccgggctactggccacgagttcgccgtgaagatcatggaggtaaccgccgagaggctctccccggagcagctggaggaggtgagagaggccacccgacgtgagacccacatcctgagacaggtcgcagggcatcctcacattattacattgatcgattcctatgagagttcctccttcatgtttcttgtgtttgacttaatgagaaaaggcgagctttttgactatctaaccgaaaaggtggccctgtccgagaaagagacacgttccattatgcggtctcttctagaggccgtatcgtttctccacgctaataatattgtacatagggacctgaaaccagaaaatattctcctggatgacaatatgcagattaggttgtcagactttggtttctcctgtcatttagagccaggggagaagctcagagagctatgtgggacaccaggataccttgcgcctgagatccttaagtgctccatggacgaaacacaccccggttatggtaaggaggtggatctgtgggcctgcggcgtgatcctcttcacactgttggctggcagcccaccattttggcataggcggcagatacttatgctgcgaatgatcatggagggacaataccagtttagctccccagaatgggatgatcgctcctccaccgtgaaggatttaatttcgagactgctgcaggttgatcccgaagctcgcttaactgccgaacaggccttacagcaccccttctttgagaggtgcgagggctcccagccatggaacctgacacctcgtcaacgtttccgcgttgccgtgtggacggtacttgccgctggacgggtggcactgtcgacacatcgggtgcgccctctaaccaagaacgctctgctgcgtgacccttacgcgctaaggagtgtcagacacctgatcgacaattgcgcatttaggctgtatgggcactggataaggaagcagtggatcggcaagctgatggcctgtgtctag

SEQ ID NO: 4586 - DNA, 3999 bp, synthetic construct
  misc_feature 1..3999: note = source = /note="Description of Artificial Sequence: Synthetic coding sequence"
  source 1..3999: mol_type = other DNA
atgcagcaggctcctcagccttacgaatttttcagtgaagaaaattccccgaaatggcgcggtctgcttgtatccgcgcttcgtaaagttcaggagcaggtccacccaacgctaagtgccaacgaggagtctctttattacattgaggaacttatttttcagctgctaaataaattatgcatggcccaaccaaggaccgttcaagacgtcgaagaaagagtgcagaaaacattccctcacccaattgacaaatgggccattgccgacgctcagtctgcaattgaaaaacggaagaggcggaatcccctgctgttgcccgtggacaaaatacacccttccctgaaagaagtgctgggatacaaggtggactatcacgtctctctctatatcgtagccgtcctcgagtatatctccgctgacatactaaagctcgcaggcaattacgtttttaacatcagacactatgagatctcacagcaggatataaaagtgtctatgtgcgccgataaagtgttaatggacatgttcgaccaagacgatatcggactggtttcgctctgcgaagacgaaccaagcagcagcggcgaactgaattactacgacttggtgcggactgaaattgcagaagaacggcaatacctccgagaacttaatatgataatcaaggtttttcgtgaagcttttctgagcgaccggaagctgttcaagccctctgatattgaaaaaattttctctaatatttctgacatccacgagctcaccgtgaaactgctggggctcatcgaagacaccgtagagatgacagacgagagttcacctcatccgctggcgggatcctgtttcgaggacctcgccgaggagcaggccttcgatccttacgaaacgctctctcaggatatccttagtccagagtttcatgagcactttaacaagctcatggctaggcctgctgtggcactccattttcaatccatagccgacggctttaaggaggctgtacggtacgtgctccctcgcttaatgcttgttcccgtataccactgttggcactatttcgaactccttaagcaactcaaagcttgtagtgaggaacaggaagaccgggagtgcctgaaccaagcaataactgcacttatgaatctccagggttccatggacagaatctataaacagtactctccgagaagacggccaggagaccctgtctgtccattctactctcatcaattaaggtccaagcacctcgctatcaaaaagatgaatgagattcagaagaacattgatggctgggaaggcaaggacattggccaatgctgtaatgagtttataatggaggggccactgacacgcatcggcgcaaagcatgagcgacacatcttcctgtttgacgggttaatgattagctgcaaacccaaccacggacaaacacgactgcctggatacagttcagccgaataccggctgaaggagaaattcgttatgcgaaagatccagatctgtgataaggaagacacatgcgaacacaaacatgcgttcgagttagtgtcaaaagatgaaaattcaataatatttgccgcaaagtccgctgaagagaaaaacaactggatggctgcactgatcagcctccactaccgatctacactggataggatgctcgattctgtcctgctaaaggaagagaacgaacagcctctgcgactgccttctccagaagtctatcgcttcgtcgttaaggactccgaagaaaatatcgtgttcgaggacaacttgcagagcaggagcggcatccccattattaaaggcggtacagtggtgaagctcatcgaaagactcacctaccacatgtacgcggacccaaattttgtgcggacatttcttacgacatacagaagcttttgcaagcctcaggaactgctgtccctcctgatagagcggtttgagattccagagccagagccaactgacgccgacaaactggccatagaaaagggcgaacagccaatctccgccgacctgaagcgctttaggaaggaatatgtccaacccgtgcagctgagaattctcaacgttttcaggcattgggtggagcatcacttctacgactttgaaagggatctggagttgcttgagcgactggaaagttttatcagtagtgtcagaggaaaggcgatgaaaaaatgggtggaatccatcgccaagattattcggaggaagaagcaggctcaggcaaacggggtgtctcacaatatcacttttgaatcccccccaccgcctattgaatggcacatcagtaagcctggtcagttcgagactttcgatctgatgaccctccatccaatagagattgccaggcagctgactctgttggaaagtgatctgtatcgcaaagtgcagccatcagagctcgtgggttctgtgtggacgaaagaggacaaagaaatcaactcaccgaatctcctgaagatgataagacacactactaaccttactttatggtttgagaagtgcattgtcgaagcggaaaactttgaagaacgcgtggctgtgctctcccggatcatcgaaatccttcaggtattccaggacttgaacaattttaatggcgtcctcgaaattgtcagcgccgtgaatagcgtgtcagtgtacaggttggaccatacgtttgaggccttgcaggagagaaagcggaaaattcttgatgaggcggtggaactctctcaagaccactttaaaaagtatctggtaaagctgaaaagcatcaaccctccctgcgtgccgttctttgggatatacctgacaaacatcctcaagactgaggaagggaacaatgacttcctgaagaagaaaggcaaagatcttattaatttttcgaagaggagaaaggtcgcagagatcactggggaaattcaacagtatcaaaaccagccatattgtctgcgcattgagcctgacatgaggagattctttgaaaatctcaacccaatggggagtgctagtgagaaggagtttaccgattatctgtttaacaaatcgcttgagattgaacctcgaaactgcaaacagccaccacgctttccccgaaagtcaacatttagtttgaagtcccctgggatacgcccaaacaccggcaggcacggttccaccagtgggacattgcggggacacccaacgcctctcgagagagagccctgcaagatctcttttagtcgaatcgcagaaactgagctggagtccacagtgagcgcgcctaccagccctaacactcccagtacacctccagtgtcggcttcgtccgatctgagtgtgtttctggacgtagaccttaactcgagctgcggaagcaatagcatattcgcccctgttttgttaccccactccaaatctttctttagtagttgcgggtccctgcataagctctcagaggagcctctcatcccccctccccttccacctcggaaaaagttcgatcatgacgcgtccaatagcaagggtaatatgaaaagtgacgatgacccgcctgcaatacctcctaggcagccccctcccccaaaagtgaagcctcgagttccggtgccaacaggcgctttcgacgggcctctgcacagtccccctccacctcctcctcgcgacccactgcccgatactcctcccccagtgccgctgcggcctcccgagcattttatcaactgtcccttcaatctgcagcctccaccgctgggtcacctgcaccgcgacagtgattggctgcgggatatctcgacttgcccaaactcaccttctacccccccttcaaccccaagccctagggtgcccaggagatgttacgtgctgtcatctagccagaataatcttgcgcaccctcctgctccacccgttccccctagacagaactcatctccgcatctccccaaactccccccaaaaacctacaaacgggagttgagtcatccccctctgtataggctgcctctgcttgagaacgcagagacgccacaatag

SEQ ID NO: 4587 - DNA, 2442 bp, synthetic construct
  misc_feature 1..2442: note = source = /note="Description of Artificial Sequence: Synthetic coding sequence"
  source 1..2442: mol_type = other DNA
atggcaaaacccctgaccgaccaggagaagcggaggcagattagtataagaggaatcgtcggggtagagaacgttgccgagttaaagaaaagcttcaaccgacatctgcatttcactctagtcaaggaccgaaatgtcgcaaccacccgcgattattacttcgccctcgcacataccgtccgcgatcaccttgtgggacggtggatcaggacacaacagcattactatgataaatgcccaaaactgggtttagacattgaggagctggaagaaatcgaagaggacgccggtcttgggaacggcggtttgggacgcctggccgcatgcttcttagactccatggccacccttggactcgcggcttacgggtacgggatacggtacgagtatggcatcttcaatcagaaaataagggatgggtggcaggtggaggaagcagacgattggctcagatacggcaatccttgggagaagtcgcgcccagaatttatgcttcccgtgcatttttacggcaaggtggagcacacaaacactggaaccaagtggatagatacacaggtagtgttggccctcccctacgacacaccagtgccgggatatatgaataatacagtgaatactatgcgactgtggtcggcacgcgctccaaacgactttaacctgagggattttaatgttggagattatatccaggcagtccttgatcgcaacctcgcagagaatatttcccgagtactgtatccaaatgataacttttttgagggtaaggaattgaggctgaagcaagaatacttcgtagttgcagcaactctgcaggacatcattcgccgatttaaggcttcgaaatttggttctactaggggagccggaaccgtgttcgacgcttttcctgatcaggttgcaatccagcttaacgacacacatcccgcactggctatcccagagctgatgcgcatctttgtcgacatagaaaaactgccctggtccaaagcttgggagctcacacagaagacatttgcatataccaaccacacagtcctccctgaagcactggagaggtggccagtggacttggtggaaaaactgctgcctcggcacctggaaattatttatgaaatcaatcagaagcatctggataggattgttgccctgttccccaaagacgtagacagactgcgccgtatgtccttaattgaagaagaggggtcaaagcgcatcaatatggcccatctctgcattgtggggtcccacgccgtcaatggcgtggctaagatacattctgatattgttaagacaaaggtattcaaggacttcagtgaactggagccagacaagttccaaaacaaaaccaatggcataacaccccgacggtggctgctgctttgcaaccccggactggcagagctgatcgcggaaaaaatcggcgaggattatgttaaagatttgagccagctgacgaaactacacagctttctgggggacgacgtgtttctgcgggaattggcaaaagtgaagcaagagaataagctgaaattctctcaatttctggagactgaatacaaagtcaaaataaatcccagctccatgttcgatgttcaggttaaaaggattcatgagtacaaaagacagctgctcaattgtctgcacgtgataaccatgtacaatcggatcaagaaagaccccaagaagctttttgtgccgagaactgtgattattggtggcaaggcagcccctggctaccacatggccaaaatgattataaagctgataacatccgtggccgacgtggtaaataacgatcccatggtcgggtccaaactgaaagtgatcttcctagagaactatcgggtgtctctggccgaaaaagttatcccagctaccgatcttagcgaacagatcagcaccgcaggtaccgaagcttctggcacaggtaatatgaagtttatgcttaacggcgcattgacaatagggacaatggacggcgctaacgtcgaaatggcagaggaggccggtgaggaaaacctctttatcttcgggatgaggattgatgatgtggccgcacttgacaagaaaggctatgaagccaaagagtattacgaggccctgccagagctcaagctcgtaatcgaccagatcgataatggatttttcagtccaaagcagcctgacctattcaaggatattatcaacatgctgttctaccacgaccgttttaaagttttcgccgattacgaagcttatgtcaaatgccaggataaggtcagtcagctgtacatgaatccaaaggcctggaataccatggtattgaagaatattgcagcctccggcaagttcagctctgacaggaccatcaaggaatatgcacagaacatttggaatgtcgaacccagcgacctcaaaatttctctgagtaatgaaagtaacaaggtgaacggaaactag

SEQ ID NO: 4588 - DNA, 2433 bp, synthetic construct
  misc_feature 1..2433: note = source = /note="Description of Artificial Sequence: Synthetic coding sequence"
  source 1..2433: mol_type = other DNA
atggaacataaggaagtggtcctcctgctacttctcttcctgaagagcggccagggcgagccacttgacgactacgtgaatacacagggcgcttctttgttttcagtgacaaaaaaacaactcggcgctggcagcatagaagaatgtgccgcaaagtgcgaggaggatgaagaatttacttgccgggcatttcagtatcacagcaaggagcagcaatgtgtgatcatggcagaaaatcggaaatctagtattatcataagaatgcgtgatgtcgtcttattcgagaaaaaagtgtatctctccgagtgcaaaactgggaatgggaagaactacagagggacaatgtccaaaaccaaaaacggcatcacttgtcagaaatggagctctaccagtccgcatcgtccccgtttttcaccagccactcacccttccgaagggttggaggaaaactactgccgtaaccccgataacgaccctcagggcccttggtgctataccaccgatccagaaaagcggtacgactactgtgacatactggagtgtgaggaggagtgcatgcattgttcgggagaaaactatgatgggaagattagcaagaccatgtcagggctggagtgccaagcctgggactctcagagcccccacgcccacggatatataccctcaaagttcccaaataagaatttaaagaaaaattactgtcggaatcccgatagggagctcaggccctggtgttttaccaccgaccccaacaagcgatgggaattgtgcgacataccccgatgcactacccctccgcctagctctggaccaacttaccaatgcctaaaaggtactggcgaaaattatagaggcaatgttgctgttactgtctccggccatacctgccaacactggagtgcacagactccccatacacataatagaacacccgagaacttcccatgcaaaaaccttgacgaaaactattgccgcaaccctgatgggaaacgcgcaccatggtgccatacaacaaattcccaggtaaggtgggagtattgtaagattccttcctgtgatagctcccccgtgagtacagagcagctcgccccaaccgcccctcccgagctcacaccagttgtacaggattgttatcacggcgacgggcagtcatatcgtggcactagttccaccacaaccacaggaaaaaaatgtcaaagttggagttccatgacccctcatcggcaccagaaaactcctgagaactatccgaacgcaggtttaacgatgaattactgccggaatcccgatgctgacaaggggccttggtgcttcactaccgatccaagtgtgcggtgggaatattgcaacctgaagaaatgctctggtacagaggcaagcgtagtcgcgcctcctcccgtcgttcttctgcccgatgtggagactccttctgaagaggactgcatgttcggaaacggcaaaggctaccgcggaaagcgcgcaacaacggtcacgggcaccccttgtcaggactgggcagcccaagagccgcaccgacacagtatctttacccccgagaccaatccaagggcaggcctcgagaaaaattactgccgaaacccggacggcgacgttggtggcccttggtgctatactaccaatcccagaaagctgtatgactactgcgacgtcccacagtgcgccgcaccctcgtttgattgtggcaagccccaagtcgaacccaaaaaatgccctggtcgagtcgtggggggttgtgtggctcatccccatagttggccctggcaggtgtccttaagaaccagattcggtatgcatttttgtgggggaaccctcatatctccagagtgggttttaacagccgcacattgcctggagaaatctcctagacctagcagctataaagtgatcctgggggcacaccaggaggttaaccttgaacctcacgtccaggaaatagaagtcagtaggctctttctcgagcctactcggaaggatatcgctctgcttaagttgagttctcccgctgtgattacagacaaggtgattcctgcctgcctgccctccccaaattacgtggtggcggaccggacagagtgtttcatcacagggtggggagagacccagggaacatttggagccggattacttaaagaggctcagctaccagtgattgaaaataaagtgtgcaataggtacgaattcttgaatggaagagtgcagtctactgagctttgcgcgggtcacctggcgggtggtaccgactcttgccaaggcgattcgggagggcctctcgtctgttttgagaaggacaaatacatccttcagggcgtgactagctgggggttgggctgtgctcgccctaataaacctggtgtctatgttagagtgagtagattcgtgacctggattgagggagtaatgaggaataattag

SEQ ID NO: 4589 - DNA, 633 bp, synthetic construct
  misc_feature 1..633: note = source = /note="Description of Artificial Sequence: Synthetic coding sequence"
  source 1..633: mol_type = other DNA
agattcggtatgcacttttgtggcggaactctgattagcccagaatgggtcttgaccgccgcacactgccttgagaagtcccctcggcctagctcatacaaggtgatcctcggagcccaccaggaggtgaacctcgagccccacgtgcaagaaatagaggtgtcaaggctgttcttggagccaactcggaaagacattgccctgctaaagctgtcctcacctgccgtaataactgataaagtcatccctgcttgcctgccgagtccaaattacgtggtggctgatagaacagaatgctttattacaggatggggtgagacccaaggaacttttggagccggactgcttaaagaagctcagctgcctgtcattgagaacaaggtttgtaatcgctacgaatttctcaacggaagagtacagtctacagagctgtgcgccggtcacctcgctggagggacagactcttgtcagggtgactccggcggaccactggtctgctttgaaaaagataagtacattttgcagggcgtgacctcatggggccttggatgcgctcggccaaataaaccaggtgtgtatgtacgggtgtcgcgcttcgttacttggattgagggcgtgatgcgcaacaactag

SEQ ID NO: 4590 - DNA, 411 bp, synthetic construct
  misc_feature 1..411: note = source = /note="Description of Artificial Sequence: Synthetic coding sequence"
  source 1..411: mol_type = other DNA
atggaacataaggaagtcgtgcttctactgctcctgtttctgaagtccggccagggagaaccactcgatgattacgttaatactcagggcgcatcgctcttcagcgtgactaaaaagcagctgggggcaggcagtatcgaggagtgcgcggctaaatgcgaggaagacgaagagtttacttgtcgcgcttttcagtaccacagtaaggaacagcagtgtgtgataatggctgaaaatcgaaaatcttcaatcataatcagaatgagggatgttgtcctgttcgagaaaaaggtgtacctttcagaatgcaagaccgggaatggtaagaattataggggcaccatgtctaaaaccaaaaacggaataacatgccagaaatggagctccacttctcctcaccgaccaaggtag

SEQ ID NO: 4591 - DNA, 945 bp, synthetic construct
  misc_feature 1..945: note = source = /note="Description of Artificial Sequence: Synthetic coding sequence"
  source 1..945: mol_type = other DNA
atgggaataggcagatcagaaggtggaaggcgaggagcggcactgggagtgcttttagcactgggtgccgcactcctggctgtcggcagcgcgtctgaatacgattatgtgtcctttcaaagcgacatcggaccatatcaatccgggaggttctataccaaaccaccgcaatgtgtcgatattccggctgacctgcgcctgtgtcacaacgttgggtataagaaaatggtccttcctaacctcctagaacacgagacgatggcggaggtgaaacaacaggcttccagctgggtgcccttactaaataaaaattgccatgccggaacacaggtgtttctgtgctctctgtttgccccagtgtgccttgaccggcctatctacccatgccggtggctgtgcgaagccgtgagggactcttgtgagccagtgatgcaattcttcggattttactggccagagatgctaaaatgtgataagttcccggaaggcgacgtttgtattgcgatgaccccccctaatgccacagaagcatccaagccccaagggactactgtatgccccccatgtgataacgagcttaagtcggaggctattattgaacacctatgtgcttctgagttcgcacttcggatgaagatcaaggaagtcaagaaagagaacggggataaaaagatagtgccgaagaagaaaaagccactgaaactcggaccaataaagaaaaaggatctcaaaaaactggtcctgtacttgaagaatggagctgattgcccatgtcaccagctggacaacctgtcccatcacttcctaattatgggtaggaaagtcaagtcgcagtacctgctgacagctattcataagtgggataagaagaataaggaattcaaaaacttcatgaaaaagatgaagaatcacgaatgtcccacgttccagtctgtgtttaaatag

SEQ ID NO: 4592 - DNA, 882 bp, synthetic construct
  misc_feature 1..882: note = source = /note="Description of Artificial Sequence: Synthetic coding sequence"
  source 1..882: mol_type = other DNA
atggacgccatgaaaaggggactctgctgtgttctcctgctgtgcggagctgtctttgtctctcccagtcaggaaatccatgcaagattccggcgaggcgctaggtcctatcaagttatttgccgggatgaaaagacccagatgatctaccagcagcaccagagctggttgcgaccggtactgagaagcaaccgagtggagtattgctggtgtaatagcgggagagcacagtgtcactctgtgcccgtgaaaagctgttcagagcctagatgctttaatggcggaacctgccagcaggcactctattttagcgacttcgtctgccaatgtcctgaaggcttcgcagggaagtgctgcgaaattgatacccgggcaacttgttatgaagaccagggtatttcgtaccgcggaacatggtctaccgccgaatccggagccgagtgtactaattggaatagctctgcgttagcccagaagccttacagcggtcgtcgccctgacgccattagactcggattgggcaatcataactattgtcggaaccctgatagagattctaaaccgtggtgttacgtgttcaaggccggaaaatactcctccgagttttgttccaccccggcttgttcagaggggaattcagactgctacttcggtaacggctctgcctacagaggcactcacagcttgaccgagtctggcgcttcctgtttaccctggaatagcatgattttgattggtaaggtgtatacagctcaaaacccctcagctcaggctctaggtttaggtaagcacaattactgccggtgtcggacagggaggtctgtctcatccccagcaacggcatcaatgaggccatgcctcctatcaatcaggtccggctag

SEQ ID NO: 4593 - DNA, 1551 bp, synthetic construct
  misc_feature 1..1551: note = source = /note="Description of Artificial Sequence: Synthetic coding sequence"
  source 1..1551: mol_type = other DNA
atggatgctatgaagcgagggctctgttgcgtccttctcttgtgtggtgcagtgtttgtctctccctcccaggaaatccacgctcggtttaggaggggagcgcgaagttaccagggctgttcagaacctagatgtttcaacggcggaacctgccagcaagctctctattttagtgattttgtatgtcagtgccctgaggggtttgccggaaagtgctgcgaaatcgataccagggcaacttgttatgaagaccagggcatttcctatcggggtacatggtctaccgctgaatctggcgctgaatgcactaattggaacagctccgccctggcccaaaaaccttattccggtcgtagacctgacgccattagattagggttgggcaatcataattactgcaggaacccagacagggattcaaagccttggtgctacgtgtttaaagcaggaaaatatagctcagagttctgtagcaccccagcatgttccgaggggaacagcgactgctactttggcaacgggagcgcttacagagggacccattcgctcaccgaatctggcgcatcttgtctcccatggaattcaatgattttgattggtaaggtgtacaccgctcaaaatccttccgctcaggccctcgggcttggaaagcacaattactgcagaaacccagatggagatgctaagccgtggtgccacgtccttaaaaaccgacgcctgacatgggaatactgtgacgtccccagctgctccacgtgcggcctccgtcagtattcccagccacagttcagaattaaagggggattgtttgctgacatagcttcgcacccgtggcaggccgctatcttcgctaagcatcggaggagtccaggcgagcgtttcctctgcggaggaatcctgatctcgagctgttggattctttctgctgcccactgtttccaagagagattccctccacatcatctgaccgttatcctcgggcgtacatacagagtggtccccggtgaggaagagcagaaattcgaagtggaaaagtatattgtgcataaagaatttgacgatgacacatacgataacgacatcgccctgttgcaactgaaatcagattcgtcgcgttgcgcccaggagagttctgtggtaaggaccgtttgtctgcctccagccgatctacaactgcctgactggaccgagtgtgaactgtccggatacgggaaacacgaggcgttgtcccctttctacagtgaacgtctcaaggaggcccacgtcagactgtatccaagttccaggtgcacctcccaacacctgctcaaccgcacagtgacagacaatatgctatgcgctggggacacaaggtccgggggtccgcaggcaaatttgcacgatgcttgccagggagacagtggaggaccgttggtgtgcctcaacgatggacgaatgacactggttggtatcatcagctgggggctggggtgcgggcagaaggatgtcccaggcgtgtacactaaggtcactaattacctggactggatccgggacaatatgaggccctag

SEQ ID NO: 4594 - DNA, 1689 bp, synthetic construct
  misc_feature 1..1689: note = source = /note="Description of Artificial Sequence: Synthetic coding sequence"
  source 1..1689: mol_type = other DNA
atggacgccatgaaacgcggtctgtgctgcgtcctcctgctgtgtggcgcagtctttgtctcacctagccaggaaattcacgcccgatttcggagaggagccaggagctatcaggttatctgccgtgatgagaaaactcagatgatttaccaacaacatcagtcctggctgcgcccagtgctgagatctaatcgcgtagagtattgctggtgcaactccggccgtgcccagtgtcactcagtccccgtaaaaagctgcagcgagcctcggtgtttcaatgggggaacttgtcagcaggctctgtatttttctgattttgtctgccagtgccccgaaggatttgcagggaaatgctgtgaaatcgataccagggcaacctgctacgaagaccagggcatcagttaccggggtacctggtccacagcagagagcggcgctgagtgcacaaactggaatagcagtgccttagcacaaaagccctatagcgggaggcgccctgatgctattcgcctaggcctgggaaaccataactactgcaggaaccccgacagagactcaaaaccatggtgctacgtctttaaagcagggaaatactcatcggagttctgcagcaccccggcttgtagcgagggcaactctgactgttacttcggaaatggcagcgcgtatcgaggaacacatagtctgacagagtccggggctagttgtctgccctggaactctatgattctaatcgggaaagtctacaccgcccagaatccttccgcacaggctctcgggctggggaagcacaactattgtcgaaacccagatggcgatgccaaaccctggtgccacgtgctgaagaatcggcgactgacttgggagtactgtgatgtgccttcctgttcaacctgcggcttgagacaatattcccaacctcagttccgtattaaaggtggcctgtttgcagatatcgcctcgcacccatggcaagcagccatattcgcaaagcatcgaaggagtccaggggagaggtttctgtgcggagggattctaatttcgtcgtgctggatactctccgcagctcactgcttccaggagaggtttccacctcaccacctgactgtcattctggggcgtacctatcgggtagtacctggcgaggaagaacagaaattcgaggttgaaaagtatatcgtccataaagagtttgacgatgatacctacgacaatgacatagcgctcctgcaactaaaaagtgactccagccgttgcgcgcaggagagtagtgttgttcggacagtttgcctccctccagccgatctgcaactgccggactggaccgagtgcgagctgagcggctacgggaagcatgaagctttgagtcccttttactccgaaaggctgaaggaggctcacgtacggctttacccctctagtcgatgcacaagccagcacttgttaaaccgcacagttacagataacatgctgtgtgccggagatacaagatctggtggacctcaggctaatctccacgatgcttgtcagggagactcaggcggtcccctggtctgtttaaatgacggacgtatgactctggttggtattataagctggggacttgggtgtgggcaaaaagacgttcctggagtctatacgaaggtgacaaactacctggattggattcgcgacaatatgaggccatag

SEQ ID NO: 4595 - DNA, 1311 bp, synthetic construct
  misc_feature 1..1311: note = source = /note="Description of Artificial Sequence: Synthetic coding sequence"
  source 1..1311: mol_type = other DNA
atggatgctatgaagcgcggactttgttgtgtgctgctcctctgcggcgcagtgttcgtttcccccagccaagaaattcacgccaggttcaggcgcggagctaggtcttatcaggtgatttgccgtgatgagaagactcagatgatttaccaacagcaccagtcttggctccggccagtcctgaggtccaatcgagttgagtactgttggtgcaattccgggagggcgcagtgccactctgtgcccgtgaagagaaattccgattgctatttcggcaacggaagcgcgtatcgcggtacacacagcctgaccgaatctggcgcaagctgtctgccctggaatagtatgatcctgatcggaaaggtttacacagctcagaatccctcggcacaggccctgggactgggaaagcataactattgccgaaatccggatggcgatgcgaaaccatggtgccacgtccttaagaataggcgcctcacatgggagtactgcgacgtcccgagctgttcaacctgtggactgagacagtactcccaaccccagttccggattaaaggcggactgttcgcagatattgctagccacccctggcaggccgcaattttcgcaaaacacaggcgaagccctggggagaggtttctgtgcggcggtatcctgattagctcctgttggatcctctcagccgcacattgcttccaggagaggtttcctccgcaccatctgaccgttattcttggcagaacgtacagagttgtacccggagaggaggaacagaaattcgaggtagaaaagtacatcgtccacaaggaattcgacgacgacacatacgacaacgacattgctctgcttcagttaaaaagcgactctagccgctgcgcacaggagagctctgttgtgaggacggtgtgtcttccacctgctgatctgcaattacccgactggaccgaatgcgaactgagtggttatggcaaacacgaggctctatcacctttctatagcgagagactcaaggaagcacacgtcagactgtatccaagctcaagatgtactagccagcacctgctcaataggacggtgaccgataatatgctctgtgcaggtgataccagatccgggggtccacaggccaacctacatgacgcctgccaaggcgattctggaggtcccttggtgtgcttgaacgatggtagaatgaccttggttgggatcatatcgtgggggctgggctgcggccagaaggacgtaccaggcgtctacaccaaagtcacaaattacctggactggattcgcgacaacatgagaccttag

SEQ ID NO: 4596 - DNA, 1500 bp, synthetic construct
  misc_feature 1..1500: note = source = /note="Description of Artificial Sequence: Synthetic coding sequence"
  source 1..1500: mol_type = other DNA
atggacgccatgaaacgcggactgtgctgcgttctgttgctctgcggcgcagtctttgtttcacctagtcaggaaattcacgctcgttttaggcgcggagcacgatcatatcaagttatctgccgggacgagaagactcagatgatctatcagcaacaccagagctggctgcgacccgtgctgagaagcaatagagtggagtactgttggtgtaactctggcagggcccaatgccattctgtaccagtcaagagttgcagcgagccgcgatgcttcaatgggggtacatgccagcaggctctgtacttttctgattttgtgtgccagtgccctgaagggtttgccggaaaatgttgtgaaatcgattcaaagccatggtgctatgtgtttaaagccggtaagtatagttctgagttttgttcaacgcctgcttgctccgagggcaactccgactgctattttggtaacggcagcgcttaccgtggaactcattccttaaccgaaagcggggcttcctgtttgccttggaacagtatgatactgattggtaaagtatatactgcccaaaacccttccgcccaggccctgggtctcggtaagcataattactgtcgcaaccctgacggcgacgccaagccttggtgccacgtgctgaagaatcgcaggttgacttgggaatactgtgacgtgccctcctgcagcacttgtgggctgcgccagtatagccagccccagttcagaataaaaggcggactttttgccgacattgcttcccacccatggcaggccgcaatctttgccaaacaccggagatctcctggtgagaggttcctctgtgggggaatccttatatcctcctgctggatcctgagcgctgcacactgttttcaggagcggtttccgccacaccatcttactgtgatcctggggaggacataccgtgtggtgcccggagaagaggaacagaaatttgaagtcgaaaagtacatcgtgcataaggagttcgatgacgacacctatgataacgacatcgcgttacttcagctcaagtctgattctagtaggtgtgcacaggagtccagtgtagtgcgcactgtctgtctcccaccagccgacctccagctgcctgattggacagaatgtgagctgtccggatacggcaaacacgaggcactgtcaccgttttactccgaacggctgaaagaagcacacgtgaggctatatccttcaagccgatgcacttctcagcacttattgaacagaacagtaaccgacaatatgctgtgcgccggagatactcggtccgggggaccacaagcaaacctgcatgacgcatgtcagggagactctggcggtccccttgtctgtctgaacgacggaaggatgactctagtgggtattatatcatgggggctggggtgtggccagaaagacgtgcccggagtgtacaccaaggtaactaactacctggactggatcagggataatatgcgtccttag

SEQ ID NO: 4597 - DNA, 537 bp, synthetic construct
  misc_feature 1..537: note = source = /note="Description of Artificial Sequence: Synthetic coding sequence"
  source 1..537: mol_type = other DNA
atggatgcaatgaagcgcggactatgttgcgtcctgctcctgtgtggagcagtatttgtgtcaccttcccaggaaatacacgcccgttttagaagaggggcacgttcctaccaggttatctgccgagacgagaaaacccagatgatctatcagcagcatcagagttggctgcgcccagttctgaggtccaatcgcgtggagtattgctggtgcaattcaggtagagcccagtgccattctgtgccagtgaagtcttgtagcgagccaaggtgcttcaatggaggtacatgccagcaggctctctacttcagcgacttcgtgtgccagtgtccagaaggatttgccggaaaatgttgcgagatagatactcgggctacctgctatgaggatcagggtattagctaccgcggaacttggtctactgccgagtcgggggctgagtgcaccaattggaatagcagtgcacttgcacaaaagccatacagcggacgcaggcccgacgctattcggctcggcctcggaaatcacaactattag

SEQ ID NO: 4598 - DNA, 474 bp, synthetic construct
  misc_feature 1..474: note = source = /note="Description of Artificial Sequence: Synthetic coding sequence"
  source 1..474: mol_type = other DNA
atggacgctatgaagaggggtttatgttgcgtactgttgctctgtggcgcagtattcgtcagccccagccaagagattcacgctagattcagaagaggcgcaagatcctaccaggtcatctgccgggacgagaagacccagatgatttaccagcagcaccagtcttggttgcgacctgtacttcggagcaatcgagttgagtactgttggtgtaactccggtagagcacagtgccattctgttcccgtgaaatcttgctcagaacccaggtgtttcaacggtggcacctgtcaacaggctttatatttcagcgattttgtctgccaatgtcctgaaggattcgcaggtaaatgttgcgagatcgatacaagggccacttgctatgaggatcaggggatctcgtatcgcggaacgtggtctactgcagagagcggtgctgaatgtactaactggaattcctcagctcttgcttag

SEQ ID NO: 4599 - DNA, 1422 bp, synthetic construct
  misc_feature 1..1422: note = source = /note="Description of Artificial Sequence: Synthetic coding sequence"
  source 1..1422: mol_type = other DNA
atggatgccatgaaacgcggactgtgttgcgtccttctgctgtgtggcgctgtatttgtttcaccttcacaggagattcacgcacggtttcgtcgaggtgcaagatcctaccaagtcatctgccgcgacgagaagacgcaaatgatttaccaacagcatcagagttggctccgcccagtcctccggtcaaacagagtagaatattgctggtgcaactccggtagagctcagtgccatagcgtgccagtcaaatcctgttcagaaccaaggtgttttaatggaggaacatgccaacaggctctttacttcagcgacttcgtttgccagtgtcccgaagggttcgcaggaaagtgctgcgagattgggaattcagactgttacttcgggaatgggagtgcatacagaggcacacactctctgacagagagtggtgccagttgcctcccctggaatagtatgattctgatcggcaaggtttatactgctcagaatccatctgcgcaggctttaggcttgggaaaacataactactgcagaaatccagacggtgacgccaagccgtggtgtcacgttcttaaaaaccggaggctaacatgggagtattgtgatgtgcccagttgcagcacctgtggcctgaggcagtacagtcagccccagtttcgtatcaagggtggtctcttcgctgacattgcctcgcacccgtggcaggccgctatctttgctaaacacagacgcagcccaggcgagcgcttcttgtgtggaggcattctgattagctcttgctggatcctgtctgccgctcattgtttccaggagagattcccaccacatcacttgactgtgatcctgggcagaacatatcgcgtggtgccgggtgaggaggagcagaagtttgaagttgagaagtacatcgtacataaggaatttgacgatgatacatatgacaacgatattgcactcctgcagctgaaatccgactcttctcgctgcgcacaggagtcctctgtggtgcgcaccgtctgccttccaccggctgatctccaactgcccgattggaccgaatgcgagttgagcgggtacgggaaacacgaagcgctgagtcctttttatagtgagaggctgaaggaagcccatgtcagattgtacccctcctcacggtgtacgagccaacacctcctcaatcgtaccgtaactgataacatgctatgcgccggtgacacccgatctggagggccacaggcgaatctgcacgacgcatgccaaggcgactccgggggacccctggtctgtctcaatgatggacgcatgaccctcgttggcatcatcagttgggggctcggttgtgggcagaaagatgttcctggagtgtacactaaggtgaccaactatctggactggattcgcgataacatgagaccttag

SEQ ID NO: 4600 - DNA, 1083 bp, synthetic construct
  misc_feature 1..1083: note = source = /note="Description of Artificial Sequence: Synthetic coding sequence"
  source 1..1083: mol_type = other DNA
atggccggtcacctcgcatccgatttcgccttctctccccctcccggaggaggtggggatggaccaggcggtcctgaaccaggatgggtggaccctcggacatggctctcgttccaagggcctcctggaggacccggtatcggtccaggcgtcggacccggatctgaggtctggggaattcccccttgtccacctccctacgagttttgcggcggtatggcgtactgtgggcctcaggtaggggtgggcttagtgcctcaagggggactggaaacctcccagccagagggcgaagctggggtgggagtggaatcgaacagcgacggcgcttctcctgagccatgtaccgtgaccccgggagctgtgaagctggagaaggagaagctggaacagaatcccgaggagagccaggacatcaaagcccttcagaaagagctggagcaattcgcaaagctgctgaagcagaaacggatcacactgggttatactcaagccgatgtaggcctgacactcggagtcctgttcggcaaagtgttcagtcagacgacgatctgtcgctttgaagccctgcagttgtcgtttaaaaacatgtgtaagctacgccctttgctgcagaaatgggttgaggaggccgataataatgaaaatctgcaggagatttgcaaggctgagaccctggtccaggctaggaaacggaaaaggacaagtatcgagaaccgggtgcggggaaatctggaaaatctctttctgcagtgtccaaagcctacactccagcagatttcgcacatcgcacagcagctgggcctggaaaaagatgtcgttagagtctggttttgcaacaggaggcaaaagggcaaacgtagttccagtgactacgcccaaagagaggactttgaggctgctggcagtcccttttctgggggtccagtgagctttccactcgcgcctggccctcacttcggtacacccggatatggtagtccccattttactgcgttgtattcctcagtgccattcccagaaggcgaggccttcccacctgtttctgtaaccactttaggcagcccaatgcattctaactag

SEQ ID NO: 4601 - DNA, 798 bp, synthetic construct
  misc_feature 1..798: note = source = /note="Description of Artificial Sequence: Synthetic coding sequence"
  source 1..798: mol_type = other DNA
atgcatttctatcgcttgtttctgggggctacacggcgattcctaaatccagagtggaaaggtgaaatcgacaattggtgtgtgtatgtccttacatccctgcttcctttcaagatccagagccaggacatcaaggctttgcagaaagaactagagcaatttgccaaactgcttaaacagaagaggattacactaggatacacacaggcagatgttggactgacactgggagtgttgtttggtaaggtattcagccagaccactatctgccgatttgaagccctgcagctgtcatttaaaaacatgtgcaaactaaggccattactgcagaagtgggtggaggaagccgataacaacgagaatctacaggagatctgtaaagctgagactctagtgcaggctagaaaacgcaaacgcacgtctattgaaaatagagtccgcggaaaccttgaaaatctcttcctccaatgccccaaacctaccttgcagcaaatttcccatatcgcacaacagctggggctagaaaaagatgttgtgcgggtgtggttctgcaaccggaggcaaaagggcaagcgatcctctagcgattacgcccaacgcgaggacttcgaggcagcgggttcgccattttcaggcggacccgtttcatttcccctggcaccaggccctcacttcggcacgcctggatacgggtcgccccacttcaccgcactgtacagtagcgttccgtttcccgagggagaagccttcccaccggtgtccgtaactacactaggatcgcctatgcattctaattag

SEQ ID NO: 4602 - DNA, 1083 bp, synthetic construct
  misc_feature 1..1083: note = source = /note="Description of Artificial Sequence: Synthetic coding sequence"
  source 1..1083: mol_type = other DNA
atggccggtcatttggctagcgacttcgcttttagtcccccaccaggcggtggaggagacggaccagggggacctgaaccgggttgggttgaccccagaacatggctgtccttccagggacctcctgggggtccaggcattggccctggagtcggcccaggctctgaggtatggggaatccccccttgtcccccaccgtatgagttttgcggcggaatggcctattgtggaccccaggtgggtgtcggtcttgtgcctcagggtggtctcgaaacatcccagcccgagggggaagccggtgtgggtgttgaatcgaactcggacggagcatctcccgagccttgtacagttactccaggcgcagttaaattagagaaagaaaagcttgagcagaatcctgaagaaagtcaagacattaaggctctgcaaaaagaactggagcagtttgctaagttgctgaaacagaagcgcatcacgctcgggtacacgcaggccgacgtcggattaacgctgggggtgctttttggaaaagtgttctctcagactactatttgccgtttcgaggcgctacagctgtcatttaaaaatatgtgcaagcttagacccctgctacagaagtgggtggaggaagccgataacaatgaaaatctacaggagatttgcaaggccgagactctcgtgcaggccagaaagagaaaacggacctcaattgagaaccgggtgagaggtaacctggaaaatctttttctgcagtgccctaagcctaccctgcagcagatcagccacatcgctcagcagctgggtctggaaaaggatgtggtacgagtctggttctgcaaccgcagacagaagggtaaacgctctagttcagactatgcccagagggaggatttcgaagccgcaggaagcccattctctggtggccctgtcagttttccgctggctccaggcccacactttggcacaccgggatacggttctccacatttcacagctctttatagcagtgtgccatttcctgagggggaagcatttccaccggtgagcgttactacgcttgggagtcctatgcactccaattag

SEQ ID NO: 4603 - DNA, 798 bp, synthetic construct
  misc_feature 1..798: note = source = /note="Description of Artificial Sequence: Synthetic coding sequence"
  source 1..798: mol_type = other DNA
atgcacttctatcggctgttcctgggggctacaagacgctttttaaaccccgagtggaagggagagatcgacaattggtgtgtttacgtgctgacctcccttctgccgttcaaaatccagtcccaggatatcaaggcactgcagaaggaacttgaacaattcgccaagctcctgaagcaaaaacgtattactttgggatatacccaggccgacgtgggcctcacgctgggggttcttttcggaaaagtgttctcacaaaccaccatttgccgattcgaggccctgcagctgagcttcaagaatatgtgtaagctaaggcctttgctgcagaaatgggtcgaggaggcagataacaacgaaaacttacaggagatttgtaaggccgaaactttggtgcaggcgcgaaaacggaagaggacatcaatcgagaacagagtgcgaggaaacctggaaaacctattcctgcaatgtcctaaaccaacactgcagcagatcagtcacattgcacagcaactcgggttggaaaaagatgtcgtgagggtatggttctgtaatagacggcagaagggtaagcggtcttctagcgactacgcccaacgagaggactttgaggctgccggatctcctttcagcggtggaccggtttcattccccctggcccctggtccccatttcggaacacccggatatggcagccctcactttacggcgctgtactcttctgtgccattccccgaaggagaagcattcccacccgtatcagtgaccactcttgggtctcctatgcacagcaattag

SEQ ID NO: 4604 - DNA, 798 bp, synthetic construct
  misc_feature 1..798: note = source = /note="Description of Artificial Sequence: Synthetic coding sequence"
  source 1..798: mol_type = other DNA
atgcatttctaccgcctcttcctaggtgcgactagacgattccttaaccccgagtggaaaggagaaatcgacaactggtgcgtgtacgtgctaacgagccttctgccatttaaaatccagagccaggatatcaaagccctgcagaaagagttggagcaatttgccaagcttctcaagcaaaaaagaataacactggggtatacgcaggccgatgtgggtctaactctcggtgtgctctttggcaaggtctttagccaaaccactatatgtcgattcgaggccctgcagttgtcattcaagaatatgtgcaagcttcgccctctcctgcaaaagtgggtcgaggaggccgataataacgagaacctgcaggaaatttgcaaggccgagaccctggtgcaggcccgaaaacgtaaacggacctcgatcgagaaccgagttcggggaaatttagagaatttgttcctgcagtgtcccaagccgactctgcagcagatcagccacattgcccagcagctgggactggagaaagatgttgtcagggtctggttctgtaaccgcagacagaagggaaaacggtcttctagcgactacgcacagagggaagatttcgaagccgctggctctccattttctgggggacctgtgtcctttcccttggcacccggaccacactttggaacccccggatacggctccccccactttacagccttgtacagttccgttccttttccagagggggaagcatttccgccagtgtccgttacaaccttgggctcgcccatgcacagcaactag

SEQ ID NO: 4605 - DNA, 1083 bp, synthetic construct
  misc_feature 1..1083: note = source = /note="Description of Artificial Sequence: Synthetic coding sequence"
  source 1..1083: mol_type = other DNA
atggccggacatcttgccagtgacttcgctttttctcctcccccaggtggaggtggcgacgggccaggcggacctgagcctggatgggttgatccaagaacgtggctcagttttcagggtcctcccggaggacctggtataggcccaggagttggccctggtagtgaggtgtgggggatcccaccctgccctccaccgtacgaattctgtggtggcatggcatattgtgggcctcaggtgggagtggggcttgtaccccaagggggacttgaaacttcccagccggagggagaagccggtgttggtgtggaatctaattccgatggcgcaagcccggaaccctgtacagtgactcccggtgctgttaaacttgaaaaggagaagcttgagcaaaatccagaggaaagccaggatatcaaagccctacagaaagagctggagcagttcgcgaaactacttaagcagaagcgcattactctgggctatacacaggctgatgtgggtctgacattgggcgtcctgttcgggaaggtcttttcacaaactacgatttgtaggttcgaggcgctgcagctgagttttaagaatatgtgcaagctccgtccattgttacagaagtgggttgaagaggccgataataatgaaaatcttcaagagatatgcaaagctgaaacactggtgcaggcacggaaacggaagaggacctctatagagaatagggtgcgcggaaatttggagaacctgtttctccagtgccctaagcctacactgcagcagatcagccacattgcgcaacagctgggcctggaaaaagacgttgttagggtgtggttctgcaatcggaggcaaaagggcaaaaggtcctcctccgactacgcccagcgagaggactttgaggctgccggatctcctttttctggcggacccgtgtcttttcctcttgcacctgggccacactttggtacccccggttacggttctccgcacttcactgcactatatagctcagtgcctttcccagaaggcgaagcatttccacccgtatcggtgacaacgctagggtcaccgatgcattccaactag

SEQ ID NO: 4606 - DNA, 1083 bp, synthetic construct
  misc_feature 1..1083: note = source = /note="Description of Artificial Sequence: Synthetic coding sequence"
  source 1..1083: mol_type = other DNA
atggccggacaccttgccagcgacttcgcttttagcccacctcctgggggagggggagacgggcctgggggaccagagcctgggtgggttgaccccaggacctggcttagttttcaagggcctcctggaggacctgggataggtcccggtgtaggccctgggtctgaagtttggggaattcctccatgcccacccccttacgaattctgcgggggaatggcgtattgcgggcctcaagtcggggttgggttggtgccccaggggggactggagacgagccagccagaaggagaggccggtgtgggagtggagtcaaactctgacggggcttccccagaaccttgtaccgttacccccggagcagtgaaattggagaaggaaaagctcgagcagaatcccgaagaaagccaggacataaaagccctgcagaaagaattagaacaatttgcaaaactacttaagcagaaaagaatcactcttggctacacgcaggccgacgtggggctcactctgggggtgctgttcggtaaagttttctcccagaccacgatctgcagattcgaagcgttgcaactgtcgtttaagaatatgtgcaaactgcgacctttgctgcagaaatgggttgaagaagccgataacaatgagaacctacaggagatctgcaaggcagaaactctggttcaggcccgtaagagaaagcggacaagtatcgagaatagagtccgcggtaatctcgagaaccttttcctgcaatgtccgaaaccgaccctgcagcaaatttcccatatcgcacaacagctggggttggaaaaagatgtcgttcgcgtgtggttctgcaaccgcaggcagaagggcaaacggtcaagttccgactatgcacaacgcgaggactttgaggcagccggtagcccgttctcaggcggtccagtttccttcccgcttgctcctgggccacatttcgggactccgggttatggttcccctcattttaccgctctctactcaagcgttcctttccccgaaggcgaggcgttccctcccgtgagcgtgaccactctaggctcacccatgcattccaattag

SEQ ID NO: 4607 - DNA, 798 bp, synthetic construct
  misc_feature 1..798: note = source = /note="Description of Artificial Sequence: Synthetic coding sequence"
  source 1..798: mol_type = other DNA
atgcacttctatcgtttgtttttaggggctacacggagatttctaaatcccgaatggaaaggtgagatcgataattggtgtgtttacgtactgacttccctgttgccctttaaaatccaatcacaggatataaaagctttgcagaaggagctggaacaatttgcaaagctacttaagcagaaacggatcaccctgggctacacacaggcagatgtggggctgactctgggtgttttatttggcaaggtgttcagtcagacaaccatttgccggttcgaggcccttcagctgtccttcaagaatatgtgcaaattgcgccctcttttgcagaagtgggtggaggaagccgacaacaacgaaaacctgcaggagatctgcaaagccgaaacactggtgcaggctagaaagagaaagaggaccagtattgagaacagggttcggggaaatttagaaaacctctttcttcaatgccctaagccaaccctgcaacagatctctcacatcgcacagcaactgggacttgagaaggatgtggtcagggtgtggttttgtaaccggagacagaaaggaaaacggtcaagtagtgactatgcccagcgggaagactttgaggccgcagggagcccattttccggtggacctgttagctttcccctagcgccaggaccccactttggtactcccggttatgggagccctcatttcaccgctctctacagctcagtgccatttccggagggtgaggccttccctccagtctctgtcacaacactcggtagccctatgcactctaattag

SEQ ID NO: 4608 - DNA, 1083 bp, synthetic construct
  misc_feature 1..1083: note = source = /note="Description of Artificial Sequence: Synthetic coding sequence"
  source 1..1083: mol_type = other DNA
atggcaggacacctggccagtgattttgcattcagccctccaccaggtggaggtggagatgggccaggtgggcctgaaccaggatgggtggatccacgcacgtggctgagctttcaggggccacccggaggcccaggcattggtcccggtgtggggcctggaagtgaagtgtgggggatccccccatgtcctccgccttacgaattttgtggagggatggcctattgtggtccacaggttggggtgggtttggtgccccagggcggtctcgaaacaagccagcctgaaggcgaagcaggcgtcggtgtggagtccaactccgacggcgcttctccagagccctgcacagtcacccctggcgctgtgaagctagagaaagagaaattggagcaaaatcctgaggagtcccaggacatcaaggctctccagaaggagctagagcagttcgcaaaattgctcaagcaaaaacgcatcaccctggggtacactcaagctgacgtcgggctgaccctcggggtgctcttcggcaaagtgttcagtcaaaccacaatttgcagattcgaagcactgcaattgagctttaagaacatgtgcaaactacgacccctgctgcagaagtgggtcgaagaggcagataataatgagaaccttcaggagatctgtaaggccgaaactctcgttcaggcgcgaaagaggaagagaacatctattgagaaccgggtgcggggaaatcttgaaaatttatttctgcagtgcccaaaaccaaccctccaacagatttcacacatcgcgcagcagctcgggttggaaaaagacgtggtgcgagtctggttttgtaaccgtagacagaaaggcaagaggtcttcatctgactacgcacagcgcgaggacttcgaggcagccggatcccccttcagcgggggacccgtgtctttccccctagccccaggtccccactttggtacccccggttatggcagccctcattttaccgctctctactcctcagtgccattccctgaaggagaggccttcccccctgtttcggtgacgaccttgggatctcccatgcacagtaactag

SEQ ID NO: 4609 - DNA, 369 bp, synthetic construct
  misc_feature 1..369: note = source = /note="Description of Artificial Sequence: Synthetic coding sequence"
  source 1..369: mol_type = other DNA
atggctggacatctggcatccgacttcgcgttttcccctcctccaggcggaggcggagatggacctggcggaccggaaccaggctgggtggatcctcgaacctggttgagttttcagggccctcctgggggaccagggattgggccaggtgtggggccagggtcagaagtgtggggcatcccaccctgtccccctccctacgaattctgtgggggtatggcttactgcgggccacaagtcggcgttggtttagttcctcaggggggactggagacctcccagcccgaaggggaggcaggcggaggcgagcagcttcgatggggtttgcccggtgcgctccacaggcatccctggtgccgtgaagcctag

SEQ ID NO: 4610 - DNA, 798 bp, synthetic construct
  misc_feature 1..798: note = source = /note="Description of Artificial Sequence: Synthetic coding sequence"
  source 1..798: mol_type = other DNA
atgcacttctatcggctcttccttggggcaacacgacgcttcttaaacccggagtggaaaggggaaatagataattggtgtgtttacgtcctcaccagtcttctgccattcaagattcagagccaagatatcaaagcactccaaaaggagttggagcaattcgcaaagctgttaaagcagaagaggataacactaggctacacccaggccgatgtgggtctgaccctcggcgttctgttcgggaaagtgttcagccagaccaccatctgtcggtttgaggccctgcagctgtcattcaagaatatgtgtaaacttcgccctctgttgcagaaatgggttgaggaggccgataataacgagaatctgcaagagatttgtaaagccgagaccctcgtgcaggcgaggaagagaaaaagaacctcaattgaaaatcgggtgaggggcaatttagaaaatcttttcctgcagtgcccgaaacccactctgcagcagatctcccacatagcacagcagttgggattggaaaaggacgtggtgagggtgtggttctgcaaccggaggcaaaaaggcaaaagatcctccagtgactacgctcagcgtgaggatttcgaggccgcaggctcacctttttcaggtggcccagtgagctttcctcttgccccagggcctcacttcgggaccccgggttatggctcaccccattttacagctctgtattcgagcgtaccattcccggaaggtgaggcctttccacctgtttccgttaccacactgggatcacccatgcatagcaactag

SEQ ID NO: 4611 - DNA, 1083 bp, synthetic construct
  misc_feature 1..1083: note = source = /note="Description of Artificial Sequence: Synthetic coding sequence"
  source 1..1083: mol_type = other DNA
atggccggacatttggccagcgattttgccttcagtcccccaccaggcggaggaggagatgggcctggtggccctgagccgggatgggtggacccacgtacatggctcagcttccaggggccacccggtggtcctgggatcggacctggagttggccctggtagcgaggtctggggcattccgccttgcccacccccttatgaattttgtgggggtatggcctactgtggccctcaggttggtgtcggattggtgcctcagggcggtttagaaacatctcagccagagggcgaagccggtgttggtgtcgagtcaaatagtgacggagcctcacctgaaccctgtactgttacccctggcgctgtcaagctggaaaaagaaaaactggagcagaacccggaggaatcccaggatatcaaggcattacagaaagagctggagcaatttgccaaactcctgaagcaaaaacgcatcactctgggatatacacaagctgacgtaggcttgactctgggggtgctgtttgggaaggtgtttagtcagaccacaatctgccgctttgaggcactgcaattatccttcaagaacatgtgtaagcttcggccactgctacagaagtgggtcgaagaggccgataataacgagaaccttcaagaaatatgtaaggctgagaccctggtacaggcgcgtaaacgcaagcgaacatcaattgagaaccgcgtacgcggaaacctcgaaaacctgttcctccaatgcccaaaaccaacgctgcaacagattagccatattgctcaacaactgggcttagaaaaagatgttgtgcgtgtttggttttgcaaccggagacagaagggtaaacgctccagttctgactacgcccagcgtgaagattttgaagctgcgggatcacccttttccggtggtcctgttagttttccactagctcctggacctcatttcggtacacccggttacggtagcccacattttacagcattatacagctctgtgccttttccagaaggcgaggcattccctccagtttccgtgactaccctgggctctccgatgcattccaactag

SEQ ID NO: 4612 - DNA, 372 bp, synthetic construct
  misc_feature 1..372: note = source = /note="Description of Artificial Sequence: Synthetic coding sequence"
  source 1..372: mol_type = other DNA
atggccggacatctggcaagtgatttcgccttctctccaccgcctggcggaggcggagatgggcctggcggacccgagccagggtgggtggacccacggacatggttgagcttccagggccctccgggtggcccaggcataggtcccggagtgggccctgggtccgaggtatggggaatccccccttgtcctccaccatatgaattttgtggtggcatggcctactgtgggccacaagtaggggtagggctggtgccacagggcggtctggagaccagccagcccgaaggagaagccggagtgggcgttgagacaccaatgggaccacctaggtccccagcaccccatccgttccctttccccctgctgtag

SEQ ID NO: 4613 - DNA, 558 bp, synthetic construct
  misc_feature 1..558: note = source = /note="Description of Artificial Sequence: Synthetic coding sequence"
  source 1..558: mol_type = other DNA
atggccggacaccttgccagcgactttgccttctcacctcctcccggaggaggaggtgacggacctggtgggccagagcccggatgggtcgacccaagaacctggctttcattccaagggcctccgggaggccctggaatcggaccgggagttgggcctggttctgaggtctggggtattcccccatgcccacccccatacgagttttgcggcggtatggcctactgtggacctcaggtaggtgttggcctggtgccgcaaggagggctagagacttctcaaccagagggcgaagccggtgtcggcgtagagagtaattccgatggcgcaagtcccgagccctgtaccgtaactcctggagcagtgaagttagagaaagagaagctggagcagaatcccgaggaaagccaggatataaaggcccttcagaaggaattagaacagttcgccaaactgcttaaacaaaagcgaattacactcggatacactcaggccgacgttcatccaggaggctcaatctgggaaggtatacagcctaacgatcacctgcccttatag

SEQ ID NO: 4614 - DNA, 372 bp, synthetic construct
  misc_feature 1..372: note = source = /note="Description of Artificial Sequence: Synthetic coding sequence"
  source 1..372: mol_type = other DNA
atggcaggccatctagcttctgactttgccttttctcctccacccggagggggtggggatggtccgggaggaccagagcccggatgggtggacccgagaacttggctgtcattccagggtcctcctgggggacccggtatagggcctggggtcggaccaggctcggaggtctggggaatacctccatgtcctccgccatacgaattctgtgggggaatggcctattgcgggcctcaagtgggcgtgggcttggtcccacaaggaggtctggagactagccagcccgaaggcgaagccggtgttggagtggagactcccatgggccctccacgttcccctgcaccgcatccgttcccatttccattactgtag

SEQ ID NO: 4615 - DNA, 558 bp, synthetic construct
  misc_feature 1..558: note = source = /note="Description of Artificial Sequence: Synthetic coding sequence"
  source 1..558: mol_type = other DNA
atggccggtcatctcgcttctgatttcgcattttcacctcccccaggcggaggcggtgatggcccaggtggtccagagcccggttgggtcgaccccaggacctggttgtcattccaggggcctccaggtggacccggtataggacccggtgttggccctggttcagaagtttggggcattcctccttgtccccctccatatgagttttgcggtggcatggcctactgtggccctcaagtcggcgttggactcgtacctcagggcggtcttgagacttcgcagccagagggcgaggcaggcgtgggggttgagagtaattcagacggggctagccccgagccttgtactgtgacccctggggcagttaagctcgagaaagaaaaacttgaacagaaccccgaggagagtcaagacattaaggccctccagaaggagcttgaacagttcgccaagttgcttaagcaaaaacggattacactgggatatactcaggcagacgttcatcccggtggctccatctgggaaggtatccagcctaacgaccacctgcccctgtag

SEQ ID NO: 4616 - DNA, 372 bp, synthetic construct
  misc_feature 1..372: note = source = /note="Description of Artificial Sequence: Synthetic coding sequence"
  source 1..372: mol_type = other DNA
atggccggacatctggccagcgacttcgccttctcaccaccccctggtggaggtggcgacggacctggaggcccagagcctggatgggtcgaccccaggacctggctctcatttcagggcccacccggtgggcctggcatcgggccaggggtgggcccaggttccgaggtgtggggtattcccccatgtcctcccccatatgagttttgtggcggtatggcgtattgtgggccacaagtgggagtcggtctggtgccccagggcggactggagacaagccagccggagggtgaggccggagtgggagtagagaccccaatgggccctccaagatctcccgctcctcacccttttcccttcccgcttctctag

SEQ ID NO: 4617 - DNA, 558 bp, synthetic construct
  misc_feature 1..558: note = source = /note="Description of Artificial Sequence: Synthetic coding sequence"
  source 1..558: mol_type = other DNA
atggccggacatctggcatccgattttgccttcagcccccctccaggaggagggggagatggccctgggggacccgagcctggttgggttgatccgcgtacttggctgtcttttcagggacccccaggaggtcccggaatcggacccggtgtcggtcctggaagtgaggtatggggaattcctccatgcccacctccttatgagttctgtgggggtatggcctactgcgggcctcaggtcggagttggtttggttccccagggcggacttgagacctcacagcccgagggtgaggctggggtgggcgttgagtcaaactcggacggggctagtcccgagccttgtacagtgacgcccggtgctgtgaagttggagaaagagaagttggagcaaaaccctgaggaaagccaagatattaaggctctacaaaaggagctggagcaattcgccaaactcctgaagcagaaacgtatcacgctaggctacacacaagcagacgtacatcccggtggcagtatatgggaaggaatccaacctaacgaccacctaccattgtag

SEQ ID NO: 4618 - DNA, 558 bp, synthetic construct
  misc_feature 1..558: note = source = /note="Description of Artificial Sequence: Synthetic coding sequence"
  source 1..558: mol_type = other DNA
atggctgggcacctggcaagtgacttcgcctttagcccaccccctggtggtggcggagatgggcctggcggtcctgaacctggctgggtagaccctcgcacgtggctctctttccaagggccaccaggtgggccaggcataggaccgggtgttggcccaggcagcgaggtgtggggcataccaccatgcccgcctccttatgagttctgtgggggtatggcatattgcgggcctcaggtcggcgtgggtctggtgccacagggcggtctggaaacctctcaacccgagggagaagcaggcgtgggggttgaaagtaattcagacggggcatcaccggaaccatgcaccgtgactcccggtgcagtgaaactggaaaaggagaaattggaacagaatcccgaagagtcgcaggacatcaaggcattgcagaaagagcttgagcaattcgccaagctgttgaagcagaagcgtattactttaggatacacacaggccgacgtgcaccctggaggatccatttgggagggtatccaacccaatgaccacctccctctatag

SEQ ID NO: 4619 - DNA, 372 bp, synthetic construct
  misc_feature 1..372: note = source = /note="Description of Artificial Sequence: Synthetic coding sequence"
  source 1..372: mol_type = other DNA
atggcgggacatttggcgtccgattttgctttttcaccccctccaggtggcggaggggatgggcctgggggtcctgaacccggttgggttgatccccgtacttggctgagttttcagggcccacccggaggtcctgggatcggccctggtgtggggccagggtcggaagtatgggggatccccccttgccccccaccttatgagttttgcggtggaatggcctattgcggtccccaggttggggtgggcctggtgccccagggcggactcgagacaagccagcccgagggggaagcgggtgtaggagtcgaaacccccatgggacctccacgctctcccgcaccacacccgttccccttccctctactgtag

SEQ ID NO: 4620 - DNA, 372 bp, synthetic construct
  misc_feature 1..372: note = source = /note="Description of Artificial Sequence: Synthetic coding sequence"
  source 1..372: mol_type = other DNA
atggccggtcacctggctagcgatttcgcgttctctcctccacccggaggtggaggagatggacccggtggtccagagcccggatgggtggacccccgtacctggttgagcttccagggtcctccagggggtcccggaattggacctggagtgggaccagggtcggaagtttggggaatacccccttgccctcctccgtacgagttttgtggaggaatggcctactgcggacctcaagtgggcgtgggtttggtgccccagggtggccttgagactagtcagccggagggagaggcaggcgtgggggtagagaccccgatggggcctccccgatcacctgcgcctcatccttttcccttcccactcctgtag

SEQ ID NO: 4621 - DNA, 2079 bp, synthetic construct
  misc_feature 1..2079: note = source = /note="Description of Artificial Sequence: Synthetic coding sequence"
  source 1..2079: mol_type = other DNA
atggggactgtttccagtcggaggagttggtggcctttacctctgctccttttgctgctgttactcctcggcccagcaggcgctcgggctcaagaggacgaagacggcgactacgaagagctggtgctggctcttaggtccgaggaagacggcttagccgaggctcccgaacacggcaccaccgccacattccatcgatgtgcaaaagatccatggagactgcccggtacgtatgtggtagtcctgaaggaggaaactcacctgagtcaatccgagagaacagcccgtcggctgcaggcccaggccgctcggaggggctaccttacgaaaatcctgcacgtctttcatggactgttacccggattcctagtgaagatgtccggggacctgcttgaacttgccttgaagctgccacatgtggattacatagaggaagactcttctgtatttgctcagtccatcccatggaatttggaacgtattaccccaccacgctaccgagcagatgagtaccagccaccggacggaggttcactggtcgaggtttacttgctggacacatcaattcagtcagatcatagggagattgagggcagagtaatggtgaccgattttgagaacgtgcccgaagaagacgggaccagattccatcgccaagcctctaagtgcgatagccacggcactcatctggctggcgtggtttcgggacgggatgcgggagtggcaaagggcgcatcgatgagaagcctgcgggtcctgaactgtcagggcaaagggactgtgtctggcactctgatcgggctggagttcattaggaagagtcagctggtacagcccgtgggtcccttggtcgtgctgctccccctggcaggaggctatagtcgagtgttaaatgcggcatgtcaaaggctcgccagggccggtgtcgttttggtcacggctgctggcaacttcagggatgacgcatgtctgtacagccctgcaagcgccccagaagttatcaccgtcggcgcaacaaacgcccaggatcagcctgtgaccctaggcactcttggtactaactttggcagatgcgtggatttgttcgcccctggagaggacattattggggcttcttccgactgctctacctgttttgtgtctcagagcgggaccagccaggcagctgctcacgtcgcaggcatagccgctatgatgctttccgccgaacctgaactgacactcgcagagctgcgccagcggttgattcacttttctgccaaggacgtcattaacgaggcgtggttccccgaggatcagagagtgttgacacctaatttggtggcagctttgccgccaagcacacatggcgctgggtggcaattattctgccggaccgtatggtctgcccattccggcccaactagaatggctacggccgtggcacgttgcgcaccggacgaggagctgctatcctgcagctcattttcacgttctggcaaacgcagaggcgaaagaatggaggcccaagggggaaaactggtctgcagagcccataacgcatttggaggtgaaggcgtctatgccatcgcacggtgttgccttctgccgcaagccaactgcagtgtccataccgcaccccctgcagaggcctccatgggaacccgggtgcattgtcaccagcaggggcacgtgctgacgggatgtagctctcactgggaagtagaggatttggggacgcacaaacctcctgtcctcaggccacgaggccaacccaatcagtgcgttggccatcgtgaagcctctatacacgccagttgttgccatgctccgggactggagtgtaaggtcaaagagcatggcatacctgcccctcaggagcaggttaccgtggcttgcgaagaaggttggacactaaccgggtgttccgctctaccagggacgtcccacgtgttgggtgcatacgctgtagacaacacctgtgtcgttcgctcccgggacgtgtcaacaaccggctctacttctgagggcgcagtcactgccgtggcaatctgttgtcggagccgacatctggcacaagcctcacaggaattgcagtag

SEQ ID NO: 4622 - DNA, 618 bp, synthetic construct
  misc_feature 1..618: note = source = /note="Description of Artificial Sequence: Synthetic coding sequence"
  source 1..618: mol_type = other DNA
atgggaacagtgtcctcaaggagatcttggtggcccttacccctgctcctgctccttcttcttctcctgggtcctgcgggagcaagagctcaggaagatgaggacggtgactatgaagagctggtgctggcgctcagatccgaagaagatggactagctgaggcaccagaacatggaacaaccgccacattccatcgatgtgccaaggatccttggaggctgcctgggacatacgtggtggtcttgaaggaggagacccatctgtctcagtcagaaaggacagcacgacggctgcaggcacaagctgccaggcgcggatacctgactaaaatacttcacgtctttcatggcttactgccaggcttcctggttaaaatgagcggtgacctgctggaacttgcgctcaaactcccacacgtggattatattgaggaagacagctccgttttcgctcagtctatcccctggaatctcgagcgcattacaccaccgagatatagggccgatgagtatcagcctcctgcctatctcgaagaccattgtgggggacatcggggtgctgtacagatggctctgcagaagacccaggagacgctaggccaggaacaattcgattag

SEQ ID NO: 4623 - DNA, 801 bp, synthetic construct
  misc_feature 1..801: note = source = /note="Description of Artificial Sequence: Synthetic coding sequence"
  source 1..801: mol_type = other DNA
atggtgactgacttcgagaatgtccctgaagaggacggaactcgtttccaccgccaggcatctaagtgtgactcacacgggacacatctggccggagtggttagcggcagagatgcaggcgtggcgaagggagctagcatgagatccctacgcgtgctcaactgtcagggtaagggtactgtcagcgggactctcatcggtctggaatttataaggaagtcacaactggtgcagccagtcggtcctctggtggtgctgctgcccttggccggtgggtacagtagggttctcaacgcagcttgtcagcggctggctagagcaggcgttgtcctcgtgacagccgctgggaattttcgagatgacgcatgcctgtacagccccgcttctgcgccagaagtgatcacagttggagctactaatgcacaggaccaacctgtgactctggggaccctggggaccaactttggaaggtgcgttgatctgtttgcgccaggggaggacatcattggggcttcctctgactgttccacctgttttgtctcacagtccggcaccagtcaagcagctgctcatgttgctggaattgcggctatgatgctgtccgcagaacccgagcttacacttgcggagctcaggcaacgcttaattcactttagtgccaaggacgtaattaacgaggcctggtttcctgaagatcaacgggtgggatcctgctttgctggactgtacgggcagcacactcgtggactgcacggttggccacagccaagcccggctgctccccagatgcggtcctgttag

SEQ ID NO: 4624 - DNA, 3972 bp, synthetic construct
  misc_feature 1..3972: note = source = /note="Description of Artificial Sequence: Synthetic coding sequence"
  source 1..3972: mol_type = other DNA
atggaagatgggggattaaccgcctttgaggaggaccagaggtgtttgtcccagtccctcccgctgcctgtgtctgccgaaggccctgccgcacagacaacagcggaaccgagtcgcagttttagcagcgcccacaggcacttgtcacggcgtaacggcttgtcccgcctctgccagtctcgaactgccctctcagaggatcggtggtcttcctattgcctatcttcactggccgcacaaaatatctgcactagcaaacttcattgccctgccgcacctgagcataccgatccttctgagcctagaggcagtgtgagctgttgctcacttctgcgaggtctgtcgtcaggctggagctctcccctcctgcctgcacctgtatgcaaccctaataaagctatattcacggtggatgctaagacgacagagatactcgtggccaatgataaagcctgtgggctgctgggatatagttctcaggatctgattgggcagaaactaactcagtttttcctgcgcagcgactcagacgtcgtcgaagctctgtctgaagagcatatggaggctgacggtcacgccgctgtggtgtttggaactgttgtggacataatttctcggtcaggagaaaagatcccagtgtctgtctggatgaaacgcatgcgccaggagaggagactgtgctgtgttgtggtactggagcctgtagagcgggtgtctacttgggtggccttccagagcgacgggaccgtcactagctgtgattctcttttcgcacatttgcacggttacgttagcggcgaggatgtagccggtcagcacattacggacctgatacccagcgtgcagctgccacctagtggccagcacattccaaaaaacttaaagattcaaaggtctgtgggcagagctagagacggtaccacttttccactgtcactcaaactgaagagccagccgagctctgaagaggctaccacaggagaggcagctcctgtttcagggtacagagcaagcgtttgggtgttctgtactatttcaggattgatcacactcctgccagacggaaccattcatgggattaatcactcgtttgccctcacattattcggctatggaaaaacagagcttttgggtaaaaacattacttttttgattccagggttctactcctacatggatctcgcatataatagcagcctgcagctgcccgatcttgctagctgcttggacgtaggtaacgagtctggctgcggggagcgcactttggacccctggcagggccaggaccctgccgaaggaggccaagatcctagaataaatgtggttctcgccggagggcacgtggtaccacgggatgaaataagaaaactgatggagtcccaggatatttttaccggaacgcaaactgagttaatcgctggcggacaactgttgtcctgcctgtccccccagcctgctccaggtgtggacaacgtccctgagggaagcctgccggtacacggcgaacaggccttgcctaaggatcaacagataaccgcgctcggccgtgaggagcctgtggccatcgagagtcccggacaggatttactcggggagtcaagaagtgaaccagttgacgtgaagccgttcgcatcctgcgaggacagcgaagccccagtgccggctgaagacggtggctctgatgctggaatgtgcgggttgtgccagaaagctcagcttgagcgaatgggtgtatctggtccgtctgggtccgatctgtgggccggtgcagctgtcgccaaacctcaggccaaggggcagcttgcaggaggaagtctgctaatgcattgtccctgctacgggagcgaatggggcttgtggtggcggtcacaagatttggccccatccccctccggaatggcaggtttatccttcggaacacctaccttagatgaaccatggttaggggtcgagaacgatcgcgaagagctccagacttgcttgatcaaagaacagctctctcagttgagcctggctggggctttagacgtgccacacgccgaacttgtcccgactgaatgtcaggccgtgacagctcctgtttcatcctgtgacctagggggaagggatctttgcgggggttgcactgggtccagcagtgcctgctacgccctggctactgacctacccggagggctggaagctgtagaagcccaggaagttgatgtcaatagcttctcctggaatctgaaggagttattcttctcagatcagacggatcagacctcgtcaaactgcagttgcgctacctccgagctcagagagactccttcctccctggcggtgggaagcgaccccgacgtggggagcctgcaagagcagggttcctgcgtgctggatgacagagaactcttgcttctgactgggacctgcgtggatcttgggcaaggtagacggttcagggaaagctgtgtgggtcatgaccctactgagcccctggaggtctgcctagtcagcagcgagcattatgctgcttctgacagggagagcccaggacatgtcccatccaccctggacgcaggtcccgaggatacatgccctagcgccgaggaacctcgccttaatgtgcaagtcaccagtacaccagtcattgttatgcggggagccgcaggtctgcagcgggaaatccaggagggcgcttatagcggatcttgttatcatcgagacggcctgaggttgtccattcaattcgaggtgcgcagggtcgagttacaggggccaacaccattattctgttgctggctggttaaggacctgttacacagccagcgcgactcggcagcaaggacccgcctgttcctcgccagcttacccggatcaacccactctaccgctgcagagctcaccggtccctctcttgtcgaagtgcttcgagccagaccatggtttgaagaaccaccgaaggctgtggaattagagggtttggctgcatgcgaaggtgagtattcacagaagtatagcacgatgtcaccccttggatccggagccttcggcttcgtttggaccgcagtcgacaaggaaaaaaataaggaagttgtggtgaagtttattaaaaaagagaaggtccttgaggactgctggatcgaagatcccaagctggggaaagtgacgctggaaatagccatcctctcccgggttgaacatgccaacattatcaaagtcctcgatatttttgaaaaccagggatttttccagctcgtgatggaaaagcatggcagcggcctggacttgttcgccttcattgataggcacccacgtttagatgagccattggcttcttacatttttcgccaactagtttccgccgtcggctatctgaggctgaaagatattatccacagggacataaaggatgagaatatagtcattgcagaggactttacaataaagttaatcgacttcgggagcgctgcttatctcgagaggggcaaattgttctacacattttgcgggacaatcgagtattgtgctccagaggtgttgatgggaaatccatatagaggacccgaactggaaatgtggagcctaggtgttactttatacacattggtctttgaagagaatcctttttgtgagctcgaagagaccgtggaagcagctatacacccaccttatctcgtgagtaaggaactcatgtccttggttagtgggctgttgcagcctgtacccgagaggcggaccaccctggagaagctcgttacagatccctgggtgactcagccagtgaatctggccgactatacttgggaggaggtgttcagggtgaataagccggagtctggagtactttcagctgcctcactagagatgggcaacaggagcctcagtgacgtcgcccaggcgcaggaattatgcggtggccctgtgcccggagaagccccaaatggacaggggtgccttcaccctggagaccccaggttactcacttcttag

SEQ ID NO: 4625 - DNA, 1488 bp, synthetic construct
  misc_feature 1..1488: note = source = /note="Description of Artificial Sequence: Synthetic coding sequence"
  source 1..1488: mol_type = other DNA
atgtggcaactgaccagcctcttactgttcgttgcaacatggggtatttcgggcacccccgcacccttggatagtgtattctcgtcttccgagagagcacatcaagtgctgcggattcggaaacgtgctaattctttccttgaggaactcagacattcctcattggagcgggagtgcattgaggagatctgcgactttgaggaagccaaagagatcttccagaacgtcgacgacaccctggccttctggtctaaacacgtcgatggggaccagtgtctggtactaccacttgaacacccctgcgccagtttatgctgcggtcacgggacatgcattgacggcattgggtcattttcctgcgattgcaggtccggatgggaaggtagattttgccaaagaggggagggcgaacggtggatgctagcagggggaggagccggactggggcctggatgggggcgaggcacctccacgtcctgcccaaggccgccactaccagctgaagtttcattcctgaattgctcgctcgacaatgggggttgcacccattactgtctagaggaagtgggatggcggagatgcagctgcgctccaggttataagctaggtgacgatctgctccagtgccacccagccgttaagtttccatgtggaagaccctggaaacggatggagaagaaaagatcgcatctgaagagagacacagaagaccaggaggatcaggtcgacccccgactgatcgatggtaagatgacacgaaggggcgattcaccatggcaggtggtgctactcgattctaagaagaagttggcgtgtggggcagtcctcatccacccttcctgggttttgaccgctgcgcattgcatggatgagtctaaaaaactgcttgtccggctgggggagtatgatctccgcaggtgggagaagtgggagctggacctggatattaaggaggtctttgtgcacccgaattattctaagagcacgaccgacaacgatatcgctctgcttcacctcgcgcagccagccaccctgagccaaacgatagtacctatctgcctgccagatagcggcttggctgagagagagcttaatcaggccggtcaggaaaccctggtgacaggatggggctatcacagctcccgggagaaggaggccaagcgaaacaggacgtttgtcctgaattttatcaagatccccgtggtgccccacaatgaatgttctgaagtgatgtcaaacatggtatccgagaacatgctttgcgccggaatcctgggagatcggcaggacgcttgtgaaggcgacagcgggggtcccatggtggcaagtttccatgggacttggtttctagtgggcctggtttcatggggagagggatgcggactcttgcataattatggtgtatatacaaaggtgagccgctatttagattggatccatggacatatccgggacaaggaggctccccagaaatcctgggccccatag

SEQ ID NO: 4626 - DNA, 1386 bp, synthetic construct
  misc_feature 1..1386: note = source = /note="Description of Artificial Sequence: Synthetic coding sequence"
  source 1..1386: mol_type = other DNA
atgtggcagcttacaagcctacttctgttcgtcgcaacctgggggataagtggaactccagccccattggattctgtattctccagctctgagcgggctcaccaggtcttgagaattcgcaaacgagccaatagcttccttgaagaactaaggcacagcagcctcgagcgggaatgtatcgaagaaatttgcgacttcgaggaggcaaaagaaatcttccagaacgtggatgacacattggccttctggagcaagcacgtcgatggggaccagtgtctggtgttacccttggagcatccttgcgcctccctgtgctgcggtcacggtacttgtatcgacggcattggaagtttcagctgcgattgtcgctcagggtgggaaggtagattctgtcagcgagaagtgagttttctcaattgcagccttgataatggtggctgcacccattattgtctagaagaggtcgggtggcgtagatgctcttgcgccccaggatataagttgggcgatgaccttttgcaatgtcacccagcggtcaagtttccctgcggcaggccttggaagagaatggaaaaaaaacgtagccatctgaagcgcgatacagaagaccaggaggatcaagtggaccccaggctcattgacggcaagatgaccaggcgcggagactcaccctggcaagtggtcctactcgattccaagaaaaagttagcctgtggggcagtgttgatccacccctcctgggtacttactgcagcccattgcatggacgagagcaagaaactgctagtgcgactgggtgaatacgacctacgtaggtgggagaagtgggagctggacttggatattaaggaggtgttcgtccatcctaattacagcaaaagcactactgataacgatattgctttgctccacctcgctcagccggctaccctgtcgcaaaccatcgtgccaatttgtttgcccgacagcggcctggcagagcgcgaactaaaccaggctggtcaggagacactggtcacaggctggggctaccattcatcgcgggagaaggaggctaagcgcaacaggacctttgtactgaactttattaaaattcctgttgttccgcacaatgagtgttctgaagttatgtcaaacatggtcagtgaaaatatgctttgtgccggtatcttaggcgatcggcaggatgcctgtgaaggtgacagcgggggtcccatggtcgcaagctttcacggaacctggtttctcgtggggcttgtcagctggggtgaaggctgcggtcttcttcacaactacggtgtgtacacaaaggtttcccgatacttagactggattcatgggcacatacgcgacaaggaagctcctcagaagtcatgggcaccttag

SEQ ID NO: 4627 - DNA, 351 bp, synthetic construct
  misc_feature 1..351: note = source = /note="Description of Artificial Sequence: Synthetic coding sequence"
  source 1..351: mol_type = other DNA
atgtggcagctgacctccttgcttctgttcgtggctacttggggaattagcggtactcccgctcccctggattctgtttttagcagcagcgagcgagcccaccaagtcctccgcatcagaaagagagcaaacagcttcctcgaagagctgcgccacagcagtcttgaacgagagtgtatcgaggagatttgcgacttcgaagaggccaaagagatttttcagaacgtcgatgacacgctggccttctggtccaaacacgttgatggcgatcagtgtctagtgctcccgctggaacacccatgtgcctctctctgttgcggccacggcacatgtatcgacggcatcggatag

SEQ ID NO: 4628 - DNA, 381 bp, synthetic construct
  misc_feature 1..381: note = source = /note="Description of Artificial Sequence: Synthetic coding sequence"
  source 1..381: mol_type = other DNA
atgtggcaactgaccagcctgctcttatttgttgctacatgggggatatctggaactccagcgcctctggatagtgtgtttagctccagcgagagggcacaccaagtgctgcggatccggaagcgggcaaacagctttctggaagagctccgccactcctcattggaaagagagtgtatcgaggaaatctgtgattttgaggaggcgaaggagatttttcagaatgttgacgatacactcgctttctggtctaagcatgttgatggtgaccagtgcttagtgctgccgctggagcacccatgtgcatccctgtgctgtgggcatgggacctgtatcgacggtatcggaagcttctcctgcgactgtaggtccggttggtag

SEQ ID NO: 4629 - DNA, 1551 bp, synthetic construct
  misc_feature 1..1551: note = source = /note="Description of Artificial Sequence: Synthetic coding sequence"
  source 1..1551: mol_type = other DNA
atggccgcaggcaggagaacttgctctatatccactactaggccctgcgcatcggctagtcggatgtggcaacttaccagtctgctattgtttgtcgctacgtggggaatctcaggcacaccagctcccttggacagcgtgttctcatctagtgaacgagcccatcaagtgctccggatcaggaagagggccaactcttttcttgaggagctgcggcacagtagcttagagagagaatgcatcgaggagatctgcgattttgaggaagctaaagagatctttcagaacgtggacgacactctcgccttctggtcaaagcatgtagatggcgaccaatgcctggttctacccttagaacatccatgcgcaagtttgtgctgtgggcatggcacgtgtatagacggcatcggatctttctcttgcgactgccgatccggatgggagggccgtttttgccaacggggtgagggagagagatggatgctggccggtggaggcgctgggctgggtcctggctgggggcgaggcacctccactagctgcccacggccaccactcccggcagaagtctcttttctgaattgctccctggataacggcggatgtacacactactgtttggaagaggtgggatggcgcagatgtagttgcgcgcctggatacaagctgggagacgatctgcttcagtgtcatcctgccgttaagttcccttgcgggaggccctggaagagaatggagaaaaagagatctcacctcaaaagggatactgaggatcaagaggatcaggtagaccctcgccttatagatggtaagatgactcggcgaggggattcaccatggcaggtggtcctgttagattccaagaaaaagctggcctgtggggctgttctaatccatccaagctgggtgcttactgccgctcattgcatggacgagtctaaaaaactcctggtgagattgggtgagtacgatctgagacgttgggagaaatgggagctggacctcgatataaaggaagtgttcgtccacccgaattacagcaagagcactactgacaacgacattgccctgctgcatctggcacaacctgccactttaagtcagaccattgtcccaatctgccttccggatagcggcctggcagaaagggagctgaatcaggccggacaggagactcttgtgacgggctgggggtatcacagctccagagaaaaagaggccaaaaggaaccgcacatttgttcttaattttatcaagattcccgtggtccctcataacgagtgcagcgaagtgatgtccaacatggtgagcgaaaacatgctatgtgctgggatcttgggcgatcgccaggatgcctgtgaaggtgactccggcggacccatggtggcttcgtttcacggaacctggttcttggtgggtcttgtgtcttggggagaaggctgcggactcttgcacaattatggagtttacacgaaggtctcacggtacctcgattggatacacggccatattcgcgataaggaggccccacagaagagctgggcaccgtag

SEQ ID NO: 4630 - DNA, 1263 bp, synthetic construct
  misc_feature 1..1263: note = source = /note="Description of Artificial Sequence: Synthetic coding sequence"
  source 1..1263: mol_type = other DNA
atgtggatgacacactggcctagcggaccttccacatcaacagtgacctcagcctggagctgcccttggagtacccgagcccctgcctgcgcggcaggcactgcgcgagcttccaccgcctcagcggcatctgcggctactgcggctgcggctggcagggctgctagcgccagtgctgtgcggggaagaggcggatgctggaggggcggtgcgggacttgggccaggttggggacgaggcacttccactagctgcccgagaccacccttaccggcagaagtgtccttcctgaattgttccctggataatggcggatgcacacactactgccttgaagaagttggctggaggagatgttcttgtgcacccggttacaagctcggagatgatctgctgcagtgtcatccggctgttaaattcccgtgcgggcgaccatggaagcgcatggagaagaaaagaagtcacctgaaaagggacaccgaagatcaggaggaccaagtcgatccaagattaattgatggcaagatgacccggaggggcgacagcccgtggcaggtagtcctgctggatagcaagaaaaaactggcatgcggagctgtcctcattcaccctagttgggtcctgaccgccgcacattgcatggatgagtcaaaaaaactactcgtgcgactgggcgagtatgatctgcggagatgggagaagtgggagctggacctcgatatcaaggaggtgttcgtccaccccaactattcaaagagcactaccgacaacgacattgccctcctccatttggcacaacccgctactctcagccaaaccatcgttcctatttgcttgcctgacagcggccttgccgaacgcgagctcaaccaggctggacaggaaacccttgtcaccggttggggttaccactcctcccgagaaaaggaagccaagcgcaaccgcaccttcgtgttgaacttcatcaaaatcccggttgtaccacacaacgagtgttcggaggtcatgtccaatatggtgtctgaaaacatgttatgcgccggtatcctgggggaccggcaggacgcatgtgaaggtgatagtggcggaccaatggttgcctccttccatggaacgtggttcttggtggggctagtgtcatggggagagggctgcggccttctccataactacggagtttacaccaaggtgtccaggtatttagactggatccacggtcacattagggacaaggaagccccacagaagagctgggcgccttag

SEQ ID NO: 4631 - DNA, 354 bp, synthetic construct
  misc_feature 1..354: note = source = /note="Description of Artificial Sequence: Synthetic coding sequence"
  source 1..354: mol_type = other DNA
atgcctcgcctgttcttttttcacctacttggcgtctgcctgttgctgaatcagttctcgcgcgctgttgcagatagctggatggaagaagtgattaagctgtgtggcagggaactggttagagcgcagatcgccatctgcggcatgagcacctggtcaaaaaggtcactctcacaggaggacgctccccaaacccctaggcctgtggccggtgattttatccagacagtgtccctgggcatctccccagatggaggcaaagcactccgtactggtagctgctttacaagggaattccttggcgcactttccaagctctgccatcccagttcaactaagatccagaagccttag

SEQ ID NO: 4632 - DNA, 558 bp, synthetic construct
  misc_feature 1..558: note = source = /note="Description of Artificial Sequence: Synthetic coding sequence"
  source 1..558: mol_type = other DNA
atgcctagacttttctttttccacctactgggggtgtgcctgctgctgaaccagtttagcagggccgtggccgactcatggatggaggaggtcatcaaactgtgcggcagagaacttgtccgtgcacagatagccatatgcggcatgtccacctggtccaaaagatctctgtctcaagaggacgcgcctcagacgcctcgcccagtagcagaaattgttccaagctttatcaacaaagatacagagaccatcaacatgatgagcgaattcgttgctaacttaccacaggaactcaagttaacactgagcgagatgcagccagcccttcctcaactgcagcagcatgtgccagttctcaaggactcatctctgctgttcgaggaattcaaaaaactgattcggaacaggcagtccgaggcggcagatagctctcccagtgaacttaagtatctggggttagacacgcacagtagaaaaaagcgtcagctgtatagcgcactggccaacaagtgctgtcacgttggttgcaccaagcggtccttggccaggttctgttag

SEQ ID NO: 4633 - DNA, 1047 bp, synthetic construct
  misc_feature 1..1047: note = source = /note="Description of Artificial Sequence: Synthetic coding sequence"
  source 1..1047: mol_type = other DNA
atgaacggaactgagggacctaacttttatgtgcctttcagcaatgccactggcgtggtaagatccccctttgaatatccacagtattacttggcggagccatggcaatttagcatgctcgctgcatacatgttcctgctcatcgtcttgggtttccctatcaacttcttgaccttgtacgtgaccgtacagcataaaaaactcaggactcctctcaactacatcctgctgaaccttgctgtggctgacctattcatggtcctgggcggtttcacaagtacattgtacactagcctgcacggttactttgtgtttggtcccacaggctgcaatttggaaggatttttcgccactctgggaggcgaaattgcgctttggagcctcgttgtgttagcaatcgagaggtacgttgtggtttgcaagccaatgagcaacttccggttcggtgagaaccacgctatcatgggagtcgcatttacttgggtgatggccctcgcttgcgctgcaccccctttggcaggatggtcccggtatattccagaaggtctacagtgttcatgcggaatcgattattataccctgaagccagaagttaacaatgaaagctttgtgatctatatgttcgttgtgcactttaccattcctatgataatcattttcttttgctacggccagctagtcttcactgtgaaagaagcagcagctcagcagcaggaatccgcgactacccagaaagcagagaaggaagttacacgcatggttattattatggtcatcgcctttttaatctgttgggtgccatatgcttcagttgccttttatatttttactcaccaagggagcaactttgggcctatattcatgacaataccagctttcttcgccaagtcagcagccatttacaacccagtaatctacatcatgatgaacaagcaattcaggaactgcatgctgacaaccatttgctgcggtaaaaatcccctcggagacgacgaggcatcagctactgtcagtaagactgagacctctcaagtggccccagcatag

SEQ ID NO: 4634 - DNA, 1257 bp, synthetic construct
  misc_feature 1..1257: note = source = /note="Description of Artificial Sequence: Synthetic coding sequence"
  source 1..1257: mol_type = other DNA
atgcctagctcggttagctggggaatcctccttcttgccggtctgtgctgcctggtccctgtcagcctggcagaagatccgcagggagacgccgcacagaagactgacacttctcatcacgatcaagaccacccgacatttaataagattaccccaaacctcgccgagttcgccttctccttgtatcgccagcttgcccaccagtcgaacagtaccaacattttcttcagccctgtgtccatcgcgaccgccttcgcaatgttatccctcggcacaaaggctgatacccacgacgagattctcgagggcctaaactttaatctcactgaaatccctgaagctcagatccacgagggattccaggaactccttcgtacgctgaaccagcccgacagccagctgcagttgaccacgggaaacggcctgtttctgtctgagggtcttaagcttgtggacaagtttctagaagatgtaaaaaaactgtatcactcggaggcattcactgtcaacttcggggatacagaggaggccaagaaacagattaatgactatgtcgagaagggcactcagggcaagatcgtggacttggtcaaagaactcgacagggatacagtgtttgctttagtcaattacatttttttcaaagggaagtgggaaaggccctttgaggtgaaggataccgaggaagaggactttcacgtcgaccaggtgacaacggtgaaagtgcctatgatgaaacggctcggcatgttcaatattcagcactgcaagaagttgtccagctgggtgctgcttatgaaatatctaggcaatgcaaccgccatatttttcctgcccgatgaaggaaagttgcaacatttggaaaacgagctgacacacgatataatcaccaagtttcttgagaacgaggatcgtcgctcggccagcctgcacctgccaaaactgtcaatcaccggcacatacgatctcaagagcgtgctgggccagttagggatcacaaaggtattttctaatggtgcagacctcagcggagtcacggaagaagcgcctctgaaactgagcaaggctgtgcataaggcagtcctgactatcgacgaaaagggtactgaggccgcaggggctatgttcctggaagccattcccatgagcattcccccagaagtgaagttcaacaagcctttcgtattcctgatgatagaacagaacacaaagtccccattgttcatggggaaagtggtgaatcccacgcagaagtag

SEQ ID NO: 4635 - DNA, 1257 bp, synthetic construct
  misc_feature 1..1257: note = source = /note="Description of Artificial Sequence: Synthetic coding sequence"
  source 1..1257: mol_type = other DNA
atgccctcttctgtgtcctgggggatcctgttgctggcgggtctgtgttgcctggtgcccgtttccttagccgaggacccacagggcgacgccgctcagaagacagatacctcacatcacgaccaggaccaccccacgtttaataaaattacgcctaacctggcagaattcgctttctctctgtatcgtcagcttgcccatcaatcaaactctacgaatatttttttttcccccgtatccatagccaccgcttttgcaatgctgtcccttggcaccaaagccgatacccatgatgaaatcctggagggtctgaattttaacctcaccgaaatcccggaagcgcagatccacgagggcttccaggaattgctgcgcaccctgaaccagcccgatagccagcttcagctgacgaccgggaatgggctgtttctctctgaagggttaaaactggttgataaatttctggaagacgtgaagaaactttaccacagcgaggcgttcaccgttaactttggcgacaccgaggaggcaaaaaaacagattaatgactacgtggaaaaaggaacccaggggaagatcgttgatctagtcaaggaactggacagggatactgtgttcgccctcgtaaactacatattctttaagggcaaatgggaacgcccttttgaggtgaaggatacagaagaggaggactttcacgtggatcaggtgacaactgtgaaggtacctatgatgaagagactcggtatgttcaatattcaacattgcaagaaactgagtagctgggtactccttatgaagtacctcggtaacgccaccgcaatcttttttctacctgacgaggggaagcttcagcacctggaaaatgaactcactcatgatattataaccaaattcttagagaacgaagatagaaggagcgcatccctgcacctgcccaaactgtcaattacagggacatacgatttaaaatcggtgctggggcagttagggataaccaaagtattctccaatggcgcagacctctctggagtcactgaggaggccccacttaagctttctaaggcagttcacaaggccgtcttaactattgacgaaaagggcacagaggccgctggtgccatgttcctggaggccatccctatgtcaatcccacctgaggtgaaatttaataaaccttttgtgtttctgatgatagaacaaaataccaaatcacctctgtttatgggcaaagttgttaacccaacccagaagtag

SEQ ID NO: 4636 - DNA, 1257 bp, synthetic construct
  misc_feature 1..1257: note = source = /note="Description of Artificial Sequence: Synthetic coding sequence"
  source 1..1257: mol_type = other DNA
atgcctagcagcgtgtcctgggggattctattgcttgcgggtctctgttgtttagtgcctgtatcgctggcggaagatcctcagggcgacgccgctcagaagacagacacttcccatcacgaccaagatcatcccacattcaataagatcaccccgaatcttgccgaatttgcattttccctgtacagacagctggcacatcagtccaatagtacaaacatattttttagccctgtgagcattgccaccgccttcgccatgctgagcttgggcactaaggccgatactcatgacgaaatccttgagggcctgaacttcaatctgacagagattcccgaggcacagattcacgaaggcttccaagaattgctgcgtaccctgaatcagcccgattcccagctccagttgaccacagggaatgggctgttccttagcgaaggcttgaagcttgttgacaagttcctcgaagatgtcaaaaaattataccattctgaggccttcacagtcaacttcggcgataccgaggaagcgaagaagcaaatcaatgattacgtggagaagggcactcagggtaaaattgtggatctggttaaggagctcgatagggataccgtcttcgccctggttaattacatcttctttaaaggtaagtgggaaagacctttcgaagtgaaagacaccgaagaagaagatttccacgttgatcaggttacaactgtgaaggtgcctatgatgaaacgcctgggcatgtttaatatccagcactgtaagaaactgtccagttgggtgttattaatgaagtatttgggaaacgccaccgcaattttcttcctgcctgatgaaggcaagctccaacacctggagaacgagcttacacatgatattataacaaaattcctcgaaaatgaggatcggcgtagtgccagcttgcacctgcctaaattgagtatcactgggacttatgatctcaagagtgtgcttggccagctgggaatcacaaaggtcttctccaatggtgctgacctcagtggagtgacagaagaagcacctctgaagttatcgaaggcagtgcacaaggcggtactcacaattgacgagaagggaacagaagcagccggagcaatgttcctcgaagcaatccctatgtcgattcctcccgaagtcaagttcaataagcctttcgtttttctgatgatcgaacaaaatactaagtccccgttgtttatgggtaaagtggtgaacccaacccagaaatag

SEQ ID NO: 4637 - DNA, 1080 bp, synthetic construct
  misc_feature 1..1080: note = source = /note="Description of Artificial Sequence: Synthetic coding sequence"
  source 1..1080: mol_type = other DNA
atgccctcaagtgtgtcatggggaatcctcctcttggcaggcctttgctgtttggtccctgtcagtctcgcggaggacccccagggtgacgctgcccaaaagacagatacctctcaccacgatcaggaccatcctacattcaacaagatcacccctaacctggcagagtttgccttctctctgtatcgacaattagcacaccagagcaattcaaccaatatcttcttctcccccgtgagcatcgcgacagccttcgcgatgctgagtcttggtacaaaagcagatactcatgacgagattctggagggattgaatttcaatcttaccgagattcctgaggcacagatccatgagggattccaggaactgctgaggacgctgaaccagcctgacagccagctgcaattgactacaggtaacggcctgttcctatccgaagggttgaagctagtggacaagttcctggaggatgtgaagaagctgtaccactcggaagcatttactgtcaactttggggacactgaggaggccaaaaagcagatcaacgattacgtcgaaaaaggtacccagggcaagattgtcgacctggtgaaagaactcgatcgcgataccgtgttcgctctggtcaattacattttcttcaaaggtaaatgggaaaggccctttgaggtcaaggacaccgaagaagaggattttcatgtcgaccaagtcaccactgtgaaggtacctatgatgaagcgtctcggaatgttcaacattcagcattgtaagaaactatcatcctgggtccttctgatgaaatacttaggaaatgcgacagctatttttttcttacccgacgaaggcaaactgcagcacttagagaatgagctgacacatgatataataaccaagtttcttgagaacgaggatcgtcgctctgcctcgctgcacctgcctaagctttccattaccggcacttacgacctgaagtctgtcttgggtcaactcggaatcaccaaggtgtttagtaatggggctgatctgtctggcgttaccgaagaagcccctctaaagctaagtaaggtgcgcagcccctag

SEQ ID NO: 4638 - DNA, 1257 bp, synthetic construct
  misc_feature 1..1257: note = source = /note="Description of Artificial Sequence: Synthetic coding sequence"
  source 1..1257: mol_type = other DNA
atgccctccagtgtctcctgggggatcctgctcctcgctggcctgtgctgcctggtgccggtgagtctggccgaggacccacaaggagacgcagcccagaagaccgatacttctcatcatgaccaggatcatcccactttcaataagatcacccctaatctggccgaattcgccttctccttgtaccgtcagctagctcaccaaagcaatagcaccaatatattcttctcccccgtctccatcgccactgccttcgccatgctgtctctcggcacaaaggctgatacacatgacgaaatccttgagggcttgaattttaacctgacagaaattccagaggcccagatccatgaaggattccaggagcttctgaggactctgaaccagcctgactctcagttgcagctgaccaccggtaacggactgtttctgtcagaaggcttgaagctcgttgacaagtttctggaggatgtcaagaaactgtaccacagtgaggcgtttacagtgaatttcggcgataccgaggaggcaaagaagcagataaacgactacgttgaaaagggaacacagggcaagatagtagatctggtgaaagagcttgaccgcgacacggtgtttgctctcgtaaattatatattcttcaaaggaaagtgggagcgaccattcgaagtgaaagatacggaggaagaagatttccacgtggatcaggtgactacggtgaaggtgccaatgatgaaaaggctgggcatgttcaatatccaacactgcaaaaaactgagttcatgggtcctgctcatgaagtacctggggaatgccaccgctatctttttccttccagacgagggaaagctgcaacacctcgagaacgagttgacccatgatataatcaccaagtttctggagaatgaagatcgtcgctcagcttctttacacctccccaagttgtctattaccggaacatatgatctaaaaagcgttttaggccagctcgggataaccaaagtcttctctaacggggcagacctaagcggtgttaccgaggaggctcctctgaagctatccaaggccgtacacaaggccgtcttgacgatcgacgagaagggcaccgaggctgcgggtgctatgtttctggaggctatacccatgtcaattccccctgaggtgaagtttaataaaccattcgtttttttgatgatcgaacagaatacaaaatctcccttgtttatgggcaaggtggtgaacccgacccagaagtag

SEQ ID NO: 4639 - DNA, 1257 bp, synthetic construct
  misc_feature 1..1257: note = source = /note="Description of Artificial Sequence: Synthetic coding sequence"
  source 1..1257: mol_type = other DNA
atgcctagcagcgtcagctggggcattttattgctcgcaggcctgtgttgtttggtacctgtgtcgctcgccgaggatcctcagggcgacgctgctcagaagaccgatacatcacatcacgatcaagaccacccaaccttcaataagattactcctaatctggccgagttcgccttttcgttgtataggcagcttgctcaccagtccaacagtactaatatcttctttagtccagtgagcatagccactgcttttgcaatgctgagcttaggaaccaaggctgatactcacgacgagattttagaaggcttaaacttcaatcttaccgagataccggaggcccagatacacgagggtttccaagagctgctaaggacccttaaccagcccgatagccaactacagctcactacagggaacggcctgttcttgagtgaaggactgaaactggtggacaaattcctcgaagacgtgaagaaactgtaccactcagaggcctttacggttaacttcggggacacagaagaggctaagaaacaaattaacgactacgtcgagaaaggtacccaaggcaagatcgtcgacttggtaaaggagctcgatagagacactgttttcgctctagtgaactacattttcttcaaaggtaaatgggagcggccatttgaggtcaaggacacagaggaggaggacttccatgtggatcaggttacaaccgttaaggtgccgatgatgaaacggctgggcatgttcaacatacaacactgcaagaagctgtcgagttgggtgctgctcatgaaatatttaggcaatgccaccgcaatcttctttctgcccgacgagggaaagctccagcacctggagaatgaactgactcacgatatcattactaaatttttagaaaatgaggatcgacggagcgcttctttgcacttgcccaaactgagcattaccggaacttatgatctcaagagcgtgcttggccagctgggaattaccaaggtgttctcaaatggggcagatctaagtggtgtgacagaagaagcgccactcaaactgagcaaggccgtacataaagctgtcctgacaatcgacgaaaaggggacagaggctgccggagccatgtttctggaagccattccgatgagcatcccccctgaggtgaagtttaataaacctttcgtatttctcatgattgagcagaacaccaaaagtcctctgtttatggggaaggtcgtgaatcctacccagaagtag

SEQ ID NO: 4640 - DNA, 1257 bp, synthetic construct
  misc_feature 1..1257: note = source = /note="Description of Artificial Sequence: Synthetic coding sequence"
  source 1..1257: mol_type = other DNA
atgccctccagtgtaagttggggaatcctgcttctggctggtctctgctgtctcgtcccggtgtcgcttgctgaggacccccaaggcgatgccgctcagaaaaccgacacatcacaccacgaccaagaccatcccacctttaataagattacgcctaacttggctgagttcgccttctcattgtaccgccaactcgcgcaccaatctaacagcaccaacattttctttagtcccgtgagtatcgctactgccttcgccatgctgtctctcggaacaaaagcggacacccacgatgaaatccttgagggactgaactttaacctgactgagatcccggaagcgcagatccacgagggatttcaggagctactgcggaccttgaatcaaccagactcacagctgcagctgaccacaggtaatgggctttttctctccgaagggctgaagctggtggacaagtttttggaggacgtgaaaaaactttatcacagtgaggcattcacagtgaacttcggcgacactgaagaggcaaagaagcagatcaatgactacgttgagaagggtactcagggcaagatcgttgatctggtgaaagagttggaccgggacactgtcttcgccctggtgaactatatattctttaaaggcaaatgggaacgccctttcgaagtgaaagacaccgaggaggaggatttccacgtcgatcaggtcactaccgtgaaggtccctatgatgaagcgtcttggtatgtttaatatccagcattgcaaaaaactgtctagctgggtcttattgatgaaatatctcggcaacgccacagccatcttttttctgcccgacgagggcaagttacagcatctcgagaacgagctaacccacgatattattacaaagttcttagagaatgaggacagaaggtcagctagtctgcatttgcctaagctatccattacaggtacatacgatctcaaatctgtcttgggacaactaggcatcaccaaagttttttccaatggcgctgacctctcaggtgtgacggaggaagccccattgaagttgagcaaggctgtccataaagctgtactcactattgatgagaagggaacagaggcggcaggagctatgttcttagaagcaatacctatgagcattcctcccgaagtcaagttcaacaagcccttcgtgttcctgatgatagagcaaaacaccaaatctccactgttcatgggcaaagtcgtgaatcctacccaaaagtag

SEQ ID NO: 4641 - DNA, 1257 bp, synthetic construct
  misc_feature 1..1257: note = source = /note="Description of Artificial Sequence: Synthetic coding sequence"
  source 1..1257: mol_type = other DNA
atgccctcaagcgtttcatggggcattcttctgctcgccggactctgttgcctcgtcccagtgtctctagccgaggatccacagggcgatgccgctcagaagaccgatacttcccatcatgatcaggaccatccaacctttaataagatcactcccaacctggcagagtttgcgttctccctctatagacagctggcccaccagtcaaactcaacaaacattttcttctcccctgtctcaatcgctaccgcttttgcaatgctgtctcttgggaccaaagccgatactcatgatgagattcttgaaggactgaattttaatttgacagagatacctgaagctcagatccacgagggctttcaggaactgctgaggacattaaaccagcctgactctcagctccagctgacgactggcaatggcctgttcctttctgaaggattaaagttagtcgacaaatttcttgaagacgtcaagaaactatatcatagcgaagccttcacagtgaattttggcgataccgaagaagccaagaagcagattaatgactatgtggagaagggaactcaaggcaaaatcgtagacctcgttaaagagcttgatcgcgatacagtgttcgccctcgtcaattatattttctttaagggaaagtgggagcgaccttttgaggtgaaagacacagaggaggaagatttccacgttgatcaggtcacaactgtgaaggttcctatgatgaaacgtctggggatgtttaacatccagcactgtaaaaaactgtccagctgggtgcttttgatgaagtacctggggaatgccaccgccatcttttttctaccagacgaaggcaaactacaacacctggagaacgaactgacacacgatattattacaaagttccttgaaaacgaagaccgccgatccgcatctttacatctgcctaagttgagcataacaggaacttacgatctcaaatccgttttgggccagctgggtattactaaggtgttttcgaacggggcagacctttcaggcgttaccgaagaggccccactgaagctgtccaaagccgtacataaagctgttctgactatagatgaaaagggtaccgaggctgccggagctatgtttcttgaggcaatccccatgtctatccccccagaagtaaagttcaacaaaccctttgtttttcttatgattgagcagaacaccaagtctccccttttcatgggcaaggtagtcaatcctacgcaaaaatag

SEQ ID NO: 4642 - DNA, 1257 bp, synthetic construct
  misc_feature 1..1257: note = source = /note="Description of Artificial Sequence: Synthetic coding sequence"
  source 1..1257: mol_type = other DNA
atgccaagcagcgtgagctgggggatccttctactggccggtctctgttgcctcgtgccggtctcactggccgaagaccctcagggggacgccgctcagaaaacggacacctcacatcatgatcaggaccaccccacctttaataagattacacccaacctggccgaatttgcttttagtttgtaccggcagcttgcccatcagtctaatagcactaatattttttttagcccagtctcaatcgcaacggccttcgccatgctgtccttggggacgaaagcagatacccatgacgagatcctcgagggacttaattttaacctgaccgaaatccccgaagcgcagatacacgaagggtttcaggaactgctccggaccctgaatcaaccagatagccagctgcagcttacgacagggaatggactgtttctctccgagggtttaaaacttgtggataagttcctcgaggacgtgaagaagttgtatcacagtgaggcctttaccgttaactttggagataccgaagaagctaaaaagcaaattaacgactatgtggagaaaggcacacagggcaaaatcgtggacctcgtgaaggagctggatagagacaccgttttcgcacttgttaactatatcttttttaaagggaaatgggagcgaccgttcgaagtcaaagatacggaggaggaggattttcacgtggaccaggttaccaccgtgaaagtgccaatgatgaagcgccttggtatgttcaacatacaacactgcaaaaagctttctagttgggtcctgctcatgaaatatctgggtaatgccactgcgatattctttcttcccgacgagggaaagctccagcacctggaaaacgagctgactcacgatatcatcacgaagttcctggagaatgaggatagacgcagcgcctccctgcatctacccaaattatccataactggtacgtatgatttaaaatccgttctgggtcagttggggattactaaagtgttctccaacggggctgatttatccggggtgacggaggaagcccctttaaaactcagcaaggccgtacacaaagcagtcctgacgatcgatgaaaagggaacagaggcagccggagctatgttcttggaggcaattccaatgtcaataccacccgaggtgaagttcaacaaaccattcgtgtttctaatgattgagcaaaacactaaaagcccgctattcatgggcaaggttgtcaatcccacacagaaatag

SEQ ID NO: 4643 - DNA, 279 bp, synthetic construct
  misc_feature 1..279: note = source = /note="Description of Artificial Sequence: Synthetic coding sequence"
  source 1..279: mol_type = other DNA
atgcccagctccgtcagttggggaattctgctgctcgcgggactgtgttgcttagttccagtaagcctggcagaggacccgcaaggggatgcagctcagaaaactgatacctctcatcacgaccaggatcatccaaccttcaacaaaatcacaccaaacctggctgaattcgctttctcgttgtatagacaactggcccatcagtcgaattcaaccaatatcttcttttcaccagtgtcgattgccaccgccttcgctatgctgtccctcggaacttag

SEQ ID NO: 4644 - DNA, 471 bp, synthetic construct
  misc_feature 1..471: note = source = /note="Description of Artificial Sequence: Synthetic coding sequence"
  source 1..471: mol_type = other DNA
atgccaagctctgtgtcttgggggatcctgctgctggcgggactgtgttgcctggtgccagtcagtctcgcagaagacccccaaggcgatgctgcccagaagacagacacatctcaccacgatcaggatcaccctacattcaacaagataactcccaatctggcggaatttgccttttctctttaccgccaacttgcccatcagtccaactcaacaaatattttctttagcccagtgtctatcgccactgccttcgctatgttgagtctgggtaccaaggcagacactcacgatgagatcctggaaggcctgaactttaacctgacggagataccagaggctcagatccatgagggattccaggaactgttgcggacccttaaccagcccgatagccaactgcagctgactaccggcaacgggctgtttctgtctgaaggcctgaaactggtcgataagtttttagaatag

SEQ ID NO: 4645 - DNA, 354 bp, synthetic construct
  misc_feature 1..354: note = source = /note="Description of Artificial Sequence: Synthetic coding sequence"
  source 1..354: mol_type = other DNA
atgccctctagtgtttcttggggcattctgctcttggcgggtctgtgttgtctggttccagtgagcttagctgaggacccgcaaggtgatgcggctcagaagaccgatacttcgcatcatgatcaggaccacccaacctttaacaaaattacaccaaacctggcagagtttgcatttagcctgtatagacagttggcccaccagagtaactcaacaaacatcttctttagccccgtttctatcgcaacagccttcgccatgttgtcgttagggacgaaggccgatactcacgatgagattctggagggtctgaactttaacctaaccgaaataccggaggcccagattcactag

SEQ ID NO: 4646 - DNA, 69 bp, synthetic construct
  misc_feature 1..69: note = source = /note="Description of Artificial Sequence: Synthetic coding sequence"
  source 1..69: mol_type = other DNA
atgccgagtagcgtctcttgggggatccttctgttggcaggtctgtgctgcctagtcccagtgtcttag

SEQ ID NO: 4647 - DNA, 435 bp, synthetic construct
  misc_feature 1..435: note = source = /note="Description of Artificial Sequence: Synthetic coding sequence"
  source 1..435: mol_type = other DNA
atgccatcatctgtctcctggggtattcttcttctcgctggcctgtgttgcttagtgcctgtgtccctggccgaggacccccaaggcgatgcagcccagaaaaccgacaccagccaccatgaccaggatcatcccactttcaacaagatcaccccaaatttggccgaattcgcgttttctttgtaccggcagcttgcccatcagtctaatagcaccaacatattcttttctcccgttagcatcgctactgcgttcgccatgttatctctgggtacaaaggcggacacccacgatgaaatcttggaaggactgaatttcaacctgactgaaattccagaggcccaaatccacgaagggttccaggagctgcttcgaacccttaaccagcccgatagccagctgcaattgaccacgggcaatggcttgttcctatag

SEQ ID NO: 4648 - DNA, 780 bp, synthetic construct
  misc_feature 1..780: note = source = /note="Description of Artificial Sequence: Synthetic coding sequence"
  source 1..780: mol_type = other DNA
atgtattccaacgtgattggaacagttacatccggtaaaagaaaggtgtacctacttagtctcttgctgattggcttttgggattgtgtgacctgccacggtagtcctgtcgatatttgcaccgccaaacctcgtgacatacccatgaaccctatgtgtatttatcgatctccggagaagaaagcaacagaagacgaggggtctgagcagaagatacctgaggcaacaaatcggagggtgtgggagctgtcaaaagcgaattctagattcgcaaccacattttatcagcatcttgccgattccaagaacgataacgacaacatcttcctaagtccactcagtattagcaccgcctttgccatgactaagcttggcgcatgcaatgataccctccagcagttaatggaagtgttcaagtttgacactatctccgaaaagaccagcgaccagatccacttcttctttgccaagctgaattgcagactatatcgcaaagccaataagtctagcaagcttgtcagtgcaaaccgcctgtttggcgacaagtcactgactttcaacgacctgtatgtgtctgacgcttttcataaggcgtttcttgaagtgaatgaagagggctcggaagccgcagcttccactgcagtcgtgattgccggacggagcctcaatcccaatcgagtcacattcaaggctaataggccatttcttgtttttattcgagaggtcccccttaatactatcatcttcatgggacgggtggcaaacccctgcgtgaagtag

SEQ ID NO: 4649 - DNA, 1395 bp, synthetic construct
  misc_feature 1..1395: note = source = /note="Description of Artificial Sequence: Synthetic coding sequence"
  source 1..1395: mol_type = other DNA
atgtatagcaacgtcatcggcaccgtcacttccgggaagcggaaagtctacctgctctccttgttgctgattgggttttgggattgtgtaacatgccacgggagtccggtcgatatttgcaccgctaagcctagggacatcccaatgaatcctatgtgcatctataggagtccggaaaaaaaggcgaccgaggatgagggatctgagcaaaagattccagaggccactaatagacgtgtatgggagcttagcaaagcaaattctaggtttgccaccactttctatcagcatctggcagattctaagaatgataacgacaacattttcttatctccattaagcattagcacggccttcgccatgactaaactcggagcttgtaacgacaccctgcagcaacttatggaggtgttcaagtttgacacaatttctgagaaaacatccgaccagatccacttcttctttgccaagctgaactgtaggttgtatcggaaggctaataagtcttccaaactcgttagcgccaatcggctatttggagacaagtctttaaccttcaatgagacttaccaggatatctcggagctggtatatggcgcaaagttacagcctctcgactttaaggaaaacgccgagcagagtagagcggcaattaacaagtgggtgtccaacaagacagagggcagaatcactgacgtaatcccaagtgaagcgattaacgaactcaccgtgctcgtcttagttaatacaatctatttcaaaggcctctggaagtcgaaatttagcccggaaaacaccagaaaggaactgttctataaagccgacggagaatcatgttccgcttctatgatgtaccaggagggaaaattccgatatcgcagggtggccgagggcactcaagttcttgagctgcccttcaagggcgacgacattacgatggtgctaattctgcccaaaccagaaaaatctcttgccaaggttgaaaaggagctaacacccgaagtgcttcaggaatggctcgacgaactggaggaaatgatgctggtcgtccatatgcccagattccgaatagaggatggtttctctctgaaagagcagctgcaagacatggggttagtggacctcttttcacctgagaaaagtaagcttcccggtattgtggccgagggtcgggatgacctttatgttagcgatgcctttcacaaggcatttttggaagtcaacgaggaaggcagtgaggccgcagcctccactgcagtggtcatcgctggacgttctttaaacccaaatcgtgtaacatttaaggctaataggcctttcttggtgttcattagagaggtcccgctgaatactattatttttatgggcagggtggcaaatccatgtgtgaagtag

SEQ ID NO: 4650 - DNA, 1476 bp, synthetic construct
  misc_feature 1..1476: note = source = /note="Description of Artificial Sequence: Synthetic coding sequence"
  source 1..1476: mol_type = other DNA
atggcccttctgtggggcctgcttgtgttgagctggagctgtctgcaaggaccctgttctgtgttcagtcccgttagcgcgatggagccactaggtcgtcagttaacctccggtcccaatcaagaacaggtatcaccccttacacttctcaagcttgggaaccaggagcctggcggtcaaaccgccctgaagagtcccccaggagtatgttcgcgggatcccaccccagagcagacccacaggttagccagagccatgatggcttttacggcagatctgttttctctggtcgctcaaacaagtacctgtcccaatctgatactgtcaccgctgtctgtagctcttgccctatcccacctggcccttggggcacagaatcatacgctccagcgtttgcagcaggttctacatgccggttctggtccgtgtctgccacacctattatcaaggctgtgccaggatttgggccctggcgcattcagattagctgcccgaatgtatctacagaaagggtttccaatcaaggaagatttcctggagcaatctgaacagctgttcggtgcaaagccagtgagcctgactggaaaacaggaagatgatctggctaatataaatcagtgggtgaaggaggccacagagggaaagattcaggagttcctgtccggtctgccggaggacaccgtcctgcttctgctgaatgctatacactttcagggcttctggcgaaacaagtttgacccgtctctgacccagcgagattctttccatctggacgaacagttcacagtccccgtagagatgatgcaggctcggacttaccccctcagatggtttctactggaacagccagagatccaagtggcccacttcccctttaagaataacatgtcctttgtcgtcctggtccctacccacttcgagtggaacgtgtcccaggtgctagcaaatctgtcctgggataccctgcatccacccctggtttgggagcgcccaaccaaggtcaggctgcccaagttgtatttgaagcatcaaatggaccttgttgctacgttaagccagctgggcctgcaggagctgttccaagcacctgatcttaggggcatcagtgaacagagcttggtggtgagtggcgttcaacatcagtcgaccctcgaactttcagaagtaggcgtcgaagctgcagcggctaccagcattgctatgagcagaatgtctctgagctctttcagcgtcaaccgcccatttcttttcttcatctttgaagatacgaccggactacccctattcgtagggagcgtcaggaaccctaatccgagtgctccaagggaactgaaagagcagcaggacagtccagggaacaaagatttcctgcaaagccttaaaggattccctcgaggggacaaactttttggacctgacctcaagcttgtgccccctatggaggaagactatccccagttcggatctccaaagtag

SEQ ID NO: 4651 - DNA, 1476 bp, synthetic construct
  misc_feature 1..1476: note = source = /note="Description of Artificial Sequence: Synthetic coding sequence"
  source 1..1476: mol_type = other DNA
atggcactcctgtggggcctgctggtgctctcttggagctgcctgcaaggaccgtgcagcgtgtttagccccgtgtcagctatggaaccactaggcagacagttgaccagcggacccaatcaggagcaggtttcgcctctgaccctgcttaagctgggcaatcaggaacctggaggccagaccgcccttaagtcccctcctggggtttgctccagagaccccacccctgaacaaactcatcgcctggcgagagcaatgatggccttcaccgcagacctcttttcgctcgtcgcgcagacctctacctgtccaaacctaattctatccccattgagtgtcgctttagccctcagtcacttagctctcggtgcccagaaccacacattgcagaggctgcaacaggtcttgcacgcaggctcgggtccctgcctgccccacctcctcagccgcctttgccaggacctgggacccggagcatttcgtctggcggctcgcatgtatctgcagaaagggttccctatcaaggaggatttcctggaacaaagcgagcagctgtttggcgctaaaccagtaagcctgacgggaaaacaagaagatgacctggccaacatcaaccagtgggtgaaggaggctacggagggtaagatacaggaattcctgagcggattgcccgaggacacagtgttactgctgttgaacgcaatccacttccagggattttggcggaacaagtttgatccaagcctgacacaaagggatagtttccatctggatgagcaatttaccgttcctgtggagatgatgcaggccaggacttatccgctgcgttggttcctgctcgaacagcctgagatacaagtcgcgcacttccctttcaaaaacaacatgtctttcgtcgtcctggtgcctacacatttcgagtggaacgtgagccaggtgctcgcaaacctatcctgggacactctccaccctcctctggtctgggagcggcctacaaaggtgcgtctacctaaactctatctgaaacatcagatggatttggtggccacactgtctcagttgggcctccaggagctcttccaggccccagatcttcgcggaataagtgagcaatcactggttgtgtctggcgtgcaacaccaatcaacattggaactatcagaagtgggggtcgaggctgccgcagcaacttcaatcgcaatgagtcggatgtcactgagcagtttcagcgttaatagaccattcttgttctttatattcgaagatactactgggcttcccttgttcgtgggctccgtgagaaatcctaaccctagcgctcctcgagagctgaaggagcagcaagactctcctgggaacaaagattttttgcagtcgctcaaaggatttccaagaggagacaagctgttcggtcctgacctaaaacttgtgcctccgatggaagaggactaccctcagttcgggtctcccaagtag

SEQ ID NO: 4652 - DNA, 1284 bp, synthetic construct
  misc_feature 1..1284: note = source = /note="Description of Artificial Sequence: Synthetic coding sequence"
  source 1..1284: mol_type = other DNA
atggcactgctgtggggtcttttggttctctcctggagttgcttgcagggcccttgcagtgttttcagccccgtgtccgcaatggagccgttggggaggcaacttacaagcggccctaatcaagagcaggtttcccctctgacactgctgaaactgggtaaccaggtgcaaccgggagcacagaaccacaccttgcagcggctacagcaagtcctgcatgccggatctgggccatgccttccacacctgctttctagactgtgtcaggatcttggcccaggagcctttcggcttgccgcaaggatgtatctgcaaaaagggtttcccatcaaagaagacttcctcgagcaatcagagcagctgtttggagcgaaacctgtgagccttacaggcaaacaggaggatgacctagcaaacattaaccaatgggtgaaggaggccactgaaggcaagatacaggagttcctgtctggtctccctgaagacactgtgttattactgttgaacgccatacactttcagggattctggcggaacaaattcgacccctcattgacacagcgcgacagctttcatttggacgaacaattcacggtcccagtcgagatgatgcaagctaggacttaccctctgcggtggttcctgctagagcagcccgaaatccaagtagctcacttcccattcaagaacaatatgagctttgtggtactcgtgcctactcatttcgagtggaacgtgtcacaagtcttggccaacctctcttgggacactctgcatcccccactggtttgggagcggccaaccaaggtaaggttgcccaagctgtacttaaagcaccagatggaccttgtagccaccctgagccagcttggattgcaagagctctttcaagcacctgacctgcgcggtatctccgagcaatccttggttgtgtctggtgtgcaacaccaaagtacactagagctgagcgaggtgggcgttgaagccgctgccgctacaagcatagccatgagccgtatgagcctgtcttccttctcagtaaatcggccttttctgttctttattttcgaagacaccacaggcctgcccttgtttgtaggcagtgtgcgtaatcccaatccctccgctccacgcgaattaaaagaacagcaggactctccgggtaacaaagatttcttgcagtccctgaagggcttccccaggggcgataaactgtttggccctgatctgaaactggtgcctcccatggaagaggattacccccagttcggttccccaaaatag

SEQ ID NO: 4653 - DNA, 768 bp, synthetic construct
  misc_feature 1..768: note = source = /note="Description of Artificial Sequence: Synthetic coding sequence"
  source 1..768: mol_type = other DNA
atggctctcttatgggggctcctcgtgctgtcttggtcatgtctgcaagggccttgctccgtcttctccccagtctcagcgatggagcctctcggcagacagttaacctctgggccaaatcaggagcaggtgagccctcttaccctcctgaaactaggcaaccaggagcctggtggacagactgctctgaagtcaccccctggggtctgttccagagacccaacccctgaacagacccaccgccttgccagggccatgatggcatttactgccgatttgttttcactggtggctcagacgagcacttgtcctaatctgattctgtccccgttgagcgtcgcactggccttatcacatctggctttaggcgcacagaaccatacgctgcagcgactccaacaagtgctgcacgccggttctggcccatgccttcctcacctcctatcaaggctgtgtcaggatctcggccctggcgcttttcgactggccgctagaatgtatctccagaaggggttcccaattaaggaagattttttggaacagtcagaacagctgttcggggcaaagccagtgagtctgactgggaagcaggaagacgacctggccaatatcaaccagtgggttaaagaggccaccgaaggtaagattcaggagttcctctctggtctgcccgaggacactgttttgttgctactcaatgcaatacattttcaggggttttggcggaacaagtttgacccatccctgacacagagggactccttttag

SEQ ID NO: 4654 - DNA, 1503 bp, synthetic construct
  misc_feature 1..1503: note = source = /note="Description of Artificial Sequence: Synthetic coding sequence"
  source 1..1503: mol_type = other DNA
atggctagtaggctcacgctgctcaccctcctgctgttgctgttggccggagaccgtgcctcctccaatccaaatgccacctctagcagctcccaggatcccgagagcctgcaagatagaggcgagggaaaagttgccacaaccgtaatttccaagatgctcttcgtggagccaattctcgaagtctcttccctgccaacaacaaacagcactacaaactccgccacaaagataacagcaaatactacagatgaacctaccacacaaccaacgaccgagcccacaactcagccaacaatacagccaacccagcctaccacccagctccccacagattctcctacccagccaaccactggctcattctgccccggtccggtcacactgtgttctgatttggaaagccacagcactgaggctgtcttgggagatgcactggtggacttttctttgaaactgtaccatgcttttagcgctatgaaaaaggtagaaacgaatatggccttttctcccttttctatcgcgtcccttctgactcaggtccttcttggtgcaggagagaacacaaaaaccaacttagaaagtatcttgtcttatcctaaagactttacttgtgtgcatcaggctttaaaaggcttcaccacgaaaggtgtcacaagtgtgtcccagattttccattcccctgatctggctattagggacaccttcgtgaacgcctctcgcaccctgtattccagctcccccagggtcctttccaataactccgatgcgaacctggaactgatcaacacctgggtcgccaaaaacactaacaataagatcagtcgtctcctggacagcttaccctcagacacacgcctggtgttgctgaacgctatttaccttagtgcgaagtggaaaacaacttttgacccaaaaaagaccaggatggagccgtttcatttcaaaaacagtgttataaaagtccccatgatgaactctaagaaataccccgtggcgcatttcattgaccagacgctaaaggcaaaagtcggacaattgcaactgtcgcacaatttgtccctggtaatattggtccctcagaacctaaagcaccggctcgaggacatggaacaggccctgtccccttcagtttttaaagcaatcatggaaaagctggagatgtccaaattccagcccacgctgttgaccctgcctcggatcaaagtcacaacctcccaagatatgctgagcatcatggaaaagctcgagttcttcgatttctcttacgacctgaatttatgtgggctgactgaagatcctgatctgcaggtctcagcaatgcaacaccagacggtcttagaactgactgagacaggcgtggaagccgctgccgcttctgcaatctctgtggccaggacgcttctggtgttcgaggtgcagcagccattcctttttgtgctgtgggatcagcagcataaattccccgtctttatggggagggtttacgacccacgcgcatag

SEQ ID NO: 4655 - DNA, 1518 bp, synthetic construct
  misc_feature 1..1518: note = source = /note="Description of Artificial Sequence: Synthetic coding sequence"
  source 1..1518: mol_type = other DNA
atggcctcgcggctgacccttctcactctgttgctgctgttgctcgcgggatttctggagccacaagacagggcaagctcaaatcccaacgcgacatcctcaagctcccaggacccagagtcactccaggatagaggcgaggggaaagtggcaaccactgtgatatcaaagatgttgttcgtggaacctatactcgaggtctcaagcctgcctaccacaaactccactaccaactctgccacaaagatcacggctaatactaccgatgagcccacgacacagcccacaaccgagcccacaacacagccaactatccagcccacccaacctaccacccagctcccaaccgattctcccacccagcccacaacgggaagcttttgtccaggccctgttaccctgtgctcagatctggagtcccattctacggaggccgttctgggcgacgccctggttgatttttcattgaagctctaccacgctttcagcgctatgaaaaaggttgaaacaaatatggctttttcacctttctcaatcgctagcctccttacgcaggttcttttgggagcaggcgaaaacaccaaaacaaacctggaatctattctgtcatatccaaaagattttacatgcgttcatcaggccctgaaggggttcaccacaaagggcgtgacaagtgtaagccaaatcttccactcacccgacctggccatacgcgatacattcgttaatgcttcgcgtacactttatagttcctcaccccgagttttgtccaataactcggacgccaacctggaattaattaacacgtgggtcgccaagaatactaacaacaagatcagccgactcctggacagtctcccgagcgacactagactggtgctgttaaatgctatctatctttcagccaagtggaagactacctttgatccgaaaaagactagaatggagccattccacttcaaaaacagcgtgatcaaggtgcctatgatgaactccaagaagtacccagtggcgcatttcatcgatcaaactctcaaagccaaagtaggtcaactgcagttgtcacataatttgtctctggtgatccttgtgccccaaaacctgaaacaccgcctggaagatatggagcaggcactcagtcctagtgttttcaaggctatcatggaaaaattggagatgagcaagttccagcctacactgttaaccctgcccagaatcaaggttaccacatctcaggatatgttgtccattatggagaagctggagttttttgactttagttacgatctcaatctgtgtgggctcacagaggatcctgacctgcaggtcagcgcaatgcaacatcagaccgtccttgaactaactgagaccggagttgaggctgccgcagccagtgctatcagcgtggcacggaccctcctagtcttcgaagtgcaacagcctttccttttcgtgttatgggatcaacaacacaaatttcccgtgttcatggggagagtgtatgacccacgggcttag

SEQ ID NO: 4656 - DNA, 1347 bp, synthetic construct
  misc_feature 1..1347: note = source = /note="Description of Artificial Sequence: Synthetic coding sequence"
  source 1..1347: mol_type = other DNA
atgctgttcgtggagcctatcttggaggtgtcttcgttaccgacaaccaattctaccactaacagtgcaacgaaaatcactgctaacacgacagacgaacccacgacccaacccaccactgaacccacaactcagcccacaatccaaccgacccagccaacgacacagttgccgacagacagtcccacacagccaaccaccggatctttttgccctggccctgtcacgttatgcagtgatcttgagtcccactcaacagaggctgttcttggagacgccctggtagatttctccttgaaattgtaccacgctttctccgcaatgaaaaaagttgagacgaacatggccttctccccattcagcatagctagcctcttgacccaggtattgctgggcgcaggagagaacactaagactaatctggaaagtatcttgtcttaccccaaggattttacttgtgtgcatcaagctctaaaaggtttcaccaccaagggcgttactagcgtgtctcaaatattccactccccagatctggcaataagggatacatttgtcaatgcttccagaacactatactctagcagtcccagggttctgtcaaataactctgatgccaatctggagctgataaatacatgggtcgccaaaaataccaacaacaaaatcagccggctgctggattctttgccttctgacactagactcgtgctgctgaacgctatctaccttagcgccaagtggaagacaacctttgatcctaagaaaacccgcatggaacccttccacttcaagaactctgtcataaaggtgccaatgatgaattccaaaaaatacccggtcgcccacttcattgatcagactctgaaggcaaaagtcggacaactgcagttaagccacaatctttcactggtcatccttgttccacagaatctcaagcaccgactggaggatatggaacaggccttgtcgccatccgtctttaaggcaatcatggaaaagttagaaatgtctaagtttcagcctacactcctcaccctcccacggattaaagtgaccaccagtcaggatatgctgtcaatcatggagaaactcgagttctttgacttttcctacgaccttaacctgtgtgggttgacagaagaccccgacctccaggtgagtgcaatgcagcatcagactgtattagaattgaccgagacaggagttgaggctgccgcagcatcagccatttctgtcgccaggacacttcttgtgtttgaagtgcagcaaccctttctgttcgtcttatgggatcagcagcataagttccctgtattcatgggcagggtctacgatccaagggcttag

SEQ ID NO: 4657 - DNA, 483 bp, synthetic construct
  misc_feature 1..483: note = source = /note="Description of Artificial Sequence: Synthetic coding sequence"
  source 1..483: mol_type = other DNA
atggcctcccgcctcaccctgctgactttgctgttgctgctgctagcaggggatcgagcatcttctaatccaaatgcgacctctagctcatcacaggatcctgaatctttgcaggacaggggagaaggaaaagtagccaccaccgtgattagtaaaatgttgttcgtggaacccattctggaagtgtccagcctccccacaactaacagtaccacgaattccgccactaaaatcacagctaatacaactgacgaacctactacacaaccgactaccgagcccacgactcagcctaccatccagccaacccagcccacaacgcagctgcctacagacagccccacgcagccaacgaccggcagcttttgcccaggccctgtcacattatgctctgacctggaatcgcattccaccgaggccgtgttgggcgatgccctggttgacttcagcctgaagctgtaccacgctttttccgcaatgtag

SEQ ID NO: 4658 - DNA, 402 bp, synthetic construct
  misc_feature 1..402: note = source = /note="Description of Artificial Sequence: Synthetic coding sequence"
  source 1..402: mol_type = other DNA
atggccagccggctcaccttgctgactctcctgctcctccttttagcaggagacagggcctctagcaacccaaacgccacctctagttcatcacaagatcctgaatcccttcaggatagaggagaaggaaaggtggcaaccaccgtaattagcaagatgctctttgtcgagccaatcctcgaggtgtccagcctgcctaccactaattccaccactaacagcgccacaaagataacggccaataccaccgacgaaccaaccacacagcctacgaccgagcctacaactcagccaaccatccagcctacccaacctaccacacaactgcccactgatagtcccactcaaccaggctacgcactcaatcatggtgagattggaatcttaaggttctttctctag

SEQ ID NO: 4659 - DNA, 3405 bp, synthetic construct
  misc_feature 1..3405: note = source = /note="Description of Artificial Sequence: Synthetic coding sequence"
  source 1..3405: mol_type = other DNA
atgcccgtttttcacaccagaacaatcgagtctatactggaaccagtagctcagcagattagccatctcgtgatcatgcacgaagaaggcgaagtggacggcaaggccatccctgacctgaccgcaccggttgctgcagtgcaggccgctgtgagcaacctcgtgcgagtcggcaaggagaccgtgcaaacaacagaagaccaaattcttaaacgcgacatgcccccagccttcattaaggtggagaacgcatgcactaaactggttcaagctgctcaaatgctgcaatctgatccatacagcgtgcccgcacgggactacctcattgacgggtctagaggcatattgagcgggacgtccgatctgctcttaacattcgacgaagcagaggtgagaaagataataagagtttgcaagggaatcctggagtaccttacggttgccgaggtggtggaaaccatggaagacctagtcacatacacaaaaaatttagggcctggaatgacaaaaatggccaaaatgatcgacgagagacagcaggaattgacacaccaggagcatcgagtaatgttggtgaactcgatgaacactgttaaggaattgctccccgtgctgatttctgccatgaagatctttgtgaccaccaaaaactccaagaatcaaggtatcgaagaggctctcaagaatcggaatttcacagttgagaagatgagtgcggaaatcaacgaaatcatccgtgtcctgcagttaactagttgggatgaggacgcatgggcaagtaaggacactgaagcaatgaaaagagcgttggcttcaattgatagtaaacttaaccaggcaaaaggctggcttagggatccgagtgcatctccaggcgacgcaggcgaacaggctatcaggcaaatactggacgaagctggcaaggtcggggagctctgtgcagggaaggagcgcagagaaattcttggcacttgtaaaatgctgggtcaaatgaccgatcaggtggctgacttacgcgcaagaggacagggcagctcccccgttgccatgcagaaggctcagcaagtgagccaagggctggatgttttaaccgccaaggtagagaacgccgctaggaagctagaagctatgacgaacagcaagcagagcatcgctaaaaaaatcgatgccgctcagaattggcttgcggacccgaacggaggaccagagggagaagaacagatcagaggagctctggccgaggcacgaaagattgctgaactgtgcgacgaccccaaagagcgggacgatatattgcggtcactaggggaaatttcagctcttacttctaaattagcggacctgcgcaggcaaggaaaaggggattcaccagaagctagagccctagctaaacaggttgccactgcactacagaacctccagaccaagaccaacagggccgtagctaactccagacccgcaaaggccgctgtgcacttggaaggcaaaatcgagcaggcccaacggtggatagacaatccgaccgtggacgaccgcggagtgggccaggccgcaatacggggactggtggcagaaggccacaggctagcaaacgtgatgatgggtccctatcgacaagatctcctggcaaagtgcgaccgcgttgatcagcttaccgcacaacttgctgatttggccgctaggggggagggtgaaagcccacaagctagagcgttagcctcccagttgcaagattccctcaaagatcttaaagccagaatgcaggaggccatgactcaggaggtgtccgatgtgttctccgacaccaccacccctataaaactgctcgccgtagcggctacagcccctcctgacgcccctaaccgggaggaggtgttcgatgagcgggctgcaaacttcgaaaatcacagtggcaaactgggcgcaacggctgagaaagccgcagccgtcggcacagctaataagtctacggttgagggcatacaggcaagtgtcaagaccgccagagagctcactccacaggtagtttccgctgcacgcatcttactgaggaatccgggtaatcaggctgcctacgaacatttcgagaccatgaagaaccagtggatagataatgtagaaaaaatgactggcctggtcgatgaagcgatcgacaccaaaagtctgctagacgcttccgaggaggccatcaaaaaggatctggataagtgcaaggtcgctatggcaaatatacagccccagatgctggttgcaggggctacatctatcgccagaagagctaacagaatcctcctggttgccaaacgcgaggtcgagaactcagaggatccaaagttccgtgaagctgtcaaggccgcatctgacgagttgtccaagaccatcagcccaatggttatggacgccaaggccgttgccggaaatatctctgaccctggactccagaagagcttcctggactccggttacagaattctgggagccgtggcaaaggtacgtgaggcgttccagcctcaagagcccgacttcccccctccgccacctgatctcgaacagctgcgccttaccgacgaacttgcacctccgaaacccccattgcccgagggagaggttcccccacctcgaccacccccacccgaggaaaaagatgaagagttccctgagcagaaagctggggaagtaattaatcagcccatgatgatggctgcaagacagctgcatgatgaggctcgcaagtggagcagcaagcctgggattccagccgctgaggttggaattggagttgtagcagaggctgacgccgcagacgccgcaggatttccagtccctccggacatggaagatgactatgagccggagctgctgttgatgccctctaatcaaccggtgaatcaacctattctcgctgcggctcaatcactgcatcgggaggctaccaaatggtcttctaagggtaacgatatcattgccgcagctaagcggatggcactgctaatggccgaaatgagccgattggtgcgcggtggcagtggaaccaaacgcgcactcattcagtgtgccaaggacattgcaaaagccagtgatgaggtgacccgcttagccaaggaagtggcgaagcaatgcaccgataagagaattcgcactaatctactgcaagtctgcgaacgaatacctacaattagcacacagcttaaaattctgagcacagttaaagcaactatgctggggaggacaaacatctcagacgaagagtccgagcaggctaccgaaatgctagtgcataatgcccagaacctgatgcagtccgttaaagaaactgtgagagaagccgaagcagcgtctatcaaaattcggacagacgctggcttcacactgcgctgggtcagaaaaaccccatggtaccagtag

SEQ ID NO: 4660 - DNA, 1335 bp, synthetic construct
  misc_feature 1..1335: note = source = /note="Description of Artificial Sequence: Synthetic coding sequence"
  source 1..1335: mol_type = other DNA
atgtgcctctgtagtggacgaaagacgattctcgagatctaccccggtcagttccaacccagcctctgtcataagttcatcgccctgagtgataaagaaggaaaactgcttcggaactatacacaaaacatcgatactctcgaacaggtggctgggattcaacggatcatccagtgccacgggagcttcgcgacagcttcatgtctgatttgcaaatacaaggtggactgtgaggctgttaggggggatatcttcaaccaggtggtgccccgttgtccaaggtgcccagccgacgagcccctcgcgatcatgaagcctgagatcgttttttttggggagaatttaccagaacagtttcaccgggctatgaagtacgacaaggatgaagttgacctgctgatagtaattgggtccagtctgaaagtgcgcccagtggccctgatccctagctcaattccgcatgaagtgccacaaattttaataaatagagaaccactcccacatctgcatttcgacgtggagctactgggggactgcgatgtgatcatcaacgagctgtgccacaggttgggcggtgaatatgctaagctttgttgtaaccctgtgaaactgtctgaaatcacagagaagcctcctcgaacgcaaaaggagctcgcatatctgtcggagctcccacctacacctctgcatgtttctgaggatagctcatctcccgagcgtaccagcccaccagatagtagtgtaatagtgacactcctagatcaggctgcaaaatccaacgacgacttggatgtgagcgaatctaagggctgcatggaagaaaaaccccaggaggtgcagacgtcccgcaacgtggaatccattgctgaacagatggagaatccggacctaaagaatgtgggatcctccactggagagaagaacgagagaacctcagtggctggcacggtgcgaaaatgctggcctaatcgggtggctaaagagcagattagccgacgactagatggtaatcaatatttgtttctgcccccaaataggtacatctttcatggtgccgaggtttacagcgactctgaggacgatgtgctgtcttcaagttcttgcggcagcaactccgatagtgggacatgtcagagccctagtttggaggagcctatggaagacgaaagcgaaattgaagagttttacaatggactcgaggacgaaccagatgtgccagagcgcgcagggggagcaggatttggcactgacggcgacgatcaagaggctattaatgaggcaatatcagttaagcaggaagtaaccgacatgaactacccgtcgaacaaaagttag

SEQ ID NO: 4661 - DNA, 1335 bp, synthetic construct
  misc_feature 1..1335: note = source = /note="Description of Artificial Sequence: Synthetic coding sequence"
  source 1..1335: mol_type = other DNA
atgtgcctctgcagcggtcgaaagactattttagagatataccccggacagtttcagccatccttgtgtcacaaattcatcgctcttagcgacaaggagggaaaactgttgaggaactatacacaaaacattgatacacttgaacaagtggccggtattcagcgtatcatccagtgtcacgggagctttgctacagcctcctgcctgatctgcaagtataaagtggattgtgaagctgtgcgcggagacattttcaatcaggtggtaccacgatgtccgaggtgtccagctgacgaaccgcttgccattatgaaaccggagatcgtgttcttcggcgagaacttacccgaacagttccaccgagcgatgaaatacgataaggatgaggttgacctgctcattgtaataggcagctccttaaaagttcggccagtggccctaatccctagctctataccccacgaagtgcctcagattctgatcaacagagaacccctgccgcaccttcatttcgatgtcgagctcttaggggattgcgacgtcattatcaatgagctgtgtcatcgcctgggaggcgagtacgccaagctttgttgtaatccagttaaactgagcgaaattacagagaaaccaccaagaactcagaaagagctggcttaccttagtgagctcccacctaccccacttcacgtgtctgaggattcatcaagcccagaacgcactagtccccctgacagctctgtgatcgttacattgcttgatcaggccgcaaaatccaatgacgacttagatgtgtctgagtccaagggatgcatggaggaaaagccacaggaagtacagacctctcgaaatgtggaatctattgcagagcagatggagaacccagacctcaagaacgtaggcagttccactggagagaaaaatgaacgaacgagcgtggcagggacagtgcgcaaatgctggcctaatcgcgtggccaaagagcaaatcagcaggcggctcgacggcaatcaatacctgttcctgcctcccaaccggtacatttttcacggagcggaggtatactctgactcagaggatgatgttctctcatccagcagctgtgggtcaaattctgacagcggtacctgccagtccccctccctagaagagccaatggaagatgagagtgaaatcgaagaattctacaatgggctcgaagatgagcccgacgtccccgagcgggcaggaggagcgggattcgggacggatggagacgatcaggaagcaatcaacgaggctatcagtgtcaaacaggaggtcaccgacatgaactacccttcaaataagagttag

SEQ ID NO: 4662 - DNA, 1359 bp, synthetic construct
  misc_feature 1..1359: note = source = /note="Description of Artificial Sequence: Synthetic coding sequence"
  source 1..1359: mol_type = other DNA
atgttcgacatagaatattttcggaaggatcctaggcctttcttcaagtttgccaaagaaatctaccctggtcagtttcagccttctctgtgtcacaaatttattgccctctctgacaaagagggtaaactgctccgcaattatactcagaatattgacaccctggagcaggtcgctggcatccagcgcattatccagtgtcatggcagcttcgctacagcttcttgcctgatctgtaagtacaaggttgattgcgaggccgtcagaggcgatatcttcaatcaagtcgtacctcgatgtcctaggtgccctgctgacgagcctctggcaatcatgaagcctgaaatcgtttttttcggagaaaatctcccagaacagtttcacagagccatgaaatacgacaaagatgaggtggacttactgatcgtgattggctcaagccttaaagtacggccagtggctctgatacctagcagtatccctcacgaggtgcctcaaatcttgatcaaccgagaaccgctcccccaccttcacttcgacgtagaactcctgggggactgtgatgtcatcattaacgagctgtgtcaccggcttggtggtgagtatgccaaattgtgttgtaaccctgttaagctgtcagagataacagagaagccccctaggactcagaaggagctggcctatctgtcggagctgcctccaacccccctacacgtctctgaggatagttctagtcccgagcggacgtctcccccagatagctcagtgatcgtgacgctcctagaccaggcagctaagtctaatgatgatctggatgtgagtgaatctaagggctgcatggaggaaaagccccaggaggtgcagaccagtcggaatgtggaaagtattgccgagcagatggaaaatcccgatctcaagaacgtcggcagctcgacaggagagaagaacgagagaactagcgtggcaggaacagtacgcaagtgctggcccaatagagttgccaaggaacagatttcccggcgattggacggcaatcagtacttgtttctgcccccaaatagatatattttccacggagcggaagtgtattctgacagcgaggatgacgtactctccagtagtagctgcgggtcaaactcggatagtgggacatgccagtctccaagtctggaagaacccatggaagatgaaagtgaaattgaagaattctacaacggcctcgaagatgagccagatgttccagagcgggctggaggagcaggttttggaacagacggcgacgatcaggaggccataaacgaggccattagcgtcaagcaagaggtaactgatatgaattacccaagcaataagagctag

SEQ ID NO: 4663 - DNA, 987 bp, synthetic construct
  misc_feature 1..987: note = source = /note="Description of Artificial Sequence: Synthetic coding sequence"
  source 1..987: mol_type = other DNA
atgagcgtgaactacgccgcaggcctttcaccttacgcggacaaagggaaatgtgggttgcccgagatatttgatccccctgaagagttggaacgcaaagtttgggaattggccagacttgtctggcagagcagctccgtcgtcttccatactggtgcaggcatttcgaccgcctcagggattcccgacttccgcggaccacacggtgtgtggacaatggaagaacgcggactggccccaaagtttgatacaacttttgaatcagctcggcctacgcagacccatatggctctcgtccaattggagcgtgtcggcttgttacgctttctagtgtctcaaaacgtggacggcctgcacgtccgcagtggattccctagagacaagctggctgagctgcatggcaatatgtttgtggaggagtgcgctaagtgtaagacacaatatgtccgtgacaccgtggttgggacaatgggtttgaaggcaactgggcgactgtgtactgtggctaaggcaagaggccttcgagcctgtagaaacgcggacctgagcatcacactcggtacctcactgcagattcgaccttcaggaaatttgcctctggcaactaaaagacgaggagggagactagtgatcgttaatcttcagcccaccaagcatgaccgacatgccgacctgcgcatccacggctacgtggacgaagtcatgacaagactgatgaagcacctcggtcttgagattccggcttgggatgggccacgagtattggagcgcgcacttccaccactgcctcgaccacccacacccaagctggaacccaaagaggagtctccaacgcgcatcaacgggtccattccagctggaccaaagcaggagccctgcgcacagcataacggaagtgaacccgcttctcccaagcgagaacgtccgactagccccgctccccacaggcctccgaaaagggtcaaggccaaggccgtgccctcttag

SEQ ID NO: 4664 - DNA, 1068 bp, synthetic construct
  misc_feature 1..1068: note = source = /note="Description of Artificial Sequence: Synthetic coding sequence"
  source 1..1068: mol_type = other DNA
atgtccgttaattacgccgcaggcttgagcccctacgcagataagggaaagtgtggcctccctgaaatcttcgacccccctgaagaattggagcggaaggtgtgggaactggcgaggctggtctggcaatcaagtagcgtcgtcttccataccggtgcaggaatcagtaccgcaagcggcatccccgattttcgcggaccccacggggtatggaccatggaggagagggggctggctcctaagttcgacaccaccttcgagagcgcccgacccacacaaacacatatggctctggtgcagctcgaaagagtggggttgttgcgattcctcgtatcccagaatgtagatggcctccatgtgaggagcggcttccctcgcgacaagctggctgaactacatgggaacatgtttgttgaagaatgtgctaagtgtaagactcaatatgtgagggacactgtcgttggaaccatgggattgaaagcaacaggtcgattgtgcaccgtggccaaggcacggggactacgtgcgtgtcgcggtgaacttcgcgatactattttggactgggaagacagcctccccgatcgtgatcttgctcttgctgatgaagccagtagaaatgcagacctttccattaccttagggactagcttacagattcggccttctggtaacctgcctcttgccactaagcggaggggcggaagactcgtgattgtcaatttacagcccacgaaacatgatcgacacgctgaccttcggatccacggctacgttgatgaggtgatgacacgcctgatgaagcatctgggactcgagatccctgcttgggacggccctagggttctggaacgagccctgcctccactgccaagacctcctacaccaaagctggaacccaaagaggagtctcccaccagaattaatggatcgatccccgctggtcctaagcaggaaccatgtgcccagcataacggcagcgagcccgctagtcctaaacgagagaggccaacgtcccccgctccccaccggccacctaaacgagtgaaggctaaagccgtcccaagttag

SEQ ID NO: 4665 - DNA, 852 bp, synthetic construct
  misc_feature 1..852: note = source = /note="Description of Artificial Sequence: Synthetic coding sequence"
  source 1..852: mol_type = other DNA
atggaagaaagagggctggcccctaaatttgacactacgtttgagtctgcgaggcctacacaaacccacatggcactcgtacaattagaaagggtgggcttactgcggttcctggtctcccagaacgtggatgggctccacgtgaggtccggctttccacgcgataaacttgctgagctgcatggcaatatgtttgtcgaggaatgcgccaagtgtaagacacagtacgtaagagataccgtcgtgggaaccatgggcctcaaagccaccggaagactctgcaccgtcgccaaagcccgtggattgagggcatgtcggggtgagctcagggataccatcctggactgggaagacagcctccctgacagggatctagccctggctgacgaggcaagcagaaatgcggacttgagcatcacgctcggaacctccctccaaatcagaccctcgggcaacctgcccctggcgactaaacgcagaggcggaagattggtaattgtgaatcttcagcccacaaagcacgataggcacgcagatcttagaattcacgggtacgtggacgaggtcatgacaagacttatgaagcatctcggcctcgagatcccggcatgggacgggcctagggtactggagcgggctttgcctcctctgcccaggccgccaacccctaagttagaacctaaagaagaatcacctacaagaattaacggaagcattccagctggcccaaagcaggagccatgtgcccagcacaacgggtctgagcccgcaagccctaaaagggagagacctactagccccgctcctcacaggccacccaagcgcgtcaaggccaaggccgtgccctcttag

SEQ ID NO: 4666 - DNA, 1575 bp, synthetic construct
  misc_feature 1..1575: note = source = /note="Description of Artificial Sequence: Synthetic coding sequence"
  source 1..1575: mol_type = other DNA
atgactgaagataaggtgaccggaacgctggtattcaccgtgatcacagccgttctcggtagttttcagttcggatacgacatcggtgtaatcaacgctccgcagcaggttattatttcccactacagacacgtgttgggggtgccattggatgaccgcaaggctattaacaactacgtgattaacagtactgacgagcttcccactataagttatagcatgaatccaaaaccaaccccttgggcagaggaggagacagtggccgcagcacaactcatcaccatgctatggagcctgagcgtcagctcatttgcagttggtggaatgactgcctcatttttcggcggatggttaggtgatacactgggtcgtataaaggctatgttagtagccaatattttgtctctcgttggggcactgctgatgggtttcagcaaactaggaccatcccacatcctgattattgcagggaggagtatctctggcctgtattgtggcctgatttccggactggtgcccatgtatataggtgagatagccccaacagctctcagaggggctttggggacattccaccagttagcaattgtgactggcattttgattagccaaattattggcctggagttcattttaggcaattatgacttgtggcacattctcctgggattatctggtgtgagagccatcctccaatcgcttctcctgttcttctgcccggaatcgccaagatacttgtatatcaaactggacgaggaagtgaaagcaaagcagagtttgaaaagactgagaggctacgatgatgtaactaaagacatcaatgaaatgagaaaagagcgagaagaggcctctagcgaacagaaagtaagcattatccagctgtttaccaatagctcctacaggcaacctatccttgtggctcttatgctacacgtcgcccaacagttttcaggcataaatggaatcttctactacagcaccagcattttccagaccgctgggattagcaaacctgtttacgccacgattggcgtcggtgcagtcaacatggtttttaccgccgtctccgtctttcttgtggagaaggccggacgacgctccctgtttctgatagggatgtctggaatgtttgtgtgtgccatctttatgagtgtcggccttgtgctgttgaataagttcagttggatgagctatgtgtctatgatcgccatcttcctgttcgtgagtttttttgaaattggacctggtccaatcccttggttcatggtcgctgagttcttcagtcagggccctaggccggctgccctggcgattgcggcattttccaactggacttgtaatttcatagttgccctgtgctttcaatacattgctgacttctgcggcccttacgtgttcttcctttttgccggagtactgctggccttcaccctatttacattctttaaagtgcctgagaccaagggcaaaagcttcgaagaaatcgccgctgagtttcaaaaaaaatctggcagtgcccacaggcccaaggctgctgtggagatgaagttcctgggggcaacagagacagtgtag

SEQ ID NO: 4667 - DNA, 1218 bp, synthetic construct
  misc_feature 1..1218: note = source = /note="Description of Artificial Sequence: Synthetic coding sequence"
  source 1..1218: mol_type = other DNA
atgcatctgaaccgcattaaagcgatgctggtggcaaacattttgtcgctggtgggcgcactgctgatgggattctccaaactcgggccatctcatatcttgatcatcgccggacgtagtatttccggattgtactgtggacttatcagcggtctggtccccatgtatatcggcgagatcgccccaacggccctccgaggcgctcttgggacgtttcatcagctggcaatcgtaactggaatcctgatctcacagattatcggcctagagtttatattgggaaactatgatctgtggcatatcctgctcggtcttagcggagtgcgtgccatcctccagtccctcttgttgtttttttgccccgagtcgcctcggtacctctatattaagttagacgaggaagtgaaagctaaacagagcctgaagagactccggggatacgacgatgttaccaaggacattaatgagatgcgcaaggaacgcgaggaagcatccagcgaacagaaggtgagcatcatccagctattcaccaactcgtcgtacagacagcctattctggttgcactcatgctccacgtagcccagcagtttagtggtattaatgggatattctattactccacgagcatcttccagactgctggcatatctaaacccgtgtatgcaaccataggcgtgggagctgttaacatggtgttcacggccgtttctgtattcctggtagagaaggccggtcgacgatcattattcctcattgggatgtcagggatgttcgtatgcgctatcttcatgtctgtgggtcttgtattgctgaataaattcagctggatgtcctatgtaagtatgatagctatttttctatttgtcagcttttttgagattggtccaggaccaattccatggttcatggtcgctgaatttttttcccaggggccacgccctgcagccctcgcaattgccgctttcagcaattggacttgcaacttcatcgtggcactctgtttccaatatatcgccgatttttgcggtccctacgtgttcttcctattcgctggagtcttattggcctttactctgttcacatttttcaaggtgcctgaaacaaaggggaagtcgtttgaagaaatcgctgcagagtttcagaagaaaagcgggtcagcacaccgacctaaggccgcagttgagatgaagtttctgggcgctacagagacagtttag

SEQ ID NO: 4668 - DNA, 1290 bp, synthetic construct
  misc_feature 1..1290: note = source = /note="Description of Artificial Sequence: Synthetic coding sequence"
  source 1..1290: mol_type = other DNA
atggcggcacaaggctatggatattaccggactgttatttttagtgccatgttcggagggtactctttatattatttcaacaggaagacattcagttttgtcatgccttctttggtggaggagattccgctggataaagacgacctcggatttatcacatcatctcagagcgctgcctatgccatctcgaaattcgtctccggggtgttaagtgatcaaatgagtgcaagatggctgttctctagtggacttctgctcgttgggctggtgaacatcttttttgcgtggagttcaacagtgccagtgtttgcagcactgtggttcctaaatgggctggctcaaggcctgggatggcctccctgcggaaaggtactgagaaaatggttcgaacccagccaatttgggacatggtgggcgatcctctctacttctatgaacctggcaggcggtttaggcccaattcttgctactattctggcacagtcttactcatggcggtcgacattggcactcagtggcgctctgtgcgtggttgtgtcattcctctgcctcctcttgatacacaatgagccagccgatgttggcttaaggaatctggaccctatgccatctgaggggaagaaaggcagcttgaaggaagagagtacattacaggaattacttctctctccttacctgtgggtactctcaacaggctatctcgtggtgttcggagtcaagacttgttgtactgattggggccaattcttcctcatccaggaaaaggggcagagcgcgttggtggggagcagctacatgtcggccctcgaagtcgggggtctggtcggatccattgctgctggctacctgtctgaccgggctatggccaaggccggactttcgaattatgggaacccacgccacggcttactgctgttcatgatggctggtatgacggtttctatgtacctattccgcgttaccgttaccagcgactcgccgaaactgtggattctggtgctgggagccgtgtttggattttccagttacggtcccatcgctctgtttggggtgatcgccaatgagagcgcccctcccaacctgtgcgggacatctcatgctattgtgggtttgatggccaatgtagggggatttttggctggattgccgttcagtaccattgccaaacactactcatggagtacagccttctgggtcgctgaggtcatatgcgcagcttcaaccgctgctttcttcctccttaggaacatcaggacaaagatgggccgagtgtcaaaaaaggcagaatag

SEQ ID NO: 4669 - DNA, 1356 bp, synthetic construct
  misc_feature 1..1356: note = source = /note="Description of Artificial Sequence: Synthetic coding sequence"
  source 1..1356: mol_type = other DNA
atggcggctcaaggatacggctattaccgcacagtcatcttctctgccatgttcgggggatactcgctttactattttaaccgcaagactttttcgtttgtcatgccgtcactcgtcgaagagattccactggataaagatgaccttggatttatcacttcaagtcagtccgccgcttacgccataagcaagttcgtgtctggcgtgctgagtgatcaaatgagcgccaggtggctttttagcagtggacttttgttagttggcctggtcaacatttttttcgcatggtcatcgactgtacccgtgttcgcagctctgtggttcctgaacggactggcacagggactggggtggcccccatgtggcaaagtgctgcggaaatggttcgaaccttctcagttcggaacatggtgggccatcctttccacttcaatgaatctcgctggcggtcttggcccaattctagccacaattctagcccaatcctactcatggcggagcacactcgccctgtcgggcgctctgtgcgtcgttgtgtcctttctatgcctgctcttaatccacaacgagcctgccgacgtgggactgagaaacctcgatccaatgcctagcgagggcaaaaaggggtcgctgaaggaggaatccaccctgcaggaacttttgttatcaccatacttgtgggtgctcagcaccggctacttagttgttttcggtgtcaaaacatgttgtaccgattggggccaattcttcctcatccaggagaagggtcagagtgccctggtaggatcatcctatatgagtgctttggaagtggggggactcgtcggctcaatcgccgcagggtacctcagcgaccgggcaatggccaaagccggtctgagcaactatggtaatcctcgccatggccttcttttgtttatgatggctggtatgactgtttccatgtacttgttcagggtgaccgtcacatcagactctccaaaggacgttgccttctggactcttgcccttcatcccttggcagagctgaccggctttaccgagcatgagctttggatcctcgtcttgggggcagtgttcggtttctcttcctacggacctattgctctgtttggagtaattgccaatgagagtgctcccccaaatttgtgcggaacaagccacgctattgtcggcctcatggccaatgtgggcggatttttggctggcctacctttttccacaatcgccaaacattattcatggtccactgccttttgggtcgctgaagtaatctgcgccgcttccaccgcggcattcttcctgctgcgcaacatccggacgaaaatgggtagagtctcaaaaaaagccgagtag

SEQ ID NO: 4670 - DNA, 1716 bp, synthetic construct
  misc_feature 1..1716: note = source = /note="Description of Artificial Sequence: Synthetic coding sequence"
  source 1..1716: mol_type = other DNA
atgaccagagccggagaccacaataggcagcggggttgttgtggatccctcgcggattacctgacaagcgcgaaattcttgctgtacctcgggcactctttaagcacttggggcgaccgaatgtggcacttcgctgtgagcgtttttcttgtggagctgtatggcaattcactgctgctgaccgcagtatacggtctggttgtcgctggcagtgtccttgtgctcggcgctatcattggagattgggtggacaagaacgcgcgactcaaggtggcacagacctccttagtggttcagaatgtgagcgtcattctgtgtgggattatcttgatgatggtgtttctacacaaacacgagttactgaccatgtatcacggttgggttctcacaagctgctacattctaattatcaccattgccaatatcgctaatctagcctctacagctactgctatcaccatccagagagactggatcgtagtggtagcaggtgaggaccggagcaaacttgccaatatgaatgctacaatcagacgtatagatcaactgaccaacatcctggctccaatggcagttggacagatcatgacattcggaagtccggtgatagggtgtgggtttatctccggatggaatttggtgtcaatgtgcgttgaatatgtgctgctatggaaagtgtatcagaagacgcccgcactggctgtgaaggcaggcctcaaggaagaagagaccgagctcaagcaactgaaccttcacaaagataccgagcccaagccattggagggcacccatctgatgggcgtgaaggactcgaatatccacgaactggagcatgaacaggagccaacatgcgcatcgcaaatggcagaaccttttcgcacattcagagacggatgggtatcgtactacaaccagccggtgttcttggccggaatgggactggccttcctctacatgaccgtgctgggttttgactgcatcaccacgggctacgcctacacacaaggattatccgggtccatcctttctatccttatgggcgcttctgcaatcacgggcatcatggggaccgtcgcattcacctggctgcgccgtaagtgtggactcgtgcgtacaggactgatatctgggctcgcacagctctcttgcctgatcctatgtgttatatcagtcttcatgcccggaagcccgctggaccttagcgtgtcaccctttgaagatatacgcagcagattcatccagggagagagcattacccccaccaagatccctgagatcacaacagaaatctatatgagcaatggttctaacagcgctaacattgttcctgagacctccccagaaagtgttccgataatatcggtgtccctgcttttcgccggtgtgatcgcggcacgaatcggtctgtggtcattcgatcttactgtgactcagctgttacaggagaacgtcatcgagtccgagcgcggaataattaacggagtgcaaaattcaatgaattaccttttagacctgctgcattttataatggttatcctcgcaccaaatcccgaagcctttggtctgctagttctgatatcagtcagtttcgtcgccatgggacacattatgtattttcgatttgcacagaatacacttggcaataagcttttcgcctgcggcccagacgctaaggaagttagaaaggagaaccaagcaaataccagcgtcgtttag

SEQ ID NO: 4671 - DNA, 603 bp, synthetic construct
  misc_feature 1..603: note = source = /note="Description of Artificial Sequence: Synthetic coding sequence"
  source 1..603: mol_type = other DNA
atgacacgggcaggtgaccacaacagacagcggggttgctgtggctccctcgcagactatctgacatccgcaaagttcctcctatacctggggcacagcttgtcaacttggggagatcggatgtggcacttcgcggtgtccgtgttccttgtagagctttacgggaattctctgctgctgaccgcggtttatggcctcgtcgtggccggttccgtcctggtcctgggagcaattatcggggattgggttgataaaaacgccaggctgaaggttgcccagacttccctggtggtgcagaacgtgagtgtcatactgtgcggaatcatcctgatgatggtctttctacacaagcatgaattgcttaccatgtaccacggttgggtccttacctcctgctacattctaatcattactattgccaacattgcgaacctggcatccaccgccacagctattacaattcaacgggattggattgtcgtagtagccggagaggaccgctctaaactcgcaaatatgaacgccactattaggaggattgatcagcttaccaacattctcgccccaatggccgtcgggcagataatgacatttggtagttag

SEQ ID NO: 4672 - DNA, 78 bp, synthetic construct
  misc_feature 1..78: note = source = /note="Description of Artificial Sequence: Synthetic coding sequence"
  source 1..78: mol_type = other DNA
atgacccgggctggagatcacaaccgccaaagagggtgttgcggaagtctggccgattaccttacaagcgctaaatag

SEQ ID NO: 4673 - DNA, 78 bp, synthetic construct
  misc_feature 1..78: note = source = /note="Description of Artificial Sequence: Synthetic coding sequence"
  source 1..78: mol_type = other DNA
atgacacgcgcaggtgaccataacaggcagcgaggttgctgcgggtcactcgctgactatctaacatccgcaaaatag

SEQ ID NO: 4674 - DNA, 168 bp, synthetic construct
  misc_feature 1..168: note = source = /note="Description of Artificial Sequence: Synthetic coding sequence"
  source 1..168: mol_type = other DNA
atgaccagagcgggagatcacaatcggcagcgtggatgctgtgggtctctggccgattaccttacctcagcaaagttcctgttgtacctgggccacagcttgagtacttggggcgacaggatgtggcacttcgccgtgagcgtgtttctagtcgagctgtatggctag

SEQ ID NO: 4675 - DNA, 300 bp, synthetic construct
  misc_feature 1..300: note = source = /note="Description of Artificial Sequence: Synthetic coding sequence"
  source 1..300: mol_type = other DNA
atgagggcgagtattcataagaagctccgcaagagtagcggcatagttactatcttgtattccgccttcgttctcgtgagcactagtgatatggcggaagagaccgaggacgcttggccacgttgctatcttcagtttttggctctcctgctcacctcgacgtcagcaagagcagccgctgccattgccgctgcagaggagccggcaggttccccaagcgtgatgactcgagcgggagatcataacaggcagaggggctgttgcgggagccttgcagactatctgacaagtgctaaatag

SEQ ID NO: 4676 - DNA, 504 bp, synthetic construct
  misc_feature 1..504: note = source = /note="Description of Artificial Sequence: Synthetic coding sequence"
  source 1..504: mol_type = other DNA
atgggcgtgaaggatagtaatatccacgagctggagcatgagcaagaacccacttgcgctagccagatggcggagccatttaggacatttcgcgatggctgggtctcttattacaatcagcctgtgttccttgccggtatgggactcgctttcctgtacatgacagtcctgggtttcgactgcattactactggctatgcctatacccagggcctgagtggctccattttgtccattctgatgggcgcatccgccattacaggcattatgggaactgtcgccttcacgtggcttcggaggaagtgtggtctggtcaggactggcctgatcagcggcctcgcacagctcagctgtctgatactgtgtgtgatctctgtttttatgcccggatcaccactggatctgtccgtgagtccatttgaggacataagatcccggtttatccagggggagtcaattacccctacaaagataccggagatcactacagagattcacgtatag

SEQ ID NO: 4677 - DNA, 2496 bp, synthetic construct
  misc_feature 1..2496: note = source = /note="Description of Artificial Sequence: Synthetic coding sequence"
  source 1..2496: mol_type = other DNA
atggagaggccgtggggcgctgcagacgggttgagtcggtggccccatggcctgggactgctccttctcctgcagcttcttcctccctcaacactgagccaggaccgccttgacgcaccccctcctcccgcagcccctcttccaagatggtctggcccaattggagttagctggggactgagggccgctgctgccggaggggctttcccccgtgggggaagatggcggcgtagcgccccaggtgaggacgaagagtgtggacgtgtccgggactttgtcgccaagctggccaacaacacgcatcagcacgtattcgatgatctgcggggaagcgtctcacttagttgggtgggagactctactggagtcatattggtcttgaccacctttcacgtgccactggtcattatgaccttcgggcaaagtaagctgtatagatctgaggactacggaaagaacttcaaggacataacagacctgattaacaacactttcatccggactgaatttggcatggccattgggcctgagaacagcggcaaagtagtgctcacggctgaggtctctggcggttctagagggggaagaatcttccggtcctctgatttcgccaagaacttcgtacaaactgatctaccgttccatccactcacccaaatgatgtacagcccgcagaactcagattacttgttagcattaagcactgagaacggcctctgggttagtaaaaactttggagggaagtgggaggaaatccacaaggccgtatgtcttgcaaagtgggggtctgacaatactatttttttcacaacatatgctaatggatcctgcaaggctgacctcggcgcactagagctctggcggacatcagatctggggaagagctttaagacaataggtgtgaaaatatatagcttcgggcttgggggacgctttctcttcgccagcgttatggctgacaaggacactacgaggcgtattcatgtatccacagaccagggagatacatggtccatggcccaactgcctagtgtggggcaagagcagttttactcaatccttgcagcaaatgatgacatggtctttatgcatgttgacgagccaggggacacaggcttcggtactattttcacaagcgacgaccggggtattgtatacagcaagtctttggacagacacctctacaccaccaccggcggtgaaaccgatttcactaacgtcacatccctgaggggcgtatacattacctccgtcctgtctgaagataactcaatacagacaatgattacttttgaccagggtggaagatggacacatttgcggaaaccagagaactccgaatgtgatgcaactgctaagaacaagaatgagtgttcactgcacatacatgccagttatagtattagccaaaagctgaacgtgcctatggcgccactgagtgaacctaatgctgtaggtatcgtcattgctcatgggagtgtgggcgatgctatttctgttatggtgcccgacgtgtatatctcagatgatggcggatatagttggacaaaaatgctggaagggccacattattatacaattttggacagtgggggaatcattgtggccattgagcattccagccgcccaataaacgtgatcaagttcagcaccgacgaaggacagtgttggcagacctataccttcacacgtgaccccatctacttcacaggccttgcttcagagccaggcgctcggtctatgaatatctcgatatgggggttcactgagtccttcctgaccagccagtgggtttcttacactattgacttcaaggatattttagaaagaaattgcgaggagaaagactataccatttggctggcgcactctaccgaccccgaggactatgaggacggatgcattctaggatacaaggaacagtttttaagactacgaaagagctccgtctgtcagaatgggagagactacgtggtgacaaaacagccgtcaatatgtctttgcagcctggaggatttcctgtgcgattttggctattatcgcccagagaatgattctaagtgtgttgagcagcccgagctgaagggccatgacctcgagttctgtctgtacggacgtgaggagcatctcacgactaatggttacagaaaaattcctggcgataaatgtcagggaggcgttaatcctgtgcgagaagtgaaagaccttaaaaagaagtgcacaagtaattttttgtctcctgagaagcagaacagcaagtctaattctgtgccaatcatcctggctatagtcggtcttatgctggtgaccgtcgtggctggggtgctgattgtcaagaagtatgtatgtggcggtcgattcctcgtacacagatacagcgtgctgcaacagcacgcagaagccaatggggtagatggggtcgatgccctggatactgcaagccacaccaacaaatctggctatcatgacgattctgacgaggacctcttggaatag

SEQ ID NO: 4678 - DNA, 2085 bp, synthetic construct
  misc_feature 1..2085: note = source = /note="Description of Artificial Sequence: Synthetic coding sequence"
  source 1..2085: mol_type = other DNA
atgacttttggccagagtaaactgtaccgttccgaagactacggcaaaaacttcaaggacatcacggaccttatcaacaatacattcattaggacagaatttggcatggcaatcggacccgaaaactctggcaaggtggtactgaccgccgaggtgagcggaggatcccgtgggggacgcattttcaggtctagcgacttcgccaagaatttcgtccaaactgacttaccatttcaccccctgacccagatgatgtactccccccagaacagtgattatttgcttgctctgtctactgagaatggtctttgggtgtcaaagaacttcggagggaagtgggaggaaatacacaaagcggtgtgcctggccaaatggggctccgacaataccattttctttaccacgtacgcgaacggttcttgcactgacctaggcgctctcgaactatggaggaccagcgatctcggcaaatccttcaagaccatcggcgtcaaaatctactccttcgggctcgggggaaggtttctgttcgcttccgttatggccgataaagacaccactcgcagaatccacgtgtccaccgatcagggagacacctggtccatggcacagctccccagtgtaggacaagaacagttctacagcatattagctgccaacgacgatatggtcttcatgcatgtggatgagccaggggacactggcttcggaaccatcttcacatcagacgatcggggtattgtgtacagcaagagtctggatcgccatctgtatactacaaccgggggtgaaacggattttactaacgtcacatcactcagaggtgtctacatcacctcggttctctctgaggacaacagcatacaaacgatgataaccttcgaccaagggggtagatggacgcacctgagaaagcctgagaatagtgagtgcgacgccactgccaagaacaagaatgagtgctctctccatatccacgcttcgtatagcatcagccagaagctgaacgtgccaatggcccctttgagtgagcccaacgccgttggaatcgtgattgcacacggaagcgttggagatgcaatttccgtgatggtgcccgatgtgtatatttcagatgacggaggatattcctggacaaaaatgttggagggcccacactattacacgatactggactctggtggcatcattgtcgctatcgaacactcctcccggccaattaacgtcataaagttttcaacagatgagggccagtgctggcagacttatacattcacacgtgatccgatttacttcaccgggcttgcaagtgagcccggtgcccgatctatgaacatttctatctggggattcaccgagagctttcttacaagccaatgggtttcctatacgatcgattttaaggatatcctggagcggaactgcgaggagaaagactatacgatttggctcgctcatagcacagatccagaagactacgaagacggctgcatcctgggctacaaagagcagtttcttcgtctcaggaagtcctccgtgtgccaaaacggaagagactatgtcgtgaccaagcagcctagcatctgtctgtgctccctggaggatttcctctgcgattttggctactataggccagagaacgatagtaaatgcgtcgaacaacccgagctcaaggggcacgatcttgagttctgtctatacgggagagaagagcatctcacaaccaacggctatagaaagatccccggagataagtgccagggcggagtcaaccccgttagggaagtaaaagacttgaaaaaaaaatgtacatccaactttctgtcccccgagaagcaaaactccaaaagcaattccgtacccattattttggcaattgtcgggcttatgctggtaaccgttgtggcgggagtgctaatagtcaaaaaatacgtttgtggcggacgattcctggttcaccgctattcagtgttacaacaacatgccgaagcgaatggcgtggatggtgttgacgccctcgacacagcaagccacaccaataagtctggatatcacgatgatagcgatgaagacctcttggagtag

SEQ ID NO: 4679 - DNA, 1446 bp, synthetic construct
  misc_feature 1..1446: note = source = /note="Description of Artificial Sequence: Synthetic coding sequence"
  source 1..1446: mol_type = other DNA
atgaaggtgctcagtgaaggccaactcaagctgtgtgtagtccagccagtgcacctaacttcctggctgcttatctttttcatactgaagagtatcagttgtctcaaacctgccaggctgccaatttaccagcgtaagcccttcattgctgcatggaatgcacctaccgaccagtgtctcatcaagtataacctgaggctgaatctcaaaatgttccccgtaataggcagccccctcgccaaggcaagggggcagaacgtgaccatcttttatgtgaaccggcttggctattacccatggtatacttcccagggggtgcccatcaacggcggactccctcaaaacatatcactacaagtgcatttggagaaggccgatcaggacataaactattatattccggcagaggacttttcagggctcgccgtgattgactgggagtattggaggcctcagtgggcccgtaactggaacagcaaagatgtttatcgtcaaaaatcccgcaaattgattagtgacatgggcaaaaatgtatccgcaacagatattgagtacctggccaaggtcacttttgaggagagcgcaaaggcattcatgaaggagaccattaaactgggcataaaatcgaggccaaagggtctctgggggtattacctttatcccgactgccacaactacaatgtgtatgcccctaactacagtggatcttgccccgaagacgaggtcctgagaaataatgagttatcttggctgtggaactcaagtgcagccctataccctagtattggcgtctggaaatccctgggcgacagtgaaaatatcctgaggttcagcaaatttcgcgtgcatgaatcgatgcgcataagcacaatgaccagtcacgattatgccctgcctgtatttgtctacaccagattgggttaccgcgatgagcctctgtttttcctgagtaagcaggatctcgtctcgacaatcggtgagtcagcagcgctcggcgctgccggaatagtaatatggggcgatatgaacttaactgcaagcaaggcaaactgcactaaggtaaaacagtttgtgtcttctgacttaggatcatacattgccaacgtaacccgagcagccgaggtctgctcattacacctgtgtcgcaataatggcaggtgtattcgcaagatgtggaatgcccctagctatctgcaccttaaccctgcctcgtaccatatagaggccagcgaggacggggaatttacagttaagggcaaagccagcgacacagacctggcagtgatggcagataccttttcttgtcactgctatcagggttacgagggtgccgattgtagagagatcaagacggctgacggttgcagcggtgtgagtcccagcccaggatccttaatgacactctgcctgctcctgctagcatcatacaggtcgatccagttatag

SEQ ID NO: 4680 - DNA, 1536 bp, synthetic construct
  misc_feature 1..1536: note = source = /note="Description of Artificial Sequence: Synthetic coding sequence"
  source 1..1536: mol_type = other DNA
atgggagtcctgaagttcaagcatattttcttccggtcttttgtgaagagcagcggcgtgtcacagattgtttttacattcctgctcatcccatgttgcctgactctcaattttcgggctccgcctgtaatcccaaatgtgccattcctctgggcctggaatgcacctagtgaattctgtctgggaaagttcgacgagcctctggatatgagtctgttctcctttattgggagcccgagaatcaatgctaccgggcaaggagtgactattttctatgtggaccggttgggttactatccatatatcgacagtatcactggagtgactgtcaacggcggaatcccgcagaagattagcttacaggaccatctggacaaggccaaaaaagacatcacgttttatatgcctgtggacaacctcggtatggccgtcattgattgggaggagtggcgccctacttgggcaagaaactggaagcccaaagacgtgtataagaatcggtctatagagctggtacagcagcagaacgtgcagctgagtctgaccgaggccaccgagaaggccaaacaggaattcgagaaggccggaaaggacttcctggtggaaacaatcaagctggggaaactgctccgccctaatcatctatggggttattacttgtttccagactgctacaaccaccactacaagaaaccgggatataacgggagctgcttcaacgtggaaatcaaaagaaacgatgacctctcttggctctggaatgaaagtactgccctctatccttcaatttatctgaacactcagcagtctcctgtagcagctactctgtatgtccgtaacagagtaagggaggcaatacgcgttagtaagatccccgacgccaagtccccgctccccgtgtttgcctacacccgaatcgtgttcactgatcaggtgctgaagttcctctcgcaggacgaattggtctatacctttggcgagaccgtagccctcggggcaagcgggattgtcatatggggtaccctctcgattatgcgcagcatgaagtcttgtctgcttctggacaattatatggaaactatactaaacccatatattatcaacgtaacgctcgccgctaaaatgtgcagccaggtgttatgtcaggaacaaggcgtctgcatccggaaaaactggaacagctctgattacctccacctgaatccagacaacttcgcgatccagctcgaaaaaggcggaaagttcaccgtgcgtggtaaaccaaccctggaggacctggagcagttctcggagaaattctactgtagttgttacagcacactgagttgcaaggaaaaggcagacgttaaggataccgacgccgttgacgtgtgcatcgccgacggagtgtgtattgatgctttcctgaagcctcccatggagaccgaagaacctcagatattctacaacgcctccccatccactctttctgctaccatgtttatttggaggttggaggtctgggaccaagggattagtcgtatcggctttttttag

SEQ ID NO: 4681 - DNA, 1530 bp, synthetic construct
  misc_feature 1..1530: note = source = /note="Description of Artificial Sequence: Synthetic coding sequence"
  source 1..1530: mol_type = other DNA
atgggagtgctcaagttcaagcatatcttcttccggtcattcgtcaaatccagtggggtgtcccagattgttttcaccttccttctgattccttgctgtctcactctgaatttccgagccccaccggtgatcccgaatgtgcccttcctttgggcctggaacgccccatctgagttttgcttaggcaaatttgacgagcctctggacatgtcccttttcagctttatagggagccccagaattaatgctactggtcagggcgtaaccattttctacgtcgataggttaggatactatccctacattgactctatcaccggggtgacagtaaatggcggaattccccaaaagatttccttgcaggaccacttggacaaggccaagaaggatatcactttctacatgcccgtggacaatctggggatggccgtgatcgattgggaagaatggcggccaacatgggctcgaaattggaaaccgaaagacgtgtataagaacagatccatcgaacttgtccagcagcaaaatgtgcagctgtcattgaccgaggctacggaaaaggccaaacaggaattcgagaaggccggtaaagactttctcgtagagactattaaattgggaaagcttctgaggcccaatcatctgtggggttactaccttttcccagattgctacaatcaccactacaaaaagcctggttacaatggctcctgcttcaacgtggagatcaagaggaacgacgacctcagctggttgtggaatgagtctacagccctgtacccaagcatctatctgaacacccagcagagtccagtggccgctactctgtacgttcgtaacagggttcgagaggctataagggtttcaaagattcctgatgcaaagtctccattgccagtgtttgcttacaccagaatcgtgttcaccgatcaagttttgaagtttctctcccaggacgaactggtatatacttttggcgagactgtcgccctgggagccagtgggatcgtcatttgggggacgctgtcgatcatgcgttctatgaaaagctgtttactgctcgacaattacatggagactattctgaatccctatatcattaatgtgaccttagccgcaaaaatgtgctcccaggtgctttgccaagaacagggcgtgtgcatccgaaaaaactggaacagtagcgactatctccatctcaatcccgacaacttcgccattcagttggaaaaagggggtaagtttacggtgcgcggtaagccgacactagaggacctggaacagtttagtgaaaaattttactgcagctgctacagtaccctgtcctgtaaagaaaaggctgatgtaaaggacacagatgccgtggacgtctgcatagccgatggcgtttgtatcgatgcctttctgaagccacccatggagactgaagagcctcagatcttctataacgcctcgccttctactctgtccgctaccatgttcatcgtgtcaatcctattccttattatctcctccgtcgcctcactttag

SEQ ID NO: 4682 - DNA, 243 bp, synthetic construct
  misc_feature 1..243: note = source = /note="Description of Artificial Sequence: Synthetic coding sequence"
  source 1..243: mol_type = other DNA
atgggtgttctgaagtttaagcatatcttcttcagatctttcgtgaaaagttcaggagtctcgcagattgtgttcacttttttgttgatcccctgttgcctgaccctgaactttagagcccctcctgtcatcccaaacgtcccatttttgtgggcgtggaatgctccttccgagttctgcctgggtaagtttgatgagcctctggatatgagccttttcagctttatcggctcccccaggtag

SEQ ID NO: 4683 - DNA, 1530 bp, synthetic construct
  misc_feature 1..1530: note = source = /note="Description of Artificial Sequence: Synthetic coding sequence"
  source 1..1530: mol_type = other DNA
atgggagttctaaaatttaagcacatcttcttccgcagcttcgttaagagttctggggtgtcccagatcgtcttcaccttccttttgatcccatgttgtctgaccctgaatttccgcgcacccccagttatcccaaacgtcccttttctgtgggcctggaatgcaccatctgagttttgtctgggcaagttcgacgaacccttagatatgagcctgttcagcttcatcggttctccccgaataaatgcgacaggtcagggagtgaccattttttatgttgacaggttaggctattatccatacatcgatagcatcaccggggtgacagtgaatggaggaatcccacagaagatttccctgcaagatcaccttgacaaggcaaagaaggacattacattctacatgcctgttgacaatctgggcatggctgtcattgattgggaagaatggagacccacatgggctcggaattggaagcctaaggacgtgtacaagaataggtcaattgaactggtccagcagcagaacgtgcaactgtctctgaccgaagcgactgaaaaggctaagcaggagtttgagaaagcaggcaaggattttcttgtggagaccatcaaattgggtaagctattgcgccctaatcatctgtgggggtattatctgttcccagattgttacaaccatcattataagaagcctgggtataacggctcttgtttcaacgttgaaatcaagagaaatgacgatctctcttggctgtggaacgagtcgactgccctgtatccttccatttaccttaacacacaacagtcacctgtcgctgctacactctatgtgcggaaccgcgtgcgggaggccatcagggtgagcaagatcccggacgccaagagcccccttcctgtgtttgcatatacgagaatcgtattcaccgaccaagtgctgaaattcctgagccaagacgagctggtctatacttttggagagaccgttgctctgggggcttctggaatcgtaatctggggaacgttgtccataatgagaagcatgaaaagttgcctactcctcgacaactacatggagacaatactgaatccatacataattaacgttaccttagcagcgaaaatgtgctcccaggtactgtgccaggaacagggcgtgtgtattcgaaaaaactggaactcgagtgattacctccacttgaacccagacaactttgctattcagctagaaaaggggggaaaatttacagttagaggtaaacctaccctggaggatctcgagcaattcagcgagaagttttattgctcctgctattcaactttatcatgtaaggaaaaggccgacgttaaggatacagacgccgtggacgtttgtatcgctgacggagtatgcatcgacgcctttttaaagccacctatggagaccgaagagcctcagatattttataatgcctccccaagcacgctctctgcgacaatgtttatcgttagcatcctgttcctaatcatctccagcgttgcttcattgtag

SEQ ID NO: 4684 - DNA, 1530 bp, synthetic construct
  misc_feature 1..1530: note = source = /note="Description of Artificial Sequence: Synthetic coding sequence"
  source 1..1530: mol_type = other DNA
atgggggtattgaaattcaaacatatcttcttcaggagtttcgtcaagagttccggagtgtcacagattgtgttcacttttctcctcataccctgctgtcttacactgaattttagagcccctcctgtcattcctaatgttccgtttctttgggcttggaacgccccttccgaattttgcctcggaaaatttgatgaaccactggacatgtccctgttctcctttatcggcagccccagaatcaacgccaccggacagggagtgaccatattttacgtggacaggctgggctattacccttatattgacagcattaccggggtgacggtcaacggtggcatcccccaaaagatcagtctccaggaccatctggataaggccaagaaagacatcactttttatatgcctgtggataacctggggatggcagtgatcgattgggaagaatggcggcctacttgggcccgtaattggaaacctaaggacgtctataaaaaccgctccatcgagctggttcagcagcaaaatgtccagctgagtcttacggaagctactgaaaaagctaaacaggaattcgagaaagcgggtaaggatttcctggtcgaaacaatcaaattggggaagctcctgcgacccaaccacctgtggggttactatctcttccctgattgctacaaccaccattataagaagcctgggtataacgggtcctgcttcaatgttgagataaaacggaacgacgacctctcctggctgtggaatgaaagtactgccctttacccatctatctatcttaacactcagcaaagcccagttgctgcgaccctttatgtgagaaaccgggtgcgcgaagcaatacgcgtgagcaagattcctgacgccaaaagccccctcccagtgtttgcatatacccggatcgtgtttacagaccaggttctaaaattcctttctcaggatgagttagtttacacctttggcgagaccgtcgccctgggcgctagcggcatcgttatctggggaacgctatccatcatgcgctctatgaagtcctgcttgctcctggacaattacatggagaccatcctgaacccctacatcattaatgttactctggccgcaaaaatgtgctcgcaggtcctttgtcaggagcagggtgtctgtattagaaagaactggaactctagtgattatctgcatctaaatcccgacaatttcgccattcagctcgagaaggggggtaaattcaccgtccggggaaaacccacgctcgaggatcttgaacagtttagtgaaaaattctactgcagttgctacagcacactgagctgtaaagaaaaggctgacgttaaggacacggacgccgtcgacgtgtgcattgccgatggggtatgtattgacgcatttttaaaaccccctatggaaacggaggaaccccaaattttttataacgcctctccatcaaccctgtccgccacaatgttcattgtctcaatcttgttcctgattatttccagcgttgcttctctttag

SEQ ID NO: 4685 - DNA, 1764 bp, synthetic construct
  misc_feature 1..1764: note = source = /note="Description of Artificial Sequence: Synthetic coding sequence"
  source 1..1764: mol_type = other DNA
atgccaagatacggcgcaagcctgcgccaatcctgtcccagaagtggacgcgagcaaggtcaggatggcaccgcgggtgcacctggattgctgtggatggggctcgtgctggctctcgctctcgccctagcacttgctttggctttgtcagattccagagtgttatgggccccagctgaagcccaccccttatcccctcaagggcatccagccaggcttcatcgcatagttccacgcctgagggatgtgttcggttggggaaatctgacatgtcccatttgcaaaggacttttcaccgccatcaacttgggactgaagaaagagcctaatgtggccagggtaggttctgtcgccataaaactgtgtaatctgctaaagattgctccacctgctgtatgccagtcaattgtgcacctgttcgaagacgacatggtggaagtttggcgccgatccgtcctatcaccctctgaggcatgcggcctgctgctggggagtacttgtggacactgggacatcttttccagctggaatatcagtctgcctacagtaccaaaacctccacccaagcccccaagtcccccagccccaggcgcacccgtttcacgcatcctgttcctcaccgatctgcactgggaccacgactatctggagggtacagaccctgactgcgccgaccctctgtgctgcagaagaggaagcgggctgcctcccgcaagccgcccaggggctgggtattggggtgaatatagcaagtgcgatctccccctgcgcactctcgaatcacttctgagcgggcttggtcctgccggaccattcgatatggtgtactggacgggcgacatcccagcccacgatgtgtggcaccagacgcggcaggaccagctgagagcactgaccactgtcactgccctagtcagaaagtttttggggccagtgccagtttaccctgccgtggggaatcacgaatctacaccagtcaattccttcccccctccatttattgagggtaaccactcaagcagatggctctacgaggcaatggctaaagcctgggaaccctggctgcccgcagaagctttgagaaccctccggtatctgagttctgtcgagacacaggagggcaaaagaaaggtgcacataattggccacattccccctgggcactgcctcaagtcttggagttggaactattatcgcatcgtagctcggtatgaaaatacactggccgcacaattcttcggacatactcacgtggacgagtttgaggtgttttacgacgaagagactctctcaagacccctcgcagtggccttcctggcacccagcgccacaacatacatcggcctcaacccgggatatagggtgtatcagattgacggaaattactcgggatcttcacatgtggtgctcgatcacgagacttacatcctgaacctaactcaagccaacatccccggtgctattccccattggcagctgctttatagagcaagggagacctatggtctgccgaacacattgcccactgcctggcataatctggtctatcggatgagaggtgacatgcagctatttcagacattttggttcctatatcacaaaggccacccgccttcagaaccctgcgggacaccatgcaggctggctacattatgcgcacagctgtccgcacgagcggattcccctgccctgtgcaggcatctgatgcccgacgggagccttcccgaagcacaatccttgtggccaaggcccctcttctgttag

SEQ ID NO: 4686 - DNA, 1896 bp, synthetic construct
  misc_feature 1..1896: note = source = /note="Description of Artificial Sequence: Synthetic coding sequence"
  source 1..1896: mol_type = other DNA
atgcccaggtatggcgcaagcctccgccagagctgcccccgatccggaagggaacagggccaggatgggacagctggggctcccggtctcctgtggatggggctcgtgttggctctggccctcgccttagcattggctctagccctctcagatagcagggtgttgtgggcgccagcagaggcccaccctctgtctccccagggccacccagccagactgcacagaatcgtccccagactgagagacgtcttcggttgggggaacctgacttgtccgatttgtaaagggctgttcacagccataaaccttggcctgaagaaagagccgaatgtggccagggtgggctctgtcgcaatcaaactgtgcaatctcctgaagatcgcccctccagctgtgtgccaatccatagtccacctgtttgaggatgatatggtggaggtctggcgcaggtcagtgctatccccctcggaggcctgcggcttgttgcttggttctacgtgcggtcactgggatatcttttcatcatggaatatctctctccctacggttcccaaaccaccacctaaacccccttcccccccagcccctggggcaccagtgagtcgtatcctcttcctcactgatctgcattgggatcacgattatcttgaaggaacggatccagactgcgctgaccccctgtgttgtaggcgtgggagcggactgcccccagcgtcaagaccgggagctgggtactggggtgaatactccaagtgtgatctgcccttgcgcaccctcgaaagcctcctctccggtctggggccagctggcccttttgatatggtgtattggaccggagatatccctgcacacgacgtctggcatcagaccagacaggatcagctcagagccttaaccaccgtaactgcgctagtgagaaagttcctggggccagtgcctgtctaccccgctgtgggaaatcatgaatcaactcctgtgaatagttttcctccaccattcatagaggggaatcactccagccgatggctatacgaggctatggcgaaagcatgggaaccatggttaccagcagaagcactccgaacgcttcggatcggcggtttttacgcactgagtccctaccctgggctccgactgatcagcctaaatatgaatttctgcagtcgcgagaacttctggctgctgatcaattccacggaccccgcaggccagctgcaatggctggtgggagaactgcaggccgctgaagatagaggcgacaaggttcacatcatcggacatatccctccgggacattgccttaaatcatggtcgtggaactattaccggattgtggccaggtatgagaataccctcgcagcccagttctttggccacacccacgtggacgagtttgaggtgttctatgacgaagagaccctgagccgcccactggccgtggcattcctggcacccagcgcaacaacatatattgggcttaaccctgggtatcgtgtgtaccagatagatggcaattactccggatcaagtcatgtcgtcctcgaccatgagacctacatcctaaacctcacgcaggctaatattcccggtgctatcccccactggcagctcctctaccgcgctcgagaaacctacggacttcctaacacgttacctaccgcttggcacaatcttgtctatcgcatgaggggggatatgcagttatttcaaaccttctggttcctgtaccacaagggccatcctcccagtgagccatgtggtactccatgtaggcttgccacactctgcgctcagctgtccgcccgtgctgatagtcccgctctgtgtaggcatttaatgcccgacggcagtctaccagaggctcagtccctctggccgagacccctattttgctag

SEQ ID NO: 4687 - DNA, 1728 bp, synthetic construct
  misc_feature 1..1728: note = source = /note="Description of Artificial Sequence: Synthetic coding sequence"
  source 1..1728: mol_type = other DNA
atgccgcgttatggggcttctctgaggcagagctgtccccgaagcggcagagaacaggggcaggatggcacagcaggagctccaggacttctctggatgggactcgtgctcgcattagcacttgcactcgccttggcactggccttgtccgattccagagttctgtgggcgccagccgaggcacacccactctcccctcaggggcatccagctcggctgcacaggatcgtgcctagactccgggacgtgttcggttgggggaatctgacctgccctatatgcaaaggcctgttcacggccatcaacctgggtctaaagaaagagcccaatgtggctagggtaggctctgtcgcaataaagttatgtaatctgttgaagattgctccaccagccgtgtgtcagtctatagttcacctgtttgaggacgatatggtagaggtgtggaggcgatctgtcttgtccccgtctgaggcttgcgggttgctcctcggcagcacctgcggccattgggacatattctcttcctggaacatcagtcttcctacagtgccaaaaccaccacccaaacccccttcacctcccgcaccgggagctcccgtctcccgtatccttttcctgacagacctgcattgggaccatgactacctcgaggggacagacccggactgcgccgaccccctgtgctgtcgacgcggttcaggactcccacctgcgtcaagacccggagcaggttattggggtgaatactcaaaatgcgacctgcctctgagaactcttgagtcgctgctcagcggcctggggccagctgggcctttcgatatggtgtactggacaggagacattcccgcacatgatgtctggcatcagaccagacaggaccagctgcgcgcactcaccacagtaactgccctagtgcgcaagtttctggggcctgtgcctgtatatcctgccgtgggaaatcacgagtcaaccccagtcaactccttcccccctcctttcatcgagggtaatcacagtagccgctggctctatgaggctatggcaaaagcctgggagccgtggctgcctgccgaggcgcttcgaacactcagaaaggtgcacatcatcgggcacataccacccggacactgcctcaaaagttggtcctggaactactatagaatcgtggctagatatgaaaatacattggcggctcagtttttcggccatacccacgtggatgagttcgaggtgttctacgatgaggagacactctcaagaccattggctgtggcttttctcgcaccctcagccacgacttacatcggtctaaatccagggtaccgcgtctatcagattgatggtaattactcaggctccagccacgtagttctggaccacgaaacctatattttgaatcttacacaggccaatatccccggagcaattcctcactggcagctgctgtatcgggcacgggagacatatggactgcccaataccctgcccactgcttggcataatcttgtgtaccgtatgcgaggtgacatgcaactgttccagaccttctggtttctctaccataagggccaccctccaagcgagccctgtgggacgccctgcaggctggccacgctgtgcgcccagctatcagcccgagcagattcccctgccctctgtaggcacctgatgcctgatggctcactgcctgaggctcagtcattgtggccgagacctcttttctgttag

SEQ ID NO: 4688 - DNA, 1893 bp, synthetic construct
  misc_feature 1..1893: note = source = /note="Description of Artificial Sequence: Synthetic coding sequence"
  source 1..1893: mol_type = other DNA
atgcctaggtatggcgctagtcttagacagtcctgtcccagatctgggagagaacagggacaggacggtacagcaggcgcacctggccttttgtggatgggattggtgcttgctcttgcattggccctggccctggccctcgccctgagcgatagcagggttttatgggcgccagcagaagcccatcccctgtccccccagggtcaccctgctcgattacaccgcatcgttcctcggctgcgcgatgtgttcggctggggaaatctaacttgcccaatttgcaagggtctgtttacggctattaatctgggactgaaggagcctaatgtggccagagttggatctgttgccattaaactgtgcaacttgctgaagattgcaccgccagccgtgtgccagtcgattgtacacctgttcgaggatgatatggttgaggtgtggcgcagatcagtgctcagtccctctgaggcttgtggactgctgttggggagcacatgcgggcactgggatatcttttcaagttggaatattagcttgccaacagttccaaaaccacctccaaaacctccctccccccctgccccaggcgctcccgtctcacggattctcttcctgacagatctccattgggatcatgactaccttgaaggaaccgaccctgactgtgcagatccgctatgttgccgtcggggttcaggcttgccccctgcctcacggcctggggctgggtattggggtgaatatagcaagtgtgatctgccgctacggacactggagtctctgcttagcggccttggcccagctgggccttttgatatggtatactggacaggagatatccctgcccacgacgtctggcatcagacccgccaggaccagctgcgagctctgaccaccgttaccgctctcgtccggaaattcctggggccagtaccggtctaccccgctgttggtaatcatgaatccacaccagtgaattctttccccccaccctttatcgaaggaaatcattcaagcagatggctctatgaggctatggccaaggcttgggaaccctggctcccagcggaggcccttcggacattgcgaatcggcggattctacgcattgagcccctatcctgggctcaggctgatttctctgaatatgaatttctgttcacgggaaaacttctggctgctgattaactcaacagatcctgccggacaactgcagtggttagtcggggaactgcaagccgctgaagatcggggtgacaaggtacacattataggccacattcctcccggacactgccttaagagctggtcgtggaactactaccgcatcgtcgctagatacgaaaatacactcgccgcacagttcttcggacatacacatgtagatgagttcgaggttttttacgatgaagagacattgagcagacccctggctgtggccttcctcgctccaagcgccaccacctatatcggcctgaatcctgggtacagagtgtatcaaattgatggcaactattcaggctcatcgcacgtggttcttgaccacgagacctacatcctgaacctcactcaagcaaacatacccggtgccataccacattggcagctcttgtatagagctagagagacctacggcctgcctaatacactgccaaccgcctggcataacctcgtttaccggatgcggggagatatgcaactgtttcagaccttttggttcctttaccacaaaggacatcctccatctgaaccatgcggcacgccttgccggttggctaccctctgtgcacagctctctgctcgcgctgattcccccgcactgtgccgccacctcatgcccgacggatccttacccgaagctcagagtctttggcctcgccctctgttctgctag

SEQ ID NO: 4689 - DNA, 1101 bp, synthetic construct
  misc_feature 1..1101: note = source = /note="Description of Artificial Sequence: Synthetic coding sequence"
  source 1..1101: mol_type = other DNA
atgcctcggtatggagcatccctcaggcaaagctgcccacggtcggggagagagcagggtcaggacggaactgccggagccccaggactgctgtggatgggactggtactggcccttgcactggcattggcattggccttggctctgtctgacagcagagtgttgtgggctccagctgaggcacacccactaagtccccaaggacacccagcgaggttgcaccgtattgtgccaagactccgtgatgtcttcgggtggggaaacctgacctgcccaatatgtaaagggctttttacggccatcaacctcggtcttaagaaggaaccaaacgtggccagggtcggatctgtggcgataaagctatgtaacctcttaaagatcgcaccccctgccgtctgtcagagtatcgttcatctctttgaagacgatatggttgaggtctggagacgctcagtccttagcccctcagaagcttgtggattgttgctcgggtccacgtgtggacactgggatattttctcaagttggaacattagcttgccgacagttcccaagccaccaccaaagccaccttctcccccagccccaggagcccctgtgtcgcgaatcctcttcctgacagatcttcattgggaccatgattacctggaggggactgatcctgactgcgcagaccccttatgctgccgtagagggagtggcctcccccctgcctccagacctggcgctggttactggggagagtatagcaaatgtgatctacccttgcgcactctggaaagccttctcagcgggcttggacccgctggaccctttgatatggtgtactggactggcgacataccagcccatgatgtctggcaccagacgagacaagaccagcttagggcgttgactacagtgaccgctctagttcggaagttcctgggacccgtccccgtgtaccctgctgtgggaaatcatgagtctacgccagtgaatagttttccaccgccatttatcgaaggaaaccattccagccgctggctctacgaggcaatggctaaggcatgggaaccgtggctgcctgccgaggcactgcggaccctgcgttgcatttag

SEQ ID NO: 4690 - DNA, 1209 bp, synthetic construct
  misc_feature 1..1209: note = source = /note="Description of Artificial Sequence: Synthetic coding sequence"
  source 1..1209: mol_type = other DNA
atgcctaggtatggggcttctcttcggcagtcatgtccgaggagtggccgagaacaggggcaggatggtactgcaggagcaccgggtctgctctggatggggttggtcttggccctggctctggcgctcgcgctcgccctcgcactgtcagactcccgagttctgtgggcacccgctgaagcccatcccctgagtccacagggacatcctgcaaggcttcacaggatcgtcccccgactgagggatgttttcggatggggtaacttgacctgccccatttgtaaaggccttttcacagctattaacttgggactaaaaaaagaacctaacgtcgccagggtgggaagtgttgccatcaagctgtgcaaccttctgaagatcgctcctccagccgtctgccagagcattgtccatctcttcgaagacgacatggtcgaagtttggcggaggagcgtcttgtctccttctgaggcatgtggcctgctcctgggttctacttgtggacactgggacattttctcttcctggaatatttctcttccgacagtgccaaagccaccacctaaaccaccctcaccaccggcaccaggcgctccagtgtccagaatcctcttcctcacggacctccactgggatcacgattatctggaggggacggaccctgactgtgctgatcccctttgctgtaggcgcggaagcgggctgcctcccgcttcccgcccaggtgcgggatactggggtgaatacagcaagtgtgatctacccttacgcactttggaatccctgctttcaggcttgggaccggctggaccctttgatatggtgtactggaccggcgacattcccgcacatgacgtgtggcaccaaaccaggcaggatcaactgcgtgccctcaccacagtgacagctctcgtgcgcaagtttctgggaccagtccccgtgtaccccgcagtaggcaaccacgaaagcacaccggtgaactcctttccaccaccttttattgaaggtaatcactctagtcggtggttgtacgaggctatggccaaggcgtgggaaccatggctccccgctgaagctttacgaacattacgctatttaagctcggtcgaaacccaggaggggaagcggaagaattggggggtgctctgcagcttcccaatcccacgttctccaccacacctgtcacagtatgaatttctctttccatag

SEQ ID NO: 4691 - DNA, 954 bp, synthetic construct
  misc_feature 1..954: note = source = /note="Description of Artificial Sequence: Synthetic coding sequence"
  source 1..954: mol_type = other DNA
atgtacaacatgatggagaccgagctcaagcctccaggaccccagcaaacctccgggggaggcggaggtaattcgacagccgcagcagctgggggaaaccaaaagaacagcccggaccgcgtaaaaagacccatgaacgcgtttatggtctggtcacggggacaacgacggaaaatggcacaggaaaaccccaagatgcacaatagcgagatctctaagcggttgggagccgaatggaagctcctgtccgagaccgagaagcgtccttttatcgatgaggccaaacggcttcgggctctgcacatgaaagaacatccagactataaataccgacctagaaggaagacaaagacactgatgaaaaaagacaagtatactctgccaggcggtctgcttgccccaggcggtaacagcatggctagtggggtgggagttggagctggactgggcgcaggagtcaaccagcgaatggattcctatgcacacatgaatgggtggtcaaacggatcttatagcatgatgcaagatcagttgggatatccccagcatccagggttgaatgcccatggcgcagcccagatgcaacccatgcaccggtacgacgtgagcgcacttcagtataactcaatgacaagctcccagacctacatgaacggctcacctacatattctatgtcctactctcagcagggtacacctggaatggctctaggcagtatgggaagcgtggtgaagtctgaggcgtcttctagtcccccagtggtaactagcagttcacacagccgggctccgtgccaagccggagaccttagggacatgatctcaatgtacctgcccggtgctgaggtaccggagcctgctgctccaagcagactgcacatgagccagcactatcagtcaggacctgttccaggcacagccatcaatgggacactgcccctctcacatatgtag

SEQ ID NO: 4692 - DNA, 954 bp, synthetic construct
  misc_feature 1..954: note = source = /note="Description of Artificial Sequence: Synthetic coding sequence"
  source 1..954: mol_type = other DNA
atgtacaatatgatggagaccgagcttaaaccccctgggccacaacagacgtctggtgggggagggggaaactcaaccgcagcagccgcaggcggaaatcagaagaattctcccgatcgcgtgaaaaggccgatgaacgcctttatggtatggtcacggggtcagcgcagaaagatggcccaagaaaacccaaagatgcataattcagagattagtaagcgcctcggtgcagaatggaagcttctgtccgaaacagagaagcgccctttcattgacgaggctaagagacttagggcacttcatatgaaagaacatcccgattataaataccgcccacgtagaaagacaaagaccctaatgaaaaaagacaaatatacactgcctggcggactgctggcacccggaggaaattccatggccagcggggtaggggtgggcgctggacttggcgcaggagttaatcagagaatggacagctatgctcacatgaacggatggtccaatggctcttacagtatgatgcaggaccagctgggctatcctcagcatcccggtctgaatgcacacggagcagcccagatgcagcccatgcatcgatatgacgttagtgccctgcaatacaattcgatgactagtagtcagacatatatgaatgggagccccacgtactctatgtcatactctcaacagggtacaccaggtatggcactcgggtccatgggatcagtggtaaagtcggaggcatcctcttctcctccggttgtgacatcctcttcccacagccgcgctccatgccaggccggtgacttgcgggatatgatatccatgtacctgcctggcgcagaggtgcccgagccagctgctccatctcggctgcacatgtctcagcattatcaatccgggcctgtccccggaactgcaatcaatggcaccctgcccctgtcccatatgtag

SEQ ID NO: 4693 - DNA, 1182 bp, synthetic construct
  misc_feature 1..1182: note = source = /note="Description of Artificial Sequence: Synthetic coding sequence"
  source 1..1182: mol_type = other DNA
atgcatcaagccggttacccagggtgtagaggggcaatggcagagagtcacttactccagtggctattgctactattgccaactctgtgtggacctggaacagcggcatggaccacgagttctctcgcgtgcgcccaggggcctgagttctggtgccagtcacttgaacaggcgcttcagtgtcgcgcactcggacattgcctgcaggaggtgtgggggcacgtcggggcagatgacctttgccaggaatgtgaggacatcgtccacatcctcaataagatggctaaagaggctattttccaggacacaatgaggaaatttctggagcaggagtgtaacgtgctcccactcaagctacttatgccccagtgcaatcaggtgctcgacgactattttccactggtcatcgattatttccagaaccagactgactccaacggcatatgtatgcacctggggttatgtaagtctcggcagccggagcctgagcaggagccagggatgtctgaccctctgcctaagcccctgagggaccctctgccggaccccctactagacaagctggtcctgcctgttctgcccggtgctctgcaagccaggcctggcccacacacccaggacctgagtgaacagcaattccccatccccctcccatactgctggctgtgccgcgcactaatcaagcgaattcaggctatgatccctaaaggtgcactcgctgttgcggtggcccaggtctgccgtgtggtgcctctggtggccggaggtatttgccagtgtttggcagaacgctattcggtcatactgctggacacattgctaggtcggatgttgccgcagctggtatgtcgcctagtcctgcgatgcagcatggacgactccgcaggaccgaggtcgcctacaggagaatggctccctagagacagtgagtgccacctgtgtatgtccgtgactacacaagctggcaactccagcgagcaagccatcccccaggccatgcttcaggcatgcgtgggtagctggctggatcgggagaaatgcaaacaatttgtggaacagcacaccccgcagctcctgacactcgtgcccaggggctgggacgctcacacaacatgccaggctctgggggtgtgtggaaccatgtcgagtcctctccagtgcatacattcccctgatctgtag

SEQ ID NO: 4694 - DNA, 1182 bp, synthetic construct
  misc_feature 1..1182: note = source = /note="Description of Artificial Sequence: Synthetic coding sequence"
  source 1..1182: mol_type = other DNA
atgcatcaagccggataccccggatgccgaggcgcaatggccgaatctcaccttcttcagtggctgctgcttttgctgcccaccctatgtgggccaggcaccgcggcatggacgacgtccagcctcgcctgcgcacagggccctgagttctggtgccaaagtctcgagcaggcactgcagtgtcgcgctctgggccactgcctgcaagaagtgtggggccacgtaggtgctgacgacctgtgtcaggagtgcgaagatattgtacacatcctgaataagatggcaaaagaggccatcttccaagacacaatgagaaaattcctggaacaggaatgtaatgtcttgcccctcaaacttctcatgccccagtgtaatcaagtcctggatgactatttccctctggtgattgattacttccaaaatcagaccgattcaaacggaatctgtatgcacctgggactgtgcaagtctcgacagccagaacccgagcaagaaccgggaatgagtgaccctctgcccaagccattacgggaccctcttcccgatccactgttggataaactagtgctgccggtgctccctggagcattgcaagccaggccaggcccacatacccaagacttgagcgaacaacagttcccaatacccctgccatattgctggttgtgcagagctctgatcaaacggattcaagctatgatccccaaaggagccctggccgtggcggttgcacaggtttgcagagtggtgccactggtcgccggaggcatatgccagtgtctggctgaacgatactctgttatcctcctggataccttactgggaagaatgctaccccaactggtatgccggctggttttgcggtgcagcatggatgactccgctgggccaaggagccctacaggtgagtggcttcctagggatagtgagtgtcatttgtgcatgtccgtcaccacacaggctggaaattccagtgagcaggcaatcccgcaggctatgcttcaggcctgcgtcggcagctggttagaccgggaaaaatgcaaacagtttgttgagcagcacacaccccagttgttaacccttgtccccaggggatgggacgcacataccacatgtcaggctctgggggtctgcggcacaatgagcagccccctccaatgtatccactctcctgatctctag

SEQ ID NO: 4695 - DNA, 1050 bp, synthetic construct
  misc_feature 1..1050: note = source = /note="Description of Artificial Sequence: Synthetic coding sequence"
  source 1..1050: mol_type = other DNA
atggcggaatcgcacctcttgcagtggctgctgctcctccttcctacactttgtggcccaggtacagcagcatggactaccagctcccttgcctgtgcacaggggccagaattttggtgtcagagtctcgaacaggccctccagtgtcgagcgctcgggcattgtctgcaggacactatgagaaagtttctagaacaggagtgtaatgttttgcctcttaaattattgatgcctcagtgtaatcaggtgctggacgactacttccccctggtgattgactattttcagaatcagactgattcgaatggtatctgcatgcatctaggattgtgtaagtcccgccagcccgaacccgagcaagagcccggaatgagcgatcccctccccaaacccctgagagatccccttccagatccattgctggacaagttagtgctcccagttctccccggagctctccaggcacgacctgggccacacacccaggatttgagtgagcagcagtttcctatcccactcccttactgttggctgtgcagagctctgatcaaaaggatccaagcaatgatccccaagggagccctggcagtggccgtggcacaggtctgtagggtcgtacctctcgtggccggagggatctgtcagtgcctggcggagcggtactccgttatcctgctcgacacgcttctaggtagaatgctgccgcagcttgtgtgtcgacttgtactgcgatgtagcatggatgatagcgcgggaccacggagcccaaccggagagtggcttcctcgggattcagagtgtcacctctgtatgtccgtaacaactcaggccggtaacagttcagaacaggccattccccaagctatgctccaagcttgtgtggggtcatggcttgaccgggagaagtgcaaacagtttgtcgagcagcacaccccccagctgctgacgctggtgcctcgcggatgggacgcacacactacctgtcaggccctgggtgtctgtggaacaatgtcttcaccccttcagtgtattcattctccggatttatag

SEQ ID NO: 4696 - DNA, 1152 bp, synthetic construct
  misc_feature 1..1152: note = source = /note="Description of Artificial Sequence: Synthetic coding sequence"
  source 1..1152: mol_type = other DNA
ggagccatggctgagagtcacttactgcagtggctgctcttgcttctgccaactctatgtgggcctggtacggctgcatggacgacgtctagtctcgcctgcgctcaagggccagaattctggtgtcagagtctcgagcaggcactgcaatgccgcgctttggggcactgcttgcaagaggtatggggtcatgttggagctgatgatctgtgccaggagtgcgaggatatcgtgcacatcctgaacaagatggccaaggaggcaatttttcaggacactatgcgtaagtttttagagcaggagtgtaacgttctgcccctgaagctgctgatgccccagtgcaatcaggtgctggatgattactttccccttgtgattgattatttccagaatcagaccgactccaacggaatctgtatgcaccttggactctgcaaaagtcggcagccagaacccgaacaggagcccggaatgtctgaccctctgcctaaaccattgagagatcccctgccagatcctctcctcgacaaattagtgctgcccgtcttacctggcgcactgcaagcacggccaggaccgcatacacaggatttaagtgagcagcagttccccatacctcttccgtactgctggctgtgccgcgcactgatcaagcgcatccaagcaatgatccccaagggagcccttgcagtagcagtggcccaggtgtgtcgcgtagtcccgcttgtcgccggtggtatctgccagtgcctcgccgaacgttatagcgtcatcctcttagatactcttctgggacgcatgctgccgcaacttgtatgtcgcttagtgctcaggtgtagcatggacgactctgcgggaccacgctcgccaaccggagagtggctacctcgcgacagcgaatgtcatctgtgtatgtccgttacaacccaggccggaaattcaagcgaacaggctatcccacaggccatgctccaggcatgtgtgggatcttggttagatagagagaagtgcaagcagttcgtggagcagcacacaccccagcttctaacactcgtccccaggggctgggatgcccatacgacatgccaggctttaggtgtttgtggaaccatgtcctcacccttacagtgtatacacagcccggacctttag

SEQ ID NO: 4697 - DNA, 1728 bp, synthetic construct
  misc_feature 1..1728: note = source = /note="Description of Artificial Sequence: Synthetic coding sequence"
  source 1..1728: mol_type = other DNA
atgctcggcgttctggtgctcggggctctggctctcgctgggcttgggttcccagcccctgcagagcctcaacctggcggtagtcagtgtgtagaacatgactgttttgccctttatccaggacccgcaacatttcttaatgcctcgcagatttgcgacgggctacgcggacacctgatgacagttaggtcgtctgtggcagccgacgtgatctccctgctgctgaacggtgacgggggagtcggcagacggagactgtggatcggcctgcagctgcctcctgggtgcggcgatcccaaacggctcggcccactgcggggtttccagtgggtcaccggggacaacaacacctcgtattctaggtgggctcgactcgacctcaacggagcaccactctgtggacctctctgtgtggctgtttccgctgccgaggccaccgtgccttcggaacctatatgggaagagcaacagtgcgaagttaaagccgacgggtttctgtgtgaattccatttccccgcaacatgtcgcccactggctgtagaaccaggggcagctgcagctgccgtgagcatcacgtatgggactccttttgccgcacgcggagccgatttccaagctctaccagtgggcagtagcgccgctgtggcaccactgggactgcagctgatgtgtacagcccctcctggggcagtgcaggggcactgggcacgggaagcaccaggcgcttgggactgtagcgtggagaatgggggttgcgagcacgcatgcaatgccattccaggagctcctagatgtcagtgtcccgctggagccgctctgcaggctgacggaaggagttgcacagctagcgccacgcaatcgtgtaatgatttgtgtgagcacttttgcgtgcctaatccagaccagccaggaagctacagctgtatgtgtgaaactggttatcggctggcagcagaccaacatcgatgtgaagatgttgatgactgcattctggaaccttccccatgtccccagcggtgcgtcaatactcaaggtggatttgagtgtcactgctaccctaattatgatctggtggacggagaatgcgttgaaccagtagatccatgttttagagcaaattgtgagtatcagtgtcagcctctgaaccagacaagctacctgtgtgtttgcgccgagggcttcgcacccatcccccacgaaccccatcggtgtcagatgttctgtaaccaaaccgcatgtccagccgactgcgatcccaacacacaggcttcatgcgagtgtccagagggctatattctggatgacggctttatctgcactgatatcgatgagtgcgagaatggcggtttctgttcaggggtttgccacaaccttcctgggacatttgagtgcatttgcggacccgactccgccctggcccgtcacattgggaccgattgcgactccgggaaggtggacggcggagattctggatctggcgaacctccaccgtctccaaccccagggtccacactgactccccctgctgtgggcctggtacactctggccttttgatcgggattagtatcgctagtctgtgtcttgttgtggcactactggccctgctgtgccacctgaggaagaaacagggcgctgccagggccaagatggagtataagtgtgcagccccatccaaggaagtggtgctccagcacgtgaggaccgaaagaactccgcagcgcctgtag

SEQ ID NO: 4698 - DNA, 1674 bp, synthetic construct
  misc_feature 1..1674: note = source = /note="Description of Artificial Sequence: Synthetic coding sequence"
  source 1..1674: mol_type = other DNA
atgagcgaagcagcctcccaggggttgagggctgccgcaaggagcgtatgggccggtactgaccgccgagggtgtagacacagacgtccagtccctttgtgtagtggtactgcactgagccaatgtccccgttttccacgaaggctgcatgccgctagattgggcaacatgctcggcgttttagtattaggtgccttggcactggcgggattggggttcccagcacccggatgtggtgatcccaagcgattgggtcctttgcgcggttttcagtgggtaaccggggacaacaacacaagttatagccgctgggcccgactggatttgaatggcgctccattatgcgggccactctgcgtcgccgtttcagctgccgaggccactgtgccatccgaacccatttgggaggaacaacagtgcgaagtgaaggccgacggctttctgtgtgagttccatttcccagccacctgcagaccactggccgtggaacccggagctgccgcagctgccgtgagcattacctatggcactcctttcgctgccagaggagctgattttcaggccttgccggtgggatcttcagcagctgtcgctcctcttgggctccagttaatgtgtaccgctccgccaggtgcagtccaaggacattgggcccgagaagcacctggcgcttgggattgctcagtagaaaatgggggatgtgaacatgcttgtaatgcaatacctggtgcacccagatgtcagtgccctgcgggagcagctctccaggccgacggtcgttcctgtactgcctccgctactcagtcatgcaacgacctgtgtgaacatttctgtgtgcccaacccagatcaacccggttcttactcttgcatgtgcgagaccggttatagactggctgcagatcagcacagatgtgaggatgtggatgactgcatccttgagccgagtccatgtccccagaggtgtgttaatacccagggcggattcgaatgccattgttatcctaactacgacctggtggatggcgaatgcgtggagccagtcgacccgtgctttcgcgcaaactgtgagtaccagtgccaacccctgaaccagaccagctatttgtgtgtctgtgctgaagggttcgccccaatcccccatgaaccgcaccggtgccagatgttctgtaatcagacggcctgcccagccgattgtgatcctaacacgcaggcaagctgcgaatgccccgaggggtacatcctggatgatgggttcatatgtaccgacattgacgagtgtgagaatgggggattctgcagcggcgtgtgccacaatcttccaggtactttcgagtgtatttgtggcccagatagcgccttggctaggcacatcggtaccgattgcgatagcggcaaagtcgacggcggagacagtggcagtggtgagccgccacccagcccaacacccggttccactctgacaccaccagctgttgggttagtccacagtgggctgctcatcggcatatctattgcctccctgtgtttggtggtagccttactcgctttgctgtgccacctccggaagaagcagggagcggcaagggccaagatggagtacaagtgtgccgcacccagtaaggaagttgtgctgcagcatgtcagaactgagagaactccgcagagactctag

SEQ ID NO: 4699 - DNA, 1062 bp, synthetic construct
  misc_feature 1..1062: note = source = /note="Description of Artificial Sequence: Synthetic coding sequence"
  source 1..1062: mol_type = other DNA
atggagctgacggaactcctgctggttgtcatgttgcttttaactgcccgactgacgctgagctccccggctcctccggcttgcgacctgcgagtgctttctaagctgttgagggactctcacgtgctgcacagccggcttagccagtgtccagaagtccacccgctgcccacccccgtactccttcctgccgttgactttagcctcggggagtggaagacccagatggaggaaaccaaggctcaggatatcctaggcgcagtgaccttacttttagagggggtaatggccgctcgagggcagctgggacctacctgcctgagcagcctgctgggccagttgagtgggcaagttcgcctcctgctgggtgccctgcagagtcttttagggacacagctcccacctcaaggtaggacaactgctcacaaagaccctaatgccattttcctaagcttccagcacctcctcagaggcaaggtccgctttctcatgcttgtgggagggtctactctttgtgtccggagggcgccaccaaccaccgctgtcccttcccgcacgtcacttgttttgacactgaatgaacttccgaacaggacatccgggctactggagaccaatttcacagcaagcgctcggacaaccggatccggactgttgaagtggcagcaaggcttccgtgcaaaaattccagggttgctgaaccaaacttccaggagcctcgatcagattcccggatacttgaaccgcatccatgagttattgaacgggacgcggggactcttccctggacctagtagacgcaccctgggggctcccgatatttcttcggggactagcgataccggatcgctcccacctaatttgcagcccggatatagcccctctcccacacaccccccaaccgggcagtataccctgttcccactgcctcccaccttgcctaccccagtagtgcaactgcatcccctgcttccagatccgtcggcacccaccccaaccccaacttctccgttgttgaatacgtcttatacccattcccagaacctgtcccaagaggggtag

SEQ ID NO: 4700 - DNA, 945 bp, synthetic construct
  misc_feature 1..945: note = source = /note="Description of Artificial Sequence: Synthetic coding sequence"
  source 1..945: mol_type = other DNA
atggagctaactgagctgctgttagttgttatgctactcttgacggcaaggttgacacttagctcccccgctcctccagcctgtgatcttcgggtgcttagcaagctgctcagagactcccacgtgctgcattcgcgcctgtcacaatgtccggaagtgcatcccctgccaacacccgtgttacttcccgctgtggacttcagtctcggggaatggaaaacccaaatggaggagactaaggcacaggacatcctcggcgctgtcactcttctgctcgaaggcgtgatggccgcaagggggcagctcggacccacatgtctcagtagcttactggggcagctttcgggccaggtccggctgctgctgggcgctctccaaagtctactcggcactcagctccctccccaggggcgtaccacagcccacaaggaccccaacgccatatttctgtcatttcagcacctgctgaggggaaaaacctccggactcctcgagacaaacttcaccgccagcgccaggactacaggttctggtttactgaaatggcagcaggggttccgcgcaaagattcccggtctgttaaatcagacgtctcgttcacttgatcagatccccggataccttaacaggatccacgaactgttgaatgggactcgcggactcttcccgggaccgagtcgccgaacactgggcgcaccggacatttcctctggcaccagcgacactggctccctccctcctaacctccaaccaggatattctccttcacctacacatccaccgacggggcagtacacgctattcccccttccccctaccctacctacaccagtggtccagttgcatcctctgctgccggatccatccgctcctacccctacaccaacaagcccactgcttaacacctcctacacacactcacaaaacctatcccaggagggctag

SEQ ID NO: 4701 - DNA, 861 bp, synthetic construct
  misc_feature 1..861: note = source = /note="Description of Artificial Sequence: Synthetic coding sequence"
  source 1..861: mol_type = other DNA
atggaactgacagagctcctactagtagtcatgttactgcttactgcccgtttgaccctatcttcgcccgcacctcctgcttgtgatctccgggtgctatcaaagctgctgagagatagccacgtgctgcactcccgcctgtcacaatgcccagaagtgcaccctctgcctactcctgtgctgttgccagctgtggattttagcttaggcgaatggaagacgcagatggaggaaaccaaggctcaggatatcctcggggctgtgactctgcttctggagggggtaatggccgctcggggacaacttggcccaacttgtctatcctctctcttggggcagctgtccggacaggtgcggctgctacttggtgccctgcagagcctcctgggcactcagctcccacctcaggggagaactaccgctcataaagaccccaatgcaattttcctgtcattccaacatctgttgcgcggaaaagacttctggattgttggtgacaagctccattgcctgagccaaaactactggctgtgggctagcgaagttgctgcaggcatccaatcgcaagattcttggtcagctgaacccaacctacaggtgcccggtccgaatccccgaatccctgagcaagatacacggacactcgagtggaactcttggacactgagctggacactcactcaggaccctcggagtcccggacacttcttgcggaatattcgccatcgcctgcctgcaactcagccccctgcttggatttttagctttcccaatccttcgtcttattggacagtctacgccctcccatcgtctactcacctggctcacccctgcggtcccgcaccgcctcccgcttcttag

SEQ ID NO: 4702 - DNA, 1050 bp, synthetic construct
  misc_feature 1..1050: note = source = /note="Description of Artificial Sequence: Synthetic coding sequence"
  source 1..1050: mol_type = other DNA
atggaacttactgagctgttgctggtggttatgctcttacttaccgctcggctcactctgagctcaccagcccctcctgcctgcgacttgagagtcctcagcaagctgctgcgcgacagccatgtactgcatagccggcttagtcaatgtccagaggtccaccctctcccaactcctgtcctccttcccgctgttgattttagcctcggggagtggaaaactcagatggaagagaccaaggctcaggacattctaggtgctgtcaccctgctcctggagggcgtgatggccgctagaggccagctcgggcctacatgcctatcatctctcctcgggcagctgagtggtcaagtgaggctcctgttaggcgctctgcaatcactgctggggacgcaggggagaacgaccgcgcataaggaccccaatgccatattcttgtccttccagcatttactgagaggaaaggtacggtttcttatgttggtcgggggaagcaccctgtgcgtgcggcgtgccccaccaactactgctgtcccaagtcgcacctccctggtcctgaccctgaatgagctgcctaacaggaccagcggactactggaaacaaactttaccgcgtcggccagaaccacaggcagcggactactgaaatggcaacagggttttcgcgcaaaaatacctggactcctaaaccagacaagcagaagtcttgaccagatccctggatatctcaatcggatccacgaactgctcaatggcactcgcggactcttccctggaccgagtagaaggactctaggagcacccgatatcagttctggtacctcagacactggcagccttcccccaaacctgcagcctggctattcccctagccctactcatccacccaccggtcagtataccctgtttccactcccgcctactctgcctacccctgtggtgcagctccacccattactccccgatcctagtgcccctacgccaacacctacctcccctttgctcaacaccagttacacccatagccagaacctttctcaggagggatag

SEQ ID NO: 4703 - DNA, 963 bp, synthetic construct
  misc_feature 1..963: note = source = /note="Description of Artificial Sequence: Synthetic coding sequence"
  source 1..963: mol_type = other DNA
atgcccatgtaccaggtgaagccctaccacggcggaggagctccgctgagggttgagttacctacgtgtatgtatcgcttaccaaacgtccacggtaggtcgtatggacccgctcccggtgctggacacgtacaggaagagagtaacctgtctctgcaggcattagaatcccggcaggacgatattctcaaacgcctttatgagcttaaagcggcagtcgacgggctctccaaaatgatccagacccctgacgccgatctcgatgtgactaacattatccaggctgatgagcccactactttgaccacaaatgctttggatttgaatagtgtgctcggcaaggactacggtgcattaaaggacattgttataaatgctaacccagctagcccccctctgtcactgctcgttttgcatcggcttctgtgtgagcatttcagagtcctgagcacggtccacacacattcttctgttaagtccgtgccggagaatctgttgaagtgtttcggggagcaaaacaaaaaacagccgagacaggactatcagctagggtttactttgatctggaagaacgtcccgaaaactcagatgaagttcagcatccagaccatgtgtcctattgagggcgaagggaacatcgctcggtttctcttctccctgttcggacagaaacacaatgccgtgaatgccacccttatcgacagttgggtagacatcgccattttccagttgaaggaaggctccagcaaagagaaggctgccgtttttaggagtatgaactctgcactcggcaagtctccatggctggctggcaacgaactgacagtcgcggatgttgtgctgtggtcggtcctgcagcaaatcgggggatgctcagtcaccgtgcctgctaacgtgcagcgttggatgagatcgtgcgagaaccttgcccctttcaacacagctcttaaactccttaaatag

SEQ ID NO: 4704 - DNA, 1068 bp, synthetic construct
  misc_feature 1..1068: note = source = /note="Description of Artificial Sequence: Synthetic coding sequence"
  source 1..1068: mol_type = other DNA
atggaacgtctgtggggtctgttccagcgggcacagcagctttctcctaggagcagccagactgtctatcaacgagtggagggaccgcgaaagggtcatctggaagaggaggaagaggacggtgaagagggagccgagacactggctcacttctgcccaatggagctgaggggaccagaaccactgggaagtaggccccgacagccgaatctcatcccgtgggctgccgctggcaggcgcgcagccccatacttagtacttaccgcccttctcatcttcaccggggcattcttgctcggttatgtggccttccggggaagctgccaggcttgcggggatagcgtcctggtggtctccgaagatgttaattacgaacccgacttagattttcaccaaggtagattgtattggtctgatctgcaggccatgttcctccagtttctgggggagggacggctggaagataccattcgacagacttcgctgagggagcgcgttgctggttccgcaggcatggccgctctgactcaagatatcagggcggcactatcccgccagaagctcgaccatgtgtggaccgatacgcactacgtcggtcttcagtttccagatccggcacaccccaacaccctacattgggtggacgaggccggaaaggtgggggaacagctgccccttgaagacccagatgtatactgtccgtactctgcgattggtaacgtcaccggcgagctcgtttatgcccattatgggaggcccgaggacctgcaggacttacgggctcggggagtggacccagtgggcaggctgttactggttagagtgggagtgataagtttcgctcagaaggaggcacagaggccgtgcggaccgcctcgaatggccggagagcctccccgactccccttgtctcccggacctcgcgctaccaccgccgcttccggccagcagtcccaggatctgcaccctcatcagcagcatctgaggctgcatcgacggccactgcgtgccagatctctgcgctgccacagaggtccagagggctgcatgggtccaagatcctcgtag

SEQ ID NO: 4705 - DNA, 2406 bp, synthetic construct
  misc_feature 1..2406: note = source = /note="Description of Artificial Sequence: Synthetic coding sequence"
  source 1..2406: mol_type = other DNA
atggagcggctttgggggctgttccaacgggcacagcagctctcacctagaagtagccagacagtgtaccagagggtggaagggccacggaagggccacctggaagaggaagaggaagacggtgaagagggcgctgaaacacttgcccacttctgtcccatggaactgcgcggacctgagccacttggatctagaccgaggcagccaaatctgatcccttgggccgcagccggacgcagggcagccccatacctcgtcctaacggcactactcatttttaccggggcttttctgctcggttatgtggccttccgcggatcttgccaggcctgcggcgatagtgtgcttgtagtgtctgaagatgtgaactacgaacctgatctggattttcaccaaggcagactttattggagtgacctgcaagctatgttcttgcagtttctcggcgaagggaggttggaggacaccatccggcagacctcgttgcgggaaagggttgcaggatctgccggtatggctgcgctgacacaggacatccgtgccgcactgtcaagacagaaactggatcatgtatggacagacacccactatgtgggtctgcagtttccggaccccgcacaccccaacacactacactgggtcgacgaggctggcaaggttggagaacagctcccgctggaggatccggatgtgtattgcccctactccgctatcggcaatgtcacaggagagctggtctatgcacattacggccgaccggaggacctgcaagatttgagagccagaggtgtggatcctgtgggccgtctgttactggtgcgcgtcggggtgatatccttcgcacagaaggtaacaaatgctcaggattttggcgctcagggagtgctgatctatcctgaaccagcagatttcagccaagatccaccaaagccatctctctcaagccaacaggctgtgtacggacatgtgcatctggggaccggcgacccttacaccccaggctttccaagcttcaaccaaacgcagtttccccctgtggcttccagcggcctgccttcaatccccgcacagcctatatccgcagacattgccagtcgcctccttcgcaaactgaagggaccagttgcgccacaggagtggcaggggagtctactgggctctccctaccacttggggccaggtccccgtcttaggctcgttgtcaataatcatcggacttctacccccattaataatatatttgggtgcatagagggtcgctctgagcctgatcattacgtggtgatcggtgcccagcgggacgcatggggtccaggggcagcaaaaagcgcagtcggcactgccatactccttgagcttgttaggactttcagttctatggtctcaaacggtttcagaccaagacgtagcctgttgttcatatcatgggatggcggtgactttggatccgtcgggtccaccgaatggctggagggatacttgtccgtgttacatttgaaagctgttgtctatgtgtcattggataatgccgttctgggcgatgacaaatttcacgctaaaacaagccctctactgaccagcctgatcgaatcagttctgaagcaggttgactccccaaaccattctgggcagaccctgtatgagcaagtcgtgttcacaaatccgtcttgggacgcagaggtaattcgcccactacccatggattctagtgcttactcatttacagcctttgttggtgtcccggctgtggagttcagcttcatggaagacgaccaggcatatccgttcctccatacaaaggaggatacttatgagaacctacacaaggttctgcagggacgtctgcctgccgttgcacaggccgttgctcagcttgccggacagctgctaattagactgagccatgatcgactgttgcccctagacttcgggcgttatggcgacgtagtactgagacacatcgggaacctgaacgaatttagtggcgatctgaaagctagaggactgactttacagtgggtctacagtgcccgtggagattatatcagggccgctgaaaagttacgccaggagatatacagttctgaagaaagagacgagaggctgactcgaatgtataatgtgaggattatgcgggtcgaattttacttcctgtcccagtatgtgtctcccgcagactcaccattccgacacattttcatgggtaggggcgaccatacgctcggcgctctcttagaccatttaagactacttaggagcaactcaagcggaaccccgggagcaacgagtagtaccggcttccaggagtctcgattccggagacagctggccttgctgacctggacactgcaaggggctgcaaatgccttaagcggcgatgtgtggaatatcgacaacaatttttag

SEQ ID NO: 4706 - DNA, 1029 bp, synthetic construct
  misc_feature 1..1029: note = source = /note="Description of Artificial Sequence: Synthetic coding sequence"
  source 1..1029: mol_type = other DNA
atggtatctaatggtttcaggcctcgccgtagcctcctgtttatttcatgggatggcggtgattttggatccgtgggatcaacagaatggctagaggggtatctgagtgtgctccacctgaaggctgtggtgtacgtgtctcttgataacgccgtcctgggcgacgataaatttcatgccaagacgtcacctctgctgaccagcttaatcgaaagcgtcctgaaacaggtcgactcccccaaccactcaggacaaaccctctacgaacaggtggtgttcactaatccctcttgggacgccgaagtgatccggcctttgcctatggactctagtgcctattcctttactgcctttgtcggcgtcccagccgtggaattttctttcatggaggatgaccaggcctacccctttctgcacacaaaggaggacacctacgagaatctacataaggtgctgcaaggtagactcccggcagtcgcacaggcggttgctcagctcgcagggcagttactcatcagactgagccatgatcgccttctgcccctggatttcggccgatacggcgacgttgtactgaggcacattggaaatttgaatgagtttagtggagacctgaaagcgagaggacttacactccagtgggtgtatagcgctagaggtgactacattcgagcagccgaaaaactgaggcaggagatttacagctccgaagagcgggatgaaagactgacccgcatgtacaacgtgagaataatgcgcgtggaattttacttcctgtctcagtatgtgtcccccgcagattctcccttccggcatatattcatgggtagaggggaccacactttgggtgcgttgttggaccatctgcggctgctcagatctaattcgtctggtacgcccggagccacttcttcgacaggctttcaagagtcaagattcaggcggcaactggccttgctcacatggactctgcagggcgcagcgaacgcgctctctggcgacgtttggaatatagataataatttttag

SEQ ID NO: 4707 - DNA, 1596 bp, synthetic construct
  misc_feature 1..1596: note = source = /note="Description of Artificial Sequence: Synthetic coding sequence"
  source 1..1596: mol_type = other DNA
atggcggcaactctggacctcaaatctaaagaggagaaggatgcagagctggacaaacgcatcgaggcccttcgaagaaaaaatgaagccctgatcaggcgttaccaggaaattgaagaggatcgcaaaaaggcagaacttgagggggttgctgtgacagcccctcggaaaggtagatcagttgagaaggagaatgtagctgtcgaaagcgaaaagaacctgggtcccagcagacggtcccctgggacccctcgccctcctggcgctagcaaaggagggagaacccctccccaacaagggggacgggcaggaatgggcagagcttcccgcagctgggagggttccccaggggaacagccacgaggcggaggtgctggagggaggggaaggcggggaagaggcagagggtctccacatctttcaggcgctggggatacttctataagcgatcggaaatccaaggagtgggaagagaggcgacggcagaacattgagaagatgaacgaggagatggagaaaatcgcggagtatgagcgaaaccagcgcgagggtgtgcttgagcccaatcctgtgcgaaactttctcgatgatcccaggcgacgttcagggcctctggaagaaagcgagagggacagacgtgaggagtcgaggaggcacggcaggaattggggtggacctgatttcgagcgcgttcgctgcggactggaacatgagcgccagggtcggagggcgggactgggcagtgcaggggatatgacactgagtatgacggggagggaacgctcggagtaccttcgttggaaacaggaacgtgaaaaaatcgatcaagagcgcctccagcggcaccgtaagccgactgggcaatggaggagagaatgggacgccgagaagacagacggtatgtttaaggacggtcccgtacctgcacatgagcctagccatagatacgacgatcaggcctgggctcgccctcctaaaccaccgacatttggagagttcctcagccagcacaaggccgaggcctccagtcgtcgaaggcgcaaaagcagcaggcctcaggcaaaggccgcaccccgagcctacagtgatcatgatgatcgctgggagacaaaggagggtgccgcaagtccagcacctgaaacaccccagcctacgagtcctgagacctcgcctaaggaaacgccaatgcaaccccctgaaatccccgctcccgctcaccgacctccagaagatgagggagaagaaaatgagggagaggaggatgaggaatgggaggacataagtgaagacgaggaggaggaggagattgaggtagaagaaggggacgaggaagagccggctcaggatcaccaagcacctgaggctgcgcctactggcattccgtgctccgagcaggcccacggcgtaccattcagcccagaggaacccctgctcgagccccaggcaccaggcacacccagctcaccatttagccccccttcggggcaccagccagtttctgattggggggaagaggtggagttaaattcacctcgtacgacccatctggcaggagccctgagccctggggaggcctggccttttgaaagtgtgtag

SEQ ID NO: 4708 - DNA, 1329 bp, synthetic construct
  misc_feature 1..1329: note = source = /note="Description of Artificial Sequence: Synthetic coding sequence"
  source 1..1329: mol_type = other DNA
atgcactactgtgtgttatcagcatttctaatcctgcacttggttactgttgccttgtccctctcaacttgttctacactggatatggatcagttcatgcggaagcgcatcgaggccatcagggggcagattttgtccaaattgaaacttactagtccacctgaagattatcccgaacccgaagaggttcccccagaggtcatctctatatataacagcacccgcgatttgctgcaggagaaagcttcaaggagagctgcagcatgcgaacgggaacggtctgacgaagagtattatgctaaagaagtttacaagattgatatgcctccgtttttcccatcagagacagtttgtcccgtcgtgacgaccccttccgggtccgtcggcagtttatgctcaaggcaaagccaggtgctttgtggctacctcgatgccatacctcctactttctatcggccttactttagaatcgtgcggttcgatgtgagcgccatggaaaaaaatgcttctaacctcgttaaagccgagttccgagtattccgactacaaaatcctaaggcaagggtaccagagcaacgcattgaactctaccagatactgaagtctaaggacctgacatcgcctacacagagatacatcgactctaaagtggtaaaaactagagccgaaggcgaatggctgagctttgatgtcactgacgccgtgcacgagtggttgcaccataaagacaggaacctgggctttaaaatctctcttcattgcccttgctgtacgttcgttccatcaaacaattacatcatccccaacaaatcagaggagcttgaggccagatttgcgggaattgatggcacctccacatatacgagcggtgaccagaaaacaattaagtccacaaggaaaaagaatagtggtaagaccccgcacctgctgctcatgctgctgccgtcctatagactggagtcgcaacagaccaatcggagaaagaagagggcattggacgcagcgtactgtttccgcaacgttcaggacaattgttgcctgaggcctttatatatcgattttaagagggaccttggctggaagtggattcatgagccaaaaggctacaacgcaaatttctgtgccggagcctgtccatacctttggtcctccgacacacagcattctcgcgtgttgtccttatataataccattaatcccgaggcctcggcctccccttgctgcgttagtcaggacttggaacccttgacaatcctgtattacatagggaaaacacctaaaatagaacagctgagcaatatgatcgtgaaaagctgcaaatgtagttag

SEQ ID NO: 4709 - DNA, 1245 bp, synthetic construct
  misc_feature 1..1245: note = source = /note="Description of Artificial Sequence: Synthetic coding sequence"
  source 1..1245: mol_type = other DNA
atgcattattgcgtcctgtccgcatttctcatcctccacctggtaaccgttgccctgtccctgtcgacctgtagcactctcgacatggaccagtttatgaggaaacgcattgaagcaatcagagggcaaatattaagtaaattgaaattgacctcgccgcctgaggattaccccgagcccgaggaggttcctccagaagtgatatccatttataatagtactcgcgatttactccaggagaaagcctcccgtcgggctgccgcttgcgaacgggaacgctcagacgaggaatactacgctaaagaggtgtataagatcgatatgccaccattttttccaagtgaaaatgctatacctccaaccttttaccggccttacttcagaatagtgcgttttgacgtctctgccatggaaaagaacgcatcgaacctggtcaaagccgaattccgcgtgttccggctgcaaaaccccaaggccagggtgccggagcagcggatagaactgtatcaaatcctgaagtcaaaggacttaacctccccaactcagcggtacattgacagcaaagtcgtgaagactagagcagaaggtgagtggctaagtttcgatgtcactgacgctgtgcacgagtggctgcaccacaaggatcggaacctggggtttaagatttcactgcattgcccctgctgcacgttcgtgcccagcaacaactacatcattcccaataagagtgaagaactggaagcgaggtttgctgggatagatggaactagcacctataccagtggggaccaaaaaactattaaaagcacacgcaaaaaaaactccggtaaaacgccacaccttctgttgatgctgcttccatcttaccggcttgaaagccagcaaacaaacaggagaaagaagagagcattagatgccgcatattgctttaggaacgtgcaggacaattgttgcttgcgtccgctctatattgacttcaaaagagatctcgggtggaaatggattcatgaaccaaaaggatacaacgctaatttttgtgcgggagcctgcccttacctgtggagtagcgacacacagcatagcagagtactctcgctctacaacaccatcaacccggaagcctcggctagcccctgttgcgtgtcacaagacctcgagcccctgaccatactgtattacatagggaagactccaaaaatagaacaattgtctaatatgatcgtgaagtcttgtaagtgctcctag

SEQ ID NO: 4710 - DNA, 1239 bp, synthetic construct
  misc_feature 1..1239: note = source = /note="Description of Artificial Sequence: Synthetic coding sequence"
  source 1..1239: mol_type = other DNA
atgaagatgcacctgcagcgcgctctcgtggtactggcgctgctgaacttcgcaacagtgagtctaagtctgtcgacctgtacaacccttgatttcgggcacatcaagaagaagagagtggaggctattaggggtcagattctcagcaaactccggttgacctctcctcctgagcctaccgtgatgacccacgtgccttatcaggtactcgctctgtacaactcgacgcgggagctgctagaggaaatgcacggagagcgggaggaaggctgtactcaagagaataccgagtcagagtactatgctaaggagatccacaagtttgatatgatccaagggctcgccgagcataatgaacttgctgtgtgtccgaaaggaattacctccaaagtttttcggttcaatgtgtcaagcgtcgaaaaaaaccggacgaaccttttcagagcggagttccgggtactgcgggtcccgaatccatccagcaaacgtaacgagcagagaattgaactgttccaaatacttagacccgacgagcatatagctaagcagaggtacattgggggaaaaaatctgcctacccgtggaaccgcagagtggctctctttcgacgtgacagatactgttcgagagtggttgctccggagggagtccaatctagggctggagatctccatacactgcccctgtcataccttccagcccaacggcgatatcctggaaaacatccacgaggttatggaaatcaagtttaaaggggtcgataatgaggacgatcacggcagaggagatcttggccgattaaaaaagcagaaagaccaccacaatcctcatcttattctcatgatgattcccccacacaggctcgacaatcccggacaagggggtcagcgaaaaaaaagagccttagacacaaactattgtttccgtaatctggaggagaactgttgtgtgcggccattatatatcgactttaggcaggacctgggctggaagtgggtccacgaaccaaaaggttactacgccaacttttgttctggcccttgcccctacctgagatcagctgataccacacattctaccgttttgggcttatacaacaccctgaaccctgaggcttcagccagcccctgctgcgtccctcaagatctcgagcccctgacaattctatactacgttgggcgtactccaaaagtagagcaactctcaaatatggtggtgaaatcctgtaaatgttcttag

SEQ ID NO: 4711 - DNA, 930 bp, synthetic construct
  misc_feature 1..930: note = source = /note="Description of Artificial Sequence: Synthetic coding sequence"
  source 1..930: mol_type = other DNA
atgaagatgcacctgcaaagagcattggttgtgcttgccctgctaaatttcgctacagtgagtctctcgctgagtacttgcactactttggactttgggcacattaaaaagaaacgcgtggaggctattaggggtcagatcctgtctaaactgaggcttacctcgcctccagaacctacagtaatgacccacgtgccgtatcaggtgctggctttatataactctacacgggagctgctggaggaaatgcacggagagagagaggaaggatgcacccaggagaataccgagtctgaatattacgccaaggaaatccacaagtttgacatgatccagggtctggccgagcacaacgagcttgccgtttgcccgaaaggcattaccagtaaggtgttccggttcaatgtctccagcgtggaaaagaaccgcacaaatctgtttcgggcagaatttcgagtgttgcgggtgcccaatccttcatcgaaacgaaatgagcagagaattgagcttttccagatcctgcgcccagacgaacacattgccaaacagcgatacatcggtgggaaaaacctacctacacgtggaacagctgagtggctgagcttcgatgtcactgacaccgtaagggaatggcttcttagacgtgaatctaaccttggactggagatttccatccactgtccgtgtcatacattccagcccaacggggacattctcgagaatatccatgaggttatggaaatcaagttcaaaggagtggacaatgaagacgaccacggcaggggtgatttgggccgtttgaagaagcagaaggaccaccataatccccatctgatattgatgatgatcccaccgcaccgcctcgacaatcctggacaaggaggtcagcgtaagaagcgagctttggacacgaactattgtttcaggtag

SEQ ID NO: 4712 - DNA, 444 bp, synthetic construct
  misc_feature 1..444: note = source = /note="Description of Artificial Sequence: Synthetic coding sequence"
  source 1..444: mol_type = other DNA
atggcttctcaccgcttgttactcctctgcctggccggtctcgtgttcgttagtgaagcaggtccaactggtaccggagagtcaaagtgcccactaatggtcaaggtgctggacgcagtacggggatcacccgcaatcaatgtggccgtgcacgtttttcggaaggctgccgatgacacctgggagccttttgctagcggcaaaacatcagagagcggtgagctgcacggactaaccaccgaagaggagttcgtcgagggcatctacaaggtcgaaattgataccaagagttactggaaggccctgggaatttctccatttcatgaacacgctgaagtggtatttaccgctaatgactccggcccacggaggtataccatcgccgctctactgagcccctattcctatagcaccactgctgtcgtcactaatccgaaagagtag

SEQ ID NO: 4713 - DNA, 555 bp, synthetic construct
  misc_feature 1..555: note = source = /note="Description of Artificial Sequence: Synthetic coding sequence"
  source 1..555: mol_type = other DNA
atggcgtcgcatcgactgcttctgttatgcctagccggtctggtcttcgtgtcggaggctggtcccaccggcaccggggaatccaagtgccctttgatggtgaaggtcttggacgccgtgcggggatcccctgcaatcaacgtggccgtgcatgtctttcgtaaggcagctgacgacacttgggagccatttgctagcgggaaaacatccgagagtggggagcttcacgggctgacgacggaggaagagtttgtagaggggatatacaaagtcgagatagacacgaaaagctattggaaagcactgggaatatcgccttttcacgagcacgccgaagttagcatccagacttttgaagcctttcaggagatcctgtataaaaaaaagttcaccactctttggcattggacctccggcggacagtccttttttcgggctctggtggaggtagtgtttaccgctaacgattcaggcccacggaggtacacaatcgccgctctcctctcgccctactcatacagcaccaccgccgtcgttactaacccaaaggagtag

SEQ ID NO: 4714 - DNA, 420 bp, synthetic construct
  misc_feature 1..420: note = source = /note="Description of Artificial Sequence: Synthetic coding sequence"
  source 1..420: mol_type = other DNA
atggcaagccataggttactgctgctgtgcctggccggattagtgtttgtctccgaagccggacctaccggaacaggagagagcaagtgcccactgatggtgaaggtcctggacgccgtgagaggcagccccgctatcaacgtggcagtacacgtgttccggaaggccgcagacgacacgtgggagccatttgctagcgggaaaacaagtgaatccggggagctgcatggccttacaacagaggaagagttcgtggagggcatttataaggtggagatcgatacaaagtcctactggaaggccttgggcatctcacccttccacgagcatgcggaggtagtattcaccgcgaacgattccggccctagacggtactattcatattctaccaccgccgtcgtgaccaaccccaaggagtag

SEQ ID NO: 4715 - DNA, 996 bp, synthetic construct
  misc_feature 1..996: note = source = /note="Description of Artificial Sequence: Synthetic coding sequence"
  source 1..996: mol_type = other DNA
atgaatggcacccgcaactggtgtactctggtagacgtgcaccccgaggaccaagccgctgtgtacttgaagggacgctcaggagataaaatgatacatgagaaaaatatcaaccagcttaaaagtgaggtgcaatacattcaggaagctaggaattgcctccagaaactgagagaagatatttccagcaagctagatcgtaacttaggcgactctctgcatcgccaagaaatccaagtggttctggagaaacctaatgggttcagtcagagccccaccgcactctattccagtccccctgaagtggacacttgtataaacgaagatgttgagtctcttcggaagacagtgcaagacttgctggcaaaactgcaggaagccaaaaggcaacaccaaagcgactgcgtagcttttgaggtcactctctcccgatatcaacgagaagctgagcagagtaacgttgctctgcagcgcgaggaggaccgagtggagcagaaggaagccgaagtcggtgaactccaacgccgactgttgggcatggagacggaacaccaggcactgctcgcaaaggtaagggaaggggaggttgctctagaggagctgcgatccaataacgctgattgccaagctgagagggaaaaagcggcaaccctggaaaaggaggttgctggcttacgagagaagatccaccatctggatgatatgctgaagtcacagcagcgcaaggtcaggcaaatgatcgagcagctacagaattcgaaggctgtcatccaatctaaagacgccaccatccaagagttgaaagagaaaatcgcatatctggaggccgaaaatctagagatgcacgacaggatggaacacctgatcgagaagcagatttctcatggaaatttttctacccaggccagggcgaagaccgagaaccctggatcaatacggatctctaagccccctagtcctaagcccatgcctgtcatcagagtcgtggagacatag

SEQ ID NO: 4716 - DNA, 1098 bp, synthetic construct
  misc_feature 1..1098: note = source = /note="Description of Artificial Sequence: Synthetic coding sequence"
  source 1..1098: mol_type = other DNA
atgaacgggacccggaactggtgcaccttggttgacgtgcatcctgaggaccaggcggcagcaggcaggaaaacttacgcgatggtgtcgtcacattcggctggacactccctggcatccgagctggtagagtcacatgacggacacgaggagataataaaggtgtacctcaagggcagatcaggcgacaagatgattcatgaaaaaaatatcaatcagttgaaatccgaggtgcagtacatacaggaagccagaaactgcctccagaagctgagagaggatatcagcagcaagttggataggaacctcggcgacagtctccacagacaggaaatccaagtggtcctcgagaagccaaatggattttcacagagcccaactgccttatactcttctcctcctgaggtagacacttgtatcaacgaagacgtggagtccctcaggaagacggtccaggacctgttagctaaactgcaagaggctaaaagacagcaccaatcagactgtgttgccttcgaggtgactttgtctcggtaccaacgggaggctgagcaatctaacgtagcattgcagcgggaagaagatcgcgtggaacagaaggaagctgaggtcggcgagttgcagcggagactccttggcatggagactgaacaccaggccctcttggccaaagttcgcgagggggaggtcgccctggaagaactgagatccaataatgcagactgccaggccgagcgggagaaggccgcaaccctggaaaaagaggttgccggtctgagagagaaaatccatcacctggacgacatgctgaagagccagcaacggaaggttcggcagatgatcgagcagctacaaaatagcaaagctgtgatacaaagcaaagatgcaaccatccaggaattaaaggagaagattgcctatctggaggcagaaaacctcgaaatgcatgaccgaatggagcacctgattgagaagcaaattagccatggtaacttctccacacaagctcgtgctaagaccgaaaacccagggtcaatccggattagcaaacccccttcgccaaaaccaatgccggtgatccgggtggtggagacatag

SEQ ID NO: 4717 - DNA, 1173 bp, synthetic construct
  misc_feature 1..1173: note = source = /note="Description of Artificial Sequence: Synthetic coding sequence"
  source 1..1173: mol_type = other DNA
atgaacggaacaagaaactggtgtacactggttgatgtgcatccggaggaccaggctgctgggtcagtggacattttgcgccttactctgcagggagagttgacaggcgatgagctggaacacatcgctcaaaaagcgggacggaaaacctacgctatggtgagttctcattccgccggacactcacttgcctcggagctcgtggaaagtcacgacggccacgaggagatcatcaaggtgtacttaaaaggacgctcaggtgacaagatgatccatgagaagaacatcaatcagctgaagagtgaggtgcaatacattcaagaggcaagaaactgcctgcagaagcttagagaggacatcagttcaaagcttgacaggaacctgggtgactcgttgcaccggcaggaaattcaggtggtcttggaaaaaccaaatgggttttcacagtctcccaccgctctgtactctagcccccctgaggttgacacgtgcataaatgaagacgtcgagtccctccggaaaaccgtgcaggatctactggcgaagctgcaggaagctaaacgccagcaccagtccgattgtgtggccttcgaagtcactctgtcaaggtaccagagggaagcggagcagagtaatgtggctctccagcgggaggaggaccgggttgaacagaaagaagcggaagtgggggagctccagagacggctgcttggcatggagactgaacatcaagcgctcttggcaaaggtgcgcgaaggagaggttgccctagaggagttgcggtctaacaacgcagattgtcaggcagagagagagaaggccgcaaccctggaaaaggaagtggccggtttgcgggaaaagatccatcatctagacgatatgctcaagagccaacaacgaaaagtccggcagatgattgagcagctccagaattctaaagctgtgatccagtctaaagatgctacaatccaggagctcaaagagaagattgcttatctggaagcagagaaccttgaaatgcacgatcgaatggaacatctaatcgagaaacaaatcagccacggtaatttctccacgcaggctcgggcaaagaccgaaaatcctggctcaataagaatttccaagcctcccagccctaaacctatgcccgttattagggtggtcgaaacctag

SEQ ID NO: 4718 - DNA, 600 bp, synthetic construct
  misc_feature 1..600: note = source = /note="Description of Artificial Sequence: Synthetic coding sequence"
  source 1..600: mol_type = other DNA
atgaacgggacacggaattggtgcacactggtagacgtccaccccgaggatcaggccgctgccggaagaaaaacgtacgccatggtcagttcgcactcggctggacacagtctggcatccgaactagttgagtctcatgatggacatgaggagatcataaaagtgtatctaaagggacgctctggagacaagatgatacatgaaaaaaatattaaccagttaaagtccgaagtccagtacattcaggaagcgagaaattgcttgcagaagcttcgggaagacattagcagtaagctcgaccggaacctcggcgacagtttgcacaggcaggagatccaggtcgtgctagagaaacctaacggtttctctcaaagccctacagccctgtatagtagtcctccagaagttgatacttgtatcaacgaagacgtggaatctctaagaaagacagttcaagatctacttgcaaaactgcaagaagccaagcgtcagcatcaaagcgactgtgtagcattcgaggtgacactgtcccgataccagagggaagctgagcagtctaatgtggccctacagagggaggaggataggtgcccagaatag

SEQ ID NO: 4719 - DNA, 1230 bp, synthetic construct
  misc_feature 1..1230: note = source = /note="Description of Artificial Sequence: Synthetic coding sequence"
  source 1..1230: mol_type = other DNA
atgtcttcacccggaatgactagcctgcagcttgaaaaggaggaatgtatgcagtgcgtgccctgctccccaaggaccagagtcgctctgctggaactgtatcgggctatgtgtcaaggaagcgtggacatcctacggctaaccctgcagggggaactcactggagatgaactggagcacatcgcacagaaggctggacgcaagacttacgcgatggtatcctcccactctgctggacattctctggcaagcgagctggtcgaaagtcatgacggccatgaagagattataaaagtttatctcaaaggtagatctggggacaagatgatccatgaaaaaaacattaaccagctaaagtcagaagtgcaatatattcaggaggccaggaactgtttgcagaagcttcgcgaggacataagcagtaagcttgatcggaatctaggggatagcctccacagacaggaaatccaggtggtcctcgagaaacccaatgggttctcacagtctcccaccgcgctctattctagcccacctgaggtggacacttgtatcaacgaagacgttgaatccctgcggaagactgtgcaggacctcctggcaaaactgcaagaagcaaagagacaacaccagagtgactgcgtggcgttcgaggttactctgtcaagataccaacgtgaggcggaacaaagcaatgtggccctccagcgagaggaagatcgtgtggagcagaaagaagcagaagtgggcgagctgcagcgacgactgctggggatggagactgagcatcaagcacttttagcaaaggtccgagagggagaggtcgctctggaggagctgcggagtaataatgccgattgtcaggccgaacgcgagaaagccgcaactctggagaaagaagtggccggattgcgcgaaaagatccaccatcttgatgacatgctgaaatctcagcagcgaaaagtgcggcagatgattgagcagctccagaacagcaaagccgtgattcagtccaaagatgcgactatccaggagctgaaggaaaagatcgcatacctggaggcagaaaatctcgaaatgcacgataggatggaacacttgattgaaaagcagatttctcacggcaactttagtactcaggcgcgtgctaaaaccgagaatccaggaagtatacgaatatccaaacccccatcccctaagccaatgcccgtcatcagggtggttgagacctag

SEQ ID NO: 4720 - DNA, 543 bp, synthetic construct
  misc_feature 1..543: note = source = /note="Description of Artificial Sequence: Synthetic coding sequence"
  source 1..543: mol_type = other DNA
atgaatggcactagaaactggtgtacgctggtggacgtgcacccagaagatcaggcagcagcgggaagaaaaacctacgccatggttagcagccattctgccggacactcattggcctccgaacttgtagaatcccacgatggccatgaagaaatcatcaaggtctatcttaaagggcgttcaggcgacaaaatgatccatgaaaagaatattaaccaattaaaaagcgaggttcagtatatccaagaggccaggaactgtctgcagaaactaagagaagatatttcttcgaaactagacagaaatctgggcgattccctccatagacaggagatccaagtggtcctggaaaaacctaatgggttctcccagtctcccacggcactaaaggctggtgacacagatgtccaatcagattggaggatgtcttggggtaacgaagtcccatctaccaacacagcacagtttctcgcaaccaattgcctgtttttctacctgctgcacctgcagccaactctgccttggcctcctgccgaccggtag

SEQ ID NO: 4721 - DNA, 1182 bp, synthetic construct
  misc_feature 1..1182: note = source = /note="Description of Artificial Sequence: Synthetic coding sequence"
  source 1..1182: mol_type = other DNA
atggaagagccccagagcgaccccagtgtcgagccacccctgtcccaggagacatttagcgatctttggaagctcctgcctgagaacaacgtgttgtcccccctgccttcacaggcaatggacgatctcatgctctctccagacgacatcgagcagtggttcaccgaggacccaggaccagacgaagcccctcgtatgccagaagcagcccctccggtcgcccctgcaccagccgcaccaaccccagctgctcccgctcctgcaccgtcttggcccctgtctagcagtgtgccctcgcagaagacctatcaagggagctatggattcaggcttggtttcctgcatagcggtaccgcaaagtccgtcacctgcacatattcacctgctttgaacaaaatgttttgtcagctggcaaaaacctgccccgtccagctatgggttgactcaacacccccaccgggaacccgcgttagggccatggcaatctacaagcaatcccagcatatgacagaagtcgtccgtcgttgtccgcaccacgagcgatgtagtgattctgatggactggctccgccacagcacctcataagagtggagggcaaccttcgggtagaatacctggatgatcgcaacaccttccgacacagtgttgtagttccctacgagcctccggaagtaggctctgactgtaccaccatccattacaattacatgtgcaatagttcatgtatgggtggaatgaacagaaggccaattctaacgatcattactctcgaagacagcagtgggaatctgttaggcagaaattctttcgaggtgcgagtctgtgcatgtcctggcagggacagacggaccgaagaagaaaatttaaggaaaaaaggggaaccccaccatgagcttcctccaggaagcacgaaaagagctcttcccaataacacctcctcaagtccacagccgaagaagaaaccacttgacggcgaatacttcacgctgcagataagggggcgagagagattcgagatgtttagggagctgaacgaggctttggagcttaaagacgcccaggcagggaaagaaccaggaggaagtcgggcacatagttcccacctcaagagcaaaaagggacagtccacaagccgccacaaaaaattaatgttcaagaccgagggaccggactcagattag

SEQ ID NO: 4722 - DNA, 1032 bp, synthetic construct
  misc_feature 1..1032: note = source = /note="Description of Artificial Sequence: Synthetic coding sequence"
  source 1..1032: mol_type = other DNA
atggaagagccacaaagcgacccctccgttgaaccacctttatcccaggaaactttttccgatctgtggaaactgttaccggaaaacaatgtcttgtccccattgccctcgcaggcaatggatgatttaatgctgagccctgacgacatagagcagtggttcaccgaggatcctggacctgacgaggcacccaggatgcccgaggcagcccctcctgtggcacctgcccctgccgcacccacccctgccgctcctgcacccgcaccttcgtggcccctttcgtcctctgttccgtcccagaaaacctaccagggtagctatggtttccggctggggttccttcacagcggtacagccaagtccgtgacctgcacttatagccccgcactcaataagatgttttgccagctggctaagacttgccctgttcagttgtgggtcgactccacgcctccccctggtacccgtgtccgcgcaatggcaatttataaacagtcccagcacatgactgaggtcgtgcgcaggtgcccgcatcacgagcgatgctccgatagcgacgggctcgccccacctcagcacctcatccgtgttgaagggaatctccgggttgagtacctagacgacaggaacacattccgccatagcgtggtagtgccttatgaacctccggaggtgggctctgattgtacaaccatccactataattatatgtgcaactcctcctgcatgggagggatgaatcgaagacccatcctgaccattatcaccctggaggatagttctggcaacctactgggacggaactcgtttgaagtccgcgtttgtgcgtgtcccggacgggacagacgcacagaggaggagaacctgcgcaagaagggggagccacaccatgagcttccccctggaagcacaaagcgggctttgcctaataacacctcttcatcaccccagcccaagaaaaaacccctggatggagagtatttcaccctgcagaagacctttcccgcaaggcatggcggatcccatctatag

SEQ ID NO: 4723 - DNA, 1149 bp, synthetic construct
  misc_feature 1..1149: note = source = /note="Description of Artificial Sequence: Synthetic coding sequence"
  source 1..1149: mol_type = other DNA
atggaggaaccccagtctgacccttccgtagagcctcctctatcccaagaaactttctcagacttgtggaagctcctgcccgaaaataacgttctgagccccctgcccagtcaggccatggatgatctcatgttgtcccccgatgatatagaacagtggtttacagaagaccccggacccgacgaggccccacgaatgcctgaagccgctccacctgtagctcccgctcctgcagcccctacacctgcagccccagctcccgctccatcatggcccctgagcagcagtgtgcctagccagaaaacgtaccaaggctcctacggcttcaggttaacctgcacttattccccagcacttaataagatgttctgccagctggcaaaaacatgtcccgttcagctctgggttgactctactccgccaccaggtactagagtgcgtgcaatggcaatctataagcagagccagcatatgactgaagtggtccgtagatgtcctcaccacgaaagatgctccgatagtgacgggctcgcccctccccagcatctgattagggtggaaggaaatttgcgtgtcgagtatctggacgacaggaatacattccggcatagcgtcgtggtcccgtacgagcccccagaggtcggctccgattgcactacaatccactataattatatgtgtaattccagctgcatgggtggaatgaatcgccgacccatacttacgatcattaccctggaagattcgtccgggaatctgctcggcaggaactctttcgaggtgcgggtctgcgcctgtccaggtagagacagacgaacagaggaggaaaaccttcgcaaaaaaggcgagccccaccacgaactgccaccaggaagtactaaacgcgcacttcctaataacacctctagcagccctcagccaaaaaaaaaaccccttgacggggaatattttacacttcagattcggggtagggagcgctttgaaatgtttcgggagctcaacgaagctctggaactgaaagacgctcaagcaggaaaagagccagggggatcccgtgcccactcgtcccacctaaaaagcaagaaaggacaaagtacttcaagacacaagaaactaatgtttaagaccgagggccctgattccgattag

SEQ ID NO: 4724 - DNA, 858 bp, synthetic construct
  misc_feature 1..858: note = source = /note="Description of Artificial Sequence: Synthetic coding sequence"
  source 1..858: mol_type = other DNA
atggaagaacctcaatcagacccatcagtcgaaccacctcttagtcaagagactttcagtgatctctggaagcttttacccgaaaataacgtgctgagccccctgccttcccaggcaatggacgacctaatgctcagcccagacgatatcgagcaatggtttacagaggacccgggacccgatgaggcacctagaatgcccgaggcagcacctccagtcgcccctgcgccagctgcaccaacccctgctgctcccgctcctgcccctagctggcccctttctagttcagtgccttcccagaagacttatcagggaagttacggttttcgccttggatttttacactctggaactgctaagtccgtaacttgtacatattctcctgctctgaacaagatgttctgccagctggcaaagacctgtccggttcagctgtgggtcgacagtactccgcctcctggaacccgcgtgcgggcaatggctatctacaagcagtcgcaacacatgacagaagtcgtccgtcgatgcccccatcatgaacggtgtagcgactccgacgggttagcaccaccccagcatctgattcgggtggaaggaaacttaagagtggagtatctggatgacagaaacacattccggcattctgtcgttgtaccatatgagcctccggaggtcggttccgactgcactaccattcactataattacatgtgtaactcgtcctgtatgggtggcatgaatagaaggccaatccttaccattatcacgctcgaagacagtcgaccgcgacaagttgatcacctgcggtccggagtgcaggactccctggccaatattgctaagtctcacctgtattag

SEQ ID NO: 4725 - DNA, 273 bp, synthetic construct
  misc_feature 1..273: note = source = /note="Description of Artificial Sequence: Synthetic coding sequence"
  source 1..273: mol_type = other DNA
atgttctgccagctggctaaaacatgccccgtccagctctgggttgacagcaccccgcctcccggaacacgggtgcgagcaatggcaatctataaacagtcacagcacatgaccgaggttgtgcggcgttgccctcatcacgaacgatgcagcgacagcgacggactggctccgcctcagcacctaattcgcgtcgaagggaatctcagggttgaatacctcgatgacagaaatacgtttcggcattccgtcgtgagcggcaggcgaggttag

SEQ ID NO: 4726 - DNA, 135 bp, synthetic construct
  misc_feature 1..135: note = source = /note="Description of Artificial Sequence: Synthetic coding sequence"
  source 1..135: mol_type = other DNA
ccactgcctagccaaaggcgcaaccattggatggaaaatataagtccgttttcccaccttaagtcaaaaaagggccaatctacaagcaggcacaagaagctgatgttcaagaccgagggtccagacagcgactag

SEQ ID NO: 4727 - DNA, 1026 bp, synthetic construct
  misc_feature 1..1026: note = source = /note="Description of Artificial Sequence: Synthetic coding sequence"
  source 1..1026: mol_type = other DNA
atggaagagcctcagtcggacccctcggttgagccgccactgagccaagaaaccttcagcgatttatggaaactactgcctgagaacaacgttctgtcacccctcccgagccaggctatggatgacctgatgctgtcccccgacgatatagagcagtggttcacagaggatccgggaccagacgaagcgcctaggatgcctgaggctgcacccccagtcgcccctgcaccagccgcacccactcctgcagccccagcaccagcaccatcatggccgttaagctcatccgtgccttctcagaaaacttaccaggggagttacggattccggctgggctttttgcatagcgggaccgccaagagtgttacttgcacgtacagccctgctcttaataaaatgttttgtcaactggctaagacgtgccccgtccagctgtgggtagactctacccctccacctggaaccagagtcagagccatggcaatttacaaacagtctcagcacatgaccgaggtggtcaggcgctgccctcaccacgagcgctgcagcgattcggacggactggctccccctcaacatttgattcgcgtggaaggtaaccttcgggtggaatacctggatgatagaaacacattcagacatagtgttgtagtcccctacgagcctcccgaagtggggagcgactgtactaccatacactacaattatatgtgcaattcatcctgcatgggtggtatgaatcggagaccaatccttacaattatcaccctcgaagacagctccggtaatctgctgggacggaatagctttgaggtgcgcgtgtgcgcgtgccctggtcgcgatcgaagaacagaggaagagaacctgaggaagaaaggcgaaccacatcacgagctccctcccggatctaccaagcgagcacttcctaacaatacgtcttccagtccccagcctaaaaaaaagccactggatggagaatacttcacattgcaggatcagactagtttccagaaagaaaactgctag

SEQ ID NO: 4728 - DNA, 1182 bp, synthetic construct
  misc_feature 1..1182: note = source = /note="Description of Artificial Sequence: Synthetic coding sequence"
  source 1..1182: mol_type = other DNA
atggaggagcctcagagcgatccaagtgtcgagccacccctctcccaggagaccttttctgatctctggaaactcctgcccgagaataatgtgctctctcctctgcccagccaagcaatggatgacctgatgctctcccccgacgacatcgaacagtggttcacagaggatccaggccctgatgaggccccaaggatgccagaagcggcacccccagtggccccagccccagcggcaccaacccccgcagctcctgcaccagcacctagctggccattgtctagttctgttccttcccagaaaacatatcaggggtcgtacggctttagacttgggttcctgcacagcgggaccgccaagtccgtgacatgcacctattcccctgctttgaacaaaatgttttgtcagttagccaaaacctgccctgtgcaactgtgggttgacagtacacccccacccggaacccgcgtccgcgctatggccatatacaagcagagccagcacatgaccgaggtggtgcggagatgtccacatcatgagcgctgctctgactctgacggcctcgcgcctcctcagcatttgataagggttgaggggaatctcagagtagagtacttggatgaccgcaatacgtttagacattctgtagtcgttccttacgagccacccgaagtgggaagcgattgtacgactattcactataactacatgtgtaattcctcatgtatggggggaatgaacagaaggccaatcctgacaatcattacactggaagactccagtggaaatctgttgggtcgcaatagtttcgaggtgagggtgtgtgcctgcccaggtcgcgatcgacggactgaagaggaaaatttgaggaaaaagggcgagccacaccacgagcttcccccagggtcaaccaaacgggctctccctaataataccagttcctcacctcagcccaaaaagaagcctcttgacggggagtatttcacgctgcagattcgcggtagagagcgcttcgagatgtttagagaactgaacgaagctcttgagctcaaagacgcacaggcaggcaaagaaccgggaggctcgcgagcacactcctcacacttaaaaagcaaaaaagggcagtcgacatctaggcataagaaattaatgtttaagacagaggggccagatagtgattag

SEQ ID NO: 4729 - DNA, 1041 bp, synthetic construct
  misc_feature 1..1041: note = source = /note="Description of Artificial Sequence: Synthetic coding sequence"
  source 1..1041: mol_type = other DNA
atggaggagcctcaatccgacccaagtgtggagcccccactgagtcaggaaacattctctgatctctggaaactcttgcctgagaacaacgtgctgagtcctctcccctcccaggctatggacgatctgatgctctcaccggacgacattgaacagtggttcacggaagatcccggaccggatgaggcacccaggatgcccgaagctgcccctcccgtggcaccagcccctgcagccccaactcctgctgcccctgccccagccccttcttggccgctgtcaagttctgtccccagccaaaaaacctaccaaggctcttatgggtttagactgggatttctgcattcaggcacagctaagtccgtcacgtgtacatatagccccgcactgaacaaaatgttctgtcagctcgccaagacctgtcctgtgcagctgtgggtggattctaccccacctccagggacccgagtacgcgcaatggccatctacaaacagtctcagcatatgacagaggtggtaagaagatgccctcatcacgagaggtgctccgacagtgatggcctggcacctcctcagcacctgatcagggtggagggcaacctaagagtggagtatttggacgaccgcaacaccttccgtcattccgttgtggtgccatatgaaccccctgaagtcggctcagactgtacaactatccattacaactacatgtgtaattcttcttgcatgggtgggatgaacagaagacccatcctgactatcattaccctggaggacagcagtggtaacctcctggggagaaatagtttcgaggtgcgcgtgtgcgcctgtccaggtcgtgaccggaggacagaggaagagaatctgcggaaaaaaggcgaaccacatcacgaacttcccccaggctctaccaagcgtgccttgccaaataatacctcctcttcccctcagccaaagaagaaaccactggatggggagtatttcactctccagatgctgctggatctgaggtggtgctattttttaatcaatagctcttag

SEQ ID NO: 4730 - DNA, 387 bp, synthetic construct
  misc_feature 1..387: note = source = /note="Description of Artificial Sequence: Synthetic coding sequence"
  source 1..387: mol_type = other DNA
atggaggagccccagagcgatccctcggtggagcctcccttaagtcaagagacctttagcgacctttggaaactgttgccagagaataatgtgctgagcccactaccaagtcaggcaatggacgatctcatgctgtcgcctgatgacatagagcagtggtttacagaagaccccggtcccgacgaggccccaagaatgcccgaagctgcccctccagtcgccccagctcccgcagctcctactcccgctgctcccgctcccgcaccctcatggcccctgtctagctcagtgccatcacagaagacctatcaaggttcttatggcttccgactgggcttcctccatagcggtacagctaagtctgtgacttgcacatacagcccatag

SEQ ID NO: 4731 - DNA, 498 bp, synthetic construct
  misc_feature 1..498: note = source = /note="Description of Artificial Sequence: Synthetic coding sequence"
  source 1..498: mol_type = other DNA
atggaggaaccccaatcagatcctagcgtcgagccccctctgtctcaggaaaccttcagtgacctgtggaagctgctccccgagaacaatgtcttgtcacctctgcctagccaggccatggatgatctcatgttatcaccggacgacatcgaacagtggtttaccgaggacccaggcccagacgaagcgccacggatgcccgaagcggctccacccgtggctccggcacccgctgcccctacacctgctgcgcctgctccagccccaagttggcctctgtcctcatcggtaccttcacagaagacgtatcaggggagttacggatttaggctagggttcctgcacagcggcacagccaagtccgtgacttgcacctactctccagccctgaataagatgttctgtcagttggccaagacctgtcccgtgcaactctgggtggatagtaccccgcctccgggtactagggtgcgagcgatggctatatacaagcagtag

SEQ ID NO: 4732 - DNA, 600 bp, synthetic construct
  misc_feature 1..600: note = source = /note="Description of Artificial Sequence: Synthetic coding sequence"
  source 1..600: mol_type = other DNA
atgttctgccaacttgccaagacttgccccgtccagctgtgggttgattcgactcccccaccaggcactagggtgcgggctatggccatctacaagcagtctcaacacatgactgaggtggtgcggcgttgtccccatcacgagcgctgttcagattccgacggcttagcacctcctcaacacttgattagagtggaggggaatctaagggttgagtaccttgatgaccgaaatacttttaggcacagcgtggtggtcccatacgaacccccagaggtgggatcagattgtaccaccatccactacaactacatgtgtaactcctcttgcatgggaggcatgaatcggagaccaatcctgactatcatcacattagaagattcctcaggcaacttattaggcagaaattcatttgaggtgcgcgtctgcgcatgtcccggtcgggatcgaagaacagaggaggaaaacctgcgaaaaaagggcgaaccccaccacgagctgccaccgggttctactaagagggctctgcccaacaatacttctagttcaccccaacccaagaaaaaacccctcgacggggaatattttacactgcagtag

SEQ ID NO: 4733 - DNA, 468 bp, synthetic construct
  misc_feature 1..468: note = source = /note="Description of Artificial Sequence: Synthetic coding sequence"
  source 1..468: mol_type = other DNA
atggaggagccacagagtgatccgagcgtggaacctccactgtctcaggagacctttagcgatctatggaagctgctgccagagaacaatgttttatatagcccagctctgaacaaaatgttctgtcaactggccaaaacctgtcccgtgcagctgtgggtggactcgacaccaccgccagggactcgggtaagagctatggctatttacaagcagtcacagcatatgaccgaagtggtccgacgatgcccccatcacgaacgatgctcggactctgacggactcgcccctccacagcacttgattagagtagaagggaacctgagggtcgagtacttggatgataggaatactttccgccactccgtggtggtgccatatgaaccacctgaagtgggatccgattgcaccactattcactataattatatgtgcaatagcagttgcatggggggtatgaacagatag

SEQ ID NO: 4734 - DNA, 468 bp, synthetic construct
  misc_feature 1..468: note = source = /note="Description of Artificial Sequence: Synthetic coding sequence"
  source 1..468: mol_type = other DNA
atggaggagccacagtcggacccatctgtggaaccacccctcagccaggagacattcagtgacctctggaaactcctgccggagaataacgttttatattctcccgcactgaataagatgttttgtcagctggcaaagacttgtccagtgcagctttgggttgactccaccccccctcccggaacaagggtcagggcaatggccatatataaacaatcacagcacatgacggaggtagtgcgcaggtgtccccaccatgaaaggtgtagtgacagtgatgggctagctcctcctcagcatcttattagggtggaaggcaacctacgagtggagtatttagatgatagaaataccttcagacactccgttgtggtgccatatgagcctcctgaggttggctcagactgcacaaccattcattataattacatgtgtaacagctcatgtatgggcggaatgaataggtag

SEQ ID NO: 4735 - DNA, 1590 bp, synthetic construct
  misc_feature 1..1590: note = source = /note="Description of Artificial Sequence: Synthetic coding sequence"
  source 1..1590: mol_type = other DNA
atgctgttagctgtcctgtattgtctcctttggagcttccagacgtcggccggtcacttcccccgagcctgcgtgtccagcaagaacctgatggaaaaggagtgttgccccccttggtcaggagatcggtcgccgtgcgggcagctatccgggcgaggatcatgccagaatattttgcttagcaatgcaccgctggggcctcaattccccttcacgggcgtggatgatcgtgagtcatggccctcggtgttttataaccgaacttgccaatgtagcggcaatttcatggggttcaattgtggcaattgcaaatttggattttggggcccaaattgtacggaacgacgcctgctggtgagaagaaacattttcgatttatccgcccctgagaaggacaagttcttcgcatacttgactcttgcgaaacacactatcagtagcgactacgtcatcccgattggcacttacggacagatgaagaatggatctaccccgatgtttaatgatatcaacatatacgacctgtttgtttggatgcactactacgtgtccatggacgccctgctcggagggtcagagatctggcgtgatatagactttgctcacgaagcacccgcttttctgccctggcaccggctgttcctgttgcggtgggaacaagaaattcagaagctcaccggcgatgaaaattttaccattccctactgggattggagagatgcagagaaatgcgatatctgcacagatgagtatatgggtggccagcaccccaccaatccaaacctcctctctccagcctcattcttctcatcctggcagatcgtgtgctcgcgactggaggagtacaattctcatcagtctctgtgcaatggcaccccagagggccctttgcggaggaaccctggaaatcacgataagtcacgcacccctcggctgccatcctccgctgacgtggaattctgcctgagcttgacacagtacgagtctggctcaatggataaagccgctaactttagctttaggaacacactagagggatttgccagtcctttgaccggaatcgccgatgctagccaatccagcatgcacaatgccctgcacatctacatgaacgggaccatgtcccaggtccagggatctgccaatgatcctatcttcttgttacatcacgccttcgtcgatagtatttttgaacaatggctcaggagacaccgtcctctccaagaggtctacccagaggccaacgctcctattgggcacaatcgtgagagttatatggtaccctttatccctttgtacagaaatggggattttttcattagcagtaaagacctgggctatgactacagttacttacaggactccgatcctgacagctttcaggattacattaaatcttacttggaacaggccagtcgcatctggagctggttgctcggagcggctatggtaggagccgtcctgaccgcattgctggccggtctcgtctctttgctctgtcgccacaaacgcaagcagcttcctgaggaaaagcagccgctcctgatggaaaaagaagactaccactcattgtatcaaagccacttgtag

SEQ ID NO: 4736 - DNA, 1365 bp, synthetic construct
  misc_feature 1..1365: note = source = /note="Description of Artificial Sequence: Synthetic coding sequence"
  source 1..1365: mol_type = other DNA
atggacccttatatgattcaaatgtcttccaagggcaatctccccagcatcctcgacgtccatgtgaatgtggggggtcggtccagcgtgcccggaaaaatgaaggggcgaaaagcacgctggtcagtccgacctagcgacatggccaagaagaccttcaatcccatacgggcaatcgtagacaacatgaaagttaagcccaatccaaacaaaaccatgatatcgttgtctatcggcgatccaacagtgttcggtaatctaccaaccgaccctgaagttactcaggccatgaaggacgcgctcgacagcggtaaatacaatgggtacgcaccatcaattggatttctgagttctcgtgaagagatagccagctattatcactgcccggaggcccctctggaagcaaaggacgtaatcctcacatccggctgtagtcaagccatcgacctatgcctggcagtgttggcaaatccaggacaaaacatcttggttccacgcccaggcttctccctctacaagacacttgcagagtccatggggatagaggtgaaactgtacaacctgcttcccgaaaagtcatgggagatcgatctgaaacagctggagtacctgatcgatgagaagacggcctgtctgatcgtaaataatccttcgaatccatgtggaagtgtgtttagcaagaggcacctgcagaaaattctggccgtggcagcaaggcagtgcgtaccaattctggccgatgagatctacggagacatggtcttttccgattgcaagtacgaaccccttgccactctatctacagatgtgcctatcttgagctgtggaggccttgccaaaaggtggctggtgccgggttggcggctgggctggatcctcatacacgatcgaagagatatcttcggcaatgaaatacgcgacggattagtcaaactctcccagcgcatcctcggcccttgtactatagtccagggcgctctcaagagcattctttgccgtacccccggtgagttctatcacaacactctcagcttcttgaagagtaatgcagacctgtgctatggggcactcgccgcaattcccggactgaggcccgtcaggccgagcggggctatgtatttaatggtgggtattgagatggaacattttccagagttcgaaaacgacgtcgagtttacggaacgtctagtcgccgagcagtccgttcactgcctgcccgcaacgtgctttgaatatcccaacttcatcagagtcgtgatcaccgtgcctgaagttatgatgctggaggcttgttcccgaatacaggagttctgtgaacagcattatcactgcgccgaaggctcacaggaagaatgcgacaagtag

SEQ ID NO: 4737 - DNA, 1602 bp, synthetic construct
  misc_feature 1..1602: note = source = /note="Description of Artificial Sequence: Synthetic coding sequence"
  source 1..1602: mol_type = other DNA
atggctgttgagagccagggcggaaggccactcgttctaggtctcctgctttgcgtgttaggacccgtggtaagtcacgccggaaagattttgctgattccggtggacggatcccactggctcagcatgttgggagccattcaacaattacagcagagaggccatgagattgtggtcctggcaccggacgccagtttgtatatacgagatggcgctttttatacgctgaagacgtatcctgtgccctttcaaagagaagacgtgaaagaatcttttgtcagcctgggccacaatgttttcgagaatgactcttttctacagagagtcataaagacgtacaaaaagattaagaaagacagtgcgatgctcctgtccggctgcagccacctacttcacaataaagagttaatggcctccctggcggaatcttccttcgatgttatgttaacagatccatttctgccatgcagcccgatcgtggctcaatatctgagcctgccaacagttttcttcctccatgctctaccctgtagcttggagtttgaagcaacacagtgcccaaacccgttctcttacgtgccccgtcccctatcttcccatagcgaccacatgacctttctgcagcgtgtcaaaaacatgctaatcgcattcagccagaattttctgtgtgacgtcgtgtactccccctacgccactctagcttctgagtttctccagcgtgaagtgactgtgcaggacttgctatcaagtgccagcgtttggctgttcagatccgactttgtgaaagactatcctaggcctattatgcccaacatggttttcgtgggcggaatcaactgcctccaccaaaatcccttatcccaggagttcgaggcatacattaatgcttcgggtgagcacgggatcgtggtgttctcgctgggtagcatggtctctgaaattccggaaaaaaaggcgatggctatcgccgatgctttgggaaaaatcccccaaacagtgctgtggaggtatacgggcacaagaccctctaaccttgccaataacaccattctggtgaagtggcttccccagaacgatctcctgggccatccgatgactagagcttttatcacgcacgccggatcacatggagtttacgaatcaatctgtaacggggtgcctatggtgatgatgccactgtttggcgaccagatggacaatgcaaagcgtatggagaccaagggcgctggcgtgaccctgaacgtgctcgagatgactagcgaggacctggagaatgctctaaaggccgtaattaacgataagagctacaaggagaatataatgcgcctctcctcattacacaaagatcggccagtcgagcctctggatctcgccgtgttctgggtggagttcgttatgcgacacaagggggctcctcacctgcggcctgccgctcacgacctgacttggtaccaataccacagtctggacgtcattggttttctacttgctgtggtcctgactgtagcctttatcaccttcaagtgttgtgcatacgggtaccggaagtgtctgggtaaaaagggacgggtgaagaaagcccataagagcaagactcactag

SEQ ID NO: 4738 - DNA, 1335 bp, synthetic construct
  misc_feature 1..1335: note = source = /note="Description of Artificial Sequence: Synthetic coding sequence"
  source 1..1335: mol_type = other DNA
atggccgttgagtctcagggaggcaggcccctagttctcggactccttctgtgcgtcctgggccctgtcgtgagccacgccggtaagatcctcttgatccccgtagatggttcccattggctgagtatgcttggcgctattcaacagctccaacagcgcggacatgagattgtcgttctcgcaccagacgctagtttatacattcgcgatggcgcattttacaccctgaaaacttaccccgtccccttccagcgggaggacgtgaaagaaagctttgtcagtctcgggcataacgttttcgagaacgatagctttctccaacgggttatcaagacctataagaaaattaaaaaggattcagccatgctgttatcggggtgcagccatctgctgcacaacaaggaactgatggcatctctcgctgaaagctctttcgacgtgatgctgaccgatcctttcctcccctgttcccccatagtggcccagtacctttccctccccactgtgttttttttgcacgccttaccttgttcgctagaatttgaagccacccagtgcccaaaccccttctcatacgtacccaggcccctaagttcccactccgaccacatgacctttctgcagcgtgtgaaaaatatgctcattgcattttcccagaacttcctgtgcgatgttgtatattcaccatacgctacactcgcatccgagtttttgcaaagagaggtgacagtacaagatctgttatcctccgcttcggtgtggctgttcagaagtgacttcgtgaaagactatcctcgtcccatcatgcccaacatggtgttcgtagggggaataaattgtttgcaccagaatcccctttcccaagagttcgaagcttatatcaatgcctccggagaacacgggatcgtggtgttttctttgggatccatggtgagcgaaatcccagagaagaaggctatggccatagccgacgccttggggaagatcccacagactgtcctttggcggtacaccggtacgcgaccgagtaatctggccaacaacacaatactagttaagtggctgccacagaatgatctgcttggtcacccaatgacaagggctttcatcacgcacgcaggctctcatggcgtctatgaatctatctgcaatggtgtaccaatggtgatgatgcctctgttcggcgatcagatggacaacgccaaaagaatggaaactaagggagctggggtaaccctgaacgtcctggaaatgacctccgaggatttggagaacgctctcaaagcggtaataaacgacaagaggaagaaacagcagtccggtcgacagatgtag

SEQ ID NO: 4739 - DNA, 1593 bp, synthetic construct
  misc_feature 1..1593: note = source = /note="Description of Artificial Sequence: Synthetic coding sequence"
  source 1..1593: mol_type = other DNA
atggcaagggctggctggaccagccccgtcccattgtgcgtgtgtctcctgttaacatgcggatttgccgaggcaggcaagctgttggtggtgcctatggatgggtcacattggtttaccatgcagtcagtggtggagaaactgattctgcgcggtcatgaggtggtcgtcgtcatgcctgaggtaagctggcaattggagcgtagtctaaattgtacagttaagacgtactcaacctcctatacactagaagaccagaacagagagttcatggtgttcgctcatgcacagtggaaggcacaggctcagtccatattctccttgttaatgtcatcatcctctgggttcttggacctcttttttagtcactgccgcagcctcttcaacgaccgtaagctggtcgaatatctgaaggagtccagtttcgatgctgtgttcctggaccctttcgacacttgtggtctgatcgtggcgaaatatttttcactaccatctgtcgtgttcaccagagggattttttgccaccacctcgaggaaggagcacagtgtcctgctcctctgtcttatgtgccgaatgatctgctgggcttcagcgacgctatgacattcaaagaaagggtttggaaccatatcgtacatttggaggatcatttgttctgccagtacctgtttaggaacgctctggaaatcgcaagcgaaattcttcagactccagttaccgcttatgatctctacagccacactagcatctggctactgcgtacggacttcgtgcttgactaccctaaaccagtcatgcccaatatgatctttatcgggggaattaactgccaccaggggaaaccactcccaatggagtttgaagcttacattaatgctagcggcgaacatggcatcgtggtcttttcgctgggctccatggtctcagagattccagagaagaaagccatggccatcgctgacgccctggggaagatcccccaaactgtcctctggcgatacactggcacacgacccagtaatttggctaataatactatactggtgaaatggctgccgcagaacgatctgctgggacaccccatgaccagggcctttatcactcacgcaggttctcacggtgtctacgaaagtatctgcaacggagtgcctatggtcatgatgcctctgtttggcgaccagatggacaatgctaagcgaatggagacaaaaggggcaggagtgacactgaatgtgctggagatgactagcgaagaccttgagaatgctctcaaagctgtcatcaatgataaatcctacaaggagaacataatgagacttagcagtctgcacaaggatcgccctgtggagcccctggatctcgccgtcttttgggtcgagtttgtgatgaggcataagggagctccacacctacgtcctgctgcacacgaccttacttggtaccaataccattctctggatgtgatcggcttcctcttggccgtggtcctgaccgtcgcttttattacattcaagtgttgtgcttatggatatcgcaaatgtcttggaaaaaagggcagagtaaaaaaagcccacaagtccaaaacacactag

SEQ ID NO: 4740 - DNA, 1605 bp, synthetic construct
  misc_feature 1..1605: note = source = /note="Description of Artificial Sequence: Synthetic coding sequence"
  source 1..1605: mol_type = other DNA
atggctaccggccttcaggtaccgctcccttggcttgcgactggtttactcctgctcttgagcgtgcagccttgggcggaatctggcaaagttttggtcgttcctattgatggaagccattggctctccatgcgtgaggtgcttcgagaactgcatgccaggggccatcaggccgtggtcttgacccccgaggtgaacatgcatataaaagaagagaacttcttcactctaactacttacgccatctcctggacccaggatgaatttgatcgccatgtcttgggccacacccaactatactttgaaactgagcacttcctgaaaaagttctttagaagtatggctatgctgaataacatgagccttgtttaccacaggagttgtgtggagcttctgcacaatgaggcacttatccggcacctgaatgccaccagtttcgacgtggtgctgaccgacccggtgaatctgtgtgccgcagtgcttgcaaagtatctgtcaatcccgaccgtcttcttcctgcgcaacattccctgcgacttagattttaaggggacacagtgtcctaacccttctagctatatacccagacttttaactacaaacagcgaccatatgacgttcatgcagcgtgtgaaaaacatgctttaccctttggcgttatcttatatctgtcatgcattctcagcaccgtatgcgtccctggcttccgaactgtttcaacgggaggtgagtgtcgttgacattctgagccatgccagcgtgtggctgtttagaggggattttgttatggattaccccaggcccatcatgcccaacatggtcttcattggtggtatcaactgtgctaataggaaacccctgagccaggagttcgaggcctatatcaacgcttcaggggaacacgggatcgtggtattttccctggggagtatggttagcgagattccagaaaaaaaagctatggctatcgctgacgcactgggcaaaattcctcagaccgtgctgtggagatacacaggaaccaggccttctaacttagcaaacaatacgattctcgtcaagtggctgcctcagaatgacctgctgggccacccaatgacccgcgcattcatcactcatgcagggtcccatggagtgtatgagtctatctgtaatggtgtccccatggttatgatgccactatttggtgatcagatggataacgccaagcgaatggaaaccaagggggctggggtgaccctcaacgtactggagatgacctccgaagatctagagaacgcgctaaaagcggtgattaatgacaagagttataaagaaaacattatgcgcctgtcgtcgctgcataaggatagacctgtggagccccttgatcttgctgttttttgggtggagttcgtaatgagacacaaaggggctccccatttgagacccgcagcccatgacctcacatggtatcagtaccactcgctggatgtgataggattcctgctggccgtcgtgctcaccgtggcctttatcacatttaaatgctgtgcgtacggctatcgaaagtgtctgggcaagaagggccgagtgaagaaggctcacaaatccaagacccattag

SEQ ID NO: 4741 - DNA, 1470 bp, synthetic construct
  misc_feature 1..1470: note = source = /note="Description of Artificial Sequence: Synthetic coding sequence"
  source 1..1470: mol_type = other DNA
atggctgggcagcgggtgctgttgctcgtaggctttctgttgccgggtgtgctgctgtctgaagccgctaagatactgacaatcagcacggtggatttcaaaaaagaggagaagtcatatcaggttatcagctggttagcaccagaggaccaccagagggagttcaagaagagtttcgacttttttttggaggaaacccttggaggcagaggcaagtttgagaacctgctcaatgtgttggagtatttggctttgcaatgctcacattttcttaataggaaagacattatggattctctgaagaacgaaaatttcgacatggtgattgtagaaacctttgattactgcccctttctcatcgccgagaagctaggcaagccatttgtggcaattttgtcaacgtctttcgggagcttggagtttggcctccctatacctcttagctacgttcccgtttttagatctctgctcactgaccacatggacttctggggccgagtcaagaactttctgatgttcttctctttctgccggagacaacagcatatgcagtctacattcgacaataccattaaggagcattttacagaaggcagccgccctgtcctgtcacatcttttgctcaaagctgaactgtggtttatcaatagcgatttcgccttcgatttcgcacggcctttattaccaaacacggtgtatgttggtggactcatggagaaacctattaaaccagtccctcaggacttagagaattttattgccaagttcggggactcaggtttcgtactggtgactttaggttccatggtgaatacttgtcaaaatcccgagatctttaaagaaatgaataatgccttcgcacatctgccccagggggtcatttggaagtgtcagtgtagtcactggccaaaggatgttcatcttgccgcaaacgttaaaattgtagactggctcccccagtccgatctcctcgcccatccctcaatccgcctatttgttacccatggtgggcagaatagcatcatggaagcaatccagcatggagtgccaatggtcgggatcccactattcggagaccagcctgagaacatggttagagtcgaagcaaagaaattcggcgtttcaatacagcttaagaaattaaaggcagagactctggccctaaagatgaaacaaattatggaggacaagcgatataaatccgcagctgtggcagcttcagtgatcctgaggtcacaccctctcagtccaactcagcggctggtggggtggatcgatcacgtgctacagacagggggtgcgacgcacctgaagccctatgtcttccagcagccgtggcatgaacaataccttctggacgtctttgtgttcctgctcgggcttactttgggtactttgtggctctgtggcaagcttttaggtatggctgtctggtggttgcggggagccagaaaggttaaggaaacttag

SEQ ID NO: 4742 - DNA, 1572 bp, synthetic construct
  misc_feature 1..1572: note = source = /note="Description of Artificial Sequence: Synthetic coding sequence"
  source 1..1572: mol_type = other DNA
atggcgggtcagagggtgctgctcttggtgggtttcctgttgcccggagtgttactgagcgaggccgcaaagatcttaacaatctccacagtgggtggctcacactatttactgatggatcgggtgtcccagatactgcaggatcacggccacaacgtgactatgttgaatcataaacgaggaccgtttatgccagattttaagaaggaggaaaaatcatatcaggtaatctcttggctggctcctgaggaccaccagcgggaatttaagaagtcattcgatttcttcctcgaggagacactcgggggaagggggaagttcgagaacttgcttaacgtgctggaatacttagctctgcaatgttctcacttcctgaaccgcaaggacatcatggacagtctcaaaaacgagaatttcgatatggtgatagtggagaccttcgactattgcccattcctcatagccgaaaagcttgggaaacctttcgtggccatactcagcactagtttcgggagtctcgagtttggattaccaatccctcttagctatgttccagtgttcagatccctcctgactgatcacatggatttttgggggagagtcaagaactttctgatgttctttagtttctgtaggagacaacagcacatgcagtctacctttgacaacacgataaaagaacattttaccgaaggtagccggcctgtgcttagtcatctgctgttgaaagctgaactctggttcattaacagcgacttcgcctttgactttgctagacctctgctcccaaacaccgtgtatgtaggaggcctcatggaaaagccgatcaagccagtgccacaggatcttgagaacttcatcgccaaattcggtgattccggctttgtgctcgttacccttggaagcatggttaatacatgccagaaccctgagatcttcaaagagatgaataatgcgtttgcacacctcccacagggcgtcatttggaagtgccaatgctctcactggccaaaagatgtgcacctcgccgcaaacgttaagattgtggactggttacctcaatccgacttgttagcacaccccagtatcagattgttcgttactcatggaggccagaacagcatcatggaagcgatccaacatggcgtgcctatggttggcattcccctattcggcgatcaacccgagaacatggtgcgcgtcgaggcaaagaaattcggtgtgagtatccagctcaaaaagctgaaagcagaaacactcgcactgaaaatgaagcagatcatggaagataaaaggtataaatccgccgcagttgccgcaagcgtcatcctccgctcgcacccactgtcccccacacagaggcttgtcgggtggattgaccacgtgcttcagacagggggtgctacgcacctaaaaccttatgtgtttcagcaaccatggcacgaacagtacttgttggacgtttttgtgttcttactggggcttaccttagggacactttggctttgtggcaagctcttgggcatggccgtgtggtggttgcggggagccaggaaagtgaaggaaacttag

SEQ ID NO: 4743 - DNA, 417 bp, synthetic construct
  misc_feature 1..417: note = source = /note="Description of Artificial Sequence: Synthetic coding sequence"
  source 1..417: mol_type = other DNA
atggccggtcaacgcgtcctgcttctggtgggctttttactgcctggggtgctcttgtccgaagccgctaagatacttacgatatcgacagtcggaggtagccactacctcctgatggatagggtgtcccaaatccttcaggatcatgggcacaacgtgacaatgctcaatcataagcgaggaccgttcatgcccgacttcaaaaaggaggaaaagtcttaccaggtgatttcttggttggcaccagaggaccatcaaagagagttcaagaagagctttgacttctttctcgaagaaaccttgggcggacgcggaaaattcgaaaaccttctcaacgtccttgaatatctagccttgcagtgtagccattttctcaaccgcaaggacattatggatagccttaagaacgagaattag

SEQ ID NO: 4744 - DNA, 666 bp, synthetic construct
  misc_feature 1..666: note = source = /note="Description of Artificial Sequence: Synthetic coding sequence"
  source 1..666: mol_type = other DNA
atggttaacacctgccagaatccggaaatcttcaaagaaatgaataacgcattcgctcacctaccccagggcgtgatttggaaatgccagtgttcccactggcctaaagacgtgcacctggctgctaatgtgaaaatcgtcgattggctcccccagtctgaccttctggcacatcccagtattagactgttcgtcacacatggcggacagaacagcattatggaagctattcagcacggggttccgatggtcggcatcccgcttttcggagaccagccagagaatatggtccgcgtcgaggctaagaagtttggcgtatccattcagctgaaaaagctcaaggctgagacactggctttgaagatgaaacagataatggaggataagcggtataagtccgctgcagtcgccgcttctgtcatcctccgctcccatccgctgtcgccaacacagagactggtgggctggatcgatcatgtcttgcagactgggggagctactcacttgaagccatacgtatttcagcagccatggcatgagcaatatctgctggatgtatttgtgttccttctggggctgactcttggaacgctgtggctgtgtggtaaactcctgggcatggccgtatggtggcttaggggagccagaaaagtcaaggaaacttag

SEQ ID NO: 4745 - DNA, 1086 bp, synthetic construct
  misc_feature 1..1086: note = source = /note="Description of Artificial Sequence: Synthetic coding sequence"
  source 1..1086: mol_type = other DNA
atggccatgaactataacgcaaaagacgaagtggatggcggacccccttgcgctccaggaggaactgcgaaaaccagacgcccagataacaccgcttttaagcagcagaggctacctgcgtggcagcctatcctgacagccggaactgttttaccgatcttttttataattggcctgatcttcatccccatcggcattggaatattcgtgacttccaacaacattcgagaaatcgagatcgattacacaggtactgagccatcttcaccttgcaacaagtgcttgagtccggatgtaaccccttgcttttgcacaatcaacttcactttggagaaaagcttcgaggggaacgtcttcatgtactatggcctgtccaatttctatcaaaaccaccgcagatacgtgaaatctagggatgactcacagttgaatggggactcatctgccttgctgaatcctagcaaagaatgcgagccataccggaggaacgaggacaagcctattgctccttgcggggcaattgcgaatagtatgtttaatgacactcttgaactgtttctgattggtaatgattcctaccctatcccaatcgccttaaaaaagaaaggaatcgcctggtggactgataaaaatgtgaaattccgtaaccctcccggaggcgataatctggaggagcgttttaaaggcacgacgaagccagtgaattggttgaaacccgtctatatgctggacagtgatcccgataataatgggttcattaacgaagatttcatcgtgtggatgaggactgccgcactccccacatttcgaaaactgtaccgtttgatcgagagaaagtcagacctgcaccccacactgcccgcaggtagatatagcttgaacgtcacctataattacccggtccactacttcgacggacggaagcggatgattttgtcgaccatttcgtggatggggggaaaaaatcccttcctcgggattgcatatattgccgtgggttcgatcagtttcctgctgggggttgtccttctggtgattaatcacaagtacaggaactcctccaacacagctgatataactatttag

SEQ ID NO: 4746 - DNA, 954 bp, synthetic construct
  misc_feature 1..954: note = source = /note="Description of Artificial Sequence: Synthetic coding sequence"
  source 1..954: mol_type = other DNA
ttgactgatagacaaacggataccgccccaagcccttcttaccacctgctgccagggagaagaaggactgtagacgccgctgcctcccggggtcagggccctgagccagccccaggaggcggagttgaaggcgtgggagctaggggcgtggcactcaaactgttcgttcagctgctgggctgttcccggttcggcggtgccgtggtgcgggcaggagaggcagaacctagcggcgcagcccgaagcgcgagttcaggccgtgaagagccacagccagaggagggggaggaagaggaggagaaggaggaggaacggggtcctcagtggcgactgggagctcgcaaacccggatcatggacaggggaggcagccgtctgtgccgactccgcacccgctgccagagcgccacaggccttagctcgtgcttccggcagaggtggtagagtggcccgacgcggtgccgaagagtccggccctcctcactccccttccagacgcggatcggcatcgcgagctggaccagggagggcctctgagacaatgaattttctcctgagctgggtccactggtctctggcgcttctcttgtatctgcaccacgcaaagtggtcacaggccgctcccatggcagaaggcggtggacagaatcatcacgaggtcgtcaaatttatggatgtttaccaacggagctactgtcatcctattgaaaccctggtcgacatatttcaggaatatcctgatgaaatcgagtacatattcaaaccctcatgtgtgccccttatgcggtgtggagggtgttgtaacgatgagggcctggagtgcgtgcctacggaggagagcaatattaccatgcaaatcatgcgcatcaagccccatcagggccaacacatcggggaaatgagcttcctccagcataataaatgtgagtgcaggtgtgacaaacctcgccgatag

SEQ ID NO: 4747 - DNA, 1239 bp, synthetic construct
  misc_feature 1..1239: note = source = /note="Description of Artificial Sequence: Synthetic coding sequence"
  source 1..1239: mol_type = other DNA
cttaccgacaggcagactgacaccgccccaagcccttcctatcatctgttgcctggcaggcggagaacggttgacgccgcagccagccggggtcaaggtccagaacccgctcctggtgggggagtggagggagtgggcgctaggggcgttgccctcaaacttttcgtccagctactcggctgcagcaggttcggcggagcggtcgtgcgagcaggggaagccgagccctctggcgctgcgaggagcgcttcttcagggagggaggagcctcagcccgaggaaggggaggaagaggaagagaaggaggaagaaagaggccctcagtggcgcctcggtgctcgcaagcccggttcatggaccggcgaagctgccgtttgcgccgattccgctccggcagccagggctccacaggccctcgccagagctagtggtagagggggtcgggtggcacggcgaggagccgaagagtctggacctcctcatagcccttctcggagagggtctgcctctagagccggacccggtcgagccagtgaaacaatgaacttcctgttatcttgggtacattggagcctggctctgctgttgtacctgcaccacgcgaagtggtctcaagccgcacccatggcagagggtggcggtcagaatcatcatgaggtcgtgaaatttatggacgtgtaccagcggtcttattgtcatccaatcgaaacgctggtcgatatctttcaggaatacccagacgagatcgagtatatatttaaaccgtcttgtgtccctcttatgcgttgcggagggtgctgcaatgatgagggtttggaatgcgtgcctacagaggaatctaatataaccatgcagatcatgcgaattaagccacaccagggacagcatattggcgaaatgtccttcctgcaacataacaaatgtgagtgtagaccgaaaaaggatcgggcacgacaagagaagaaatccgtcagaggcaagggcaagggccagaagcgaaaacggaagaaatcgaggtataagagctggtccgtctacgttggcgcacgctgttgtttgatgccatggtcactacctggaccacacccctgcggcccttgtagtgagcggcgtaagcatctgtttgtgcaggatccccaaacttgtaaatgcagctgcaaaaacaccgactctaggtgcaaagccaggcagcttgagttgaacgagagaacctgtcgctgtgacaagccacggcgatag

SEQ ID NO: 4748 - DNA, 984 bp, synthetic construct
  misc_feature 1..984: note = source = /note="Description of Artificial Sequence: Synthetic coding sequence"
  source 1..984: mol_type = other DNA
ctgaccgacagacaaaccgatacagccccaagtccttcctatcacctgctgcccggaagaaggcgaaccgtggacgccgctgcgtccaggggacagggacccgagcccgcacccggaggaggggtagagggcgtcggcgctagaggcgtggccttgaaattgtttgtgcagctcctcggatgcagtaggttcggcggtgccgtggtacgcgctggagaggccgaaccgagcggtgctgcccgaagcgccagcagcgggagagaggaaccacagcctgaggagggtgaagaggaagaagagaaagaggaggaaaggggcccacaatggaggctgggggcacggaaacctgggtcatggacaggcgaagccgctgtgtgcgccgactcggccccagctgcccgtgctccccaagccctagcacgagctagtgggcgaggtggcagagttgccaggaggggagccgaggagtctgggcctccccactcaccatctcgacggggaagcgcatctagagccggtcccggacgggcatcagaaacaatgaacttcctcctctcttgggtgcactggagcctggcacttctgttatatctgcaccacgcaaaatggtcccaggctgccccaatggctgaggggggaggtcagaatcatcatgaagtagtcaaattcatggacgtgtaccagcggtcctattgtcatccgatcgagaccctggtcgacatttttcaggaatacccagatgaaattgaatacattttcaaaccaagctgcgttcctctgatgcgctgcgggggttgctgcaacgatgagggtctggaatgtgtgccaacggaagagtcaaacatcactatgcaaatcatgcgcattaagccacatcagggacagcacatcggagagatgtcttttttgcagcacaacaaatgcgaatgccgccctaaaaaggacagggcccgacaggaaaagtgcgacaaaccccgacgttag

SEQ ID NO: 4749 - DNA, 1116 bp, synthetic construct
  misc_feature 1..1116: note = source = /note="Description of Artificial Sequence: Synthetic coding sequence"
  source 1..1116: mol_type = other DNA
ctgaccgataggcagaccgataccgctccgtcgcctagttatcacttgttgccgggtagacgcaggactgtcgacgccgctgccagtagagggcagggccctgagccagctcctggaggtggcgtggagggcgtaggcgcacgaggtgtggccctgaaactgttcgtgcaactcctgggctgtagccgcttcggcggagcggtggttagggctggcgaagccgagcccagtggggctgcaagatcggccagcagcggaagggaggagccccagcccgaggaaggtgaagaggaagaggagaaagaggaggagcgaggccctcaatggcgactcggtgcaagaaaacctgggtcatggacaggagaggctgccgtctgcgcggactcagcgccagcggctcgcgcaccacaagcattggcccgagcctccgggagggggggtcgagttgctcgacggggagccgaggagtctggccctccacattcgccatcacgcagaggatctgcgtctcgggctggcccagggagagcctctgagactatgaacttcttactttcctgggtgcactggagcctcgcattactgctgtaccttcaccatgccaagtggagtcaggccgctccaatggcagaagggggtggccagaaccaccacgaagtagtcaagtttatggacgtttaccagagaagctactgccatcctattgaaacccttgtcgacatctttcaggaatatcctgatgaaattgaatacattttcaaacccagctgcgttcctcttatgcgatgtggcggatgctgtaacgatgaagggctggagtgtgtgccaacggaagagtcgaacatcaccatgcaaatcatgcggattaagccacaccagggccaacatataggagaaatgtcattcctccagcacaataagtgtgagtgtagaccaaagaaagatcgcgcaagacaagagaacccttgcggtccttgtagcgagcggcgaaagcatctttttgttcaggacccacagacctgcaaatgcagttgcaagaacactgatagcagatgtaaggccagacagctagaactgaatgagcggacatgtaggtgtgacaaaccaagacgatag

SEQ ID NO: 4750 - DNA, 444 bp, synthetic construct
  misc_feature 1..444: note = source = /note="Description of Artificial Sequence: Synthetic coding sequence"
  source 1..444: mol_type = other DNA
atgaattttttgctgtcctgggttcattggagcttggcgttactgctttatctccaccatgctaagtggtcgcaagcagctccaatggctgaggggggaggtcagaatcaccacgaggttgttaagtttatggacgtgtatcagcgttcatactgccaccccatcgagacattggtggacatatttcaggaatacccggatgaaatcgaatatatttttaaacctagctgtgtgccactcatgcgctgtggcggatgctgcaatgatgaagggcttgaatgtgtgcccactgaggagtcgaacatcactatgcagatcatgaggatcaagccccatcagggccagcatattggggaaatgtccttccttcagcataacaaatgtgagtgtcgtccaaagaaagatcgagcccgtcaggagaagtgcgacaagcccaggcggtag

SEQ ID NO: 4751 - DNA, 1170 bp, synthetic construct
  misc_feature 1..1170: note = source = /note="Description of Artificial Sequence: Synthetic coding sequence"
  source 1..1170: mol_type = other DNA
ctgacagaccgccagaccgacacggcaccatcacctagttaccatctgctgcccggaagacggagaactgtagacgcagccgcttcaagggggcaaggccctgaacccgctccagggggtggggttgaaggtgtgggcgctaggggcgttgcgctgaagctttttgtgcagctcctgggctgcagccggttcggcggagccgttgtgagggccggtgaagctgagcctagcggtgctgctcgttccgcaagctcaggcagggaggaaccccagcccgaggagggtgaggaagaggaggagaaagaggaggaacgcggtcctcagtggagactgggagcaaggaagcctgggagctggacgggtgaagccgcagtgtgcgccgattctgcaccggcagcgagagcacctcaggcacttgctcgggctagcggcagaggcggacgggtggctcggaggggcgctgaagagtccgggccacctcactccccttcacggaggggcagcgcatctcgcgcaggccctggtagagcctccgaaacaatgaactttctgctgagttgggtgcactggtcgctcgcccttctactctacttacaccacgccaagtggtcccaggctgccccaatggccgaaggtggagggcagaatcaccacgaagtggtgaagttcatggacgtttaccaacgctcttattgtcatcccatagagaccctcgttgacatctttcaggaatatccagatgagattgagtatatcttcaagccaagttgcgtgccacttatgcgctgcgggggatgctgtaatgatgaaggtctggaatgcgtgcctaccgaagagagcaacattacaatgcagataatgaggatcaaacctcatcaggggcagcatattggagagatgagtttccttcaacacaataagtgtgaatgccggcctaaaaaggatagggccagacaggagaagaagagtgtgcgtgggaagggtaaaggccagaagagaaaaaggaaaaagtctcgtccgtgcggcccatgttctgaaaggcgaaaacacctatttgttcaagacccacaaacatgcaagtgcagttgtaaaaacacagattcgagatgtaaggccaggcaactggagctgaacgagcgaacgtgtcgctgtgacaagcctaggagatag

SEQ ID NO: 4752 - DNA, 1065 bp, synthetic construct
  misc_feature 1..1065: note = source = /note="Description of Artificial Sequence: Synthetic coding sequence"
  source 1..1065: mol_type = other DNA
ctgacggatcgtcaaacagacaccgccccttccccctcctatcatcttctccctggcaggcgtagaacggttgatgccgctgcgagtcgcggacagggtccagaacccgctccaggaggcggagtggaaggcgtgggggcaaggggagtcgcccttaagctgtttgtccagctgctgggatgttcacgattcggaggcgcagtcgtgcgcgctggcgaggctgaaccctccggggctgccagaagcgcaagctctggtcgagaagaaccgcaacctgaagaaggcgaggaagaggaagagaaagaagaagagaggggcccacagtggaggttgggggctaggaagcctggttcatggacaggggaagctgctgtgtgcgcggactctgctccggcagctcgggcaccacaggctctggcaagagctagcggccgtggcggacgggtggcccgtcggggtgcagaggagagtggcccaccacattctccctccaggcgcggatccgcctctcgtgcaggaccaggaagagcgtccgagaccatgaactttctcctttcttgggtgcactggtctctcgccctgcttctctatctgcaccacgcgaaatggagtcaggccgctcccatggctgaagggggaggccagaatcaccatgaggtggtcaagttcatggatgtctaccaacggtcttactgccatccaatcgaaactctggtcgacattttccaggagtacccagatgaaattgaatatatttttaagccctcttgcgtgccgctgatgaggtgtgggggatgctgtaatgacgaggggttggaatgtgtcccaaccgaagaaagcaatatcacaatgcagataatgcggatcaaacctcaccaaggtcaacacatcggagagatgagcttcctccagcacaacaaatgcgagtgccgcccaaagaaagaccgcgcacggcaggagaacccgtgtggaccttgcagcgagcgcagaaaacatctgtttgtgcaggatccccagacatgcaaatgcagttgcaagaacacagattctcggtgtaagatgtag

SEQ ID NO: 4753 - DNA, 1188 bp, synthetic construct
  misc_feature 1..1188: note = source = /note="Description of Artificial Sequence: Synthetic coding sequence"
  source 1..1188: mol_type = other DNA
ctcaccgacaggcagacggatactgccccttctccctcataccaccttctgcctgggagacggaggacagtggacgcagctgcctcccgtggacagggtcccgagccagccccagggggaggggttgagggagttggcgctaggggagtggccctgaagttattcgtccagttgcttggatgctcccgcttcggcggtgctgtggtgagggccggagaagctgagccctcaggggctgccagaagcgcttcttctggtcgagaggagccgcaacccgaagaaggcgaagaggaagaggagaaggaggaagagagaggccctcaatggcgtctaggcgctagaaagccaggctcttggacaggcgaggcggcagtgtgtgcagactccgcacccgctgctcgcgctccacaggccctggccagggcctcgggtcgtggcggtcgagtggctagacgaggcgctgaagaatcaggccctcctcacagccccagtcggaggggttcagcatccagagccggtcccggtagggcctccgagaccatgaactttttgttatcgtgggtgcattggagtcttgcactgcttctgtatctccaccatgcaaagtggtcccaggccgctcccatggccgagggaggaggccaaaatcaccacgaggtggttaagttcatggatgtctaccagcgtagttactgtcatcccattgaaacgcttgttgacatttttcaggagtacccggacgagatcgagtacatttttaagccatcatgtgttccgctgatgcgttgtgggggatgctgcaatgacgagggcctggaatgtgtgccgaccgaagaaagcaacataactatgcagatcatgcggattaaaccccaccaagggcagcacataggcgagatgtcatttctgcagcacaacaaatgtgagtgtaggcccaagaaggaccgtgccaggcaggaaaagaagtccgtgaggggaaagggtaaggggcaaaaaagaaaacgcaagaagtctcgttacaagagctggtcagtcccgtgcggcccatgctctgagagaaggaaacacttatttgttcaagatccccagacctgtaaatgcagttgtaaaaatacagatagcagatgcaaagcccgacaactggagctgaatgagcgcacttgcagatgcgataagccgcgacggtag

SEQ ID NO: 4754 - DNA, 414 bp, synthetic construct
  misc_feature 1..414: note = source = /note="Description of Artificial Sequence: Synthetic coding sequence"
  source 1..414: mol_type = other DNA
atgaacttccttttgagctgggttcactggagcctagcattacttttgtacctccaccacgcaaagtggtcacaagccgctccaatggcggagggcggtggacaaaaccaccacgaagtagtgaagtttatggacgtctatcaaagaagttattgccacccaatagagactctcgtagacattttccaagagtacccagacgagatagaatacatatttaagcctagttgtgtgcccctgatgcgatgcggaggatgctgtaacgatgaggggctggaatgcgtgcccaccgaagaatcaaatatcactatgcagatcatgaggatcaagcctcaccagggccagcatatcggggagatgagtttcctccaacacaacaagtgtgaatgccggtgtgacaaaccacgccgttag

SEQ ID NO: 4755 - DNA, 1116 bp, synthetic construct
  misc_feature 1..1116: note = source = /note="Description of Artificial Sequence: Synthetic coding sequence"
  source 1..1116: mol_type = other DNA
cttacggaccggcagacggacaccgcaccgtccccaagttatcatctattaccaggaagaagacggaccgtcgatgctgccgcttctcgcggacaggggcctgagcccgcaccgggtggtggggtcgagggagtaggggcaagaggagtggctctgaagctatttgtccaattgctgggttgtagccggttcggtggcgctgtggtccgggcaggtgaggccgagccttctggcgcagccaggtcggcttcttccggaagagaagagccacagcctgaagagggagaggaggaggaggagaaggaagaggaacgtggcccacagtggcgtcttggcgcaaggaagccgggatcgtggactggcgaagcagctgtgtgcgccgattcagccccagctgccagggccccacaagccttggctagggccagtggaagaggtggaagagtggcacggcgaggcgcagaagagtccggacctccccatagcccaagtaggcgagggtcagcctcacgagccggacctgggcgagcgagtgagaccatgaattttctgttgagttgggtgcactggagtttggccttactcctatacctacaccacgcaaagtggagccaagctgccccaatggcagagggaggaggacagaatcatcatgaagtggtcaagtttatggatgtctaccagcgtagctattgtcatcctatagagacactggtggatatcttccaggagtacccagatgaaattgagtatatttttaaacctagttgtgtgcctctcatgagatgtggtggctgttgtaacgacgaggggctcgaatgcgtgcccacagaagagagcaacattacaatgcagattatgaggattaagccccaccagggccagcatatcggggagatgtccttcctccagcacaacaagtgtgaatgcagacccaagaaagatcgggctcggcaggagaatccatgtggcccttgcagtgagcggcgtaagcaccttttcgtccaggatcctcaaacttgtaaatgcagttgtaagaatacggatagccggtgtaaggctaggcaacttgaactcaacgagcgaacctgcagatcactgactcgcaaggattag

SEQ ID NO: 4756 - DNA, 630 bp, synthetic construct
  misc_feature 1..630: note = source = /note="Description of Artificial Sequence: Synthetic coding sequence"
  source 1..630: mol_type = other DNA
atgaatttcctcttgagttgggttcactggtccctcgccctgctgctctacctgcatcatgcgaagtggagccaggccgcacccatggcggaaggtggaggtcaaaatcatcatgaagttgtgaagttcatggacgtttaccagcggtcatattgccacccgatcgagactttagtcgacatcttccaggaataccctgacgagatagagtacattttcaagccgagttgtgtgcctttgatgaggtgcggaggctgctgcaacgatgaggggttagagtgcgtgcctactgaggagagcaatattacaatgcaaatcatgcgcattaaacctcatcagggccagcacattggcgagatgtccttcctgcagcataacaagtgtgaatgtaggccaaagaaagatcgggcaagacaggagaagaagtccgttcgtggtaaagggaagggccagaagaggaagcgcaaaaagtcccgtccatgtggcccttgctctgagagacgcaaacatctgttcgttcaggacccccagacctgtaagtgctcgtgtaagaatacagattcaagatgtaaggctagacagttagaactcaacgaacgcacctgtagatgcgacaaacccagacggtag

SEQ ID NO: 4757 - DNA, 576 bp, synthetic construct
  misc_feature 1..576: note = source = /note="Description of Artificial Sequence: Synthetic coding sequence"
  source 1..576: mol_type = other DNA
atgaatttcttgttgtcgtgggtgcactggtctctggccttactgctctatcttcaccacgccaagtggtcccaggctgcccctatggctgaaggcggtgggcaaaaccatcacgaagttgtgaaattcatggatgtgtaccagaggtcttactgccaccccattgaaacccttgtggacatattccaagaatatccagacgaaatagaatacattttcaaacccagctgcgtgccactgatgcgctgcggagggtgttgtaacgatgagggactcgagtgcgttccaacagaggagagtaatatcactatgcagatcatgagaatcaagccacatcagggccaacatatcggtgagatgagcttcttgcaacacaataagtgtgagtgtaggcccaaaaaagatagagccaggcaggagaacccatgcggaccttgctccgaaagacggaagcaccttttcgtccaggacccgcagacatgcaaatgtagttgtaagaatactgacagcagatgcaaggcaagacagctggagttgaatgagcgtacatgtagaagccttacccggaaggattag

SEQ ID NO: 4758 - DNA, 972 bp, synthetic construct
  misc_feature 1..972: note = source = /note="Description of Artificial Sequence: Synthetic coding sequence"
  source 1..972: mol_type = other DNA
tgaagagggcaaggcccagagcctgcacctggcggaggagtagaaggggtgggagctagaggcgtggcactgaagctgtttgtccagcttctcggctgctctcgcttcggaggagccgtcgtgagggcgggtgaagcggagcccagtggtgccgctcggtccgcatcatccggcagagaggagccccagcctgaagagggggaggaggaggaggagaaagaggaggagcgcggacctcaatggcggctgggcgctagaaaacctggaagctggactggcgaggctgccgtctgcgccgattcagctcccgctgcacgcgctccccaggctctggcaagagcatctggtaggggcggacgggttgccagacggggagctgaagagtcaggtccaccacattccccgagcagacgcggatcggcatctcgtgctgggccaggaagggcctctgaaacgatgaacttcctgttatcttgggttcattggagtctggctctccttctctatctgcaccatgctaagtggagtcaggcggcacccatggcagaggggggaggccagaaccatcatgaggtggtgaagtttatggatgtgtatcagcgcagttattgtcaccccattgaaacgctcgtggacatttttcaggaatacccagacgaaatcgagtatatttttaagccctcttgcgtaccactgatgagatgcgggggatgttgcaacgacgagggcttagaatgtgtccccacggaggagagcaacatcaccatgcagatcatgcggatcaagccccaccagggacagcacattggggagatgtcattccttcaacacaacaaatgcgagtgcagaccgaagaaagaccgggctaggcaggagaaaaagagcgtaagaggcaaggggaaagggcagaagagaaagcggaagaagagcagatacaaatcctggtctgtctgcgataagcccagacggtag

SEQ ID NO: 4759 - DNA, 648 bp, synthetic construct
  misc_feature 1..648: note = source = /note="Description of Artificial Sequence: Synthetic coding sequence"
  source 1..648: mol_type = other DNA
atgaactttctgttatcctgggtgcactggagcctcgcactgctcttatatctgcaccacgcaaaatggtctcaggccgctcctatggcggaagggggaggccaaaaccatcatgaagtcgtgaagttcatggatgtgtatcagcgcagctactgccacccaatcgagaccttggtagatatctttcaggagtatcctgacgaaattgagtacatattcaagcccagttgtgtgcctctgatgcgatgtggaggctgctgcaacgatgaaggactcgaatgtgtacctactgaagagtccaacatcacaatgcagatcatgaggattaaacctcaccagggacaacacattggtgagatgtcatttttgcagcataacaagtgtgaatgccgtccaaagaaggatagagccaggcaggaaaaaaagtctgtgagaggcaaaggaaaggggcagaaacgcaaacgcaaaaaaagccggtataaaagctggtccgttccctgtgggccttgctccgaacggaggaaacatctgttcgttcaggaccctcaaacctgtaaatgctcatgcaagaataccgacagtaggtgcaaggcaagacaactcgagttgaacgagagaacgtgtcgatgcgataagcccagacgttag

SEQ ID NO: 4760 - DNA, 525 bp, synthetic construct
  misc_feature 1..525: note = source = /note="Description of Artificial Sequence: Synthetic coding sequence"
  source 1..525: mol_type = other DNA
atgaattttctcctctcctgggtgcactggtccctcgccctattgctgtacctccaccatgccaagtggtctcaagcagcccctatggccgaaggcggaggccagaatcaccatgaagtggtgaaattcatggatgtgtaccagcgaagttattgtcatcctatagaaactcttgtggatattttccaggagtaccctgatgaaattgaatatatctttaaaccgagttgcgtgccgcttatgaggtgcggcggatgttgtaatgatgagggattagagtgcgttcccactgaggaaagtaatatcactatgcagatcatgaggattaagccccatcaggggcagcacatcggagagatgagcttcctgcagcacaacaaatgcgagtgtcggccaaagaaagatcgggctcggcaggagaacccttgcggcccatgctccgagcggagaaaacacttatttgtgcaagaccctcagacctgcaaatgttcttgcaagaacaccgactcgcgttgcaagatgtag

SEQ ID NO: 4761 - DNA, 699 bp, synthetic construct
  misc_feature 1..699: note = source = /note="Description of Artificial Sequence: Synthetic coding sequence"
  source 1..699: mol_type = other DNA
atgaatttcttactgtcctgggtacactggtctcttgcactgctcctatatctgcaccacgctaaatggtcccaggccgcacccatggctgaagggggaggtcagaatcatcacgaggtggtgaaattcatggacgtttatcaacggtcttattgccaccccatcgaaacactggtggatatattccaggagtatccagacgaaatagaatacatttttaagccgagctgcgttccacttatgcgatgcggaggctgctgcaatgacgagggtctggaatgcgtgcctacagaggaaagcaacatcacaatgcagatcatgcgcataaaacctcaccaagggcagcatattggagagatgagtttcctgcagcacaacaagtgcgaatgccgccctaaaaaagaccgcgcacgccaggagaagaagagcgtgaggggaaaggggaagggacagaaaaggaaacggaagaaaagtagatataaatcctggagtgtgtacgtgggcgcacgctgttgtttgatgccttggtctttacccggtccacacccatgcggcccatgcagtgagcggcgtaagcacctgtttgttcaagaccctcagacctgtaaatgtagctgtaagaacacggactcaagatgtaaagccagacagctggagctcaacgagcgaacatgccgttgcgataagcccaggcgctag

SEQ ID NO: 4762 - DNA, 576 bp, synthetic construct
  misc_feature 1..576: note = source = /note="Description of Artificial Sequence: Synthetic coding sequence"
  source 1..576: mol_type = other DNA
atgaatttcctgctgtcttgggtgcattggtctttggcattgctgctgtacttgcatcatgcaaagtggagtcaggcagctccgatggccgaagggggagggcagaaccaccacgaagttgtcaaatttatggacgtgtatcagcgttcctattgccacccgatcgagacacttgtcgatatttttcaggagtacccagacgagatagaatacatcttcaaacccagctgtgtccctctgatgcgatgtgggggttgctgtaacgacgaagggttggagtgcgtaccaaccgaggagtcaaatatcacaatgcagatcatgcgtataaagccccatcagggacaacacattggtgagatgtcttttctgcaacataataagtgtgagtgtaggcctaagaaggatagggccagacaagaaaacccttgtgggccttgtagcgaacgcagaaaacacctgttcgtgcaggacccacaaacttgtaagtgctcctgtaagaacaccgactccaggtgtaaagccaggcagttggagttaaacgaaagaacatgccgctgtgacaagcccagacgctag

SEQ ID NO: 4763 - DNA, 1263 bp, synthetic construct
  misc_feature 1..1263: note = source = /note="Description of Artificial Sequence: Synthetic coding sequence"
  source 1..1263: mol_type = other DNA
atgcacttactgggatttttctctgtggcctgtagtttgctggccgcagccctacttcctggccctagagaggctcccgctgccgctgccgctttcgagtccggccttgacctgtcagacgctgaaccggacgctggggaggcgacagcctacgcaagtaaagatctggaagaacagctacgctccgtgtcaagtgtcgatgaactgatgacagtgctctatcctgagtactggaagatgtataagtgtcagctgagaaaaggcggttggcagcataaccgcgaacaggccaacctgaacagtcgcactgaggaaacgattaagttcgccgcagcccactacaacaccgaaatcctgaaatcgatcgataatgagtggcggaaaacgcaatgtatgccgagggaagtttgtatcgatgtaggcaaggaattcggtgtggctaccaacacattttttaagcctccctgtgttagcgtctatcgctgcggtggatgctgcaattctgagggccttcagtgcatgaatacatcaaccagctacctcagtaagaccctctttgaaattaccgtgccgctgagccagggcccaaagcccgttacaattagcttcgctaaccataccagctgcaggtgcatgtcaaagttggacgtgtaccgccaggtccactccatcatacgcaggtctctgcccgctacactcccccaatgtcaagccgcaaacaagacctgtcccaccaactacatgtggaacaaccatatctgtaggtgcctcgcccaggaggattttatgttctcatcagatgcaggggacgattccaccgatggatttcatgacatatgcggcccaaataaagagcttgacgaggagacatgccaatgcgtatgcagagcgggtttacgcccagctagttgtgggcctcataaagagctggataggaatagttgccaatgtgtctgcaagaataaactgtttccttcccagtgtggggctaacagagaattcgatgaaaatacttgccagtgtgtatgcaaacggacctgtcccaggaatcagcccctgaatcctgggaaatgcgcttgtgagtgtacagagagcccccaaaagtgcctactcaaaggcaaaaaattccaccatcaaacctgctcctgttataggagaccctgcaccaaccgtcaaaaggcgtgcgaaccaggcttctcctactcagaggaggtgtgccgttgcgttccctcgtactggaagcgcccacagatgatgtcttag

SEQ ID NO: 4764 - DNA, 510 bp, synthetic construct
  misc_feature 1..510: note = source = /note="Description of Artificial Sequence: Synthetic coding sequence"
  source 1..510: mol_type = other DNA
atggatacaaggaataaggctcagctactggtacttttaactctgctttccgtgttatttagtcaaacttcagcttggccgctgtacagagctccatcggccctgagactgggcgatagaattccatttgaaggcgcaaacgagcccgatcaggtgagtcttaaggaggacatcgatatgctacaaaacgccctggccgaaaatgacactccttattatgatgtgtcgcggaacgccagacatgcggacggggtctttacaagcgattttagcaagctcctgggacagctgtctgccaagaagtacctcgagtccctgatgggtaaacgtgtgtcaaacatcagcgaggatcctgtccccgtaaaacgccacagtgatgctgtcttcacagacaattacacaaggttgagaaaacagatggcagtgaaaaagtacctcaactccatcttgaacggtaaaagatcatccgagggtgagtcacctgactttccggaagaacttgagaaatag

SEQ ID NO: 4765 - DNA, 513 bp, synthetic construct
  misc_feature 1..513: note = source = /note="Description of Artificial Sequence: Synthetic coding sequence"
  source 1..513: mol_type = other DNA
atggatacaaggaataaggcccagctactggtgcttctcacactgctgagtgttctttttagccagactagcgcgtggcctctgtacagggcacctagcgcactcagattgggtgaccggattccgttcgagggggcaaacgagccggaccaggtgtccctgaaggaagatattgatatgctgcaaaacgcgctggcagaaaacgacaccccatactacgatgtgagccgcaacgcacggcatgcagacggggtgttcacatctgatttcagcaaactcctcggacagttgtctgcaaaaaagtatctggagagtctgatgggcaagcgtgtttcgtccaacataagcgaggatcctgttcctgtgaaacggcactccgatgcggtatttaccgacaattacacgaggttgcgcaagcagatggcagtcaagaagtatctgaatagcatactgaacggaaagcgctcgtccgaaggagagtctccagatttcccagaggagctggagaaatag

SEQ ID NO: 4766 - DNA, 360 bp, synthetic construct
  misc_feature 1..360: note = source = /note="Description of Artificial Sequence: Synthetic coding sequence"
  source 1..360: mol_type = other DNA
taggtgtccctgaaggaagatatcgatatgttgcagaatgctcttgccgagaacgataccccatattatgatgtatcacggaacgcccgacacgccgatggagtcttcacaagcgatttttcaaagctactcggccagttgagcgcaaagaagtatctggagtctttgatgggcaaacgggtctcttccaatattagtgaggatccagtacccgtgaagagacattcagacgctgtgttcacagacaattacactcgccttaggaaacaaatggcggtcaagaagtacctgaacagcatactcaacgggaaacggtctgaaggggaaagccctgatttcccagaagagttagaaaagtag

SEQ ID NO: 4767 - DNA, 774 bp, synthetic construct
  misc_feature 1..774: note = source = /note="Description of Artificial Sequence: Synthetic coding sequence"
  source 1..774: mol_type = other DNA
atgcctctgaatgtcagctttaccaaccgcaattacgacttggattacgatagtgttcagccctatttctattgcgacgaagaagaaaacttttatcagcagcagcagcaatcagagttacagccccctgccccatcagaggatatatggaaaaaattcgagctgcttccgacgcctcccctgtccccatcccggagatccggcctgtgctctcccagctatgtagccgtaacgcctttttcgctgaggggggataacgatgggggtggcggttccttttctaccgcggatcagttggagatggtcactgaattgcttggcggagacatggttaatcagagctttatttgcgacccagatgatgaaacatttatcaagaatatcattatccaggattgcatgtggagcggattttccgctgccgctaagcttgtctcagaaaagctggccagttatcaggctgccagaaaggactcaggtagcccaaatcctgctcgtggacactccgtctgttcaacttcttctctgtacctgcaggacctgtcagcagccgctagcgaatgcattgacccaagtgtggtctttccttaccccctgaacgacagctcttccccaaagagctgtgcatctcaggatagctctgctttcagtccatcgagcgacagcctgctgtcatctaccgaaagctccccacaagggtcgcccgagccgctggtactgcatgaggaaacccccccaacaacaagctctgactccgggggaacacgtcgatag

SEQ ID NO: 4768 - DNA, 1365 bp, synthetic construct
  misc_feature 1..1365: note = source = /note="Description of Artificial Sequence: Synthetic coding sequence"
  source 1..1365: mol_type = other DNA
cttgattttttcagggtggtcgaaaatcagcagcctcctgctactatgccactgaacgtgtccttcactaaccgtaattacgatttggactatgattcagtccagccttacttctactgtgatgaagaggagaacttttatcaacagcagcagcagtcagagctgcaacccccagcgccttccgaagacatttggaaaaaattcgagttactgcccaccccacccttatccccatctaggcgtagcgggctctgttctccatcctacgttgcggtgacccctttctccctacgtggagacaacgatgggggtgggggaagcttctcaactgctgaccagcttgaaatggttacagagctgcttgggggagatatggtgaaccaatcctttatttgcgaccccgatgacgagaccttcattaagaatatcattattcaggactgcatgtggtcagggttcagtgcggctgcaaagcttgtgagcgagaaactggcttcctaccaagcagctcgtaaggattcaggctcacccaacccggctcgcggacattctgtgtgctccacatcttccctctatttacaggacctgtctgctgcagcgtccgaatgtattgatccatccgtcgtattcccctaccctttaaacgacagctcttcacccaagagctgcgcgagtcaagatagttctgcttttagccctagctccgattctctgttgtcctccaccgagtcctcccctcaggggagcccggaaccgttagttctgcacgaggaaaccccgccaacaacctcttccgactctgaggaggagcaagaagatgaagaggaaatcgatgtggtgtccgtagaaaaaagacaggcccctggtaagagatctgagtccggttcgccttcagcagggggtcactctaaaccaccacacagtcctctggttctgaaacgttgtcatgtgtccactcaccagcacaactacgctgcacctccatcaacccgaaaggactaccctgctgctaaacgtgtcaagttggactcagtgagagttctccgtcagatctccaacaacaggaagtgcacttcacctagatccagcgacacagaagagaacgtcaaaagacggactcataacgtcctcgagcgccagagacgaaatgaattgaaaaggtcctttttcgcactccgtgaccagattccagaacttgaaaataatgagaaagcacccaaggtcgttatcctgaaaaaagctacggcttacattctgtcagttcaggctgaggagcaaaaattgattagtgaggaagacttactgagaaagcggagagagcaactcaaacacaaactcgaacagctcagaaactcctgtgcctag

SEQ ID NO: 4769 - DNA, 1263 bp, synthetic construct
  misc_feature 1..1263: note = source = /note="Description of Artificial Sequence: Synthetic coding sequence"
  source 1..1263: mol_type = other DNA
atgcctctgaacgtgtctttcacaaaccgcaattacgacctggactacgacagtgtccagccgtacttctattgcgatgaggaagacatctggaagaagttcgagctcctgcccactcccccacttagcccctcccgccgatcgggcctgtgcagtcctagttacgtggctgtcactccgttttcactcaggggggacaacgacggaggcggaggttctttctcaaccgccgatcagctcgaaatggtcacagagctgctggggggagacatggtgaatcaaagtttcatttgcgatccggacgacgaaacattcataaaaaatatcatcattcaagactgcatgtggtctggatttagcgccgcagccaaattggtcagcgaaaaactcgcgtcataccaggcggctcggaaagactccgggtcccctaatcctgcaaggggacactctgtttgctctacctcaagcctgtacctgcaggatttatcagccgctgctagtgaatgcatcgatccctctgtcgtgttcccttaccccctgaacgactcaagctcccctaaatcttgtgcttctcaggattcctctgcttttagcccaagttccgacagcctgctgagctccactgaatcatcaccccagggctcccctgagccgttggtgctgcatgaggagacccctccgactacctcatcagattcagaagaagagcaagaagacgaggaagagatcgatgtggtctccgtggagaagcggcaagcacctggtaagaggagcgaaagcggctcgcccagtgccggtggccacagtaagccacctcacagtcccctggtgctaaagcggtgccatgtgtcaacacatcaacataactacgccgcaccgccttctacaaggaaagactaccccgcagcgaagagagtgaagttggattctgtcagagtgctgcgccagatctccaataaccgaaagtgcactagccccaggtcctccgatacggaggaaaacgtaaagaggagaacacataatgtactagagcgacagagaaggaacgagctaaaacgcagctttttcgcactgagagatcagattcccgagcttgagaacaatgaaaaggcacccaaagttgttatcttgaaaaaggccaccgcttacatcctgtcagttcaggcggaagaacagaagctgatttccgaagaagacctattgcgtaaacggagggagcagcttaaacacaaattggagcagttgcggaatagctgtgcatag

SEQ ID NO: 4770 - DNA, 1362 bp, synthetic construct
  misc_feature 1..1362: note = source = /note="Description of Artificial Sequence: Synthetic coding sequence"
  source 1..1362: mol_type = other DNA
ctggacttcttccgagtagtggaaaaccagccacccgctaccatgcccctgaatgtctcattcacaaacaggaactacgacctggattacgactccgtgcagccatatttttactgcgacgaagaggaaaacttctatcagcaacaacagcagtctgaattgcaaccaccagccccaagcgaggatatttggaaaaagttcgagctgttgcctaccccgcctttgtccccatctcgtaggagcggtctttgctccccctcatacgtggcagtcacacctttctcattgagaggggataatgacggcggaggtggatctttttcgaccgccgatcagctggagatggtgactgaactattggggggagacatggtcaaccagtcattcatttgcgaccccgatgatgaaaccttcatcaagaacatcatcattcaagattgtatgtggagcgggttctcagcagccgcaaagctcgtcagtgaaaaactcgcctcctaccaggctgcgcgtaaggactctggttcccccaacccagccagaggacatagcgtgtgtagtaccagctccctataccttcaggacctttccgcagccgcatccgaatgcatagatccatctgtcgtattcccctacccgctgaatgattcctcttctcctaaatcttgcgcgagccaggacagtagcgcctttagcccttcctccgacagcttactgagtagcaccgaatcttcgccacagggctctcctgaaccattggtcctgcacgaagagacccctccaacaacctcatcagattcggaggaagagcaggaggacgaggaagaaattgacgtggtgagcgtcgaaaagaggcaagctcctggaaagagatctgagtcaggcagcccctctgcaggcggacacagcaagccacctcactcaccgctggtcctcaagagatgtcacgtatcaacccaccaacataactacgccgcacctcctagcactcggaaggactatccagccgctaagagggtgaaactcgacagtgtaagggtgctacggcaaatctccaacaaccgcaagtgcacgagcccacggagctctgacacggaggaaaacgttaaaagacggacacataacgtgttggaaagacagcgaaggaatgagctgaaacggtccttctttgctctccgtgatcagattccagagctcgaaaataatgaaaaggctcctaaggttgtgattttgaaaaaggccactgcgtatatcctctcagtccaagctgaggagcagaaactgatctccgaagaggatcttttgagaaagcgcagggaacagctgaaacataaactcgagcagcttcgcaatagttgtgcctag

SEQ ID NO: 4771 - DNA, 8441 bp, synthetic construct
  misc_feature 1..8441: note = source = /note="Description of Artificial Sequence: Synthetic coding sequence"
  source 1..8441: mol_type = other DNA
atgataccggcacgctttgccggtgttctgcttgcgctagcactgattctccccggtaccctttgtgctgaagggacacgcggacgcagctccactgctcggtgctccctgttcggttctgacttcgtgaacactttcgatgggagcatgtattcttttgcaggatattgctcctatctgctggccggtggatgtcagaaacgaagctttagtatcattggagacttccaaaacggtaagagagtgtcattgtctgtgtatcttggagagttctttgacattcacctctttgtcaatgggactgtcacgcaaggtgatcagcgcgtcagtatgccatatgcgtcaaaggggctataccttgaaactgaagccggttactacaagttaagcggcgaagcctatggttttgtggcccgtatcgatggaagcggaaatttccaagtgttactgtcagaccggtactttaacaagacgtgcggtctctgcggcaatttcaacatatttgctgaagatgattttatgacccaggaaggaaccctgacatccgacccctatgatttcgccaactcttgggctctgagttctggcgagcagtggtgtgagagggcgtctccaccttcaagctcctgtaatatttcttctggagagatgcagaaaggtctatgggaacagtgccagctgctcaagagcacatccgtcttcgcgaggtgccatcctttggtggatccagagcctttcgtagccctgtgcgagaagaccctgtgcgagtgtgccggtggcctcgagtgcgcatgtcctgcacttctcgaatatgccaggacatgtgctcaagagggcatggtactgtacggctggactgaccacagcgcgtgctcacccgtctgcccagctggtatggagtatcggcagtgcgtgtctccatgcgcacggacttgtcagtccctacacattaatgagatgtgtcaagagcggtgtgtggacgggtgttcctgccccgaaggccagctcttagacgagggtctgtgcgtcgagagtaccgagtgtccatgcgtccattcaggaaagaggtaccctccaggaactagcctttccagagattgcaacacttgcatttgccgcaatagtcagtggatttgctctaatgaagaatgcccgggagagtgcttggttacgggccagtctcacttcaagagctttgataacagatacttcacattcagtggtatctgtcagtacctgctcgcgagagattgtcaggaccattccttctccatcgttattgagacagtgcagtgtgcagatgaccgtgatgctgtgtgcacgagaagcgtgactgttcgcctgcctggcctacacaactcgctcgtgaagctcaaacacggggctggtgtggccatggatgggcaggacgttcagctgcctttgctgaaaggcgacctacgcatacagcataccgttaccgcctccgtgcggttaagctacggcgaggacttgcagatggattgggacggcagagggagacttctggtgaaactgtcacctgtgtacgcaggcaaaacctgtggcctgtgcggcaattataacggtaaccagggtgatgatttcttgaccccgagcgggctcgcggagcccagggttgaagattttggtaatgcatggaaacttcatggtgactgccaagacctgcaaaaacaacattctgacccctgcgccctgaatccacgcatgaccagattctcagaagaggcttgcgccgtgctgacctcacctacatttgaagcatgccatagggccgtctccccacttccatacttgcgcaactgtcggtacgacgtatgttcttgctctgacggacgcgaatgtctgtgcggggcactggcctcctatgctgccgcttgcgccggacgaggcgttagagtagcttggcgggagccaggcaggtgcgagcttaactgccctaaggggcaggtgtatcttcaatgcggcactccttgtaatttaacgtgccgaagcttgagctaccccgatgaagagtgtaacgaagcctgtctggaaggctgcttctgccccccaggtctgtacatggacgaaagaggcgattgcgttcctaaagcccagtgcccttgttattatgacggcgagatatttcagcctgaagatattttctcggatcaccacaccatgtgctattgcgaagacgggttcatgcattgtacaatgagcggggttcctggaagcctgcttccagatgctgttctaagttcccctctgtcccacagatccaagcggtctttgtcttgtaggccaccaatggtgaaactagtctgccctgccgacaacctgcgcgctgaggggcttgaatgtaccaagacatgccagaattacgatctcgaatgtatgagcatgggctgcgtcagcggatgtctttgcccgccaggcatggtccgtcatgagaaccggtgtgtcgccttggagagatgtccctgcttccaccagggcaaagagtatgctcccggtgagacagttaagattggctgcaacacctgtgtttgtcaggatcgaaaatggaactgtacggaccacgtgtgtgatgccacctgttcaaccatagggatggctcactacctcacattcgacgggttgaaatacttatttccaggcgaatgtcaatatgtcctagttcaggactactgcgggtccaatcctggcacttttaggatcctggtaggtaataagggatgttcccatccttccgttaagtgtaagaagcgcgtgaccatactggtagaggggggagaaatcgaactgttcgacggtgaggtgaatgttaaacgccctatgaaggatgaaacacatttcgaggtggtcgagagcggcagatatattattcttctgctcggcaaagccctgagtgtggtttgggatcgtcatctctcaatcagtgttgtgctgaagcagacatatcaggagaaggtgtgcgggttgtgcggcaattttgatggcatccagaataatgacctaacctcctcaaatctgcaggtcgaggaggacccagtcgattttggaaactcatggaaagtttcgtcacagtgcgccgacacccggaaagtgcctttggactctagccccgctacctgccacaacaacatcatgaagcagaccatggtagatagttcttgtagaattttaaccagcgacgtttttcaggactgcaacaaactggtggaccctgagccttacctggatgtgtgcatatacgacacatgcagctgcgagtctataggcgattgcgcatgtttctgtgacaccattgcagcctacgctcatgtgtgtgcccagcacggaaaggtcgtcacctggagaacggcgaccctctgcccgcaatcatgcgaggagcgtaatttgcgtgaaaatggatacgaatgcgagtggaggtacaacagttgcgcccctgcttgtcaagtgacttgtcaacaccctgaacctctggcctgccccgtccagtgtgttgaggggtgccacgcgcactgtccgcctggcaaaatcctagacgaattgctgcagacttgtgtggaccccgaggattgtccagtgtgcgaggtggccggacggaggtttgcatctgggaagaaggtgaccttgaacccctctgatcccgaacattgtcaaatctgtcattgcgacgttgtgaacctaacatgtgaggcctgccaggagcccggaggcttagttgtgccacctactgatgcccctgtctcccctactactctttatgtggaggatatctcagagccccctctccatgatttctattgttccaggctcttggacctggtgtttctcctcgatggtagcagcagactctctgaagcagaatttgaggtgttgaaggcctttgttgttgatatgatggaaaggttgaggatctcccagaagtgggtgcgagtcgccgttgtggagtatcacgacggaagccatgcatacatcggcctgaaggacagaaagaggcccagcgaactaaggcgcatcgcatcacaggtgaagtacgctggttctcaggtggctagcacaagtgaggtgctaaagtacactctctttcagatattttcaaagatcgatcgaccagaggcatcccggattacccttttgctgatggcctcgcaggagccacagagaatgtccaggaacttcgtgcggtatgtgcaggggctaaaaaagaaaaaggtaatcgtcatacccgttggcattggccctcacgctaatctgaaacagatccgtttgattgaaaagcaggctcctgagaacaaggcctttgtcctatcctccgtggatgaactggaacaacagcgcgacgaaattgtgtcttatttatgtgacttagcaccagaagcccctccaccaacgctgcccccagatatggcccaggtaactgttggcccaggactcctaggcgtcagcacgttaggccctaagaggaactctatggtcctggacgtcgccttcgtacttgagggatcagacaagatcggggaagctgactttaatagaagtaaagaattcatggaagaggtgattcagcgaatggatgttgggcaggacagtatccacgtcacagtgctgcagtactcgtatatggtcacagtggagtacccgttctccgaggcccagtcgaagggcgatatcctgcagagggtgcgggaaattcgttatcaggggggtaaccggactaataccggcttggcgctacgctacctgagcgatcactcctttctggtgtcacagggcgatagggaacaggcgccaaaccttgtttatatggttaccgggaatccagcatctgatgagatcaagcgactgccaggcgatattcaggtcgtgcctattggcgtcggtcctaatgcgaatgtccaagaattggaaaggattggctggccaaatgcaccaattttgatccaggactttgaaacactacctcgcgaagcgcctgatcttgtgcttcagcgctgttgctcaggagaaggacttcagattcccaccctgtctccagcacctgactgtagtcagccgctagatgtgatcctgctgctggacggtagctcaagtttccccgctagctactttgacgaaatgaagagcttcgcaaaagcattcatctccaaggcaaacatcggccctcgcctgacacaggtctctgtgctacagtatggctccatcaccacaatcgatgtgccgtggaacgtcgtgccagagaaggcccacctcctctccttggtcgatgtgatgcagagagaaggtggtccgagccagatcggcgatgccctgggattcgcggtgcgatacttgactagcgagatgcatggtgcgagacccggagctagtaaagccgttgtgattctcgtgaccgacgtgtcggttgactcagtagacgcagcagccgatgccgcaagatctaatcgagtgactgtttttccaattgggataggtgataggtatgacgccgcacagttgagaatcctggctgggcctgctggcgactcaaacgttgtcaaactgcagagaatcgaagacctgcccaccatggtgacccttggtaactcctttttacataaattatgttccgggttcgtgcggatttgcatggatgaggatgggaacgagaaaaggcctggcgacgtctggaccctccccgatcagtgtcacactgtcacctgtcagccagatggtcagacgctcctgaaatcccatcgcgttaactgtgaccgcggattacgaccttcttgcccgaactcccagagccctgttaaggtggaagaaacctgcggatgcaggtggacatgtccctgcgtatgtaccgggagctccaccagacatattgtcaccttcgacggacagaatttcaaacttacggggtcgtgttcatatgtgctgtttcagaataaagagcaggacctagaggtcatcttacataatggagcttgtagcccgggtgcacggcagggttgcatgaagtcgattgaagtgaagcattcagctctctcagtggagttgcatagcgatatggaagtgacagtcaacggtcgactcgtgtctgtgccctacgtcggtggcaacatggaggtgaacgtctatggcgctataatgcacgaagttcggttcaatcatctggggcacatctttaccttcactccgcaaaataatgagtttcaattgcaactgagccctaagacctttgctagtaaaacttacggcctctgtgggatctgtgacgaaaatggtgcaaatgacttcatgctcagggatggaaccgtgactaccgactggaagaccctggtgcaggagtggaccgtgcagcgcccaggacagacatgccagcctatcctagaagaacaatgcctggtgcctgattcttctcattgccaggtgctcctcctgcctctatttgccgagtgtcacaaagttttagccccagcgacattctacgccatttgccaacaggattcttgccaccaggaacaggtttgcgaggtgatcgcctcttacgcacacctgtgtcggacgaacggagtgtgcgtagactggcggacgcccgacttctgtgccatgagctgtccgccaagtttggtgtacaaccactgcgagcacggatgtccgagacactgcgatggaaacgtgtcatcatgtggtgaccatcctagtgagggttgcttctgccccccagataaggtgatgctcgagggatcttgcgttcccgaagaggcttgcacccaatgtatcggagaggacggcgtacagcaccagtttcttgaagcctgggttcctgaccaccaaccttgccagatttgtacctgcctaagtggcagaaaggtgaactgtaccacccagccctgcccaaccgccaaggcgcctacttgtggcctatgtgaagtcgcgaggctgcgccagaacgccgaccagtgttgtcccgaatatgagtgcgtatgtgatcctgtgagctgcgacctcccgcctgtccctcactgcgaacgtggattgcaacccaccctaacaaatcccggtgaatgccggccaaacttcacctgtgcatgcaggaaggaagagtgcaaaagagtgagccctccatcatgccctcctcaccggctccctaccctgaggaagacgcagtgttgcgacgagtacgagtgtgcctgtaattgtgtgaatagtaccgtgagctgccccctcgggtatctcgcttctactgctaccaacgactgcgggtgcacgacgactacatgtctgcctgacaaagtgtgtgtgcaccgctctaccatttaccccgtgggtcagttttgggaggaggggtgcgacgtttgcacctgtaccgatatggaagatgcagtcatgggcctgcgggtggcacagtgcagtcagaaaccctgtgaggacagttgccggagtggttttacttatgtgctccatgagggagaatgctgtgggagatgccttccttctgcttgtgaggtggtcaccgggtctccacgcggagactcccagtcttcttggaagtcagtcggaagccagtgggcaagccccgagaatccctgtctgatcaacgaatgtgtgcgggtgaaggaggaagttttcatccagcagaggaacgtaagctgtccacaattagaagtgcccgtgtgcccatccgggttccagttatcttgcaagacttcagcgtgttgccccagctgtcggtgcgagcgcatggaggcttgtatgttgaacggaactgttatcggtcccggtaaaacagtcatgatcgatgtgtgcactacatgcaggtgtatggtgcaagttggcgttatctctgggttcaagctggagtgtaggaaaaccacgtgcaatccatgcccgctgggttataaggaggaaaataataccggagaatgttgcggccgttgtcttccgaccgcttgcacgatccagttaaggggtggccagattatgacattaaaacgggacgagacactgcaagatggctgtgatacccacttctgcaaggtgaacgaacgcggagagtatttttgggaaaagcgggtcaccggttgtccacccttcgacgaacacaaatgtctggccgagggtggaaaaatcatgaaaattcctggcacatgctgcgatacatgcgaggagcctgagtgcaatgatataaccgcgaggctacagtacgtgaaagtgggctcctgtaagtccgaagtagaagtggacattcactactgccaggggaaatgcgcttctaaagcgatgtactctatagatatcaacgatgtccaggatcagtgctcatgctgctcacccacccgcacagagccaatgcaggtagccctgcactgcactaatggcagcgtggtgtatcacgaggtgctgaacgcaatggaatgcaagtgcagcccccgaaaatgctccaagta

SEQ ID NO: 4772 - DNA, 816 bp, synthetic construct
  misc_feature 1..816: note = source = /note="Description of Artificial Sequence: Synthetic coding sequence"
  source 1..816: mol_type = other DNA
atgaccgaaccgcaggtgggctgcgtggcctgtcctcgggtccacaaagagcctgcccaagtaggcaccccatggcccgctaaaccacggtcacatcctaggaagagagaccccacagcgctgctgccaaggtcgctttggcctgcctgccaggagagtgttactgctctgtgtttcttgcaagaaaccgtggaacgattgggacaaagccctgcacaagacacacccgttctggggccttgctgggaccctatggctctgggcacacagggtcgcctgcttcttgacagggacagcaaagacactcagactagaattagccagaaaggaaggagattacaaccgccagggacaccgtctgcacctcctcagagacgccctcggaagcagttgaacccttgtcgcggaaccgagagagtcgatccgggattcgagggtgtaacacttaagtttcagattaaaccagattcatctctgcagattatcccaacatattcactcccttgttcaagccggtctcaggaatctcctgcggacgccgttggcggtccggctgcccacccaggtggaacggaagctcactcagccggaagcgaagccttagaaccccgtagatgtgcaagttgtaggacccagcgtacacccttgtggcgtgacgctgaggacggcacccctttgtgcaacgcctgcgggattagatacaagaagtacggcactcggtgcagcagttgttggctcgtccctagaaagaacgtgcaacctaagagactgtgcggacgttgtggcgtaagtctcgatccaatccaggaagggtag

SEQ ID NO: 4773 - RNA, 438 nt, synthetic construct
  misc_feature 1..438: note = source = /note="Description of Artificial Sequence: Synthetic coding sequence"
  source 1..438: mol_type = other RNA
atgagtacagagggcggcggacgccgatgccaggcacaagtatcccggcgaatctcattttcagcttcgcataggctgtatagcaagtttctgagcgacgaggagaacctgaaactgtttggcaagtgtaataatcccaatggacacggccataactataaagtagtcgtaactgtgcacggcgaaatagacccagctaccggaatggttatgaacctggcggatcttaagaaatatatggaggaggcaatcatgcagccattagaccacaagaatcttgacatggacgttccctacttcgcagatgttgtcagcactacagagaacgtggcagtgtacatatgggacaatttgcagaaagtactgccagttggagtgctctacaaagtaaaagtgtatgagaccgacaacaacattgttgtgtacaaaggcgagtag

SEQ ID NO: 4774 - RNA, 4284 nt, synthetic construct
  misc_feature 1..4284: note = source = /note="Description of Artificial Sequence: Synthetic coding sequence"
  source 1..4284: mol_type = other RNA
atgcatcaacgccacccccgggcccgatgtccgcctctgtgtgtcgctgggatcctcgcttgtggcttcctgctgggatgctggggtccctcacactttcaacagtcttgcctgcaggccttggagccacaggctgtgtcttcctacctctccccgggagcgcccctgaagggaagaccaccatcacccggtttccaaagacagcgtcaacgccaacgtagggcagccggtggcatcctacatctcgagttgctggttgctgtgggccccgacgttttccaggcccaccaagaggacaccgagcgctacgtccttactaacctcaatatcggggcggaattattaagagacccctcacttggagcgcaatttagagtgcaccttgtgaagatggttatcctgacggaaccagaaggcgccccgaacatcactgcaaatcttaccagctctcttttatccgtgtgcggctggtctcagacaattaaccctgaggatgataccgacccagggcatgcagatctcgtgctatatattacccggttcgatctcgagttgcctgacggcaacagacaggtcagaggcgtgactcagctcggcggggcatgctcacccacctggagctgtctgatcactgaagataccggctttgatttgggcgtaaccattgctcacgaaatcggacactcctttgggcttgagcacgatggggctccaggaagcggctgtggaccaagcggccacgtgatggcgtccgatggggccgctccccgggccgggttagcttggtccccttgctctcggagacagctgctctctcttttaagcgctggaagagctagatgcgtatgggatcccccacgaccacagcctggctctgccggtcaccctcctgatgcccagccaggcctctattatagcgctaatgagcagtgtcgagtcgcctttgggcctaaggcagtcgcgtgtacctttgccagagagcatcttgatatgtgtcaggctctatcttgtcacactgatccccttgaccagagctcctgttcccgcctccttgttccccttctggacggcactgaatgtggtgtagaaaaatggtgcagtaaagggcggtgtcgaagtctcgtggagctgacaccaattgctgccgtccacggccgctggtcaagttggggcccgaggagcccttgctcccgatcctgtggaggtggtgtggtgaccagaagacgacaatgcaataatcctcggccagcttttggtggccgagcatgcgtgggggccgacctgcaggctgagatgtgcaatactcaggcctgcgaaaagacccagctcgagtttatgagccagcaatgtgctcgcactgatggccagccattaagatcctcaccaggaggagcaagcttctatcactggggagcggcagttccccattcccagggtgatgctctgtgcaggcatatgtgccgagctatcggcgagtcgtttatcatgaaacggggagatagtttccttgacggcacaaggtgtatgccctctggtccacgggaagatggcaccctgtccctatgtgtgagcggaagttgtaggacttttggctgcgacggaagaatggatagccagcaagtttgggatcgatgtcaggtgtgcgggggagacaattccacatgttcaccccgcaaggggtcatttactgcagggcgcgcccgggaatatgtaaccttcctcactgtcacacctaacctgacatccgtctatatcgcaaatcatagacccctctttactcatctggccgtccggataggcggcaggtacgttgttgcaggcaagatgagcattagtccaaacacaacataccccagcctcctggaagacggaagggtggagtatcgcgtggctctcacggaagacagactacctcgacttgaagagataagaatttggggtcctctgcaggaagacgcggatatccaggtgtaccggagatacggcgaagagtacggcaacttgaccaggcctgatatcacgtttacctacttccaaccaaagccccgccaggcgtgggtgtgggcagccgtgcggggcccctgctctgttagctgtggggccgggctgaggtgggtgaattattcgtgcctagatcaggctaggaaagaactggtcgaaaccgtccagtgtcagggtagccagcagccacctgcatggcccgaagcatgcgtgcttgagccgtgcccgccatactgggccgttggtgactttggaccctgctctgcttcttgcggtggcggtctgcgagaaaggccagtgaggtgcgtggaagcccaaggttcgctgcttaaaacacttccccctgctcggtgtagagctggcgctcagcagccagcggttgccctcgagacctgtaacccccagccatgtccggcccgttgggaagtcagcgagccatcctcctgtacgtcagccggaggggccggcttggcacttgagaatgagacctgcgtgcccggagctgacggcttggaagctcccgtgacagaaggccctggttccgtggacgagaaactcccggcacctgaaccctgcgtcggaatgagttgccctcctggttgggggcacctggatgcaacctccgctggagaaaaagccccatctccctggggctcaattagaaccggggcacaggctgcacacgtatggacacctgcagcaggtagctgttctgtctcctgcggccgcggccttatggagctgcgcttcctgtgcatggattcagccctgcgggtccctgtgcaagaggagttgtgcggtcttgctagtaagccaggatccaggcgtgaggtttgtcaagctgtgccttgccctgcccggtggcagtacaagctcgcggcttgcagcgtctcttgcggcagaggcgtggtgaggaggatcctttactgtgcaagggcacacggggaggacgatggggaagaaatacttcttgatacacagtgtcaagggctgcctagaccggagcctcaggaagcttgctcactagagccctgcccaccgcggtggaaagtgatgtctctcggaccgtgttctgcttcttgtggtctggggaccgcaaggcgaagtgtggcttgcgttcaactcgaccagggccaggatgtcgaggttgatgaggccgcatgcgctgctttggttcggcccgaggccagtgtcccttgcctgattgctgactgtacttatcgctggcacgtgggcacttggatggagtgcagcgtgtcatgtggggacggaatacagcgtagacgtgatacctgcctgggtcctcaggcacaagccccagtcccagcggacttctgtcagcatctgccaaaacccgtgacagtccggggatgctgggctggtccctgcgtcggacaggggacccctagcctcgtaccacacgaggaagccgctgctcccggtcggactacggccacgccagctggagcatctttagagtggtcacaggcacgaggcctcctcttcagccctgcgccccagccaaggcgcctgttacctggacctcaagaaaacagtgtgcagagcagcgcctgtggcagacagcatctcgaacccacagggaccatagacatgcgcggccccggacaggcagactgcgccgtcgccataggcagaccgcttggcgaggtggtgacactgagagtgcttgagtcttccttaaactgtagtgcaggcgatatgttactgctgtggggacgtctgacctggcggaagatgtgtcgcaaattgctcgacatgacatttagcagcaaaacgaacacactggtcgtgaggcagagatgcggtcgtcccgggggcggggtgctactgcgatacgggtcccagctagctccggagaccttttatcgagaatgtgacatgcagctgtttggcccctggggagagattgtttctcctagcctcagccccgccacatctaacgcaggtggatgtaggttattcattaacgtcgccccccatgcccggatcgctatccatgctcttgccacgaatatgggtgccggaaccgaaggtgcaaacgctagttacatcctcattcgggatacacactcccttcgcacaacggcattccacggtcagcaggtgctgtactgggagtctgaatcctcccaggccgaaatggagttctctgagggatttctcaaggcccaggctagcctcagaggacagtattggactttgcagtcttgggtccccgaaatgcaggacccacaaagctggaaggggaaggagggcacatag

SEQ ID NO: 4775 - RNA, 3309 nt, synthetic construct
  misc_feature 1..3309: note = source = /note="Description of Artificial Sequence: Synthetic coding sequence"
  source 1..3309: mol_type = other RNA
atgttccagcttcctgtcaataacttgggcagcttacgaaaggcccggaaaactgtaaagaaaattctctcagatattggtctagaatactgtaaggagcacattgaggactttaagcagtttgaaccaaatgatttttacttgaagaacacaacttgggaggacgtcggtttgtgggacccaagtctgacaaagaatcaagattacagaaccaaaccattttgctgttcagcctgccccttttcttcaaagtttttcagcgcctataagagtcacttccggaacgtccacagtgaggatttcgagaaccgcatcttacttaattgcccctattgtacttttaacgcagataagaaaacattagagacgcacatcaagatatttcatgctccgaacgcctcagccccttcaagcagcttatcaacattcaaggataagaacaagaatgacggccttaaacccaagcaagcagacagtgtggagcaagcagtgtattattgcaaaaagtgtacatatcgggaccctctttatgagatcgtgcgaaaacacatctacagagaacacttccaacacgtggccgctccctacatcgcaaaagctggcgaaaaatcactgaatggggctgtgcctctggggtccaacgcgcgcgaagaaagcagtattcattgtaaaaggtgcctgtttatgcctaaatcttacgaagccctggtgcagcacgtaattgaagaccatgaaaggatcggctaccaggtgactgccatgataggtcatactaatgtcgtggtccctaggagcaaaccattaatgctgatcgcccctaagccacaggacaagaaatcgatggggctgccccctcgtatcgggagcctggcctcaggaaatgttagatccctgccctcacaacagatggtgaacaggctttccatccctaaaccgaacttaaactccacaggggtgaacatgatgagttccgttcacttgcaacagaacaattatggagtcaaatccgtgggccaggggtattcagtgggacagtcgatgaggctgggactgggtgggaacgctcctgtctcaataccccaacagtctcaatccgtcaagcaattgttgccatccggtaacggcaggagctatggcctcgggagtgagcaaagaagtcaagcgcctgcccgttactccctgcaatctgccaatgcatcatccctttctagcggacagctgaaatcgccctcccttagccagtcccaggcaagccgagtgttaggacagagctccagtaagcccgccgctgccgctaccggtccaccaccaggaaacactagttccacgcagaaatggaagatctgcacaatctgcaacgagctatttccagagaacgtgtacagtgtgcactttgaaaaagagcacaaagccgagaaagtcccagccgtggctaactacattatgaaaattcacaattttactagtaagtgtttgtactgtaataggtatttgcccactgacactctactaaatcatatgctaatacacggactgtcctgcccttattgccgctccaccttcaacgacgtcgaaaagatggctgcccacatgcgtatggtccacattgacgaggagatggggccaaaaacagacagcactctttcatttgaccttacgctgcagcagggctcccacacaaatatacacctgttagtcacaacatacaacctgcgggacgcacctgccgaatccgtagcttaccacgctcaaaataatcccccggtcccccccaagccacaacctaaagtgcaggagaaggcagacatcccagtgaagtctagcccccaggctgcagtaccctacaagaaggatgtgggaaagacgttgtgccctctgtgcttctcgatcctaaagggtccaatttccgatgctttggctcaccacctgcgcgaacgccatcaagtgatccaaaccgtccatccagttgagaaaaagttgacttataaatgtattcactgtctgggcgtctacacctccaatatgaccgctagcaccatcaccctccatctggtgcactgcagaggagtgggcaaaactcagaacggacaggacaaaaccaacgcaccaagccgcctcaatcagtccccatctctggcacccgtaaaacgaacctatgagcaaatggaatttccccttcttaaaaaacgcaagctcgacgacgatagtgattcccccagcttctttgaggaaaagccagaggagccggtcgtgttggccctggaccctaaaggccacgaggacgattcttacgaagccagaaagtcgttccttactaagtactttaataaacagccctatcctacccggagggaaatagaaaagctcgctgcctctctctggttgtggaaatcagacattgcttctcatttcagcaataaaaggaaaaaatgcgtccgtgattgtgagaaatacaagccaggggtgctgctgggattcaatatgaaagaacttaacaaagtgaaacacgaaatggacttcgacgccgaatggctgtttgagaaccacgatgaaaaggatagccgcgtcaatgcatcaaaaactgcagacaaaaagctcaatctgggtaaagaggatgatagcagcagcgatagtttcgagaatctggaggaagaatccaacgaaagcggtagccctttcgaccccgttttcgaagtggaaccgaagatcagcaacgataatcctgaagaacacgtgctgaaggtgattccagaagacgcttctgagtccgaggaaaagctcgaccagaaggaagatgggtctaaatatgaaactatacacctgacggaggaacccactaagctcatgcacaatgcgtcagattcagaggtggaccaggacgatgtggttgagtggaaggacggcgcctccccctctgagagcggtccaggctcccaacaggtgagcgatttcgaggacaatacgtgtgagatgaaaccaggcacgtggagtgatgaatccagccagagcgaggatgccagaagcagtaagcctgcagccaaaaaaaaagccaccatgcagggcgatagagagcagttaaaatggaagaacagctcttatggaaaagtcgaaggcttctggtctaaagaccagagccaatggaagaacgccagtgaaaacgatgaaagactgtccaacccacaaatcgagtggcagaatagcaccatagacagtgaagacggggaacagtttgacaatatgacagacggcgtggctgagccaatgcatggctccctggcaggcgtgaaactgagtagtcaacaggcctag

SEQ ID NO: 4776 - RNA, 3309 nt, synthetic construct
  misc_feature 1..3309: note = source = /note="Description of Artificial Sequence: Synthetic coding sequence"
  source 1..3309: mol_type = other RNA
atgttccagctgcccgtcaataatttgggaagcttgaggaaagcacgcaaaaccgtaaagaagatactctctgatatcggtctcgagtattgcaaagagcacatcgaggactttaaacagttcgagccgaacgatttctacttaaagaatacaacctgggaggatgtgggtctgtgggatcctagcctgaccaaaaatcaagactacaggacaaaaccattctgttgcagtgcgtgcccttttagctctaagtttttttccgcatataaatcccacttcaggaatgtccactctgaggacttcgaaaacaggatcttgctaaattgtccctactgcaccttcaatgcagacaaaaagacgctggagacacacatcaaaattttccacgctcccaatgccagcgccccttcatctagcctgagtacattcaaggacaagaacaaaaacgacggtcttaagcccaagcaggctgattctgtagagcaggcagtctattactgtaagaagtgcacataccgcgacccattatatgagattgtgcgaaagcacatctaccgtgaacatttccagcatgtggccgccccatatattgcaaaggctggagaaaaaagcttgaatggagctgtgccgttaggatccaatgcgagagaagagtccagtattcactgtaagcggtgtttgtttatgcccaagagttatgaggccctggtccagcacgtgatcgaggatcatgagagaattggctatcaggtgactgctatgatcggccacacaaatgtggtcgtgccccgctccaagcctttgatgcttatagcccccaaacctcaggataaaaaaagtatgggtctgcctccacggataggttctctggcgtccggtaatgtgaggagtctgcccagccagcagatggtaaatcgcctcagtatcccgaaacctaacctaaacagcacgggagttaacatgatgagcagtgtgcacttgcagcagaacaactacggcgtgaaatcagtcggtcagggctatagtgtgggacaaagtatgagattaggtctaggcggcaacgcgcccgtgtctatacctcagcagtctcagagtgtcaagcagcttctgcccagcggaaatggacgaagttatggccttggctctgagcaacggtcacaggctccagccagatactccctccagtcagccaatgcaagcagtcttagttccggccagttgaagtctccttccctatctcagtcccaggcctccagggtgttgggacagtcctcatccaaaccagccgccgcagcgacagggcccccccccggaaatactagtagtactcaaaaatggaaaatctgcacaatctgcaatgaactgttcccggagaatgtctactctgttcattttgaaaaggaacataaagctgaaaaagtgccagctgtggccaattatattatgaaaattcataactttacgtccaagtgtctttattgcaacaggtatttgccgacggacaccctattgaaccacatgctgatccatggattgagttgcccatattgccggtccacatttaatgacgtggaaaagatggctgcgcacatgcgcatggtgcacattgatgaggaaatgggccctaaaacggattccactctgtcattcgaccttaccttgcagcaaggctctcacactaatattcacctgctggtgaccacatacaatctgcgggatgcccctgccgagtccgtcgcttatcacgcccagaacaatcctcctgtgccacccaaacctcagcctaaggtgcaagaaaaggctgacattcccgtgaaaagtagccctcaagcagccgtaccctacaaaaaggatgtgggcaaaactttgtgccctctctgcttttccattctcaagggccctatctcagacgcgctggcccaccatcttagggaaagacaccaggtcattcagactgtccatccagtcgagaaaaaactaacatacaagtgcattcactgcctcggtgtatatacgtccaacatgaccgcctctaccataactctgcacttggtgcattgccgaggagttgggaaaacccagaatggccaggacaagaccaatgccccctctcgcctgaaccaatcacccagtcttgcccccgtgaaacgaacttacgagcagatggaattccccttgcttaagaagaggaagctggatgatgactccgatagcccttcttttttcgaagagaaacctgaggaacccgtggtgcttgctttagacccaaagggccacgaggacgattcgtatgaagcacgcaagtctttcctaactaaatattttaacaagcaaccttatcctactcggcgtgaaatcgagaaattagccgctagtctctggctctggaagtccgatatcgctagtcacttctctaacaagcggaaaaagtgtgtgcgggactgcgaaaagtacaaacccggcgtgctgctggggttcaacatgaaagaactaaacaaggtcaagcatgaaatggactttgacgcggaatggctgtttgaaaatcatgacgagaaagactcgagagtaaatgctagtaagacagccgataaaaaactgaatctcggaaaagaggatgatagcagctcagacagctttgaaaatttagaggaggaatccaatgagtccgggtccccattcgatccagtgttcgaagtggagcccaagatctccaacgataacccagaagaacacgtgttgaaagttataccggaagatgctagcgagagtgaggagaaactggaccagaaagaagacggatctaagtatgagactatccatctcactgaagagccaactaaattaatgcataacgcctctgacagcgaggtggaccaggatgatgttgtcgaatggaaggatggagcatcgccttcagagtcaggtcctggaagtcaacaggtcagcgattttgaggataacacatgcgaaatgaagccaggcacatggagcgacgagtcatctcagtccgaggatgcccgcagctcaaagcctgcagctaagaaaaaagccaccatgcagggcgatcgggagcagctcaagtggaaaaacagttcgtatggaaaggttgagggtttctggtctaaggatcagtctcaatggaaaaatgccagtgagaacgatgaaaggctctcaaatccccagatagaatggcaaaactctaccattgacagcgaagacggcgagcagttcgacaatatgaccgacggagttgcagagcccatgcatgggtccctcgccggtgtgaaattatctagccagcaggcctag

SEQ ID NO: 4777 - RNA, 3309 nt, synthetic construct
  misc_feature 1..3309: note = source = /note="Description of Artificial Sequence: Synthetic coding sequence"
  source 1..3309: mol_type = other RNA
atgttccaactcccagtgaataatctcggaagtttaagaaaagcgagaaaaactgtgaagaagattctgtccgatattggcttggagtattgcaaagagcacattgaggactttaagcagtttgagccaaatgatttttatttgaaaaataccacatgggaagacgtgggcctgtgggatccttccctcacaaaaaaccaggactaccgcaccaagccattctgctgctcagcgtgtccattcagcagcaaatttttctctgcttacaagtcccattttcgaaacgtccattcagaggactttgaaaacagaatactactcaattgcccatactgtacctttaacgcagacaagaaaactctggagactcacatcaaaatctttcacgcgcccaatgccagcgctccgtctagctctctatcaacatttaaggacaaaaataagaatgacggactgaagcctaaacaggcggactctgtggaacaggctgtgtattactgtaaaaaatgcacctaccgggatcctctgtacgagattgttcgaaaacatatatatcgggagcattttcagcacgtggcggccccttatattgcaaaagccggtgaaaagtctttgaacggagccgtaccgttgggtagcaacgcccgcgaggaatcttccatccactgtaaacgatgtctgttcatgcccaaatcctacgaggccttggtgcaacatgttattgaagatcacgagaggatcggctaccaggtgacagcaatgattggtcatactaatgtggtagtgccccgctccaagcctcttatgctcattgctcctaaaccccaggacaagaaaagtatgggactgcctccccggattggttcactcgcctcggggaacgtgcggtctcttccaagccagcaaatggtcaaccgcttgtcaattccgaaaccaaatttaaatagtaccggcgttaacatgatgtctagcgttcacctgcagcagaataattacggggtgaaatctgtgggtcaaggctactccgtgggtcaatcgatgaggttgggactgggcggtaacgctcctgtctccattcctcaacaatcccagtctgttaaacagctgttgccttctggcaatggccgatcttacggccttggatcagagcagagatcccaggcgccagcccgatattccctgcaatccgccaacgcatccagtcttagctctgggcagctcaaaagtccctcccttagccagtcgcaggcgagccgcgttctcggccagagttcctccaaacctgccgcggctgcaacaggtcccccacctgggaacacctcgtccacgcagaaatggaagatttgtactatctgcaacgagctctttcccgagaacgtgtactcagtccatttcgaaaaagaacataaggccgagaaagtccccgccgtcgccaactacatcatgaaaatccacaattttacatccaaatgcctgtattgtaatcgttaccttccaaccgatacacttctcaaccacatgcttattcacggactctcctgcccctactgcaggtcgaccttcaacgacgtggagaagatggcagctcatatgaggatggttcacatcgacgaagaaatgggccccaagacagattcaaccttaagcttcgaccttaccctccagcagggcagccataccaacatccatctgttagtgaccacctataacctccgcgacgccccagctgagagcgtggcataccacgcgcagaataacccacctgtgcccccgaagccccaacctaaagtacaggaaaaggctgacatcccggtaaagtcctcgccccaagcagcggttccctacaagaaggatgtaggcaaaacactgtgcccactctgcttctcaattctgaaggggcccatatctgatgcactcgcccatcacctgcgggaacggcaccaggttatacagactgtgcaccctgtggagaaaaaactgacttataaatgcatccactgtctgggcgtttatacttccaacatgaccgcctcaaccatcactcttcacctcgtccattgccgcggtgtgggcaagacccaaaacggtcaggacaaaacaaatgccccaagcaggctcaatcagtctccatcactagcccctgtgaagagaacatacgagcaaatggaattccctttattaaaaaaaagaaagctagatgatgactcagactcccctagcttctttgaagaaaagccagaggagccagttgtgctggcattggacccaaagggacatgaagatgactcttatgaagccagaaagagttttctgactaagtactttaacaagcagccctacccgacaaggagagagatagaaaaactggccgcatcgctctggttgtggaaaagtgacattgcgtctcatttctcaaacaagcgtaagaaatgcgttcgcgactgcgagaaatacaagcccggcgtgctcctggggtttaacatgaaggaactgaacaaagtgaagcatgagatggatttcgacgcggagtggcttttcgaaaatcacgacgagaaagattccagggttaacgcttctaaaacagcagacaagaaactgaacctaggtaaagaagatgattcttcctccgactcctttgaaaatctcgaggaggaaagtaatgaatccggctcacccttcgatcctgtgtttgaagttgagcctaagattagcaatgacaatcctgaagagcacgtcctgaaagtcatacccgaagacgcctcggagagtgaggaaaaactggaccagaaagaagacggtagcaagtacgaaacgatccacctgacagaggagcccaccaagttaatgcataacgcctcagacagcgaggtggatcaagatgatgtggtcgagtggaaggacggagcgtcaccgagtgaaagcgggcctggtagccagcaggtctcggattttgaagataacacatgtgagatgaaacctggcacctggtctgatgagtcaagtcaaagcgaggacgcgcggtccagcaagccagctgcgaaaaaaaaggctacgatgcagggagaccgcgagcagttgaaatggaaaaactcatcttacggtaaggtggagggcttttggagcaaggaccagtctcaatggaaaaacgcatccgagaacgacgagaggctgagtaacccccagattgagtggcaaaactctactatcgattccgaggatggcgaacagtttgataacatgacagatggggtggcagagcccatgcacgggagccttgcgggggtcaagctgtcaagtcagcaagcctag

SEQ ID NO: 4778 - RNA, 3309 nt, synthetic construct
  misc_feature 1..3309: note = source = /note="Description of Artificial Sequence: Synthetic coding sequence"
  source 1..3309: mol_type = other RNA
atgttccaactgcccgtcaacaatttaggatctctgcgcaaagcaaggaagacggtgaaaaagattctttccgacattggacttgagtactgtaaagagcatattgaggacttcaagcagtttgagcccaacgatttttacctgaaaaacactacttgggaagatgtggggttgtgggatccttccctcaccaagaaccaagattaccggacaaaaccgttctgctgtagcgcatgtcctttttcatctaaattcttcagcgcatacaaatcccacttccgcaatgtccactctgaagatttcgagaataggattctcttaaactgcccctattgcaccttcaacgccgataaaaaaaccctcgaaacacatatcaaaatctttcacgcgcctaatgcatcagccccatcctcaagtctctcaaccttcaaagacaagaacaaaaatgatgggctgaaaccaaaacaagccgactccgtggaacaagccgtgtattattgtaagaaatgtacctatagggacccactatacgagatcgttcggaaacacatctaccgcgaacatttccaacacgttgcagctccctatatcgctaaggccggcgagaagagtctgaatggcgccgtgcccttaggctctaatgcacgcgaggagtcctccattcactgcaagcggtgtctcttcatgcccaagtcgtacgaagccctggttcaacatgtgattgaggatcacgagagaatcgggtaccaagtgacggccatgattggacatacgaacgtagtggtgcccagatctaaacctctgatgctgattgcccctaagccacaggataaaaaaagtatggggctaccaccgcgtatcggatccctggccagtgggaacgtgcggtcccttccctctcagcagatggtcaatcggctttcaattcccaagcctaacttgaacagcacgggcgttaatatgatgagcagtgtccatctccagcagaataattacggggtgaaatctgttggccaaggatattctgtggggcagagtatgcgattagggctcggtggtaacgcacctgtgtcaatcccccagcagagccagtccgtcaaacagctacttccatccggtaatggcaggtcttatggactcgggtctgagcagcggtcacaagcaccagcaaggtactcccttcagtcagccaatgccagtagcctatctagcggacagttgaaatcaccaagcctgtcacagtcccaggctagtagagtattgggccaatcatcctcaaaacccgccgcagctgcaactggccctccgcctgggaacaccagcagcacccagaaatggaaaatttgtactatctgtaacgagttgttcccagagaacgtttatagcgtgcacttcgaaaaagaacacaaggcagagaaggtgccagctgtggctaactatatcatgaaaatacataattttaccagcaaatgcctgtactgtaaccgttacctaccaaccgacacattgcttaaccatatgctgatacacggtctctcatgtccttactgtaggagcaccttcaacgatgttgaaaagatggccgcccacatgagaatggtgcatatcgatgaagagatgggtcccaagacggatagcacccttagtttcgacttaaccctccagcaaggttcccataccaacatccacctgctcgtgacaacatataacctgagagatgccccagcggaatctgtggcataccacgctcagaacaacccccctgtcccccccaaaccacaacccaaagtgcaggagaaggcagatatccctgtaaaatctagtcctcaggcggctgtgccctataaaaaggacgttggcaagactctatgccccctttgcttttctatcttgaagggtcctatttcagacgccctggcacatcatctgcgcgaaaggcaccaggtgatccagaccgtgcacccagtggagaagaagctgacctacaagtgcatccactgtctcggagtctacacgtccaacatgactgccagcaccatcacattacatctagtgcattgcaggggcgtcggcaaaacccaaaacggtcaggataagacaaacgctccaagccgtctgaaccagagtcctagtctagctcctgtgaaacggacctatgagcaaatggaattccctctcttgaaaaagcgcaaactcgatgatgactctgattccccttcattctttgaagagaagccggaggagcctgtggtgctcgccttggatcctaaaggccacgaggacgactcatacgaggcccgcaaatcattcctcaccaaatacttcaacaagcagccctaccccacccgtcgcgaaatcgagaagctcgccgcgtctctgtggctctggaagagtgatatcgcttctcacttctccaataaaagaaagaagtgtgtacgcgattgtgagaaatacaaaccgggggttttactgggatttaacatgaaggaactcaacaaagtgaaacatgaaatggactttgatgccgagtggctcttcgaaaatcacgacgagaaagattcccgggtgaacgcctcgaagaccgccgacaaaaaactgaatctcgggaaggaagatgattcgagcagtgattcctttgagaacctcgaggaggagagcaacgaatcagggtccccatttgaccccgtttttgaggtggagcccaaaattagcaacgacaaccccgaagagcatgtacttaaagtgattcccgaggatgccagcgaatccgaagagaaactggatcagaaggaggatggtagtaagtacgaaactattcatctcaccgaggagccgacaaaattaatgcataacgccagtgattctgaagtggatcaagatgatgtggttgaatggaaggacggggctagcccttcagagagcggccccggttctcagcaggtgtcagattttgaagacaacacttgtgaaatgaagcccggcacctggagcgacgaaagctcgcagagtgaagacgctagatcttccaaacccgctgcaaagaaaaaagccacgatgcagggcgatcgcgagcaactcaagtggaaaaactccagctacgggaaagtagaaggattctggagcaaagatcagtcacagtggaaaaatgcatcagagaatgatgaacggctctcaaatccccagatcgagtggcaaaatagtaccatcgactccgaagacggtgagcaatttgataatatgaccgacggcgtagccgagcccatgcatggatcactggccggggttaaactctcaagtcagcaagcctag

SEQ ID NO: 4779 - RNA, 522 nt, synthetic construct
  misc_feature 1..522: note = source = /note="Description of Artificial Sequence: Synthetic coding sequence"
  source 1..522: mol_type = other RNA
atgttccagctgcccgttaacaaccttggatcattacgaaaagcccggaaaacggttaaaaaaattttgtccgatatcggccttgaatattgcaaagaacacatcgaagatttcaagcaatttgagcctaacgatttttacttaaagaacacaacatgggaggatgttggcctgtgggacccaagcctcacaaagaaccaggattacaggaccaaacccttctgctgtagcgcctgccctttctcctctaagtttttctctgcttataagagtcactttcggaatgtgcactcagaggatttcgaaaaccgcatcctcttaaactgtccatactgtactttcaatgctgacaagaagaccctcgagacacacatcaaaattttccatgcccctaatgcatccgcaccatcatcatcactatctactttcaaagataagaataaaaacgacggtcttaagccaaagcaggctgattcggtggagcaggcagtgtattactgtaaaaagtgtacttaccgctag

SEQ ID NO: 4780 - RNA, 441 nt, synthetic construct
  misc_feature 1..441: note = source = /note="Description of Artificial Sequence: Synthetic coding sequence"
  source 1..441: mol_type = other RNA
atggtaatcctgaccgaacctgaaggcgcccctaacataacagccaacctcacctcatctctcctgtctgtatgtggctggtcgcaaacaattaaccccgaggacgacacagatccaggacacgccgatctcgtgctgtatatcactcggttcgatttagagctacccgacggaaatcgacaagtgcgcggggtgactcagctcggaggcgcatgttcacctacatggtcctgtttaatcaccgaagataccgggtttgacctgggagtgaccattgcacatgaaattggtcatcggatctgtgcccgccctagccctgctactcaaactaggtggactaaagcggccgcggctgcaagctcgtttttgagctggatgggtcagaatgtggcttggagatccggagctccacgcgtggccgctgccccttggtggagctag

SEQ ID NO: 4781 - RNA, 4116 nt, synthetic construct
  misc_feature 1..4116: note = source = /note="Description of Artificial Sequence: Synthetic coding sequence"
  source 1..4116: mol_type = other RNA
atgcaccagagacaccctagagcccgctgcccccccctgtgcgtcgcaggcattcttgcctgcgggttcttgttgggatgctggggcccaagccattttcagcaaagttgcttgcaggctctggaacctcaggccgtctccagctacctgtcaccaggtgccccacttaagggaagacctccatcgcccggattccaaaggcagagacaaaggcagcgacgtgccgcaggcgggattctgcacctggagctgctagtggccgttggccctgacgtgtttcaggcccatcaggaagacactgagaggtatgtgctcaccaacttgaatatcggtgctgaattattgcgcgacccctccttaggagctcagttccgcgtccacttagtgaagatggtaatcctgaccgaaccagaaggggcaccgaatattacagccaatctgacatcgagtctcctaagcgtgtgcgggtggagccaaacaattaaccctgaggacgacacagaccctggccacgctgacttggtgctctacatcacaaggtttgaccttgaattgcccgatggaaacagacaggtgcgaggtgtaacccagttagggggtgcctgctcacccacttggagttgccttatcactgaggacactggcttcgacctgggtgtgacaatcgcgcatgaaattgggcactcattcggtctcgagcacgatggcgcgcctggatctggctgtggaccaagtggtcatgtgatggcttcagacggtgcagcaccccgggctgggctggcttggtcgccctgctcacggcgtcagcttctgagcctgctgagcgcaggtagagctaggtgcgtgtgggaccctccccgccctcagcccggctcagcagggcatccccccgacgcacagcctggactctactacagcgctaatgagcagtgcagagtggcgtttggtccaaaggccgtggcctgcaccttcgcccgagagcatttagatatgtgccaggcactgagttgtcacacggaccctctcgaccagtcctcctgcagccgtctcctggtaccacttctggatggcacagaatgtggggtggagaaatggtgttcgaaaggtagatgcagaagtctcgtagagcttacccccatcgctgctgtacatggtagatggtcttcatggggaccgaggagtccgtgcagccggtcttgtggcggcggagtggtcaccaggcggcgacagtgtaacaaccctcgaccagccttcggcggacgtgcctgtgtgggtgccgatttgcaggccgaaatgtgcaacacccaggcctgcgaaaagacacaactggagtttatgtcgcaacagtgtgctagaacggacggccagccactacgtagctctccgggtggagcttccttttatcactggggagccgcggtcccacatagccaaggcgatgcactttgtcggcacatgtgtagggcaatcggcgaatccttcattatgaaacggggcgactcttttctggacgggactagatgcatgccgtctgggccaagagaagacggcactttgagtctctgcgtctctggctcctgccggacttttggttgtgatgggagaatggactctcagcaggtttgggaccggtgtcaagtatgcggcggagacaacagtacctgttctccaagaaaaggaagttttactgcaggacgggctcgagaatatgttacctttcttactgttacgcccaacttgacctcggtatacatcgctaatcaccggcccctatttactcacctggctgtgcgcatagggggtagatacgtggttgcgggcaagatgtccattagtcccaacacaacatacccctcactgctggaagatggtagagtggaataccgtgtggccctcacagaggaccgactcccgaggctcgaggaaatccgaatctggggcccactgcaagaggatgccgatatccaggtctacaggaggtacggagaggagtatggaaatttgactaggccggatatcacgttcacctacttccagcccaagccacgacaggcctgggtgtgggccgccgtgcggggaccatgtagcgtgtcgtgtggagctggactgcgctgggtcaactactcatgtctcgaccaagccaggaaggagcttgtggagactgtacagtgtcaaggttcccagcagccacctgcatggcctgaggcttgtgtccttgagccatgccctccatactgggctgtaggggacttcggtccttgttcggcaagctgtggaggcggtttacgcgaaagacctgtccgctgcgttgaggcgcaaggttccctcctgaagacactgccacccgccaggtgcagagccggagctcaacagccggcagtagcgttggagacctgcaacccccagccctgtccggcacggtgggaggtctcagaaccatccagctgcacgtcagctggcggagccgggttggcactcgagaacgagacgtgtgtgccgggggccgatggtctggaagcacctgtcaccgagggccctgggagtgtagatgagaaacttcctgcgcccgagccctgcgttggcatgtcgtgcccgccagggtggggtcacctggacgccacctccgccggagaaaaggcccccagcccttggggatcaatcaggaccggcgcacaggcagcccatgtctggactccggcagcaggctcatgttccgtatcatgtgggcgcggtcttatggagctgcgtttcctgtgcatggattctgcgctccgcgtgcctgtgcaggaggagctgtgcgggcttgcctctaagcctggctcacggcgagaagtgtgccaggccgtgccctgtcccgcccgctggcagtataagcttgctgcgtgttccgtttcttgtgggcgcggagttgtccgcagaattctttactgtgccagggcccatggagaggatgatggcgaagaaatcctgttggacacccagtgtcagggtctaccgcgacctgagccccaagaagcctgcagcctggaaccatgtccaccacgttggaaagtaatgagcctcggcccttgtagcgcctcgtgtggcctgggaacagcccgcagatcggttgcatgtgtgcagcttgaccagggacaggacgtcgaggtggacgaagcagcgtgcgcggcgctggtgcgaccagaggctagcgtcccatgcttaattgctgattgcacctacaggtggcatgtgggcacatggatggaatgtagcgtttcctgcggggatggaatacagcgtcgccgcgatacatgtcttggacctcaagctcaagccccagttccagcggacttctgccagcacctgccaaagcctgtaactgtgagaggctgttgggcaggcccatgcgtgggacagggagcgtgtggccgccagcacctcgagccaacaggcactattgatatgcggggtccgggccaggcagactgtgctgtcgccatcgggagacctttgggcgaagtggtcactctgcgcgtgctggagtcgagcctcaattgcagcgcaggcgatatgctgttactctggggacgactcacctggcggaaaatgtgccggaaattgctggacatgactttttcctccaagacaaacacacttgtggtgagacagcgttgtggacggccaggaggaggcgtgctgctgcgttatggatctcagctcgccccagaaacattctacagagaatgcgatatgcagctttttggaccgtggggcgaaattgtatcaccaagcctgagccccgcaacatcaaacgctgggggttgcaggttgttcataaatgtggctccacacgcccgaatagcaatccacgcattggctacaaatatgggagccggaacagagggcgccaacgcgtcatatatactaatcagagacacccactcactcaggactacagcttttcacggacagcaggtattgtactgggaatctgaaagtagtcaagcggagatggaatttagtgaagggttcttgaaggcgcaggccagcttacgaggacagtattggaccctccagtcctgggtgccagagatgcaggacccacaatcatggaagggcaaagaagggacttag

SEQ ID NO: 4782 - RNA, 4023 nt, synthetic construct
  misc_feature 1..4023: note = source = /note="Description of Artificial Sequence: Synthetic coding sequence"
  source 1..4023: mol_type = other RNA
atgcaccagagacatcccagggcacggtgccctcccctatgcgtggctggcatcctggcctgcggatttcttctaggatgctggggtccaagtcattttcagcagtcttgtttgcaggctcttgaaccacaggccgttagcagctacctaagtcctggagccccgttgaaggggagaccaccgtcaccgggcttccagcgacaacgccaacgccagcgaagggccgcaggcggcatcctgcatctcgagcttcttgtcgcagtgggccccgatgtgtttcaggcacaccaggaagataccgaacgatacgtcttgaccaatctcaatatcggagctgagctcctgagagacccctctctgggggcccagtttcgcgtccacctggtgaagatggtaattctcaccgagcctgagggcgctccgaatattacagccaatcttacatcctccctgcttagcgtgtgcggatggtctcagactattaacccagaagacgacaccgatccaggtcatgcagatcttgtgctgtatataacgagatttgatctggagcttcctgatggcaaccgacaagtgaggggagtgacacagctgggaggcgcctgttcgccaacctggtcatgtctcatcactgaagacacaggatttgatcttggcgtgacaatcgctcatgagatcgggcactctttcggtctggagcacgacggcgcaccagggagtggatgcggaccttctggccacgtaatggcctccgatggcgctgccccacgggctggactagcgtggtcaccatgtagtagacgacagctgctgagcctgttatcagcaaacgaacagtgccgggtggctttcggacccaaggccgttgcctgcacgtttgcccgcgagcacttggatatgtgccaggctctctcttgtcacacagatcctctcgatcaaagctcgtgcagccgcctgcttgttcctcttctggacggaaccgagtgcggagtcgaaaagtggtgtagcaagggcagatgtagatcgctggttgagctcacaccaatagcagcagtgcacggtagatggagcagctggggacccaggagcccatgcagccgatcctgtggcggaggagtggtgacccgccgccgccagtgcaacaacccgcgacccgctttcggcggaagagcatgcgtgggagcagaccttcaggctgaaatgtgcaacacccaggcttgtgaaaagactcaattggagtttatgtcccagcagtgtgccaggaccgacgggcaaccactgagatcatcccctggtggcgcgagcttctatcactggggggctgctgtgcctcacagccagggagatgccctgtgtaggcacatgtgcagggcaatcggagagtccttcattatgaagagaggcgattcattcttagatggcactaggtgcatgccatccgggccccgggaggatggcactctgagtctgtgtgtatccggtagttgtcggacctttggttgtgacggtaggatggacagccagcaagtttgggatcgatgtcaagtgtgtggaggagataatagtacatgcagccctcgtaagggtagcttcactgcaggcagggccagggaatatgtgacatttttgactgtgactcccaatttaaccagcgtgtacatcgctaaccatcgccctcttttcactcaccttgccgtgaggatcggagggcggtatgtcgtggcagggaaaatgagtatctctcccaacaccacatacccttccttgttggaggatggtagagtggaatacagagtggcgctgacggaggataggcttcctagactcgaggaaatacgtatttggggccccctgcaagaagacgctgacatacaagtgtaccggaggtatggggaggagtatggcaacttgacacgacccgacatcacttttacatattttcaacctaagccccggcaggcctgggtgtgggcagcagtgcgtgggccctgcagcgtgtcctgcggggctgggctgagatgggtgaactattcttgcctcgaccaggcacgcaaggaattggtggagactgttcagtgccagggcagccagcaaccaccagcatggcctgaggcctgcgtgctggagccttgtcctccctattgggccgtgggtgatttcggcccctgcagcgcatcgtgtggcgggggacttcgcgagcggcctgttcggtgcgtggaagctcagggaagccttctgaaaaccctgcctccagcccgttgtagagccggagcacaacagcctgctgtcgccctagaaacatgtaaccctcagccgtgtcccgctaggtgggaggtgagtgaaccaagtagctgtacttcagctggaggtgctggattggcactggaaaacgaaacttgcgtccccggcgccgatgggctggaagcaccagtgaccgagggaccaggatccgtagacgaaaaactgcctgcacctgaaccctgcgttggcatgagttgtcctcctgggtggggacacttggacgccacatcagcaggggaaaaggccccttcaccatggggatcaattaggactggcgcccaggcagctcacgtctggacacctgcagcggggagttgctctgttagttgtgggcgcggccttatggagctgagattcttgtgtatggacagcgccttgagagtgcctgtgcaggaggaactctgcgggctggcctcaaaacccggaagccgtagggaagtatgtcaggcagtgccatgtcccgctcgttggcagtataagctggccgcctgttccgtctcatgtggccggggggtcgtacggaggatcttatactgcgcacgggctcatggcgaggatgacggcgaggagatattgctcgatacccagtgccagggcctccccaggccagaacctcaggaagcttgttctcttgaaccatgcccaccaagatggaaggtcatgtcccttgggccttgctctgcatcatgtggtctcggcaccgcccggcggagcgtcgcctgcgttcagctggaccaaggtcaggatgtcgaggtggatgaggccgcgtgtgccgccctcgtgcgacccgaagctagcgtgccctgcctgattgcggattgtacttatcgatggcacgtgggtacttggatggaatgcagtgtcagctgtggtgatggaattcaaaggcgccgagacacctgcctgggaccacaggcccaagccccggtcccggccgatttttgccagcacttgccaaagcccgtgacagtgcgaggctgctgggctggcccctgtgtgggacagggagcatgcggaaggcagcaccttgaacccaccggtaccatcgatatgagagggcccggccaagccgattgcgccgttgccatcggcagacctttaggcgaagttgtaactctgcgggtcctggagtcctcgctgaactgctccgcaggcgatatgctcttactttggggcagacttacctggcggaagatgtgtcgcaaactgctcgacatgacattcagctccaaaacgaacactctggttgtccgacagcgctgtggcagaccaggcggcggtgttctgttgaggtacggtagtcaattggccccagagacgttctaccgcgagtgcgacatgcagctctttggaccttggggggaaatcgtgtccccgagccttagtcctgccacttccaatgcaggcggctgccggctattcatcaacgtagctccacacgcgcgcatcgcaatccatgcactggcgaccaatatgggggctggtacagaaggtgcaaatgcaagctatattctgattagagacacgcacagcttgagaactactgcttttcatggacagcaggttctatactgggaatcagaaagcagccaagccgagatggaattctccgaggggttcttaaaagcgcaggcctcacttagaggtcaatactggaccctgcagagttgggttcctgagatgcaggatccacagagctggaaggggaaagaaggcacttag

SEQ ID NO: 4783 - RNA, 672 nt, synthetic construct
  misc_feature 1..672: note = source = /note="Description of Artificial Sequence: Synthetic coding sequence"
  source 1..672: mol_type = other RNA
atgcggggacccgggcaggctgactgcgctgttgccatcggacggccccttggagaggtggttacactacgagtactggagtcctcactcaactgctctgcaggcgacatgttacttctgtgggggcggctcacctggcggaagatgtgccgtaaacttctggacatgactttctcttcaaaaacaaacactttagtagtgaggcagagatgtggaagacccggcggaggagtgcttctccgctatggatcgcagttggcccccgaaaccttttatcgcgagtgtgatatgcagctatttgggccatggggtgagatagtgagccctagtctcagcccagccacatcaaacgcagggggatgtcggctcttcatcaacgttgctccacacgcacgtatcgcaattcacgcgctagcaactaatatgggcgcggggacggaaggcgctaatgcatcgtatatcctaatcagggacacacacagtctgcgaacaaccgccttccacgggcagcaagttctctattgggaatctgaatcttctcaggcggagatggaatttagcgaggggtttcttaaggcacaagcctccttaaggggacagtactggacgttacagtcatgggtgccggagatgcaggatccccagtcctggaaaggtaaagagggcacttag

SEQ ID NO: 4784 - RNA, 1035 nt, synthetic construct
  misc_feature 1..1035: note = source = /note="Description of Artificial Sequence: Synthetic coding sequence"
  source 1..1035: mol_type = other RNA
atgcaccagcgacacccccgcgctaggtgcccaccactgtgcgtggccggaatcctcgcttgtggcttcttgcttggctgttggggcccctcccacttccagcagtcatgtttgcaggctctcgagccccaggcagtatcatcttatctttcgcccggggcacccctgaaaggaaggcctccttcgcccggtttccagaggcagcgacagaggcagcggcgcgctgccgggggcatcctgcatctcgaattactggtggctgtgggaccagacgtgtttcaggcacatcaagaagacacggaacgatatgtgttaactaatttgaacattggagccgaactcctccgtgaccctagcttgggggcccagttcagggttcacctggtcaagatggtgatcctgaccgaacctgagggcgcacctaacatcaccgccaacctgaccagttccttactgagcgtttgcggatggtcccaaaccatcaacccagaagatgacactgatcctggccatgcagacctcgttctttacataacacggtttgacttggaactacccgacggaaatcggcaagtgcgcggcgtgacccagctggggggagcatgttcccccacatggtcgtgcctgatcaccgaggacacgggcttcgatctaggagtaactattgcacacgagattgggcattcctttgggttggaacacgacggagcacctggctccggatgcggaccttccggacacgttatggcctcagatggcgccgctcctagggcaggcctggcatggtcaccctgtagccgtcgccagttgctgtccctgctcagacctgttcctcctagccctctccctctcctcgccacacatttgtgtgccgggcggagtctgtcactagggccatctcaggaaccagcgcccggaggtggaagaggaccccgtactccagtgccaacccataagcgaccccgatttcagactctgccttcctcatgtccactgcttagacctgctagctcccgttgtacccccagagactag

SEQ ID NO: 4785 - RNA, 831 nt, synthetic construct
  misc_feature 1..831: note = source = /note="Description of Artificial Sequence: Synthetic coding sequence"
  source 1..831: mol_type = other RNA
atgcatcagagacaccctcgtgcccggtgcccacccctatgtgtggcaggcattctcgcatgtggcttcctgttaggctgctggggcccatctcattttcagcagtcctgtctccaagccctggaaccccaagcagtttccagttacctcagccctggggcacccctcaaggggcgtccaccttccccaggtttccaacgacagagacagcggcagaggagagccgccggtggcattctccatcttgagctactcgtcgcagtaggacccgatgtgtttcaggcccatcaggaagacaccgaacgatacgtgctcactaacctgaacatcggcgcagaactgctgcgagatcccagcttaggcgctcaatttagggtccatcttgtgaaaatggtgatcttaacggaaccggaaggcgctcccaacataactgcgaacctaactagttcattgctttctgtttgtggctggtcccagacgattaaccccgaggacgacaccgacccggggcacgccgatttggtcctgtacataaccaggtttgatctagagctccccgacggaaatcgacaagtcagaggcgtgacgcagctggggggcgcatgcagccctacgtggtcttgcctgatcacagaggacacagggtttgatctgggggtcacaattgcccacgaaattggacatcgaatttgtgctcgcccatccccggctacccagacccgttggacaaaagcagctgctgcagccagtagcttcctgtcttggatgggccaaaatgtcgcctggaggagcggagcaccccgcgtagccgctgccccctggtggagctag

SEQ ID NO: 4786 - RNA, 4284 nt, synthetic construct
  misc_feature 1..4284: note = source = /note="Description of Artificial Sequence: Synthetic coding sequence"
  source 1..4284: mol_type = other RNA
atgcaccaacggcacccacgagcacgatgtcctccactctgtgttgccggcatcttggcctgtggatttcttctgggatgttggggccccagtcacttccagcagtcctgcctgcaggccctcgaaccacaggccgtgtcaagctatttaagtcccggagcccctctgaaaggcagacctcccagcccaggatttcagaggcagaggcagcgccagagacgcgctgctgggggtatcctgcacttggaactgttagtagccgtgggtcccgatgtgttccaggcacatcaggaagacactgaacgttacgttttgaccaacctgaatattggcgccgaattactcagggatcctagccttggagcccagttccgagtccatcttgttaaaatggtgatcttgactgaacccgagggcgctcccaatataactgctaacctcacctcatcactcttgagtgtctgtggctggtctcaaactattaacccagaggatgacacagatcctggacacgccgacctggtcctgtatatcacccgttttgatctggaactgcctgacggcaaccggcaggtcagaggcgtgactcagctcggcggggcctgctcccctacatggtcttgcttaatcaccgaggacaccggctttgacctgggagttacgatcgcacatgagatcggccactctttcggacttgagcatgatggtgcccccggctccggttgcggacctagtggacatgtaatggcgtccgacggcgccgccccgcgcgctggcctggcctggtcgccatgcagtcgtcggcaactgttatcactgctctctgctgggcgggctcgttgcgtgtgggatccaccccgcccccagccaggctccgcaggccatccacccgatgcacaacctggcctctactatagcgcgaatgagcagtgtcgtgtagctttcggaccgaaggctgtagcgtgcacctttgcacgcgaacacctggacatgtgccaggccctgtcatgtcatacagatcccttggaccaatctagttgctcaaggttattagtgcctcttctggatggcacagagtgtggagtggagaaatggtgttcgaaaggcaggtgccgatccttggtggagctgacgccaatcgccgccgtgcatggcaggtggtcaagctggggacctaggagtccctgttcccgaagttgcggcgggggcgtggtgacccgccggagacagtgcaataatccacgacctgcattcggaggaagggcatgcgtgggcgccgacttgcaagctgagatgtgtaacacacaagcctgcgaaaagacacaactggaattcatgagccagcagtgcgcacgtactgatggccagcctctacgctcaagtccaggtggtgcctcgttctaccactggggagcagccgtcccccactcacagggggatgccctgtgcaggcacatgtgccgcgccataggagagtcttttatcatgaaacgtggggactctttcctagacggaacccggtgtatgcctagcggcccacgtgaggatgggacactctccctctgtgtctccggttcctgtcggactttcggatgcgacggaaggatggattcccagcaggtctgggatcgatgccaggtgtgcggcggagacaactctacatgttctcccaggaaaggctcattcaccgcaggccgggcacgcgaatacgtgacctttctcaccgtgacccccaaccttacctccgtatacatagcaaatcatcggccactgtttacacatctcgctgtccggatagggggacgctacgtagtggcagggaagatgagtatttcccctaatactacctacccttcgttgctggaagacggccgtgttgaatatagagtggccttgacagaagatagattgccacgactggaagaaatccgcatctgggggccactgcaggaggatgcggatatccaggtgtacaggcgctacggagaagagtatgggaatctcacaagacctgacattacttttacgtacttccagccaaagcctagacaggcttgggtgtgggccgctgtgcgaggaccttgtagcgtctcctgtggagccggcctacgatgggttaattactcctgtttagatcaggcacgtaaggagctggtagagaccgtacaatgccagggctcacagcagcccccggcttggcctgaggcttgcgtacttgagccatgtcctccatactgggcagtcggggattttggaccttgtagtgctagttgtggcggtggattgagggagagacctgtaagatgcgtggaagctcagggcagtctcttaaagacgcttcctcccgcccgctgtcgtgctggtgcacagcagcccgctgttgctttggaaacttgcaatccccaaccctgcccagctagatgggaggtatccgaaccttcctcctgtaccagtgccggcggcgcaggactggctcttgagaatgaaacttgtgtgcccggcgccgatggcttggaggcccccgtcacagagggaccaggctctgttgacgagaaactgcccgcaccagaaccatgcgtgggcatgtcttgtccacccggttggggacacctggacgcgactagtgctggagaaaaagcaccgtcaccttggggatccatcagaacaggggcccaggctgcgcacgtgtggaccccagccgccgggtcttgcagtgtgagctgtggacgcggactgatggagctgaggttcctgtgtatggacagcgccctcagggtgccagttcaggaggaattatgcggattggccagcaaaccaggttcacgacgggaggtgtgccaggccgttccatgtccagcccgctggcagtacaaactggccgcatgctcagtctcatgcggaagaggcgtggttagacggatcctgtattgcgctcgcgcccacggcgaggacgacggagaggagatcctgctcgacacccaatgccagggccttccccgacccgagccgcaggaagcatgctcccttgagccttgcccgcctcgatggaaggttatgagcctgggtccttgcagcgcctcctgcgggctgggtaccgcgcgccgttccgtggcctgtgtgcagctcgatcagggccaggatgttgaggtagacgaggctgcatgcgccgctttggtccgcccagaggcatccgtcccatgcctgatcgcagattgtacttatcgttggcacgttggaacctggatggagtgttctgtgagctgtggcgacgggatccagcgaaggcgcgatacttgcctgggcccacaggcccaggcgcccgtgcccgctgatttctgtcagcaccttccaaaaccagttaccgtgcgcggttgttgggcgggtccatgcgttggtcagggaacccccagcctcgtgccccacgaggaggctgcggccccgggcagaaccactgccaccccagccggagcttccctggagtggagtcaggctagaggtctactgtttagcccagctcctcagccaagacgactgctaccaggtcctcaggagaactctgtccagagtagcgcctgcggtaggcagcatctggaaccaactggaaccatcgacatgcggggccccggacaggccgactgcgccgtggccatcggacgcccactcggcgaggtagtgacattacgggtactggaatcatccctcaactgttcagccggcgatatgcttctgttgtggggaagacttacttggagaaaaatgtgtagaaagttgctggacatgaccttctcttctaagacaaatacccttgttgtccgccaaagatgtgggagaccaggaggcggcgtcctccttcggtatggttctcagctagcacctgaaacattctaccgggagtgcgatatgcagctctttggcccttggggcgaaatcgtgtcacccagcctcagccccgcaacgtcaaacgctggcggttgtagactgttcattaacgtggctccgcatgcacgtatcgccatccatgctctggccaccaacatgggtgcagggaccgagggcgcgaacgcatcttacattctgattagggatacacatagcctgaggactacagccttccatgggcagcaggtcctctactgggagtccgaaagtagccaggcagagatggaatttagcgagggctttctgaaagctcaagcctctctgcgaggacaatattggaccctacagtcatgggtgcccgagatgcaggatcctcagtcctggaaaggaaaagaaggaacttag

SEQ ID NO: 4787 - RNA, 1095 nt, synthetic construct
  misc_feature 1..1095: note = source = /note="Description of Artificial Sequence: Synthetic coding sequence"
  source 1..1095: mol_type = other RNA
atggatatgtgccaggcattatcttgtcatacagatccccttgaccaaagttcttgtagtaggttgctcgtgcctctgctggacgggactgagtgcggtgtagagaagtggtgtagtaaaggacggtgccgttccttagtagaattgaccccgattgccgctgtacacggtagatggagttcttggggaccacggtctccctgttctagatcttgcggtggaggcgtagtcacccgaagacgacagtgtaataaccctcggcccgcatttgggggcagagcatgtgtgggggccgacttacaggccgagatgtgcaacacccaggcttgtgagaaaactcagctggaatttatgagccaacagtgcgcaaggacagacggtcagcctctccgttcctcccccggcggcgcatctttctaccactggggcgcggcagtgccgcatagccaaggcgacgccctctgtagacacatgtgtcgggcaataggcgaaagctttatcatgaagcggggtgacagttttcttgacggcactagatgcatgccaagcggaccccgcgaagatgggacactgtccttgtgtgtctctgggtcttgccgcacatttggatgtgacgggcggatggactcccagcaagtatgggatcgctgccaggtctgcggaggtgacaactccacctgttcaccacggaagggctccttcacagctggtagagcgcgagaatacgttactttcttgacagttaccccaaacctaacttccgtgtacattgcaaatcaccgcccactgttcacccacttagctgtgcgcatcggaggcaggtacgtcgtggctggcaagatgtcaataagccccaacacgacttatccatccctcctggaggacggtcgagtggaatacagagtggccttaactgaggaccggctaccgcggttggaagagattcgaatttggggtcccctgcaagaagatgcggacattcaagtcgggggcgttagagcccagcttatgcatatcagttggtggtctaggcctggtcttggagaacgcgatctgtgcgcccgagggcgatggcctgggggctcttctgactag

SEQ ID NO: 4788 - RNA, 1344 nt, synthetic construct
  misc_feature 1..1344: note = source = /note="Description of Artificial Sequence: Synthetic coding sequence"
  source 1..1344: mol_type = other RNA
atgtctgcttccaagatccctctgttcaaaatgaaggacctgatcctgatcctctgtcttttggaaatgagttttgccgttccctttttcccgcaacagtccggcactccaggcatggcaagcttgtctctggagacaatgcggcaactcggcagtttgcaaaggcttaatacactgtcccagtatagtaggtacggctttgggaaatcatttaacagtctctggatgcacggactcctcccaccacattcctccctaccctggatgcggcctcgcgaacatgaaacgcagcagtatgaatattcactacccgtccatcctcctcctctcccttcccaaccctccctgaagccacaacagcccggtctaaagccattcttgcagagtgctgcggcaacaacaaaccaggccaccgccctgaaggaagccctccagccgccaatccacttaggacacttacctcttcaagaaggagagctgcccctggtacagcagcaggtggcaccatccgacaaacctccaaaacctgagctgccaggcgtggatttcgctgatccgcagggacctagcctaccaggcatggactttccggatccccagggcccaagcctgcctgggttggattttgcagacccgcagggcagtactattttccagatcgcaaggttaatttcccacggcccaatgcctcagaataagcaatcccctctctacccggggatgctgtacgtaccatttggcgctaatcaactgaatgcccccgctcggctaggcatcatgagttctgaagaggtcgcaggaggcagggaagacccaatggcttacggcgccatgttcccaggttttgggggcatgaggccgggattcgaaggtatgccacacaaccccgcaatgggcggggattttacactggaatttgactcacctgtcgccgcaaccaaaggccccgaaaacgaggaaggaggtgcacagggatcccctatgcccgaggctaatccagataaccttgaaaacccagcatttctgaccgaacttgaaccggcccctcacgctggcctgctggctttgccaaaagacgacatccccggcctgccaaggagtccctctggaaaaatgaaaggactgccctcagtgacacctgccgctgcagatcctctaatgacacctgagctcgccgacgtctatcgcacttacgacgctgatatgacgacaagtgtcgattttcaggaagaggccacaatggataccacaatggcgccaaatagcttacaaacatctatgccaggaaataaggcgcaagaacccgaaatgatgcacgatgcatggcattttcaagaaccttag

SEQ ID NO: 4789 - RNA, 1299 nt, synthetic construct
  misc_feature 1..1299: note = source = /note="Description of Artificial Sequence: Synthetic coding sequence"
  source 1..1299: mol_type = other RNA
atgagcgcctctaagatcccgctgtttaagatgaaagatttgattctgatactctgtctgttggagatgagctttgctgttcctttctttccccaacaatcagggaccccaggtatggcaagtttgagcctggaaacgatgcgccagctgggatccctgcagcggctcaacacactctcacaatactcaaggtatgggtttggtaaaagcttcaactctctatggatgcacggcctgttacccccacactcctctctgccctggatgaggccacgagagcacgagacccaacagccctctttgaaacctcaacaacccggtctcaagcctttcctgcaaagcgccgcagcaaccactaatcaagcaacagccctcaaggaagctctgcaaccacccatccatctcggtcatttgcccctgcaggagggcgaactacccctagtccagcagcaggtggcgccttccgataagccacccaagcccgagcttcccggcgtggatttcgctgacccgcaagggccctccctcccaggaatggatttcccagacccacagggtcctagccttcctggtctggacttcgccgatcctcaaggcagcaccattttccaaatcgctagactcatttctcacggccccatgcctcagaataagcagtctcccctgtatccgggaatgctctatgtgccattcggagctaatcagctgaatgctcctgcgcgactgggcataatgtcttcagaagaagtcgcaggggggcgcgaggatcctatggcatacggtgccatgttccccgggttcggcggcatgcgtcctggctttgaggggatgccccataaccctgcgatggggggcgactttacactcgaatttgacagccctgtggctgctaccaaggggccagaaaatgaagaaggtggagcccagggaagccctatgccagaagccaatccagacaatctagagaaccctgcgtttttgaccgagttggagcctgcaccacacgccggacttctggccctgccgaaggatgacattcccggactgccaagatcaccatctggcaaaatgaagggcctcccaagcgttacccccgcagccgccgaccctttgatgacgcctgagctggcagacgtataccggacatacgacgcggacatgacaacctcagttgattttcaggaagaagccacaatggacacaaccatggccccaaattctcttcaaacctcaatgcctggcaataaggcacaggaaccagagatgatgcacgatgcctggcactttcaggagccttag

SEQ ID NO: 4790 - RNA, 1341 nt, synthetic construct
  misc_feature 1..1341: note = source = /note="Description of Artificial Sequence: Synthetic coding sequence"
  source 1..1341: mol_type = other RNA
atgagcgcgtccaaaattccccttttcaagatgaaagacctgatcctgatactttgcttgcttgaaatgagcttcgcagtcccattcttccctcagcaatctggcacacccggaatggccagtctgtctctcgaaactatgcgccagctgggttcccttcagcgactcaatactctgagccagtactcccgctatggctttgggaagtcatttaactccttgtggatgcatggcctacttcccccccactcttccctcccctggatgcgaccaagagaacacgaaacacagcagtacgaatatagcctgcccgttcatcctccaccattaccttcacaaccttcactgaagcctcagcagcctggccttaagccgtttctacagtctgccgccgccacaactaaccaggccactgcccttaaggaagccctccagcctcccattcacctcgggcacttgcccctccaggaaggtgaattgcctctggtgcaacagcaggtggcacccagcgacaaaccaccaaaacccgagctgagagttgattttgctgatccacagggcccttccttacccggtatggattttcctgatccacaaggcccctccttgcctggattggactttgccgatccgcagggatcaactattttccaaattgctaggctcatcagccacgggccgatgccccaaaacaaacagtcccctctgtatccgggtatgctctacgttcccttcggggctaaccagcttaatgctccagcccgactgggaatcatgtcttcagaagaggtcgccggcggccgggaggaccctatggcgtacggggctatgttcccaggtttcggcggtatgaggccgggttttgaaggcatgccacataaccctgccatggggggagacttcacactggagttcgacagccctgttgctgcaacaaaggggcccgaaaatgaagaaggcggcgcccaagggagccccatgccggaagccaaccccgataatctcgaaaaccccgctttccttacggagctggaaccggcgccccacgctggccttcttgccctgcccaaggacgatattccggggctaccaagatcgccatctggaaaaatgaaaggtctaccaagcgttaccccagccgccgcggacccgctgatgacgccagagctcgccgacgtgtaccgaacctacgacgccgacatgaccaccagtgtagacttccaggaggaagccacaatggacacaacaatggctcccaactccttgcagacctccatgccagggaataaggcccaagagccagaaatgatgcacgatgcatggcacttccaagagccctag

SEQ ID NO: 4791 - RNA, 528 nt, synthetic construct
  misc_feature 1..528: note = source = /note="Description of Artificial Sequence: Synthetic coding sequence"
  source 1..528: mol_type = other RNA
atggggacttggattctcttcgcctgtttactaggcgccgccttcgctatgccagtcctgactcctcttaagtggtatcagtccatccgaccaccttacccttcatacgggtatgagcccatgggtggttggctccaccatcagattattcctgtcctcagtcagcaacatccccctacccataccctacagccacaccaccacattccagttgttcccgcacagcagccagttattccccagcagccaatgatgcccgtacccggacagcatagcatgactcctatccagcaccatcagcctaacttgcccccccctgcacagcagccttatcaaccccaacccgtccagcctcagccccatcagccaatgcagccccaaccacctgtgcaccccatgcagccgttgccaccccagcccccccttcccccaatgttcccaatgcagccacttcccccgatgctgcccgacctgactctggaggcctggccttctactgacaagacaaaaagggaagaagtagactag

SEQ ID NO: 4792 - RNA, 618 nt, synthetic construct
  misc_feature 1..618: note = source = /note="Description of Artificial Sequence: Synthetic coding sequence"
  source 1..618: mol_type = other RNA
atgggaacttggatcttgtttgcttgccttttgggtgccgctttcgctatgccactcccaccccacccgggtcaccctgggtatattaatttcagctatgaaaactcgcactcacaagcaattaacgtggaccgaaccgccctcgtcctgactccccttaagtggtaccagagtattagaccaccatatccttcttacggatacgagccaatgggcggctggttgcaccatcagatcatacccgtcctgtcccagcaacaccccccaacacacaccctacagccccaccaccatatacctgtagtacctgctcagcagcctgtgatcccccagcaacctatgatgcccgtgcccggccagcacagcatgacaccaatccagcaccaccagcccaatcttccaccgcctgcgcagcagccataccagcctcaaccagttcagcctcagccgcaccagcccatgcagccccagccacctgttcatcctatgcagcccctgccaccacagcctcccctccctcctatgttccctatgcagccgttacccccaatgctgcctgacctgaccctggaagcatggccaagtactgataagaccaaaagagaagaagtggattag

SEQ ID NO: 4793 - RNA, 576 nt, synthetic construct
  misc_feature 1..576: note = source = /note="Description of Artificial Sequence: Synthetic coding sequence"
  source 1..576: mol_type = other RNA
atgggcacttggatcttgttcgcctgtctccttggagccgcctttgccatgccccttcccccccaccccggtcatcccgggtacataaattttagctacgaagtacttacaccattaaaatggtaccaaagcatccgccccccctatccttcctacgggtatgaacccatgggtggatggctccatcaccagatcattcctgtgctctcacagcagcacccacctacccatacactgcaaccacatcatcatatacctgtcgttcccgcacagcagccagttataccacagcagcctatgatgcccgtccctggccaacatagcatgactccaatacaacatcatcagcctaacctccctcccccggcccaacagccttatcagccccaacctgtgcaaccgcagcctcatcagccaatgcaaccgcagcctcccgtgcatccaatgcaaccccttcctccacagcctcctctgcctccaatgtttcccatgcagccccttccacccatgctacccgacctgactctggaagcctggccctcaacagataagaccaagagggaagaagtggattag

SEQ ID NO: 4794 - RNA, 804 nt, synthetic construct
  misc_feature 1..804: note = source = /note="Description of Artificial Sequence: Synthetic coding sequence"
  source 1..804: mol_type = other RNA
atgaaagctgcggttttgacactagccgtgctttttctcaccggctctcaagcccgccatttctggcagcaagacgagccaccccagagcccctgggaccgcgtgaaagatcttgccacagtgtatgtggacgtgttgaaagactcaggcagagattacgtcagccagttcgaaggctccgcactcggcaaacaactaaacctcaagctgctggacaactgggattccgtgacttccaccttctcaaaattgagggaacagctgggccccgtaacgcaggagttctgggataatcttgagaaagagactgaagggcttagacaggagatgtccaaggatctcgaggaggttaaggccaaagtgcaaccctacctagatgactttcagaaaaaatggcaggaggaaatggaactgtacaggcagaaggtggaacccctgcgggctgaactgcaagaaggagcccggcagaaattacatgaattgcaggagaagttgtcccccttaggtgaagagatgagagaccgcgcacgtgcgcacgttgacgcactcagaacacatctcgcaccctactccgatgaactgaggcagtgcctagcagctcgcctggaagctttgaaagaaaatgggggcgcacggctggccgaataccacgctaaggcaaccgaacacctttcaactttgagcgagaaggccaagcctgccctggaggacctgaggcagggtctgctccccgtcctggagagttttaaagtgtctttcttatccgcactcgaagagtacacaaagaaactgaatacccagtag

SEQ ID NO: 4795 - RNA, 804 nt, synthetic construct
  misc_feature 1..804: note = source = /note="Description of Artificial Sequence: Synthetic coding sequence"
  source 1..804: mol_type = other RNA
atgaaggcggccgtgctgaccctggccgtgctcttccttactggaagtcaggcgagacatttttggcaacaggacgagcctccacaatcaccatgggaccgtgtcaaagatcttgccacagtttatgtcgacgtattaaaagatagcggacgagattacgtaagccagttcgagggctcagcactgggaaagcaattgaatttgaaactgctagacaattgggattccgtcacatcgacttttagtaaacttcgagaacagttaggccccgtcactcaggaattctgggataatttggagaaagagactgagggcctgcggcaggagatgtcgaaagacctggaggaggtgaaggcgaaagtccagccctatcttgatgatttccagaagaaatggcaggaggagatggagctttaccggcagaaagtggagccactgagggcagaactccaggagggagcacgccaaaagctacatgagttgcaagagaagctcagcccccttggcgaggagatgagagactgcgcgagagcccacgtggacgccttacgaacccatttggctccttacagtgatgagcttcgtcagcgacttgcagcgcgattggaggcattgaaggaaaacgggggtgccaggctggccgagtatcatgcaaaagcaacggagcacctgtccacactatccgagaaagccaaacccgccttggaagatctccgccagggccttcttcctgtgctcgagagcttcaaggtgtcatttttgagcgccttagaagaatataccaaaaagctgaacacccaatag

SEQ ID NO: 4796 - RNA, 804 nt, synthetic construct
  misc_feature 1..804: note = source = /note="Description of Artificial Sequence: Synthetic coding sequence"
  source 1..804: mol_type = other RNA
atgaaggctgccgttctgacactcgccgtcttgttcctgaccggcagtcaagctcgacacttttggcaacaggatgagcctcctcaatccccctgggatagggtaaaagatctggccacggtatatgtggacgtcctcaaagattccggcagagattatgtatcacaattcgaaggctccgccttgggtaaacagttgaaccttaaactactggataactgggactcagtcacctccacctttagcaagctccgcgagcagctagggcctgtgacacaagaattttgggacaatctggagaaggaaacagaagggttaagacaggagatgagtaaagaccttgaggaagtcaaggcaaaagttcagccatacctcgacgatttccagaaaaaatggcaggaagagatggagctctataggcaaaaggttgaacccctgcgtgcagaactccaggagggtgccaggcagaagctacatgagctccaagaaaaactgagccctctgggagaagaaatgcgcgaccgggctagggcacacgtcgacgcccttaggacccacttggccccatattcggacgagctgcggcagaggctggccgcccgtttggaggctcttaaggaaaacggaggagccaggttagcagagtaccacgctaaggcaacggaacacctctccacactctctgaaaaagctaagcctgctcttgaggatctgagacaggggctgcttcctgtactcgagtcgtttaaagtaagcttcctgtcagctttagaagagtacacgaaaaagttaaacacacaatag

SEQ ID NO: 4797 - RNA, 804 nt, synthetic construct
  misc_feature 1..804: note = source = /note="Description of Artificial Sequence: Synthetic coding sequence"
  source 1..804: mol_type = other RNA
atgaaggccgctgttctgacgcttgccgtgttgtttcttaccggtagtcaggcaagacacttctggcaacaagatgagcccccacaatcaccatgggatcgcgtaaaagatcttgccacagtgtacgtggacgtgctgaaggattcaggccgagactacgtatcgcagttcgagggaagcgctctgggcaaacagctgaacctgaaactcctggacaactgggattccgtaacatcaaccttttccaaactcagggagcagttgggaccagtgacccaggaattttgggataatttggaaaaagagaccgagggcctgaggcaggagatgagtaaggatttggaggaggtgaaagccaaggttcaaccctatctggacgacttccagaaaaagtggcaagaagaaatggaattatatcgccagaaagtggagcctcttagagccgaactacaagaaggagcccggcaaaagctgcatgaattgcaagaaaagctaagcccattaggtgaggagatgagagatcgcgcaagggcccatgtcgacgcccttcgcacccacctcgcgccatactcagacgaactgcgacagagactcgccgccaggctcgaggctctgaaggaaaatggcggagccagattagcagaatatcacgcaaaagctaccgagcacctgagtactctaagcgagaaggctaaacccgcgctcgaggatctgcgtcagggtcttctacccgttctggagagttttaaggtgagcttcctgagcgccctagaggaatacacaaaaaagctcaatacacagtag

SEQ ID NO: 4798 - RNA, 804 nt, synthetic construct
  misc_feature 1..804: note = source = /note="Description of Artificial Sequence: Synthetic coding sequence"
  source 1..804: mol_type = other RNA
atgaaagccgccgtgcttacgttagccgtgctgttcctaacaggctctcaagctaggcatttttggcagcaggacgaaccaccgcaaagtccatgggatagggttaaggacctggctactgtgtacgtggatgtgctcaaggatagtgggagggactatgtgagtcaatttgagggatccgctctcggcaagcagctgaatctgaagcttttggataattgggattccgtgacatctactttctctaaactccgggagcagttaggccccgtcacgcaagaattttgggacaatctcgaaaaggagaccgaaggactcaggcaagagatgagcaaagatcttgaagaagtaaaggcaaaagttcagccctatcttgatgatttccagaagaagtggcaggaagaaatggagctctacagacagaaggtggaacccctgagggcagagctgcaagagggtgcgcggcagaaactgcacgagctacaggagaagttgtcgcccctcggtgaagagatgagggaccgagctcgcgctcacgtagacgcgctaaggacacacctggctccctattcggacgaactgcggcaacgactggcagcccgactggaggcactgaaagaaaatggaggagcccgtctggctgagtaccacgcaaaggctactgagcacctatcgactctctccgaaaaggctaagcctgccctggaggatctgcgccagggactcctgcccgtgctagagagcttcaaggtgagttttctcagtgctcttgaagaatacacaaaaaagttgaacacccagtag

SEQ ID NO: 4799 - RNA, 804 nt, synthetic construct
  misc_feature 1..804: note = source = /note="Description of Artificial Sequence: Synthetic coding sequence"
  source 1..804: mol_type = other RNA
atgaaggcagcagtcctaacactggctgttctgtttctgactggcagccaggcaagacacttttggcaacaggacgaaccaccacagagcccttgggaccgggtaaaagacttagcaaccgtatatgtggatgtccttaaggactccggccgcgactacgttagccagtttgaaggaagcgccctgggcaagcagctcaatcttaaactgctggataactgggacagtgtcacgtcgaccttctccaaactgagggagcagctgggacccgtgacacaggagttttgggacaatcttgagaaggagacagagggcctccggcaagagatgagtaaggatctggaggaagtgaaagcaaaggttcagccttatctagacgattttcagaaaaagtggcaggaggagatggagctgtatagacagaaagtggaaccgttgagagcagagctgcaagagggcgcccggcagaagttacacgaattgcaagagaagctatccccccttggagaggagatgagggaccgggcacgagcacacgtggacgccttaagaacccatctggcaccctacagtgatgagctgcgacagcgtttggctgcccgactggaggcgctcaaggagaatggaggagcccgtctcgcagaataccatgctaaggccactgaacacctgagcacgttatcagaaaaagccaaacccgctctggaggacttgagacaaggcctcctccctgttctagaatcatttaaagtgagttttctgtcggccctggaggaatatacaaaaaagctcaatacccaatag

SEQ ID NO: 4800 - RNA, 798 nt, synthetic construct
  misc_feature 1..798: note = source = /note="Description of Artificial Sequence: Synthetic coding sequence"
  source 1..798: mol_type = other RNA
atgaaaaaagaagtatgcagcgtggcttttctaaaggcagttttcgctgaatttctcgccacactcatttttgtcttcttcggactcgggtctgcactgaaatggcctagcgccctccccaccatcttgcagatagccctcgccttcggattggccatagggacccttgcccaggccttaggccccgtctcaggcggccatatcaatcccgctatcacgctggcacttcttgtcgggaaccagatatccctcttacgtgcctttttttacgttgccgctcagctggtaggtgccatcgccggcgccggaatactgtacggcgttgcaccgctgaatgctagagggaatcttgcagttaacgccttaaataataataccactcagggacaggctatggtggtcgagttaatactgaccttccagcttgccctgtgtattttcgccagcaccgattctaggcgcacatccccagtggggtccccagctctgtctataggactatctgtaacgctcggtcacctcgtcgggatctacttcacaggttgcagcatgaacccagccagatcattcggaccagcagtagtgatgaatcgattttccccagctcactgggtgttttgggtgggcccaattgtgggagctgttttagccgccatcctctatttctaccttctttttccaaactccttaagtctgtctgagcgagtggccatcatcaaaggaacatatgagccagacgaggattgggaggagcagagggaggaacgcaagaaaacaatggagctgacgaccaggtag

SEQ ID NO: 4801 - RNA, 663 nt, synthetic construct
  misc_feature 1..663: note = source = /note="Description of Artificial Sequence: Synthetic coding sequence"
  source 1..663: mol_type = other RNA
atggagctgggtctgggaggactttcaacactgtcccactgcccttggccccgccaacaaccagcgctgtggccaacattggccgcactggccctcctaagttcagtcgcagaagcatctctcggctctgcaccccgatctcccgccccccgggaaggccccccacccgtcttagcttcaccagctgggcatctgcccggcggaaggactgcaagatggtgctccggacgagcacggaggccaccgcctcagccctcacgacctgcccccccaccgccggccccaccttctgcacttccccgcggaggccgggctgctcgcgcaggcggtcccggaagtcgcgcccgagccgccggagctcgcggatgccgcttgcgctcacaacttgtgcctgtcagggcactcggactcggacacagatctgacgaactcgtcagatttagattttgttccggctcgtgtcgccgagctcgcagcccacatgatctgagcctggcatccctgctcggcgcaggcgcgctgcgaccaccacccgggagtagacccgttagccagccttgttgtagacccacccggtacgaagccgtcagcttcatggatgttaatagcacatggcgcactgtcgatcggctgagcgctaccgcctgcggttgtttgggctag

SEQ ID NO: 4802 - RNA, 663 nt, synthetic construct
  misc_feature 1..663: note = source = /note="Description of Artificial Sequence: Synthetic coding sequence"
  source 1..663: mol_type = other RNA
atggagctgggactgggtgggctcagcactctgtctcactgtccttggccccgacagcaacctgcactctggcccacgttagctgctcttgccctgctgagcagcgtcgccgaggcaagtctaggcagtgcaccccgctcccccgctcctcgcgaaggcccacctccagtgcttgccagtcccgccgggcatctccccggaggccgcaccgcacggtggtgttctgggagggcgcgcaggcctcctccacagccgtctagaccagcccctcccccgccagcacccccaagcgcactgccacgaggtggccgtgctgctagggccggggggcctggctctcgtgcccgcgccgccggagcccgtggatgccgacttcgctcccaacttgtgccagttagggccctgggactcggtcatcgctcggatgaactggtgcgctttcgattttgttccgggtcatgtaggcgcgcccgaagtccacacgatctttctcttgcctctctcttgggcgccggggcccttcgacctcctccaggaagccgccctgtctcacagccatgttgccgcccaacacggtatgaggcagtgtctttcatggacgttaacagcacttggagaaccgtcgatcggctgtctgccacagcatgcgggtgcttgggatag

SEQ ID NO: 4803 - RNA, 687 nt, synthetic construct
  misc_feature 1..687: note = source = /note="Description of Artificial Sequence: Synthetic coding sequence"
  source 1..687: mol_type = other RNA
atggagctgggtctggggggcctctcaactctttcccattgcccctggccccgccagcaggctccccttggactgtctgctcagcctgcgttatggccaaccttagcggcccttgccctcctctcaagtgtagcagaggcttcccttggttctgccccgcgtagcccagccccacgggaagggcctcctccagtgttggccagtccagccggacacctaccaggcggacgaactgcccgatggtgtagtgggcgcgcacgccggcctcccccacagccgtccaggcctgcaccccccccacccgccccaccatcagcattgccccgaggtggccgagcagctcgagccgggggccccggatcaagagcgagagccgcaggcgccagagggtgcaggctacgcagccaactggtgccagttagggccctcgggctgggccaccgatctgacgagttagtccgttttcgcttctgctcagggtcttgccggagagctcgaagtccccacgatctcagtcttgcatccctcctgggagcaggggccttgaggcctcctcccggaagtcgacctgtgtcccaaccttgttgtaggcctacccgctatgaggctgtgtccttcatggacgtcaactctacatggcgcaccgtggaccgcctcagcgccacagcttgtggatgtctagggtag

SEQ ID NO: 4804 - RNA, 201 nt, synthetic construct
  misc_feature 1..201: note = source = /note="Description of Artificial Sequence: Synthetic coding sequence"
  source 1..201: mol_type = other RNA
atggaactgggtcttggcggactttcgacactgtcccattgtccttggcctcgccagcaacctgcactgtggcccacactagccgctcttgctctactgtcctccgtggctgaagcgagtctgggtagcgcccccagatccccggcaccaagagaaggccccccccctgtgctcgcatcccctgctggccatctaccctag

SEQ ID NO: 4805 - RNA, 270 nt, synthetic construct
  misc_feature 1..270: note = source = /note="Description of Artificial Sequence: Synthetic coding sequence"
  source 1..270: mol_type = other RNA
atggagctggggctaggtggcctgtctacactaagtcactgcccctggccacgccaacaggcgccattggggctctccgcccaacccgccctctggccgactctcgctgcactggcattgctatcttctgttgctgaggcatccctgggttctgcaccacgttcccccgcacctcgtgaagggccaccgcctgttctggcctcccctgctggtcacctccccgggggacgtacagctcggtggtgttctgggcgcgcccgacgcccgtag

SEQ ID NO: 4806 - RNA, 201 nt, synthetic construct
  misc_feature 1..201: note = source = /note="Description of Artificial Sequence: Synthetic coding sequence"
  source 1..201: mol_type = other RNA
atggagctgggcctgggcgggctctccaccttgtcccactgcccctggccgcggcaacagcctgctctatggcctacactagccgcgttagcgcttttatcttctgttgccgaagcgtctctcggatctgcccctcggagtcctgccccaagagaaggtcctccacctgttctggcatcccccgccggccacctaccctag

SEQ ID NO: 4807 - RNA, 270 nt, synthetic construct
  misc_feature 1..270: note = source = /note="Description of Artificial Sequence: Synthetic coding sequence"
  source 1..270: mol_type = other RNA
atggagttaggactcggcggtctttctaccctcagccattgcccctggcctcggcagcaggccccccttggactcagcgctcagccggctctgtggcccacactcgcagcactcgccctcctttccagcgttgccgaagccagcctgggttccgcaccacggtcgcccgcccctagagaaggtccccctcctgtacttgcctctcccgctggccacctcccaggcggaagaacagccaggtggtgcagcggaagagctagacgcccctag

SEQ ID NO: 4808 - RNA, 687 nt, synthetic construct
  misc_feature 1..687: note = source = /note="Description of Artificial Sequence: Synthetic coding sequence"
  source 1..687: mol_type = other RNA
atggaattgggactgggtggcctttcaacgcttagtcattgcccatggccgcgacaacaagctcctctcggactgtccgctcaacccgctctgtggcctacgctggccgccttggctttgctatcctctgtcgccgaagcctccctgggatccgcccccagatctcccgccccccgagagggcccaccccccgtcctggcgtcccctgcaggtcatttgcccggcgggcgtaccgcacgctggtgctccggcagggcccgaagacctcctccacagccctcccgcccagctcctcctccgcctgctcctccttccgcccttcctcgaggaggtagggcagccagagccggggggcccggtagccgcgcacgtgccgccggggctcggggatgtcgcctgcgatctcagttggttcccgtaagagctcttggattgggtcaccgcagtgatgagctggtccggtttcgattttgttccgggtcatgccggcgggccagaagtccccacgacctgtcactggcctccctgctcggcgcaggagccctccggcctccccccgggtccaggcctgtgtcacaaccatgctgtagaccgactcgctacgaggccgtgtcttttatggatgtgaactctacttggcggaccgtagatcgcttaagtgcaactgcatgtggatgtctgggctag

SEQ ID NO: 4809 - RNA, 1602 nt, synthetic construct
  misc_feature 1..1602: note = source = /note="Description of Artificial Sequence: Synthetic coding sequence"
  source 1..1602: mol_type = other RNA
atggggccaagaggagcagcatctctgccaagagggcctggacctcggcgtcttttgctacccgtggtgctgccccttctactgttgctgctgctggctccaccaggatcaggtgctggagcatcacgcccaccccatcttgtgttcctccttgctgatgatctgggttggaacgatgtcggatttcatggctcacgaattcgcacgcctcatctggacgccttagctgcgggaggcgtgctgctggataattactacacccagcctctatgcaccccttctcgttcacaactgctgactggacgttaccagatcaggacgggtcttcagcaccagattatctggccttgtcaaccaagctgcgtgccactggatgagaaattgctgccccaactactcaaagaagcaggttatacaacccacatggtgggaaaatggcatctgggcatgtatagaaaggagtgcctacctaccaggaggggatttgatacatactttggttatctcctcggttctgaagattactatagccatgaacgatgcacactgatcgatgcgttgaacgtcacaaggtgcgctcttgactttagggacggcgaggaagtagccactggttataaaaatatgtacagcaccaacattttcaccaagagggctattgcactcattactaatcatccccctgagaaacccctcttcctctatttggccctccaatccgtccatgaacccttgcaagtccccgaggaatatttgaagccctacgactttatacaggacaagaacagacatcactatgccggtatggtgagcctgatggatgaagccgtgggcaatgtgaccgccgctctgaagtcttctgggttgtggaataacacagtgttcatattttctaccgataatggcggccagaccttggccgggggaaataattggcccttgcgcggacgaaaatggtcgctgtgggagggcggcgtgagaggagttgggtttgtagcctcgcctctgctgaagcagaaaggagtcaaaaaccgtgaactgattcacatttcagattggttaccgactctcgtaaaactcgctagggggcacacaaatggaacaaaacccctcgacggtttcgatgtatggaagacgatcagcgaagggtcgccttcccctcgtatagagctcctgcacaatatcgacccaaatttcgtcgactccagcccatgtccccgaaacagtatggctccagcaaaagatgactcttccctcccggaatattcggccttcaatacaagcgttcatgcagcgattagacatggaaattggaaactcctcactggatatcccggctgcggttactggttcccaccccctagccaatacaatgtgtccgaaatcccctctagcgacccacctactaaaacattgtggctcttcgacatcgatagagaccctgaggaaagacacgacctctcaagagagtacccgcatattgtcacaaaattgcttagccgactccagttctatcataagcattccgtgcccgtgtacttccctgcccaggacccacggtgcgaccctaaggcaacaggcgtctgggggccgtggatgtag

SEQ ID NO: 4810 - RNA, 1602 nt, synthetic construct
  misc_feature 1..1602: note = source = /note="Description of Artificial Sequence: Synthetic coding sequence"
  source 1..1602: mol_type = other RNA
atgggcccgcgcggcgcggcatccctcccccggggtcctggccccagaagattactgctgccagtagttcttcctttgctgcttctgttactgctcgcccccccagggagtggggccggtgcatctcgcccaccacatttggtcttcctcctggctgatgacctgggctggaacgacgtgggttttcacggcagccgaatcagaactccacacttggatgctcttgccgctggcggtgtcctcttagataattactatactcaaccgctctgcacaccatcaagatcccagctcctaaccggacggtaccagatccgaactggtctgcagcaccagattatttggccctgtcagccttcctgtgtgccactggatgaaaagctgctcccacagttattgaaagaagcaggctacacaactcatatggtcgggaagtggcacctcggcatgtatcgcaaggaatgcctacccacgcggcgcggattcgacacctacttcggctatctcttggggagcgaagactattactcccacgaacgctgtaccctgatcgatgccctcaacgtgacccgatgtgccttagacttccgcgatggagaagaggttgctaccggctacaaaaatatgtactctaccaatattttcactaaaagagcgatcgcccttatcaccaaccacccacctgagaagcccctcttcctatacctggctctgcaaagcgttcacgaacccttgcaagtaccggaggaatatctgaaaccctacgattttatccaagacaagaacagacaccactacgcagggatggtgagtctgatggatgaagcagtcggcaacgtaacagctgccctcaagagttccggcctatggaacaatacggtgtttattttcagcacagataacggtggccagacacttgctggcggcaataactggccactgaggggacggaagtggtccctgtgggaggggggggtcaggggcgtgggtttcgtggcatctccccttctcaagcaaaagggagtcaagaacagagagttaatacacattagtgattggctgccgacacttgtgaagcttgcgagaggccatactaacggcactaagcctctggacggatttgacgtgtggaagacaatctctgaaggatccccaagcccgcgaatcgaactgctacataacatagaccctaactttgtggactctagcccctgccccaggaactcaatggcgcccgccaaggacgactctagtcttccagaatactctgccttcaacacgagcgtgcacgctgctatcagacacgggaattggaaactactcacagggtatcccggatgtgggtattggttcccacctccaagtcaatacaacgtgagtgaaatccccagctctgatcctcctacgaaaaccctgtggctattcgacatcgaccgtgatccagaggaaagacacgatctgtctcgagaatacccccatattgtaacaaagctactctcaagactacagttctatcacaagcactctgttccagtatattttccagcccaggatcccaggtgtgaccctaaggccacaggtgtatgggggccatggatgtag

SEQ ID NO: 4811 - RNA, 1242 nt, synthetic construct
  misc_feature 1..1242: note = source = /note="Description of Artificial Sequence: Synthetic coding sequence"
  source 1..1242: mol_type = other RNA
atgggcccccgtggagcagcttcactcccccgtggacccggaccgagacgccttctactcccagtcgtactgcctctgctccttctgctgctgctggccccaccaggttctggtgccggcgcctcccgcccccctcacctagttttcctgcttgccgacgacctgggttggaatgatgtgggattccatggctccaggattcggacgccccacctcgatgccctcgcagccggtggcgttctgcttgataactattatacacagcccctatgcacgccgtcacgtagccagctgttgaccggaagataccagattcgcaccggattacagcaccagattatatggccctgccaacctagttgcgtgcccctggacgagaagctgctcccacagctgctcaaagaagctggttatactacccatatggtgggcaaatggcacttagggatgtatagaaaggagtgtctccccactcgacgaggattcgatacatacttcgggtacctcctgggctcagaagactactattctcacgagcgctgtaccctgattgacgctctcaatgtaactaggtgcgccttggattttagggacggtgaagaagtggccacaggatataagaatatgtatagtactaacatttttacgaagagggcgatagcactgatcacgaatcatccgcctgaaaaacctctatttctatacttagccctgcagtccgtgcacgagccgttgcaggtgccagaggagtatctgaaaccttatgattttattcaggataagaataggcaccactacgctggcatggtgagtttaatggacgaagcagtaggcaatgtcacagctgcgctgaaatcctccgggctttggaacaatacggtcttcattttctcaacggataatggcggacagaccctagcaggggggaataattggccactgcgcggtcgcaagtggagcttatgggagggaggcgtgcggggtgtcgggttcgttgcctctccgctattgaagcagaagggggtcaagaatcgcgaattaattcacataagtgattggctgccaactctcgtcaaactggctcgaggacacactaatggcacaaagccactcgacggattcgacgtatggaaaacgatttccgagggatctccaagcccaagaatagaattgttgcataatattgaccccaactttgtagactccagtccatactggcccgaatgcagccttctgctgtag

SEQ ID NO: 4812 - RNA, 138 nt, synthetic construct
  misc_feature 1..138: note = source = /note="Description of Artificial Sequence: Synthetic coding sequence"
  source 1..138: mol_type = other RNA
atgggacctagaggtgctgccagtttgccacgcggtccaggaccaagacgcctcctactccccgttgtcttgcccttgctgttgctcttgctgttagcccccccaggctctggcgccggagcgagcaggccgccctag

SEQ ID NO: 4813 - RNA, 1788 nt, synthetic construct
  misc_feature 1..1788: note = source = /note="Description of Artificial Sequence: Synthetic coding sequence"
  source 1..1788: mol_type = other RNA
atggctggaccttccccacctctgcgcgcaggggtcggaaggaggttactgggggtagcccaccctgacctacgcccctgcttgtgcggtgagctacaggtagaggggggcccaggaccggtgccgggaatgcttcgaacctgctacgtgcggagtccatggcggagggggccttcgtccgcacggggggaacaatcaggatcaggccacctcgagcaagaagaagtgcagtctggctcgctgctgttccgcctattattgttcctgagtcggtctcctgccagccgtaatcagcgcattctatacaccgtgctagaatgccagcccctcttcgattccagcgacatgaccattgcagagtgggtgtgcctggcacagaccatcaagaggcattatgagcaatatcatggatttgtcgttattcatggtactgacactatggccttcgccgctagcatgctcagctttatgcttgagaacctgcagaaaacagttatcctgactggagcacaggtaccaatccatgccttatggagcgacgggagagaaaatctccttggggctctcctcatggctggtcagtacgttatacccgaggtctgcctgttctttcagaaccaattgtttcgcggaaaccgcgccactaaagttgacgccaggcggtttgccgccttctgtagtccaaatctcctgccactcgccacagtcggtgctgacattacaatcaaccgagaactggtgcggaaggttgatggaaaggcaggattggtggtacactcctctatggagcaggatgtgggcctcctgaggctttatcccggaataccagccgccttagtgagagccttcctgcagccacctctcaagggcgttgttatggaaacttttggtagcgggaacggtcctacaaaacccgacctgctgcaggagcttagagtggccaccgaacggggattagtgatagtgaactgtacccactgtctccaaggagctgtgacgaccgactatgctgctggaatggcaatggcaggcgccggtgttatatccggattcgatatgactagcgaggcagcgctggccaaactcagctacgtgctcggccagccgggcctgtcactggacgtgagaaaagaacttctaactaaagatctccgcggagagatgacacctccttcggtcgaagagcgtagaccatctttgcaggggaacacattaggcggcggtgtcagttggctattgtcactttctggcagccaggaggcagacgctctcagaaatgcactggtcccttctctggcatgtgcagccgctcacgcaggtgacgtagaggctttgcaagccttagtggaacttggcagcgaccttggtctggtggactttaatggacaaacacctctgcatgcagccgcacggggtggacatactgaggcagtgacaatgctgttgcagagaggagtggatgtgaacacccgggatacagatggatttagccccctgctgctggctgtcagagggaggcatccgggggttatcgggctgctgagagaagcgggagcatcactttctacacaagagttggaagaggccggaactgagctgtgcaggctggcctatagagccgacttagagggattgcaggtgtggtggcaggcaggagcagatctgggacaaccaggatacgatggccatagcgccttgcacgtcgccgaagctgctgggaacctcgctgtggttgcctttctgcaatcactggaaggcgctgttggggcccaggcgccatgtccctag

SEQ ID NO: 4814 - RNA, 1740 nt, synthetic construct
  misc_feature 1..1740: note = source = /note="Description of Artificial Sequence: Synthetic coding sequence"
  source 1..1740: mol_type = other RNA
atggccagggcagtgggaccagaaagacgcttactggcggtgtataccggcgggaccatcggaatgagaagcgaactgggagtgctcgtgcctggaactggcttggctgctatccttcgcacccttccaatgttccacgacgaagagcatgcccgtgcacgaggcctttctgaggataccctagtcctgccacccgcctcaagaaatcaacgcattctgtatacggtgctggagtgtcagcccctgttcgactcatctgacatgacaatcgccgaatgggtgtgccttgcgcagacaattaaacggcattacgagcagtatcatgggttcgtggtgatccacgggacagacactatggcctttgccgcatcaatgttgtcatttatgctcgaaaacttacagaagactgtaattctcaccggggctcaggtgcctatccacgccctgtggtcagacggaagagaaaacctgttgggcgcactgttaatggctgggcaatatgtcattccggaagtatgtctcttttttcaaaatcaattgttcagagggaacagagctacaaaggtggatgccagaagatttgccgctttttgtagtccaaacctccttcccttggcaacagtgggcgcagacatcaccattaaccgagaattggtccgaaaagtggatggaaaggctggattagtggttcacagttctatggagcaggacgtgggactgctgaggctttatcctggaattcccgcagctctcgttcgtgcgttcctccagccccccctgaagggcgtggtcatggagacattcggttccggtaacggccctacgaaaccggatctcttgcaggaacttagggtcgccacggaaagaggtttggtgatcgtgaattgcacacactgtctgcagggagcagtgactaccgattacgccgctgggatggctatggccggcgccggagtaatttccgggttcgacatgacatctgaggccgcccttgccaaactgagctacgtgttagggcagcccgggctttccctggacgttaggaaagagctgctcacaaaagatctgcggggggagatgacccctccaagcgtcgaggagaggagaccgagcctgcaaggtaacaccttaggaggaggagtgtcctggctgctgtccctctccggatcacaggaggccgatgctttaagaaacgctctggtaccaagcctggcttgtgctgccgcccacgccggcgacgtagaggctttacaggcactcgtcgagctcgggagcgacctgggactggtggatttcaatggtcagacccccctccacgcggccgctcgcggggggcatacggaggccgtgaccatgttactacaaagaggtgttgacgttaatacccgggacaccgatggtttttcacccctccttttggctgtccgcgggcggcacccaggagttattggcctacttcgggaggcaggcgcttcgctcagcacacaggaacttgaggaggccgggaccgagttatgtagactggcttatagggcagatctcgaagggttgcaggtctggtggcaagccggagccgacctgggccagcccggatacgacggacactctgcgctgcacgtcgcagaagcagctgggaatctggccgtggtggctttcttacaatcattggagggcgcggtgggagcacaggcgccttgtccagagccttcatgttttcaggaggtactgcctggcgtatag

SEQ ID NO: 4815 - RNA, 423 nt, synthetic construct
  misc_feature 1..423: note = source = /note="Description of Artificial Sequence: Synthetic coding sequence"
  source 1..423: mol_type = other RNA
gcagcggcccgggggggtcacaccgaggcggttaccatgctgctgcaaaggggtgtggacgtaaatacacgagatacggacggtttttcgcctttgttgttggcagtgcgaggaagacaccctggagttattggactgcttagggaagccggggcctccctctcaacccaggagctggaagaggcagggaccgagttgtgtagattagcatatcgtgctgatctggagggactgcaggtgtggtggcaggcgggggccgatctaggtcagcccggctacgatggtcacagcgcactgcatgttgcagaagcagcggggaacctggcagtggtggccttcttgcagtccttggagggtgcggtgggtgctcaagctccatgcccagagccaagttgtttccaggaagtattaccaggtgtatag

SEQ ID NO: 4816 - RNA, 1722 nt, synthetic construct
  misc_feature 1..1722: note = source = /note="Description of Artificial Sequence: Synthetic coding sequence"
  source 1..1722: mol_type = other RNA
atggcccgagctgttggaccagaaagacgcctgcttgctgtgtacacaggaggtacaattggaatgaggagcgagctgggcgtccttgtgcctggcaccggactagcggccatcttgcgcactctacctatgttccatgatgaggagcacgccagagcacgtggtctgagcgaagatacccttgtgctgccaccagcatctaggaatcagagaattctgtacaccgtgcttgagtgccaacccctgtttgattccagcgacatgacaattgccgagtgggtgtgtttggcccagacaattaagcgtcattatgaacagtaccacggctttgtggtcatccatgggactgatacaatggcttttgcagcaagtatgctcagctttatgctggagaatctgcagaaaaccgtcatcttaacaggagctcaggtgccgatccacgcactttggtctgacgggcgggagaatcttctgggggccttactgatggcgggacaatacgtaatcccagaggtttgtcttttttttcagaaccaactttttcgagggaaccgcgcgaccaaagtggacgcccgcaggttcgccgccttctgcagccctaatttgcttccactcgcaacagttggggctgacatcactatcaacagagagctggtgcgaaaagtggatggaaaagcaggactcgtggtgcacagcagtatggaacaggatgttgggcttctgcgcttgtaccctggtatacctgcagcactcgttcgagcctttttgcagccacctctgaaaggagtggtaatggagactttcggctctggtaatggtcctacgaagccagacctgctccaggaacttcgcgtcgccaccgagagaggtctggttatcgtgaattgcacccactgcctgcagggcgcggttacaaccgactatgctgctgggatggcaatggccggggctggagtgatctcaggatttgacatgacctctgaagccgctttggccaagctgagttatgtgctggggcagcccgggctttctctggatgtacgtaaagagctactcacaaaggaccttcggggcgaaatgactcctcctagtgttgaagaacgcaggccgtccctgcaaggtaacacgcttggagggggtgtgtcttggttactatctctgtcggggagccaggaagccgacgcgctcaggaatgccttggtccctagcctggcctgcgcagccgcccacgccggggatgtggaagctcttcaggccctcgtggagttaggatccgacctcggactagtagactttaacggccagacccctctgcatgcggccgccagaggcgggcataccgaggctgtcacaatgctgttgcagaggggcgtggacgtaaacactagagatacggatggcttctcccccctgcttctggccgtcaggggaagacatcctggagtgataggactactgcgagaggcgggcgcgtccctgtccactcaggagctcgaggaagcaggcactgagctttgccggttagcctatcgagccgacttggaagggctccaggtgtggtggcaggccggcgcagacctgggtcaaccgggctatgatggtcactccgcactgcacgtcgctgaagccgccggaaacctggcagtagtggcattcctacagagccttgaaggcgcagtgggcgcccaggctccatgtcctgaggtgctgcccggggtctag

SEQ ID NO: 4817 - RNA, 4398 nt, synthetic construct
  misc_feature 1..4398: note = source = /note="Description of Artificial Sequence: Synthetic coding sequence"
  source 1..4398: mol_type = other RNA
atgcccgagcaggaaagacagataaccgcacgggagggcgcctctaggaaaattcttagcaagctgtcactacctacaagggcttgggagcccgcaatgaagaagtcattcgcttttgacaacgtcggctacgaggggggactggatggtctcggtccaagcagccaagtcgcaaccagcaccgtgcgcatcctcggaatgacgtgtcagagctgtgtgaaaagcatcgaggaccgcatcagcaacttaaagggcattatttctatgaaggtgtctttagagcagggaagtgccactgttaaatacgtgcccagtgttgtgtgcctgcagcaagtgtgtcaccagatcggcgacatgggattcgaagcctcaatagccgagggtaaagccgcgtcctggccctccaggtccctcccagcccaggaagctgtcgtaaaactcagggtagaagggatgacttgccagagttgcgtctcatcgatcgaaggaaaagttcgcaaattgcaaggcgttgttcgggtcaaggtgagtctctccaatcaagaagctgtaattacgtaccaaccctaccttatccagccagaggacctcagggaccacgttaatgacatgggattcgaggcggccattaaatccaaggttgcgccgctgtctctgggccctatcgatatcgagcgcctccagagcacaaatccaaagagaccactgtccagcgctaatcagaatttcaataacagtgaaacactggggcaccagggctcacacgtggtaaccttacaactgcgtattgacggaatgcactgcaaaagctgcgtgttgaatatagaggagaatatcggacagttactgggtgtgcaatcaatccaagtgagcctggaaaacaaaactgcccaggtgaaatatgacccgtcttgcaccagccccgtcgccctgcaacgggcaatcgaggccctccctcctggaaattttaaggtttcactgcctgacggtgctgagggcagcggcacagatcaccggtcttcttctagccactcaccaggctcccccccaagaaatcaagtacagggaacttgctctaccacactaatcgcgatagccggcatgacctgcgcttcttgcgtccactcaattgagggtatgatcagtcagctcgaaggggttcagcagatcagcgtcagcttggcagagggcacagccaccgtgctttacaatccgtccgtcatctcgccagaagagctccgggctgcaattgaagacatggggtttgaagcctccgtcgtcagtgagagctgtagtactaaccctttggggaatcacagtgccgggaatagcatggttcagaccactgacgggacgccaacaagtgtgcaggaggttgccccccacactggaagactgccagcgaaccacgcacccgatattctcgcaaagagcccccaaagcacccgggctgtcgccccccaaaaatgcttcctccagataaaaggaatgacatgcgcatcatgcgtatcaaatatcgagagaaatctgcaaaaagaggccggggtgctgtcggtgttggtggccctcatggctgggaaggcagagatcaaatatgaccctgaagtgatccaaccgctggaaatcgctcagttcattcaggatttgggctttgaggccgctgtgatggaagactatgccggatctgatgggaatatcgagctgactatcactgggatgacctgcgctagctgcgtgcataacattgagagtaagttaacccgcactaacggcattacttatgcttcagttgccctggccacttccaaggcgttagtaaagttcgaccccgaaattattgggccccgagatatcatcaaaattatagaggaaattggattccacgcttcccttgctcagagaaatcctaatgcacatcacctggatcacaagatggaaattaaacaatggaaaaagagctttctgtgtagcttggtcttcggaataccagtgatggccctcatgatctacatgctcattccttctaatgagcctcaccagagtatggttctggatcacaatattattcccggattatcaattctcaatttgatcttttttattctttgtaccttcgtgcagctgctaggaggatggtatttctacgtccaagcctacaagtcacttcgacaccgcagcgcgaatatggacgttctgatcgtgctggctacttcaatcgcatacgtgtatagtctagtgatcctggttgttgctgtggccgagaaagcggagagatcccctgtcacgtttttcgatacacccccaatgttgtttgtcttcatcgcgctaggccgttggctcgaacaccttgcaaagtcaaagacctcggaggccctcgccaagttaatgtccctgcaggcaaccgaagcgaccgttgtgactttgggcgaagacaatcttatcataagagaggaacaagtcccaatggaactggtgcagcgcggggacatcgtcaaggtcgttccaggaggaaagtttcctgtggatggcaaggtcctagaggggaataccatggcagatgagtcccttatcaccggtgaggcaatgcccgtaactaagaaaccaggatccacagtaattgcaggtagcatcaatgcccatggctccgtcttaataaaggccacccatgtcggtaatgatactaccctcgctcagattgttaagctcgtggaagaagctcagatgtctaaagcccccattcagcagctagcggacaggttttccggctactttgtgccttttattattataatgagcacactcacactggtcgtgtggatcgtgataggtttcattgacttcggggtagttcagcggtattttccaaaccccaataagcatatcagccagacagaggtgatcatccggttcgcattccagacctccatcacagtgctctgtatcgcatgtccttgctcactgggactagctacccctacagctgtcatggtgggcacaggcgtggctgcgcagaacgggatcttgattaagggaggcaaaccactggagatggcccacaagattaagaccgtgatgtttgataagactgggacaatcacacacggcgtgcccagggtgatgcgagtactcttgctcggagacgtcgcgactcttcctctacgcaaggtactcgctgtagtgggcactgcggaagccagcagcgagcacccccttggagtggctgtgaccaaatattgcaaggaggagctgggaaccgagacgttaggctactgtacagactttcaggctgtaccaggttgtgggatcgggtgcaaggtgagtaacgtagagggaattctggcccactccgaaaggccgttgagtgcccccgcatcccaccttaatgaggcaggatcactacccgccgaaaaagatgccgtccctcaaacgtttagcgttcttataggaaatagagaatggctcaggcggaacggattgaccatcagttccgatgtgagcgacgccatgaccgatcatgagatgaaagggcagactgcgatcttagttgccattgatggcgtgctgtgtggaatgatcgcaatcgcggacgccgtgaagcaggaagcagctctggcggtccacaccctccagtctatgggggtggacgttgtgctcataacaggcgacaaccgcaaaacagcacgagccatagccacccaagtcggaattaacaaagtattcgctgaagtgcttccctcccataaagttgccaaagtgcaggagctgcagaacaaaggcaagaaggtggccatggtgggtgatggagttaatgattcacccgctcttgcccaagcggacatgggggtggccatcggaaccgggactgatgtagcaattgaggccgcagatgtggtgctcatacgaaacgacctgctggacgtggtagcctctatacatctgagcaaaaggactgtccgaagaataagaatcaatctcgttcttgccctgatttataatttggtcgggatccccatcgctgcgggagtgttcatgccgatcgggattgtcttacaaccatggatgggaagcgccgcgatggccgccagctctgtgagcgtggtgctgtcatcccttcagctgaaatgttacaaaaagcccgacctagagcgctatgaggcccaagctcacggacatatgaaacctctaacagccagccaagtgtcagtccacatcggcatggacgataggtggcgcgattcaccgagggctaccccttgggaccaggtctcctatgtgagccaggtctccctgtcgagcctgacctccgacaagccatctcggcatagtgccgcagccgacgacgatggtgacaagtggagtctgcttctgaacggtagagacgaagagcaatatatctag

SEQ ID NO: 4818 - RNA, 3777 nt, synthetic construct
  misc_feature 1..3777: note = source = /note="Description of Artificial Sequence: Synthetic coding sequence"
  source 1..3777: mol_type = other RNA
atgcctgagcaggaacgacagattaccgctagagagggcgcttccagaaagatcctaagtaagctatctctgcccaccagggcctgggagcctgccatgaagaagtcgtttgccttcgataatgtcggttacgaaggagggctcgatggcctgggccctagctcgcaggtggccactagcactgtccgcattctcgggatgacctgccagagttgcgtcaaatcaattgaagacaggatttcaaatttgaaaggcatcataagtatgaaagtaagcctcgaacagggcagcgctacagtgaagtatgtgccatctgtcgtgtgtctacagcaggtgtgtcatcagattggagatatggggttcgaagccagcattgcagagggtaaagctgcatcatggcccagcaggagcctgccagcgcaagaggccgttgtaaagttacgcgtggaagggatgacgtgtcagtcttgtgtgagttctatcgaaggcaaagtgcggaaactgcagggagttgtgagagtgaaagtctccttatccaaccaggaggcagttattacataccagccctatctgattcaacctgaagacctgagggaccacgtgaacgacatgggcttcgaggcagccattaaaagcaaggtcgccccactgagtcttgggccaatagacatcgaaagactccaaagcacaaatccaaaacggccgctctcttccgcaaatcagaacttcaataactcggaaaccctgggccaccagggaagccatgtggttactttgcagctccggattgacggtatgcactgtaagagctgcgtgctgaacattgaggaaaatatcggacagctgttaggggtgcaatcaattcaggtgagtttggaaaataagacagcccaggtcaagtatgaccctagttgtacatctcctgtggctctgcagagggctatcgaagcgttgccaccagggaactttaaggtttcattacccgatggagcagaaggttctggtaccgatcatagatcatccagctcacattctcccggaagcccacctcggaaccaggtccagggcacttgtagcaccacccttatagccattgccggtatgacttgcgctagttgtgttcatagtattgaggggatgatctcccagctcgagggggttcagcagatttctgtgtctcttgcagaaggtacagcaacagtactgtataacccttctgtgatctcccctgaggagctgcgggccgccatcgaagacatgggtttcgaggctagcgtcgtatctgaaagctgctccaccaatcccctgggcaatcactcggcaggaaacagtatggtgcaaacaaccgatgggacacccacaagcgtacaggaagtggctcctcacaccggccgactgcctgccaaccacgcaccagatattttggccaagtcaccacagtccactcgagctgtcgccccacagaagtgcttcttacagattaagggtatgacctgcgcctcatgcgtttcgaacattgagagaaaccttcagaaagaagcaggagtgctgagcgtcctagtcgcacttatggccggtaaggctgaaattaagtatgatcccgaggtgatccaacctctggaaattgcccagttcatccaggatttaggattcgaagcggctgtgatggaggactatgccggtagtgacgggaacattgaactgactattaccgggatgacatgtgcaagctgtgtgcacaacatcgagagtaagctgacccgaaccaatggaataacttacgctagcgtggcacttgctacctccaaggctctggtcaagttcgaccccgagattattgggccgcgagacattattaaaattattgagtcaaagacatcggaagccctggcaaagcttatgtctctccaggctacagaggctactgtggttactctgggagaagataatctcatcatcagagaagagcaagtacccatggagctggtgcaacgaggtgacatagtcaaggtagtgcccggggggaaatttcccgtcgacggaaaagtgttggaaggtaatactatggcagatgagtctctgataacaggggaagctatgccggtaactaagaaacctggtagcactgttatagctggaagcatcaacgcccacggcagtgtacttatcaaggctacccatgtgggtaacgacacaactctcgctcagattgtgaagctggtggaagaggctcaaatgtctaaaaatcccaataaacatatttcacaaacagaagtgatcatccggttcgctttccaaacctccatcactgtgttgtgcattgcctgcccgtgcagtctaggcttagcaacccccaccgccgtcatggttggaaccggagtggcagcccagaatggcatcctaattaagggcggaaagcctctcgaaatggcacataaaataaagactgtgatgtttgacaaaacaggaacaattactcacggggtgcccagagtgatgagagtactcctcctcggggacgtcgctactctcccactgcgaaaggtcttggccgttgtggggacagccgaggcctcgtcagagcaccctctgggcgttgccgttaccaaatattgcaaggaggaactcggtacagaaactctcgggtattgcactgactttcaagccgtgcctgggtgcgggattgggtgcaaagtgtcaaatgttgaagggatactcgcccattcggagagaccgttatctgcccccgctagccatctgaatgaggcaggatccctccctgccgagaaggatgccgtgccccagacattcagtgttctcataggtaatcgggagtggttgagaagaaacggactgacaatctccagcgacgttagtgatgcaatgacagatcacgaaatgaaaggtcaaaccgcaattttggtcgcgatcgatggcgtcctgtgcggaatgattgccatcgcggatgcggtgaagcaggaggcagccttggccgtacatacgctccaatcgatgggagttgacgtcgtgttgatcactggtgataacagaaagaccgcgagagctatcgctacccaggtgggtatcaataaggtcttcgcggaggtcctgccctcacataaggttgctaaagttcaggagctccaaaacaagggcaaaaaggtggctatggttggggacggcgtcaatgacagtccggcgctggcgcaggccgacatgggggtggctatcgggacaggtaccgacgttgcaattgaagcagctgacgtggtgctcatcagaaacgatttgctcgacgtcgtggcgtcgattcatctgtcaaagcgaaccgtcagaaggatacggataaatctcgtcctggcccttatatataacctggtgggcattcccatcgccgcaggggtatttatgcccataggcattgttctacaaccatggatggggtctgctgcaatggctgcgtccagtgtgtccgtggttttgagtagcctgcaacttaaatgttacaaaaagccagatctcgagcggtacgaggcgcaggcacacggtcatatgaaaccgctgaccgctagccaggtgagcgtccatattggtatggatgatagatggagagactccccccgcgctactccgtgggatcaggtgtcttacgtgtctcaagtgtcactgtctagcctgacatctgataagcctagcagacattcagcagccgcggatgacgacggcgacaaatggtcccttcttctcaacggacgtgatgaggagcagtacatttag

SEQ ID NO: 4819 - RNA, 4065 nt, synthetic construct
  misc_feature 1..4065: note = source = /note="Description of Artificial Sequence: Synthetic coding sequence"
  source 1..4065: mol_type = other RNA
atgccagaacaggaaagacaaattacagcaagggaaggcgcgtcacgcaaaatcctcagcaagcttagtcttccaactcgcgcatgggaacctgctatgaaaaagtcttttgcattcgacaatgtgggttacgagggtgggttagacggactgggcccttcctcccaggtggcaacaagtacagtacgaatcctcggcatgacctgtcagtcttgtgtgaagtctattgaagaccgcatttccaacctgaaggggattattagcatgaaagtgagcctagagcaagggtcggccaccgtcaagtatgtgccaagcgtggtatgccttcagcaggtgtgtcatcagattggagacatgggatttgaagcctctatcgccgaaggcaaggccgccagttggcctagtcgaagcctacctgcgcaggaggctgtggtgaagctgagggttgaaggaatgacatgtcagtcatgtgtcagctctatcgaagggaaggtgagaaaacttcagggagtggtccgggtgaaggtgtcgctgagtaaccaggaggccgtaattacataccagccatacctgatccagcccgaagacctgcgagatcacgttaacgacatggggttcgaggctgccattaagtcaaaagtggccccactatcccttggacccattgatatcgagcgcctccagtccaccaatccaaaacggcccctgagttccgccaaccagaattttaataactccgaaacccttggacaccaaggaagtcatgttgtgaccctgcagctgcgaatcgatggcatgcattgcatgatatcacagttggaaggggttcagcagatctctgtgtctctcgccgaagggactgcaacggtcttatacaatccgtcagtcatttctccagaggaattgagagctgcaatcgaagatatggggtttgaagcaagcgtggtctcagaatcttgttcaactaaccccctgggaaatcatagcgcaggcaacagcatggtccaaacaactgacgggacccccacctcagtccaggaagttgctccacacaccggcaggttgccagccaatcacgccccagatattttggcaaaaagtccgcagagcacccgagctgtcgccccacaaaagtgtttcttgcagataaaggggatgacttgcgcctcttgcgtgagcaacatagaaaggaacttgcaaaaggaagccggtgtcctatcagtgctcgtggcgctgatggccggcaaagccgaaatcaagtacgaccccgaggtcatacagccgctggagattgcccaattcatccaagacctcggctttgaagcggctgtgatggaggactatgcaggtagcgacgggaacatcgagcttacgattaccggcatgacatgcgcctcatgtgtgcacaacattgagtccaaattgacaaggacaaacggaattacatacgcatctgtagccttggcaacttctaaagcactggttaagtttgaccccgagataattggacctagggacattatcaagatcatcgaagagatcggattccacgcctcattggcacaacgcaatcccaacgcacaccatttggaccacaaaatggagatcaagcagtggaaaaagagttttctgtgtagccttgtcttcggaattccagtgatggcccttatgatatatatgctgattccgagtaacgaaccgcaccagagcatggtcttggatcacaacatcatccctggactgtcaatcctgaacttgatatttttcatcctgtgcactttcgtccagttgcttggcgggtggtatttctatgttcaagcttataagtccctacgccaccggtcggctaatatggacgtcttgatcgtcctcgctactagtatcgcatatgtgtactctctggtgatactggtggtagcagtcgcagaaaaggctgagagaagcccagtgacattttttgatactcccccaatgctatttgtgtttatcgcattaggacggtggttagagcatctagctaagtccaaaacctcagaggccttagccaaactcatgtccctgcaagctacagaagctaccgtagtgacgctgggagaagataatctcataatcagggaggaacaggtgcccatggagctagttcagaggggagacattgtcaaagtggtgccgggagggaagttccccgtggatggcaaagttctcgagggtaatactatggctgacgaatctctaattactggcgaagccatgcccgtgaccaagaagcctggttctaccgtgattgccggatcgattaacgcccacgggtcagtcctgatcaaggcgacccatgttggaaacgatacaacgctcgcccagatcgtcaagctggttgaagaggcccaaatgtctaaagcacctattcagcagctggcagatagattcagtggatattttgtgcctttcatcatcataatgtcaacattaaccctggttgtttggatagtcattggctttatcgattttggggtggtacagcgctactttcccaaccccaataaacatatttctcagacggaagtgataatcagatttgcattccagactagcattacagttctgtgtatcgcttgcccgtgttccctagggctcgcaactcccaccgctgttatggtgggcacgggagtagccgcccagaatggcattctgatcaaaggagggaaaccacttgagatggcacacaagatcaaaacagtaatgtttgacaaaacaggaactataactcatggcgttccacgggtgatgcgggtgctgttgcttggggatgtcgccacgttgcctctcaggaaagtgctagctgtcgtcgggacagccgaagcgtcaagtgagcacccactgggagtggcggttactaaatactgcaaagaagagcttgggacagagaccctgggctactgtactgactttcaagctgtgcctggatgtgggattggctgtaaagtgagtaacgtggaagggatactggcccacagcgagcgtcccctgagtgcaccagcttcccacttgaatgaggcagggtcactccccgcagaaaaagatgccgttccccagaccttctcagtgctgatcgggaacagagaatggctgaggagaaatggtctcactatcagcagcgacgtgtctgacgccatgacggatcatgaaatgaaggggcaaacagccatccttgtagcgattgacggagtgttatgtggcatgattgcgatcgctgacgctgtaaaacaagaggcagcactagccgtacacaccctgcaaagcatgggggtggatgtcgttctcatcacaggagataaccggaagactgcccgtgctatcgccactcaagtcgggattaacaaggtttttgcagaagtgttgccctcacataaggttgcgaaagtgcaggaacttcagaataagggcaagaaggtggccatggtaggagacggggttaatgactccccagcactggcacaggccgatatgggggttgctatcgggactggcacggatgtagccatcgaagcagcagatgttgtgttgattcgcaacgacctgctggacgtggtggccagtattcacctgtctaagaggaccgtgagacggatccgaattaatttggtgttagccctgatctataatctggtaggaattcccatcgctgcaggcgtgttcatgccaattggaatcgtgctacaaccttggatggggtccgcagcaatggcagctagttccgtttcagtggttttgagttctcttcagctgaaatgttataagaaacccgacctggagcgctacgaagcccaggctcatgggcatatgaagcccctgactgcttctcaggtgtcagtacacataggcatggatgaccgatggcgagatagcccaagagctaccccctgggatcaggtctcctacgtgtcccaagtatctctcagttcacttacttcagacaaaccaagcaggcacagtgcagcggccgacgatgacggcgacaagtggtccctgttactcaacggccgcgatgaggagcaatacatttag

SEQ ID NO: 4820 - RNA, 3108 nt, synthetic construct
  misc_feature 1..3108: note = source = /note="Description of Artificial Sequence: Synthetic coding sequence"
  source 1..3108: mol_type = other RNA
atgcctgaacaggaaagacaaattactgccagagaaggggcctcccggaaaatcctgagcaaacttagcctgccaaccagagcatgggaacctgctatgaagaaaagtttcgcctttgacaacgttggatacgagggaggattggatggcttaggcccatcctctcaagtagcaacctccactgtccggatccttggaatgacatgtcagtcatgcgtgaaatctattgaggaccgtatatccaatctgaaaggcatcatcagtatgaaggtgtcactggagcaggggtcggcgactgttaaatacgttccttccgtggtctgtctccagcaggtctgtcaccagattggtgacatgggattcgaagctagcattgccgagggaaaagccgcctcatggccaagccggagcctacctgcccaggaagccgttgtgaagcttagagtagaaggcatgacatgtcagtcgtgcgtgtcatccattgaagggaaagtcagaaaactgcaaggggtcgtgcgggtgaaagtgtccctttccaatcaagaggcagtgattacctatcagccgtatctgatccagccagaggatctcagagaccacgtgaacgatatgggatttgaggctgccataaaatccaaggtagcccctttgagtcttggacccatcgatattgagcgcctgcagtcaactaatcctaagcgccctttgagcagcgccaaccaaaacttcaataattctgaaactttaggacatcaaggtagccatgtcgtaactcttcagctccgcatcgatggcatgcactgcaaaagttgcgtgttgaacattgaagagaatatagggcagttgctgggggtgcagagtattcaggtgtcactggagaacaaaaccgcacaagtgaaatacgacccatcatgcacatcacccgtggctctgcagcgcgcaatagaagccctgccacctggcaacttcaaggtgtccctcccagacggtgccgaaggatccggaacagatcaccgatcaagttccagccactctcctgggagcccgccaagaaaccaggtgcaaggaacttgctcaaccacacttatcgccatagcaggcatgacgtgcgcaagctgcgtgcatagtattgagggcatgataagtcagttggagggcgttcagcagatctcagtgagccttgccgaaggaaccgccacggtcctttacaacccaagcgttatcagccccgaagagctgcgggccgccatcgaggacatggggttcgaggcatctgttgtgagtggagaggcaatgcctgtaaccaaaaagcctgggtctaccgtcatcgcggggtcaatcaatgctcacgggtcagtgctcatcaaggctacccacgttgggaacgataccacccttgcacagattgtgaagttagtagaagaggcacagatgagcaaagcgcctattcagcagctcgccgacagattctcaggatacttcgtcccattcatcataattatgtccactttgacactggtcgtttggatcgttatcgggtttatcgatttcggcgtagtgcagaggtactttcctaaccctaacaagcatatttcacagaccgaagtcattattcggttcgcctttcaaacttcaataactgtattatgcatcgcctgcccgtgcagtctcggcctggccacccccactgctgtgatggtagggaccggtgttgctgcccagaatggtatactcatcaaagggggcaaaccactcgagatggcgcacaaaatcaagactgtgatgttcgataaaacagggacaatcactcatggcgtgccaagagtaatgcgagtgcttctgttgggtgacgtggctacccttcccctcaggaaagtcctcgctgtggtaggaactgccgaggcatcaagtgaacatcctctcggcgtcgcagtgacgaagtactgtaaagaagaactgggtaccgagaccctcggctactgcacagactttcaggccgtgcccggctgcgggatcgggtgtaaggtgtcaaatgtcgagggcatcttggcccacagcgagcgtccactctctgctcctgcttcacatcttaatgaagccgggtccctgcctgccgagaaagacgcagtgccccagaccttcagcgtcctgatcggcaaccgcgaatggcttcgtcggaatggactgactatctcctctgacgtttctgatgccatgacggaccacgaaatgaagggccaaacggccatcctggtcgctatcgacggagtgctgtgtgggatgatagccatagccgatgctgtgaagcaggaagcagccctcgccgtgcacacactccaatctatgggcgtggacgttgtgctaatcacaggtgacaaccgaaaaacggcaagggccattgctacacaggtcggaattaacaaggtattcgctgaggtcctcccaagccacaaagtagccaaggttcaggagctgcagaataaagggaagaaagttgccatggtcggtgacggtgttaatgactctccagctttggctcaggccgacatgggtgtcgcaattggaacaggtactgatgtggccatcgaggccgccgatgttgtacttataaggaacgatctcctcgacgttgtggcatccatccatctctccaagaggacagtgagacgtattcgaataaaccttgtcctcgcgctgatttataatctggtgggtatccccattgctgctggggtgtttatgcctataggcatagtgttgcagccctggatgggctctgccgcaatggctgccagcagcgtaagcgttgtcttgtccagtctccagcttaaatgctataagaaacctgacttggaaaggtatgaggcccaagcacatggccacatgaaaccactcactgccagccaagtctctgtgcatataggaatggatgaccggtggagggactcgcctcgagctacaccctgggatcaagtttcatatgtctcacaggtcagcctttcctccttgacctcggataagccttccaggcactccgctgctgctgatgatgatggggacaagtggtccttgcttcttaacggcagagatgaggagcaatatatttag

SEQ ID NO: 4821 - RNA, 2031 nt, synthetic construct
  misc_feature 1..2031: note = source = /note="Description of Artificial Sequence: Synthetic coding sequence"
  source 1..2031: mol_type = other RNA
atggacgtgctaatagtccttgctacgtcaattgcctatgtgtactccttggtgatactagtcgtagccgtggcggagaaggcagaacgttcccccgtgactttctttgacacgcctcctatgctcttcgtctttattgcactgggaagatggctcgaacatcttgccaaatctaaaacgtcagaggccctcgcaaagcttatgagtctacaagcaaccgaggccacagtcgtgacccttggcgaagataacctgattattagggaagaacaggtaccaatggagctggtgcaacgaggtgacattgttaaggttgtacccgggggtaagtttccagtggacggaaaggtgctggaaggaaacactatggctgatgaatctctcatcacaggcgaagcaatgccagtcacaaaaaaacccgggtcaactgttatagcaggaagcatcaatgctcacggcagcgtgctcataaaggccacacacgtgggaaacgacactaccctagcgcagatcgttaagctggtcgaagaggcgcagatgtccaaggcccctattcaacagctggcagatagattttcaggatacttcgtgcctttcattatcattatgtcgacattgacactcgttgtctggatagtaatcgggttcatcgacttcggagtagtccaaagatatttcccaaaccccaataagcatattagccagaccgaagtcatcatccgtttcgcatttcagactagtatcaccgtgctctgcattgcttgcccttgcagtcttggcttggccacacccactgccgtgatggtcggaaccggagtggcagcccagaatgggatcctgatcaagggaggaaaacctttggaaatggcacacaaggaactaggtacagaaacccttggctactgcacagattttcaggctgtccctggatgcggcatcggctgtaaagtgtcaaacgtcgagggaatactggcacacagcgagcggcctctttcggcgccagcttctcatctgaatgaagctgggtcactccctgccgaaaaggacgccgtccctcagactttttctgtcctgatcgggaaccgagagtggctgcgacgcaatgggttgactatcagctcagatgtgagcgacgcgatgaccgatcacgagatgaaaggtcaaacagccatcctggtcgcgatagatggagtgctttgcgggatgattgccattgccgatgcggtaaagcaagaagcagctctcgctgttcatacactgcagtctatgggtgtggatgtggtgctcatcaccggcgataatcgaaagacggccagggcaattgctacacaggtgggcatcaataaagtcttcgcagaagtgttaccaagtcacaaggttgcaaaagtgcaggagttacagaataagggtaaaaaggttgccatggttggagacggagtgaatgatagccccgccctggcacaggccgatatgggcgttgccatcggcacagggactgacgtagccattgaagctgcagacgtggtactcatccgaaacgacttactggacgttgtggcctccatacatctctccaaaaggacggttcgtcgaattcgcataaacctggtacttgccctgatctacaaccttgtagggatcccaattgccgcaggagttttcatgccgattggaatcgtgctacaaccgtggatgggatccgccgccatggctgcctccagcgttagcgtggtcttatcatccttacagttgaaatgctataaaaagcccgatttggaaagatatgaagctcaggctcacggacacatgaagcctctgacggcctcacaggtctccgttcacatcggaatggatgaccggtggcgggactctccccgggcaaccccttgggaccaagtgtcttacgtcagccaggtgagtctcagttcgctgacgtccgacaaaccttcccgacactctgctgcggctgacgatgacggtgataagtggtctctgttacttaacgggcgagacgaggaacagtacatttag

SEQ ID NO: 4822 - RNA, 4203 nt, synthetic construct
  misc_feature 1..4203: note = source = /note="Description of Artificial Sequence: Synthetic coding sequence"
  source 1..4203: mol_type = other RNA
atgccagagcaggagcgtcagatcacagcacgcgagggcgcaagccgcaaaattctgagcaagctatcactaccgaccagggcctgggaacccgcgatgaagaaaagtttcgcatttgacaacgttggctatgaggggggcctggacggtcttggaccctcttcccaggtggcgacctcgacggtcagaattcttgggatgacgtgtcagtcatgcgtgaaatcaatcgaggaccggatcagtaatctcaagggaataatttccatgaaagtgagtctggagcagggctccgcgacagtgaagtacgtcccaagcgtcgtgtgccttcagcaggtgtgccatcagattggtgatatgggattcgaagcctcaatcgccgaaggcaaagcggcgagttggcccagcagatcgcttccagcacaggaggctgtggtcaagctccgggttgaagggatgacctgtcagagctgtgtaagctcaatagaaggaaaagtgcgaaaactacagggggtcgtgagagtaaaggtctcgttaagtaaccaagaagcagtcattacctaccagccctatttaattcaaccagaagacctgagagatcacgtgaacgacatgggctttgaagccgcaattaaatctaaggtcgcacctttgagtctgggccctatcgatatcgaaagactgcagtctaccaatccgaaaaggcccctttccagtgccaatcagaacttcaataatagcgaaaccctggggcatcaaggcagtcatgtggtgacgttgcagctacgtattgatggaatgcactgcaaaagctgcgtcctcaacatagaagaaaatatcggccagctgctgggagtgcagagtatccaggtgagtctggaaaataagactgctcaggtcaaatacgacccaagctgtacctcaccagttgcactgcagcgcgccatagaagcgctccctcctgggaacttcaaggtttcattgccagatggcgccgagggcagcggaactgatcaccgaagctccagttcccattccccagggagtccacccaggaatcaggtgcaaggcacttgctctaccacactcatcgctatcgctggaatgacatgcgcaagctgtgttcactcgattgaaggcatgatatctcagctcgagggcgtccagcaaattagtgtgtccctagctgaagggaccgctacagtgctttacaatcccagcgtaatctcccctgaggaactgcgcgcagcgattgaggatatgggttttgaagcctctgtggtgtctgaatcctgctcaacaaatcccttaggcaatcactcagcggggaacagcatggtacagacaacagacggaacacctaccagcgtgcaagaggttgccccccacacaggtaggttgcccgccaaccacgctccagacatcttagcaaagtctccacagtccacccgtgccgttgctccacaaaaatgtttcttacagattaaaggcatgacatgtgcttcttgcgtctccaatatagaacgcaacctgcaaaaggaagccggcgtactgtcagtgctggtggcccttatggctggcaaggccgagatcaaatatgacccagaggtaatacagccccttgaaattgctcagtttattcaggatcttggctttgaagctgccgttatggaggactacgcagggagtgacggcaatattgaattgaccattacaggaatgacttgtgcctcctgtgtgcacaacatcgagtccaagttaaccagaaccaatggcattacatatgcatccgtcgcactggctacaagtaaggccctcgttaagttcgatccagaaatcatcggacctcgcgacatcatcaagatcatcgaggagatcgggtttcatgctagcctcgcccaaagaaaccccaacgcgcatcatttggatcacaaaatggagatcaaacaatggaaaaaaagttttttatgtagccttgtctttgggatccccgtgatggccctaatgatttacatgctgatcccatcgaacgagccccatcagtctatggttctggaccacaatattatccccggcctgtcgattctcaacctgatcttcttcattctttgcacatttgtccagctgttagggggctggtacttctacgtgcaggcctataaaagcctgaggcaccgatctgcaaacatggacgtcctgattgtcctggctaccagcattgcctacgtgtactctctggtgattctcgtggtcgctgtggcagaaaaagcagagcgcagtccggtcaccttttttgacaccccccccatgttattcgtctttatcgcattgggacgatggttagagcatctggccaagtctaagacaagcgaggcattggccaagctcatgtctctgcaagctacggaagcaaccgtggtcactctaggcgaagacaacctgatcatacgggaggaacaggtgcctatggagctggttcagagaggtgatattgtcaaggttgtcccaggaggaaaatttccagttgacgggaaagtgctggagggaaacacaatggccgacgagtccctgatcacaggggaagcaatgcccgtgactaagaaaccgggctctacagtcatcgccggctcaataaacgcccacggctctgttctgataaaagcaacccacgttggaaatgatactacactcgcacagatcgttaagctggtcgaagaggcgcagatgtctaaggcaccaattcaacaactcgctgaccgatttagcggttacttcgttccttttatcatcatcatgtccacacttactttggtcgtgtggatcgtcattggtttcatcgatttcggcgtggtccaacgctacttccccatcaaaacggtgatgtttgacaagaccggaaccatcacccatggagttccccgtgtgatgagagtcctcctacttggagatgtggccactcttcctttacgaaaagtgttagccgtagtggggactgcagaggcaagcagcgagcaccctctgggcgtagccgtgaccaagtactgcaaggaagagctagggaccgaaacactggggtattgtaccgactttcaagccgtgccaggatgtgggattggctgtaaggtcagtaacgtcgaaggcatcttagctcacagtgagcgtcccctctcagcccccgccagtcacttaaacgaagctggctcccttcccgctgaaaaagatgcggttccacagacatttagcgtgctcatcgggaacagagaatggctccgtagaaacggtctcacgatcagtagcgatgtcagtgacgcgatgaccgatcacgaaatgaaaggccagacggctattctcgtggccatcgacggtgtcctttgcggaatgatcgctatcgcagacgccgtgaagcaggaagctgccctggctgttcacaccctccagtccatgggagtagacgttgtcttgatcaccggagataatcggaaaactgcaagggccatcgccacccaggtgggtatcaacaaagtgtttgctgaagtgcttccttctcacaaggtggccaaagttcaggagctgcagaacaaggggaagaaggttgcaatggtgggggacggtgttaatgactcaccagctctcgcccaggctgacatgggcgtggccatcggtactggaaccgatgtggcgattgaggcagctgacgtggttctcattaggaatgatctcctagacgtggtggcctccattcacctttcgaaacggaccgtgaggagaattagaataaacctggtcttagccttaatctataaccttgtagggataccaatcgctgctggtgtgttcatgcccattgggatcgttctgcaaccttggatgggaagcgctgcaatggcggcgagctccgtatccgtggtactttcctctctgcaactgaagtgttacaagaagcctgatctggaacggtacgaagctcaagcacatgggcacatgaagcccttaacagcctctcaggtcagcgttcacatcggcatggacgataggtggagggacagcccccgtgctaccccctgggaccaggtatcctacgtaagccaggtgtccttgtcaagcctgaccagcgataagccttctagacactctgccgccgccgacgacgacggtgacaaatggtcgctgcttctgaacggccgcgacgaagagcaatacatttag

SEQ ID NO: 4823 - RNA, 4164 nt, synthetic construct
  misc_feature 1..4164: note = source = /note="Description of Artificial Sequence: Synthetic coding sequence"
  source 1..4164: mol_type = other RNA
atgccggaacaggaaagacaaatcactgctagggaaggagccagtcggaagatcctctccaaactttcactacccaccagagcttgggagcccgcgatgaagaagtccttcgctttcgataatgtcgggtacgagggtggactggatgggcttggaccaagctcccaggtagccacgagcacagtgaggattcttggtatgacttgccagagctgcgtcaaatccatcgaggaccggattagcaacctgaagggcatcatttcaatgaaagtctccctggagcaaggtagcgccacagtgaagtatgtgccctccgtcgtatgccttcagcaggtttgtcatcagatcggagacatgggattcgaagcttcaattgctgaaggtaaggcagcctcctggccttcacggagcttacctgctcaagaggccgtagttaagcttcgcgttgagggcatgacctgccagtcgtgcgtaagtagcatcgaggggaaagtccggaagttgcaaggggttgtgcgagtgaaagttagtctctccaaccaagaggccgtgattacctaccagccttatctgattcagccagaggatttgcgcgaccacgtgaacgatatgggcttcgaagcagcaatcaaatcaaaggtggcgccactatctctgggacccatcgacatagaaaggcttcaatcaacaaacccaaagagacctttatcgagtgcaaatcagaattttaacaactccgagacactaggccaccaggggagccatgtggtgactctacaattgcggatcgacggcatgcactgcaaaagttgtgtgttgaatatcgaagagaacatcggccagctgcttggagttcagtctattcaagtgagcctcgaaaataaaacagcccaggtcaaatacgatccttcatgtacttcacccgtagctctccaaagagctattgaagcccttccacccggaaactttaaagtctcgctgcccgacggggccgaaggctcaggcacggatcacaggagttctagcagtcattcaccgggttctccgccgaggaatcaagtccagggaacctgttctacgaccttgattgcaatagctggaatgacgtgcgcatcttgcgtgcattccattgaaggtatgatttcacagctggaaggagtgcaacaaatatcggtgtctctcgccgaaggaaccgctactgtgttgtacaatcctagtgtcatcagccccgaggagcttcgggctgctatagaagatatgggcttcgaagcttcagttgtctccgagtcttgctcgactaacccccttggaaatcattccgccggtaactccatggtgcaaacaaccgacggcaccccaacatccgtacaggaggttgcaccgcatactggtaggcttccagcgaatcatgctcctgatattcttgccaagagcccacagtccaccagggccgtagcgccccagaagtgcttcctccagatcaaaggtatgacctgtgcaagctgcgtaagtaacattgaacgcaacctccagaaggaggcgggcgttctgtccgtgttggttgccctgatggctggcaaagcggaaatcaagtatgaccccgaggtcattcagcccctggagatcgcccagtttattcaagacctgggattcgaggctgccgtgatggaggactacgcagggtcagacggaaatatagagctgacgatcaccggcatgacctgtgcttcctgcgtgcataatattgagagtaagctcactagaaccaatgggatcacgtatgccagtgtcgctctagcaactagtaaggccctcgtcaagttcgaccctgagatcatcggacccagagatattatcaagataatcgaagaaatcgggtttcacgcctctttggcacagcgtaatcccaatgcacatcacctggaccataagatggaaataaagcagtggaagaagagttttctatgctcactcgtatttggcatccctgtcatggccctgatgatatatatgctgataccatctaacgagccccatcaaagtatggttcttgaccacaatatcataccagggctatctatactcaaccttattttcttcatactgtgcacatttgtgcagagcaagacgtcggaagcacttgcgaagttgatgagcctacaagcgacagaagcaaccgtggtgactttgggagaagataacttgatcatcagagaggagcaggtcccaatggaactagtgcagcggggagacatcgttaaggtagttccggggggtaaatttcctgtcgatggcaaagtgctcgagggaaacacgatggccgacgagtcattaataacaggcgaggccatgcccgtaacgaagaaaccggggagcactgtgatcgctggctcaattaatgcgcacgggtcagtactaattaaagctacccatgttggaaatgataccaccctcgcgcaaatagtgaaactagttgaggaagcacaaatgtccaaggctcctatccagcagctggccgacagattctctggatattttgttccatttatcataattatgtcaactcttactctcgtggtgtggatcgtgattggattcatcgactttggagtagttcaacgatactttccaaacccgaataaacatatatcacagaccgaggtgattatacgcttcgcgtttcagacatccattactgtgttgtgtatagcctgcccgtgcagtctgggactggccactcctaccgcagtcatggtcggtaccggcgttgcagcacaaaacggtatacttattaagggtggtaagcctcttgagatggcacacaagattaaaacggttatgttcgacaaaacaggaacaattacgcacggcgtgcctcgagttatgcgggtgttactgttgggagacgtggccacacttccacttcgaaaagtccttgctgtggtgggcacagcagaggcgtcatccgaacaccctttgggcgtcgctgtgacaaaatattgtaaggaggaactcggaaccgaaacccttggttactgcactgattttcaggccgtacccggctgcggaatcggttgtaaagtttcaaacgttgagggaatactagcccattccgaacgaccgcttagcgctcctgcgagtcacttgaatgaggctggttctctcccagccgagaaggacgctgtcccccagacatttagtgtattgataggcaaccgagaatggctgcgccgaaatggcctgactatatcttcggacgtttcggacgcgatgacggatcacgaaatgaaaggccagactgcaattcttgtggccattgatggcgtcctgtgtggcatgatcgccattgccgatgccgtcaagcaagaggccgccctagctgtgcacactctgcaaagcatgggcgtggacgtagtgttaataaccggcgacaaccggaagaccgctagagcgattgccacacaggtcggcatcaacaaggtttttgctgaggtgttgccctcccataaagttgccaaagtccaagagctgcagaacaaggggaaaaaggttgctatggtcggggacggggtgaatgactccccggccctggcacaggccgacatgggtgtggcgatcggaaccggaacagatgttgccatcgaagcagctgacgttgtcctcatacgcaatgaccttcttgatgtggttgcctccatacatctgtccaagaggacagtcaggagaattcgcattaatctggtgctggcgctgatctataacttggtgggtattccaatagcggccggtgtctttatgccaatcggaattgtgcttcaaccatggatggggtccgccgcaatggccgcatcttcagtatctgtggtcctctcctcactgcagttgaagtgttacaaaaagcccgacctcgaaagatatgaggctcaggcccatggccatatgaaacctctcactgccagccaggttagcgttcatattgggatggacgacagatggcgggacagcccccgtgctaccccttgggatcaggtgagctacgtctcccaggtcagcctgtcatcactgacgtctgataagccctctcgacactccgccgctgccgatgacgatggtgacaaatggtctctacttctgaatgggagagatgaggagcagtacatttag

SEQ ID NO: 4824 - RNA, 1587 nt, synthetic construct
  misc_feature 1..1587: note = source = /note="Description of Artificial Sequence: Synthetic coding sequence"
  source 1..1587: mol_type = other RNA
atgaagaaaagtttcgcttttgacaacgtcggttatgaaggtgggttggatggcttgggaccgtccagccaagtggcgacatcaacagtcaggatcctgggtatgacatgccagagttgtgtgaaaagtatcgaggacagaatttctaacttgaaagggatcatatctatgaaagtctcacttgaacaaggttctgcgacggtgaagtacgtcccaagcgtggtgtgcctccagcaggtctgtcatcaaattggagatatgggctttgaggcctcaatcgccgaagggaaggcagcctcctggccatcaagaagcttaccggcccaggaagccgtggttaaactaagggtggaggggatgacatgtcaaagttgtgtgtcctccattgaaggaaaagtgcgcaaacttcagggagtggtgagagtgaaggtttcgttatccaatcaggaagctgtgatcacataccagccatacctcatccaaccagaggatctgcgggatcatgtcaatgacatggggttcgaggctgctattaaatccaaggtggcccccctcagtctgggtcctattgatatcgaacggctccagtctaccaaccctaagaggccactttcctccgcaaatcagaatttcaataatagcgaaacattgggtcaccagggaagtcacgtagtgaccctccagctgcggatagatggcatgcattgtaagtcttgcgttttgaatatagaagaaaatattggacagttgctgggagtccagagtatccaggtttccttggagaacaagaccgcccaagtgaaatacgatccaagctgcacctcccctgtggctttgcagagagctatcgaagctctaccccctgggaacttcaaagtctccttaccggatggggcagaagggtcaggtacagatcaccggtcgtcgtccagtcactcaccaggctccccaccccggaaccaagtacagggaacttgcagcacaacattgatcgctattgccggaatgacctgtgcctcgtgtgttcacagtatcgaaggaatgatctctcagttggagggggtgcagcagatcagcgtttctctggctgagggtactgccactgtgttgtacaatccgtccgtgatttcccccgaagaactgcgagccgcaatagaggatatgggcttcgaagcctccgtcgtttcagaaagctgttccaccaaccctctgggcaaccattccgccggcaattcaatggtgcaaaccacagacggtacgcccacatccgtgcaggaagttgctcctcatactggtaggcttcctgccaaccatgcccccgatatcctggccaaatcacctcagtccaccagggccgtcgctccccaaaagtgcttcttgcagattaaaggcatgacgtgcgcatcttgcgtcagtaatattgaacgaaacttacaaaaagaagcagcaccccgctgggttgtgctgttgcgctcaggtcttcagatatcggagacccaggtctcacagcatgggagagcccaccgccccggccataaacactgcctttgtcttttctcgggccatccaggcggctgctgtggttag

SEQ ID NO: 4825 - RNA, 1296 nt, synthetic construct
  misc_feature 1..1296: note = source = /note="Description of Artificial Sequence: Synthetic coding sequence"
  source 1..1296: mol_type = other RNA
atgcatgtgcgctctctgcgagccgctgcaccccacagctttgtggccctctgggcacctctattcctgctaagatcagcattggcggacttttccctggacaacgaggtccactcgtcatttattcatagacgcctgaggtcacaggagaggagagagatgcaacgagaaatcctcagcatcctaggccttcctcacagaccacggccccaccttcaaggtaagcataactcagcccccatgttcatgctcgatttgtacaacgctatggccgtggaagagggaggcgggccgggcggacaagggttctcctatccctacaaagccgtattctcgacacaaggcccaccccttgccagcctccaggattcccattttttaacagacgctgacatggtgatgagtttcgtgaatttagtcgagcacgacaaggagttttttcaccctcggtatcaccaccgcgagttccgttttgatctgagcaaaatacctgaaggtgaagccgtgactgctgctgaatttcggatatacaaggactacatacgagaaaggtttgataatgagacttttagaatcagcgtatatcaggtcttacaggaacatctgggtcgggaaagcgacctgttcttactagactctagaactctctgggcgtcagaagaagggtggctggttttcgacattaccgccacaagcaaccactgggtagtgaacccgcgtcataatctgggcctgcagctgtctgtggagactttagatggacaatctatcaaccccaagctcgccggcctgataggaaggcacggcccacagaacaagcagcccttcatggtggccttcttcaaagccactgaagtacacttccgttcaattcggtcaacaggctctaagcaaaggtcacaaaacagaagcaagactcccaagaaccaggaagccctgcgcatggctaatgtcgccgaaaatagtagttcagaccagcgccaagcctgtaaaaaacatgagctgtatgtgtcatttagggaccttggctggcaagattggataattgcacctgagggatatgctgcgtactattgtgagggcgaatgcgcatttcctcttaacagctatatgaacgcaaccaaccacgctatcgtccagacactggtccacttcattaatccagagactgtacccaagccctgttgcgctccgacccaactgaacgcaatcagtgttttatacttcgatgacagttccaatgttattctcaagaagtataggaacatggtcgtacgagcttgtggatgccattag

SEQ ID NO: 4826 - RNA, 1098 nt, synthetic construct
  misc_feature 1..1098: note = source = /note="Description of Artificial Sequence: Synthetic coding sequence"
  source 1..1098: mol_type = other RNA
atgcacgtgcgatcgctgagagccgctgcccctcattcctttgtggctctgtgggcaccactcttcctgctgcgaagtgctttggctgacttcagtctggataacgaggtgcatagctctttcattcatagaagactgcggtcacaagagcgcagagagatgcagcgagaaattctctcaatattgggcctacctcatcgcccccggccacatctgcagggcaaacataacagcgcccccatgttcatgttggatctgtacaacgctatggctgtggaggaaggtggaggtcccggcggtcaggggttctcttacccatacaaagcagtgtttagtacacagggcccccctctcgcttcactgcaagactcccatttcttgacagatgcagacatggtcatgagtttcgtcaatctcgtagaacacgacaaggaattcttccatccaagataccaccaccgcgagttcagattcgatttaagcaaaattcccgagggcgaggcggttacagcagctgagtttaggatctataaggactatatccgagaaagattcgacaacgagacatttagaatttcagtttatcaggtgctgcaggagcatctaggcagggagagcgacctgtttttgttggattcacgcacactttgggcgtccgaggagggctggctggtatttgacattacggcaacctcaaatcactgggtagttaacccccgacataatctcggtctgcagctgagtgttgaaactctcgatgagaattcatcgtctgaccagagacaggcctgtaaaaagcatgaactttacgtgtccttcagagatctcggatggcaagactggatcatcgccccagaggggtatgccgcttattactgtgagggagaatgcgcatttcctttgaactcatatatgaacgcaacaaaccacgctattgtccagacattggtccacttcatcaatcctgagaccgtacctaaaccttgttgtgctcccacccaactgaacgctatatccgtgctgtacttcgatgattcaagtaacgttatattgaaaaagtatcgcaatatggttgtgagagcctgcgggtgtcactag

SEQ ID NO: 4827 - RNA, 513 nt, synthetic construct
  misc_feature 1..513: note = source = /note="Description of Artificial Sequence: Synthetic coding sequence"
  source 1..513: mol_type = other RNA
atgaagactcagagagatgggcatagcctcggacgctggtccctggtgctcctcctgttaggattagtcatgccactcgctattatagcacaggtactctcctacaaagaggctgtgttgagagctattgatggaattaaccagagaagttctgacgctaacttgtataggctgctggatctggaccctcgcccaacaatggatggcgatccagacacccccaaacctgttagtttcaccgtcaaggaaactgtgtgtccccgaactacacagcaatctcccgaggattgtgacttcaagaaagacgggctcgtcaaaagatgcatgggcaccgtaaccctgaatcaggccagaggaagcttcgacatctcgtgtgataaagacaacaagcgtttcgctctactgggagacttttttaggaagtctaaagagaagataggaaaagaatttaaaagaatcgtgcagcgcatcaaagacttcctcagaaacctggtgccgcgaaccgaaagttag

SEQ ID NO: 4828 - RNA, 1692 nt, synthetic construct
  misc_feature 1..1692: note = source = /note="Description of Artificial Sequence: Synthetic coding sequence"
  source 1..1692: mol_type = other RNA
gcatgttgttgcggaggcggctgcacgtgttgcggatgtacatgcacaaccggatgctgtactacctgtacctgctgtgcttgtgcttgtacaaccggcaccaccactggggcgggtgcttgttgtactggagggtgtgcagctgggggtaccggatgtgggggagcaggctgttgttgcacatgttgcgccggagccgccggtactggttgtggagggacatgtgctgccgggtgtggaggctgtgccgggtgcgggggtgccggtgcttgcggtggctgtggcgcggggtgctgcgcaggcggcgcggcttgttgcacctgctgttgctgctgctgcggatgcggcacctgttgctgctgtgccggatgtaccacatgctgctgcgctgggtgtggtacaggaggatgtggaggatgtggcggagcagcctgttgctgctgttgcggcggcgctggagccgccgccggggccgcgaccgccgctgctggcgcctgtacgggcggagcgacagcatgtgccggcggaacctgctgtgccacaaccgcatgcggaacatgtgctaccacttgtaccgggtgcgccggggggtgctgtgcagctaccactacagctacaggcgcgggcggggcagccacttgttgtgctgcaggtgctacaggagccgccactacaacagggggagcgggatgtgcagggggtgccggcgccggcggctgttgtggtaccactactggaacgtgcactggatgtgcaggcacaggatgctgttgttgtgccggaggctgcacaggatgcacatgttgctgcgccgggtgtgggtgtactacctgctgttgcgccgcatgcgccggggcggggggggcttgttgtgccacgtgcactggcgccaccggagcaactacctgtgctaccgcaggtggatgtgcatgcgccgcagcgtgcgcgacaggtgccgctgccacgggcgcctgcacaacaaccggagctgccggaacgactacatgctgtactacctgtgctgctacagcggcagccgcggcttgcgccggtgcctgtgctgctactgccaccgggacaaccgcaacctgcgccggcgccacatgcgcagccgcttgtacatgctgtggcgcctgctgttgttgcgcagcctgcggcgctggcgctactacgtgctgtaccggggccgccggagctgcctgtactggttgcggagccggaggagccggcggaactggcgggggatgctgtacgtgcactacctgcgccggctgcggcgcaggatgtacaggtggggcatgcaccggctgtacctgctgttgtacgggcggcgctggctgcgcatgcggagcaggcactacttgcgccgggggggccgccggcggctgcacatgcgctgggggagcagctggagccggaggcgctggcgctggctgcgcagggtgtgccgcaggctgtggcggagccgctactgcgacttgtacatgcggggctacaggttgtgctacagctgctaccgggtgtgcaggtaccaccggaggcacaggaggcggcggatgctgtgcaacaggagcctgtggggggggggggtgttgttgtgggggagcagcttgtacctgcgcctgttgtgcaggatgcacaacagctgggtgtgcaggttgcggatgtacttgtggagggtgtacagggtag

SEQ ID NO: 4829 - RNA, 3198 nt, synthetic construct
  misc_feature 1..3198: note = source = /note="Description of Artificial Sequence: Synthetic coding sequence"
  source 1..3198: mol_type = other RNA
atgaagatcctcattctgggaattttcttattcctctgctcgacccccgcctgggccaaagaaaaacactattatattggaataatcgagacaacctgggattatgcctcagaccacggagagaaaaagctgataagcgttgatacagaacattcaaacatttacctgcagaatgggcccgataggattggccggctgtacaaaaaagcactgtatctgcagtatacagacgaaaccttccggactaccatcgagaagcctgtatggctcggctttctgggtcccataatcaaagccgaaactggagataaagtgtacgtacatctgaaaaacttggcttcacgtccttacacctttcactctcacggaataacctattataaagagcacgagggcgcaatatatccagacaacacgaccgacttccaacgtgctgacgataaggtatatccaggtgaacaatacacctacatgctgctggccacagaggaacaatcaccaggcgagggtgacggaaattgtgttactaggatctaccactcccatatcgatgctccaaaggatatcgcctctggtctgatcggccccttaatcatctgcaagaaggactcgctggataaggagaaagagaaacacatcgacagggagttcgttgtcatgttttcagtggtcgatgaaaactttagctggtacctcgaagataatatcaaaacctactgtagcgaaccagagaaggtggataaagacaacgaagactttcaggagtccaatcggatgtatagcgtgaatgggtatacctttggaagcctccccggactgagtatgtgcgctgaagatcgggtgaagtggtatctctttggaatgggcaacgaagtcgacgtacacgccgccttcttccatgggcaagctctaactaacaagaattacagaatcgatactatcaaccttttcccagcaaccctattcgatgcctacatggtggcacagaatccaggcgagtggatgctatcatgtcagaaccttaatcatctcaaagctgggctgcaggcctttttccaggtgcaggagtgcaacaaatcaagctctaaagataacatcagagggaagcacgttcggcattattatatcgcagctgaggaaatcatatggaattatgccccaagcggcatagacatttttacaaaggagaacttgaccgctcccggctcagattccgccgtgttcttcgaacaggggacaactaggatcgggggatcctataagaaactggtgtatcgagaatataccgatgcatcgttcacaaatagaaaggagagagggccagaagaggaacatctgggaatacttgggcccgtgatttgggccgaggtaggcgataccattagggtgaccttccacaacaagggagcgtaccctctttccatagaacctatcggagtgagatttaataaaaataacgagggcacctactattccccaaactataacccacaaagtcggagtgtgccaccttccgcctcccatgtggcccctacagaaaccttcacatatgagtggacggtgccaaaagaagtcggaccaactaacgcagatcccgtttgtctggccaaaatgtattactctgccgtagagcccaccaaggatatatttactggactgatcgggccgatgaagatctgtaagaaaggttcactacatgccaatggtcggcagaaagacgtggacaaggaattctacctgttcccaacagtttttgatgagaacgagagccttctgttagaggacaatatcaggatgtttaccacggctcccgatcaggtagacaaggaggacgaagactttcaggagtccaataaaatgcattcgatgaacggattcatgtacggcaaccagccagggctcactatgtgtaaaggagactccgtagtctggtatctgttttcagctggaaacgaagccgacgtgcatgggatatactttagtggcaacacttatttatggcgcggagagcggagggacactgcgaacctatttccccagacatccctgaccctccatatgtggcctgacacagaagggactttcaacgtggagtgcctgacaacagatcactatactggcggaatgaaacagaagtacaccgtaaaccagtgtcgacgacagtccgaagattctacattctacttgggggagaggacttactacatcgctgcagtcgaagtagaatgggattactcgccccagcgagaatgggagaaggagctacaccacctacaagaacagaacgtttccaatgccttcctagacaaaggggaattctacattggatcaaagtataagaaggtggtgtaccggcagtacaccgactccacattccgggtgcctgtggagcgaaaagcagaggaggaacacctgggcattttgggacctcagcttcacgcagacgtgggagacaaagtgaaaattatttttaaaaatatggcgacaagaccctactccattcatgcacacggagtccagaccgagtctagcacagttacgcctacacttccaggcgagaccctgacgtacgtgtggaagatccccgagagaagcggggccggaaccgaagattctgcttgcatcccctgggcttattactccactgtcgaccaggtgaaagatctatactccggactcatcggcccattaatagtctgccggagaccctatcttaaagtgttcaatccccgtcgcaagcttgaattcgcactgctgttcttggtgtttgatgagaatgagagctggtacctggacgataatattaaaacctactctgaccacccagagaaagtgaacaaagacgatgaggaattcatagaatccaataaaatgcacgccataaatggcaggatgttcggcaatcttcagggactgactatgcatgtgggcgacgaagttaactggtatctgatgggcatgggcaatgagattgatttgcacacggtccactttcatggccattcgttccagtacaaacaccggggcgtatatagcagcgatgtgtttgacatatttcccgggacctatcagactctcgaaatgttccctcgcacgcctggcatatggctacttcactgccatgtcactgaccacattcacgctggaatggaaaccacatacacagttctccagaacgaggatacgaaatccggctag

SEQ ID NO: 4830 - RNA, 1869 nt, synthetic construct
  misc_feature 1..1869: note = source = /note="Description of Artificial Sequence: Synthetic coding sequence"
  source 1..1869: mol_type = other RNA
atggctcatgtgagggggttgcagctccctggttgcctagccctcgcagccttgtgttccttagtccattcccagcatgtattcttggcccctcagcaggcgcgctccttgttacagcgcgtgaggcgggcaaatactttcctcgaggaggtgcgcaagggtaacttggagagagaatgtgtagaagagacctgttcctacgaagaagcatttgaggcactggaaagctcgacagcaacagacgtattttgggccaaatacaccgcctgcgagacagcacgcaccccaagggataagctggccgcttgcttagaaggtaattgtgctgaggggctcggaactaattatcgtgggcacgtgaatattactcgctccggaatcgaatgtcaactgtggcgttctcgttacccgcataaacctgagattaactcaactacacatcccggcgccgacctgcaagaaaatttctgcagaaaccctgattcctccacaaccgggccctggtgttatactactgatccaactgtgagacggcaggaatgcagcatccccgtgtgcggacaagatcaggtaacggttgccatgaccccaaggagtgaaggatcctctgtgaacctcagccctcccctggagcagtgcgtacctgatcgcggccaacagtaccaaggcagactagcagtgactacccatggactcccctgtctggcatgggcaagcgcccaggccaaagccctcagcaagcatcaagattttaatagtgcagtacagctggtggagaacttctgtaggaaccccgatggagacgaagagggcgtctggtgttacgttgccgggaagcctggggattttgggtactgcgatctgaattactgcgaggaggccgtggaagaagaaaccggcgatggtttggacgaggactcagatagggctatcgagggaaggaccgccacatccgaataccagacatttttcaacccccgtactttcggaagcggcgaagctgactgcggcctgaggcccctctttgaaaaaaagagcttagaggataagaccgaaagagaattactcgaatcttatatagacgggcgcatcgtcgaagggagcgacgccgaaatcgggatgtccccctggcaggtaatgctattccgcaagagtccgcaggaactgctgtgcggggccagtcttatcagcgatcggtgggttctgaccgccgcacactgtctgctgtacccaccttgggataagaacttcactgagaatgacctcctcgtaaggattggcaaacattcccggacaagatatgaacggaatatagagaaaatatccatgctggaaaagatctacatacacccaaggtataactggagagaaaatctggatcgcgacattgctcttatgaaactgaaaaaacctgtagctttctccgactatattcacccagtatgccttcctgaccgcgagactgccgcctccttgttgcaggcgggctataaaggtagggttactggatggggcaatctgaaggaaacatggaccgcgaacgtgggaaagggtcagccctcggtcctgcaggttgttaacctgccaattgtggagcggccagtgtgtaaagattccacgaggattagaataactgacaacatgttttgcgccggttataaacctgacgaaggcaaaaggggtgatgcgtgcgaaggcgatagcgggggtccattcgtgatgaagtccccgttcaataataggtggtaccagatgggcatagttagttggggagagggctgcgacagagacggaaaatatggattttacacacatgtgttcagactcaagaagtggatacagaaggtgatcgatcagttcggtgagtag

SEQ ID NO: 4831 - RNA, 195 nt, synthetic construct
  misc_feature 1..195: note = source = /note="Description of Artificial Sequence: Synthetic coding sequence"
  source 1..195: mol_type = other RNA
ctacagggcgaatttcttcctcagcctcggcaacagcaccacggcacactggtcctacattacaggcctcatcgggaagaggcaggcatgcagcacccctgcttgtggccaggaagtagccactgcagcgatgattctactctccgaaggcttcagtgcgaatccgtgacatctatcggcgcagtctgtccatag

SEQ ID NO: 4832 - RNA, 1752 nt, synthetic construct
  misc_feature 1..1752: note = source = /note="Description of Artificial Sequence: Synthetic coding sequence"
  source 1..1752: mol_type = other RNA
atggcccatgttaggggcctgcaattgcccggctgcctggccctcgccgccctgtgttcactcgtccatagccagcatgtgttcctggccccccaacaagcacggtctttgttgcaacgagttcgacgtgctaacaccttcctggaagaagtgcggaagggcaacctggaacgagaatgtgtcgaagaaacatgcagttatgaagaggcttttgaggccctcgagagctccaccgctaccgacgtcttttgggcgaaatacacagcctgcgagacagcccggaccccgcgcgataaactcgcggcgtgcctagaagggaattgcgctgagggactgggcacgaactaccgaggacacgtgaacatcaccagaagcggcatcgagtgccaactgtggagaagccgttatccccataaaccggaaataaacagcacgacccatccaggtgcagacctgcaggagaacttctgtcgcaaccctgacagttccacaaccggaccctggtgttacactaccgaccccactgtgagacggcaagaatgtagcatacccgtttgtggccaggaccaggttacagtggccatgacaccacgctcggaaggcagctccgtaaacctgagcccccccttggaacagtgtgtccccgatagaggccagcagtatcagggcaggctcgccgtgaccacccacggtctcccttgcttggcatgggcctctgctcaagcaaaggcactctcaaagcaccaagactttaatagcgcagtgcagctggttgaaaatttttgcaggaaccccgacggcgacgaggaaggggtgtggtgttacgttgccggcaaacccggagatttcggctactgcgatctaaactattgtgaagaggctgtggaagaagagactggcgatggcctggacgaagattccgatcgtgccatagaaggaaggaccgctacttctgagtaccaaactttctttaatccccggacgttcggctctggcgaggccgactgcggcctacgccccctgtttgagaagaagtctctcgaagacaaaaccgaaagggaactgttggagtcctacatcgacgggagaattgttgaagggtctgacgctgaaataggcatgtcgccatggcaggtgatgcttttccggaagagtcctcaagagctgttatgtggcgcatccctcatcagtgacagatgggtgctgaccgcggcacactgtctattgtatcccccgtgggacaagaacttcacagagaacgacttactggtgcggattggaaagcattctagaactcgatacgaacggaacatagaaaagatcagtatgctagaaaaaatttatatccacccttcactgctgcaggctggatacaaaggaagggtgactggatggggcaacttgaaggaaacctggacggccaacgtcggaaaaggacagcccagtgttcttcaagtcgttaatctccctatcgtggagagacccgtgtgcaaagatagcactcgtattaggatcaccgacaacatgttctgcgccgggtataagcctgatgaagggaagcgcggcgatgcatgcgaaggtgacagtgggggcccattcgtcatgaagtctccctttaacaaccggtggtaccagatgggaatagtatcatggggtgagggatgtgatcgggacggcaagtatggattttacacacacgtgtttcgactaaagaagtggatccaaaaagtaattgatcagttcggcgagtag

SEQ ID NO: 4833 - RNA, 1272 nt, synthetic construct
  misc_feature 1..1272: note = source = /note="Description of Artificial Sequence: Synthetic coding sequence"
  source 1..1272: mol_type = other RNA
atgcaaagggtcaacatgataatggcggagtctccgggattaataaccatttgcctgctcggctatctgttaagcgcggaatgcaccgtctttctggaccatgagaacgcaaacaagatcctgaacagaccaaaaaggtataatagtggtaaactggaggaattcgtgcaaggcaaccttgaacgcgagtgtatggaagagaagtgttctttcgaagaagcccgcgaagtgtttgagaataccgagcgcaccacagagttttggaaacagtacgtggatgtcacttgcaatatcaagaacggccggtgcgaacaattctgtaaaaactcggccgacaacaaagtcgtgtgtagttgcactgaaggttatagattagcagagaaccagaaaagctgtgaacctgctgtcccctttccatgcggcagagtatctgtcagtcagacgtcaaagctgactagagccgagaccgtttttcccgatgtggattatgtgaattcaacagaggccgaaaccattctggacaacataacgcagtctacccaaagcttcaatgacttcactagggttgttggcggagaagacgcaaaacccggtcagtttccctggcaagtggtgttaaatggcaaggtcgatgccttttgcggcgggtccattgttaatgaaaagtggattgtgacagcagcacactgtgtggagaccggtgtcaaaataacggtggttgcgggggagcataatatcgaagagaccgagcatacggaacagaagcgcaatgtaattagaatcatacctcaccacaactataacgccgctatcaataaatataatcacgacatagccttactggagttggatgaaccccttgtcctgaatagttacgtcaccccaatatgcattgcagacaaagagtatacaaacatcttcctgaagttcggctcaggctatgtgagcgggtggggtcgggttttccataaaggtaggtcggcgctcgtgctgcaatatctacgagtccctcttgttgatcgcgcaacatgtctaaggtctacaaagttcactatttataataatatgttttgtgctggattccacgagggcgggcgagacagctgtcagggagattccggcggcccacatgttactgaggtggaagggacttcctttctcaccgggataattagctggggggaggagtgtgccatgaagggcaagtatgggatctacacaaaagtttcccgatacgtcaattggatcaaagagaagactaaactgacttag

SEQ ID NO: 4834 - RNA, 1335 nt, synthetic construct
  misc_feature 1..1335: note = source = /note="Description of Artificial Sequence: Synthetic coding sequence"
  source 1..1335: mol_type = other RNA
atggtctctcaggcccttagacttctgtgtctgctgctcggacttcagggctgccttgcagccgtattcgttacccaggaagaagcacacggcgtactccatagaagacggagggccaacgcatttctcgaagagctgcgaccaggatctctggagcgtgaatgtaaggaggagcagtgctcctttgaggaggctcgggagattttcaaggacgctgagcggactaagttattctggatatcctattccgacggggatcagtgtgcaagttcaccctgtcagaacggagggtcctgcaaagaccagcttcaaagttacatttgcttctgtctgcctgctttcgagggtcgcaactgtgaaacccacaaggacgatcagctgatttgcgtaaacgaaaacggtgggtgtgaacagtattgttccgaccatactgggactaaaagaagctgtcggtgccacgaagggtactcactgctggccgatggtgtctcttgcacacctaccgtggaatacccatgtgggaagattccaatcttggagaagagaaatgcctctaaaccccaggggcgaatcgtgggcggtaaagtatgcccgaagggtgagtgtccatggcaagtactgttgctcgtaaacggggctcaactttgtggcggcaccctcattaatactatatgggtagtttctgccgctcactgttttgataagattaagaactggaggaacctgattgccgtcctgggtgaacatgacctctcagaacatgacggggatgagcagagtcgccgtgtggcccaagtgattattccgagcacgtacgtccctggcacaaccaaccacgatatagccctcctcaggctgcaccagcccgttgtgcttaccgatcacgtcgtccccctttgtcttccagaaaggaccttttcagaacggacgctggctttcgtgaggttcagtcttgtcagtggctgggggcaactcctggatcgaggtgccactgccctggaactgatggtcctaaacgtgcctagactaatgactcaggattgtctacagcaatcccgcaaggttggcgattctccaaatataacagaatatatgttctgtgcaggctatagtgacggatctaaagacagctgcaaaggcgactcaggaggaccacacgcaacccactaccgaggtacttggtatttgactgggatcgttagctggggccaggggtgtgctacagtgggccatttcggtgtctacacgcgggtgtcccagtatatcgaatggctgcagaaacttatgcgctcggagcctcgcccaggtgtgctgttgcgcgctcccttcccctag

SEQ ID NO: 4835 - RNA, 1401 nt, synthetic construct
  misc_feature 1..1401: note = source = /note="Description of Artificial Sequence: Synthetic coding sequence"
  source 1..1401: mol_type = other RNA
atggtgtcgcaggctttgagactactatgcctcttactgggcctgcagggctgccttgccgccggcggagtagccaaggcaagcgggggagagacgagagacatgccctggaagccaggcccacatagagtgttcgtgactcaggaagaggcccatggcgtgctacaccgcaggagacgtgctaatgcctttctggaagagctcagaccggggagcctggagcgagagtgcaaggaggaacagtgcagttttgaagaagcaagggagatctttaaagacgcagaacggaccaagcttttttggatatcgtacagcgatggagaccagtgcgctagctctccctgccaaaacggaggatcttgcaaggaccagcttcagtcctatatatgtttttgtttgcctgctttcgagggacgcaactgcgagacccataaggatgatcagttgatctgtgttaatgagaatggtggatgcgaacagtactgtagcgatcacacggggaccaaacggtcgtgccggtgccatgaaggctattctctgttagcagacggagtttcatgcactcccaccgtggagtacccttgcggaaagatccccattttggagaagcggaatgcctccaaaccacagggaaggatcgtgggtggaaaagtgtgtccaaaaggtgaatgcccttggcaggttctcttactggtaaatggcgcacagctgtgtggaggcaccttgatcaacacgatttgggttgtctccgccgcccactgtttcgacaaaatcaagaactggagaaaccttattgcagtgctaggagaacatgacctgtctgagcacgatggagacgaacagtcacgcagggtcgcccaagtgatcatcccaagtacttatgtccccgggactaccaatcacgacatcgccctgctaaggctacaccagcccgtggtgctgactgatcacgtcgtgcctctctgtcttcccgagcggacatttagtgagaggaccctggcgttcgtgcgcttttccttggtgagtgggtggggccagttgttggataggggggcgactgcacttgaactaatggtattaaatgtgcctcgactcatgacgcaggactgcctccaacagtctagaaaggttggcgactcaccgaacatcaccgaatacatgttctgcgctggctactctgatggatccaaagattcttgcaagggagatagcggcgggcctcacgcaacacattacagaggaacatggtacctaactggaatcgtctcttggggacagggctgtgctaccgttgggcacttcggcgtgtacaccagggtgtctcaatacattgagtggttacaaaagctgatgagatcagagcctagacctggcgtgttgttaagggcccctttcccttag

SEQ ID NO: 4836 - RNA, 1194 nt, synthetic construct
  misc_feature 1..1194: note = source = /note="Description of Artificial Sequence: Synthetic coding sequence"
  source 1..1194: mol_type = other RNA
atgggaaacgtgaacaggcagggtcagcattgtcgcgatttcatcatggtgtcacaggcactgcgcctgctgtgtctgttattgggactacagggctgcttagctgctgacggagatcaatgcgcttcctctccatgtcagaacggcggctcttgtaaagatcagctccagagttacatatgcttttgcctgcccgctttcgaaggccgtaactgcgaaacgcacaaggacgatcagctcatttgcgtcaatgagaatggggggtgcgagcaatattgtagcgaccacacaggaacgaaaagatcgtgcagatgccacgaaggctattcactgcttgctgatggcgtgtcctgcacccccacagtcgagtacccatgcgggaagatccccatattagaaaagagaaacgcttctaagccacaggggaggatagtgggcggtaaagtgtgtcccaaaggagagtgcccatggcaggtactgctgttggtgaacggggcccagctctgcgggggtactctgatcaacacaatttgggtggtgagtgcagcgcactgctttgataagataaagaattggagaaacctcatcgccgtgctgggcgagcatgatctcagtgaacacgatggtgacgagcagtccagaagagtcgcccaagttatcatacccagtacctacgtcccaggcacgaccaatcacgatatagcccttctcagactgcatcagccagttgtactcactgaccacgtagtcccactatgcctccctgagaggactttttcagagcgaacgctggcttttgttaggttctctctcgtctcagggtggggccagcttctggacagaggcgcgacggctcttgagctcatggtgctgaatgttccccgtcttatgacacaggattgcctgcaacagagtcggaaggtaggtgatagtccgaatattaccgagtacatgttctgtgctggctactcggatgggtcaaaggacagctgcaaaggggactccggcggcccccacgcgacccactaccgcgggacgtggtacctcaccgggatagtgtcatgggggcagggatgcgctactgtcggtcacttcggcgtttatacacgtgtgagtcagtatattgagtggcttcaaaaactcatgcgatcagaaccacgacccggggtcctgctgagagcaccttttccatag

SEQ ID NO: 4837 - RNA, 651 nt, synthetic construct
  misc_feature 1..651: note = source = /note="Description of Artificial Sequence: Synthetic coding sequence"
  source 1..651: mol_type = other RNA
atgcggatccaggatcccggtaaagttttttttggtaatgtagattcaagcggcatcaaacacaatatctttaaccctccaatcatcgccagatatattcgccttcaccccactcactattcaattagatcgaccctccgcatggaactcatgggatgtgaccttaactcctgttcgatgcctctcggaatggagtccaaagcgatctcggatgcccagattactgccagctcctactttaccaacatgtttgctacatggtcgccgagtaaggccagactccacctgcagggccgcagtaacgcctggcgacctcaagtcaacaaccccaaagaatggctccaggtagacttccagaaaaccatgaaagtgactggtgtgacgacacagggagtaaagtccttacttacaagtatgtatgtgaaggagttcctgatcagcagtagtcaggatggacaccagtggacacttttctttcaaaacggaaaggtgaaagtatttcaagggaaccaagacagctttactcctgttgtgaactctctggacccaccacttttaacgcgataccttagaattcatcctcagtcctgggtccaccaaatcgcccttagaatggaagtgttaggttgtgaagcacaagatctttactag

SEQ ID NO: 4838 - RNA, 7056 nt, synthetic construct
  misc_feature 1..7056: note = source = /note="Description of Artificial Sequence: Synthetic coding sequence"
  source 1..7056: mol_type = other RNA
atgcagatcgaactatctacatgcttcttcctctgcctgctgcgcttttgtttctcggctacaagacggtactatctgggtgcggttgagttgagctgggattatatgcagtctgaccttggagagctccccgtggatgcacggttcccgccccgcgtacctaaatcctttccattcaatacatccgtcgtttacaaaaaaacgctcttcgttgagttcactgaccatctgttcaatatcgcaaagccaaggcctccgtggatgggcctcttaggaccaaccattcaagccgaagtgtatgacacagtcgtgatcaccttgaaaaatatggccagtcatcctgtcagcctgcatgccgtgggcgtctcttattggaaggcgtcagaaggagctgaatacgatgatcagacgtcccaaagggagaaagaagatgataaagtctttcctggaggttctcatacctacgtgtggcaggtcctcaaagaaaatggcccgatggcctctgaccccttatgcctgacctactcttatctctcgcacgtggacctggtcaaagatctaaactctggccttatcggtgctctgctcgtttgtcgtgaaggctcgctggccaaggaaaagacccagacccttcataaatttatcttgctgtttgccgtgttcgacgagggcaagtcttggcactcagagactaaaaattcgctcatgcaggacagggacgctgctagcgccagggcttggcccaaaatgcacacagtgaacggatacgtgaatcgctcattgccaggactaattggttgccaccgtaaaagcgtatattggcacgttattggtatgggcacaacacccgaggtccacagcatttttctcgagggacatacctttctcgtccgaaaccacagacaggcatccctggagataagcccaattacttttctcaccgcccagacactgctcatggacttgggacagtttttgctcttctgccacatcagttcccaccagcatgatgggatggaggcctacgtcaaagtagactcttgtccggaggaaccacagctgcggatgaagaacaatgaggaagcggaagattatgatgacgacctgaccgacagcgaaatggacgtcgtccgcttcgacgatgataactccccaagctttattcagattagatcagttgcgaagaaacatccaaaaacctgggtccattacatcgccgctgaggaagaggattgggactatgctcccttagtgctggcacctgacgaccggagctacaaatcacagtatttgaataatggaccacagaggatcggccgaaagtacaaaaaggtgagatttatggcatataccgatgagacgttcaagacaagggaagctatccagcatgaatcggggatcttggggcccctgttatacggggaggtgggcgacactctactgatcatctttaaaaaccaggcctcaaggccatacaatatctacccacatggcatcactgacgtccgacccctttattcccggcggttaccaaagggagtaaagcacttgaaagactttccaatcctgccgggtgagattttcaagtacaaatggaccgtcaccgtagaggatggccccacgaagagtgacccacgatgtttgaccaggtattactcatcttttgtcaatatggagcgggaccttgcatctgggcttataggacccctgttaatctgttacaaggaatccgtggaccagcgaggtaaccagatcatgtcagacaagcgcaatgtcatattattcagtgtctttgatgaaaataggagctggtatctcactgagaacattcagaggtttctacctaatccggcgggggtgcagctggaggacccagagttccaggctagtaacatcatgcacagtatcaacggatatgtgtttgatagtctgcaactgtcagtttgtctccatgaagtagcctactggtacatcctgtcaattggtgcgcagaccgatttcctttcagtcttttttagcgggtacacgtttaagcataaaatggtgtatgaggacaccctaaccctgttccccttttcgggcgaaacggtcttcatgtcaatggaaaatcctggactgtggatccttggttgtcataactcggattttaggaatagggggatgacggcactgctgaaggttagctcctgcgataagaatacgggagattactacgaggattcgtacgaggacatcagtgcttatctgttgagtaagaacaatgccatcgaaccaagatctttcagccaaaacagccggcacccaagcacacgccagaagcaattcaacgccaccaccattcccgagaacgacatcgaaaaaaccgatccctggtttgcccacagaactcccatgcctaaaattcagaatgttagcagctcagacttactgatgctcctgagacagtctcccacgccgcacggtctttccctgtcagacctgcaggaagctaaatacgagaccttttctgatgatccctcccccggtgcaatcgactctaataatagcctgagtgagatgacccattttcgcccgcaactgcatcactcaggcgacatggttttcacacccgaaagcggactgcagctcagactcaacgagaaactcggcaccaccgcagcaacggaactgaaaaaactggactttaaagtcagtagcacgtccaataatctgatcagtacgataccctccgataatcttgcggcaggcaccgataatacatccagtctaggccccccgtccatgcccgtccactacgacagccagctggacactaccttgttcggcaagaagagtagcccacttaccgaatcgggggggcctcttagtttatccgaggaaaataatgactctaaactcctagagtctggcttaatgaacagccaagaaagtagttgggggaaaaatgtaagtagcacagagtctggccgcctgtttaaaggaaaacgggctcacggccctgcccttcttacaaaagacaatgctctttttaaggtgtcgatcagcttgctgaagaccaataagactagcaacaacagcgcaaccaaccggaaaactcacatcgacggccccagtctgttaattgagaacagtccctctgtttggcagaatatactggaatccgataccgaatttaaaaaagtaacacctctcattcacgaccgaatgttgatggacaagaatgccactgctctgcggcttaaccacatgagtaacaagacaaccagcagtaagaacatggaaatggtgcagcagaaaaaggaaggccctattccaccagatgcccagaatcctgatatgtctttttttaaaatgctgtttctgcccgaatcggcacggtggatccagcggactcacggaaagaacagtcttaactctggacaaggaccaagcccaaaacagttagtctccctgggccctgagaagtcagtcgaaggccaaaacttcttatctgaaaagaacaaagtcgtggtgggtaaaggagaattcaccaaggacgttggattgaaagaaatggttttcccctcctctcgcaacctcttcctcaccaacctcgacaacctgcacgagaacaatacgcacaaccaagagaaaaaaattcaagaggagatcgagaaaaaagagaccctgattcaggagaacgtcgtgctcccccagatacataccgtaactgggacaaaaaatttcatgaagaacttatttctactgagcacacggcagaatgtcgaaggtagctacgatggcgcctatgctcccgttttacaggatttccggtcgctgaatgactcgaccaatagaaccaagaaacacaccgcccatttttctaaaaaaggggaggaggaaaatctggagggacttggcaaccagactaaacagatcgtggaaaaatacgcctgtaccacccggatatctccaaatacctcccagcagaattttgtgacccagaggtccaaaagagccctcaagcaattcagactcccgctcgaagaaacggaactggagaagcggatcattgtcgacgatacttctactcagtggagcaaaaacatgaagcacctgactcctagcactctgacccagatagattataatgagaaggagaaaggcgcgatcacccaatctcctcttagcgactgcctcacccgctctcactcaatccctcaggccaacaggagtcccctgcccattgccaaggtaagtagctttccaagcattcggcccatctatctgactcgcgtgctatttcaggataattcctctcacctgcccgcagcctcctacaggaaaaaagactcaggagtgcaagagtccagccacttcctgcagggcgccaagaaaaataacctgtcactggccatcctcaccctcgaaatgactggtgaccaaagagaggtcggttccctcggtacatccgccaccaactctgttacatacaagaaggttgaaaatactgtgctccccaaaccggatctgcctaaaacttcaggcaaagtggaactgttgccaaaggtgcacatttaccagaaagacctgtttcctactgagacaagcaatggcagcccgggccacctcgacctcgtagaagggagtttgcttcaggggactgagggtgccatcaagtggaacgaggcaaacaggcctgggaaagtccctttcctgcgggtcgccaccgaatcctcagcaaaaactccgtccaaactcctcgatccactagcatgggacaaccactacgggacacagataccaaaggaagagtggaagagtcaggaaaagagccctgaaaaaactgcgttcaagaagaaggatacgattctgagtctgaacgcctgcgagtctaaccatgctattgcagccatcaacgaggggcaaaacaagccagaaattgaggtgacgtgggcaaaacagggccgtacagagaggctgtgttcccagaatcctcccgttttaaagagacatcagcgcgaaattacccggacaaccttgcagtccgaccaggaagaaatcgattacgacgatacaattagcgtagagatgaagaaggaggacttcgatatttacgatgaggacgaaaaccaaagtcctaggagcttccagaaaaagaccaggcattattttattgccgctgtagaaagactttgggactatggcatgagcagcagtccacacgttctgcggaatcgggcacagtcaggttccgtgcctcaatttaaaaaagtcgtgttccaggagttcaccgacggatcttttacccagcccctctaccggggggaacttaatgagcatctcggtttattaggcccatatatccgggcggaggttgaggacaacattatggtcacattcaggaaccaggcgtcaagaccatattctttttatagcagtctgataagttatgaagaagaccaacgtcagggggcggaaccacggaaaaatttcgttaaaccaaatgagaccaagacatacttttggaaggtgcagcaccacatggcccctaccaaagatgagttcgattgcaaggcctgggcttatttttccgatgttgatctggagaaagacgttcattctgggttaatcggtccactgctagtgtgccacacaaacaccctaaaccctgctcatggccggcaagtcaccgtgcaggagttcgccctattctttaccatttttgatgagactaagtcctggtattttaccgaaaatatggagcgtaactgtagagccccatgcaacatccaaatggaggatccaactttcaaagagaattataggttccatgctatcaacggctatatcatggacacgctgccaggcctcgtgatggcccaggaccaaaggatcagatggtacttgctgtcaatgggctcgaacgaaaacatccacagcatacacttttctggccacgtctttactgtgaggaaaaaggaggagtataaaatggccttgtataatctgtaccccggcgtgtttgaaacagtggagatgctccccagcaaggcagggatctggcgggtcgagtgtctcataggcgagcatctgcacgctggcatgtccacgctgtttctggtgtactcaaacaagtgtcagacgccactcgggatggcctcagggcacattagggatttccagatcactgcatcaggccagtacggccagtgggcccccaagttggctcggttacactatagcggttcaatcaacgcttggagcacaaaagagccattctcttggataaaggtggacctgttggcccccatgatcatccacgggattaagacccaaggggcacgccagaagttctcttccctctatatcagtcagtttatcatcatgtacagcctcgacggcaagaagtggcagacatatcgaggcaattcaacgggtacactcatggtgtttttcggtaacgtcgactcaagcggaatcaagcataatatttttaacccacccatcatcgcccgctacatccgcttgcacccgacccactactccatccgatccacactccgcatggaacttatgggctgtgacctgaattcttgtagtatgccccttggcatggagtccaaagcaattagcgacgctcagataaccgccagctcttattttacaaacatgttcgccacatggagcccgtccaaggctaggctccaccttcagggtagatccaacgcatggagaccgcaggtcaacaacccaaaagagtggctccaggtggacttccaaaagacgatgaaagtgactggtgttactacgcagggggtcaaatcgctactgacatctatgtatgtcaaagaatttctgatctcttcatctcaagatggacaccagtggaccttattttttcagaatggcaaagtaaaagtgttccagggcaatcaggacagctttacgccggtcgttaactcattggatccaccgctccttaccaggtatctcaggattcacccacagtcttgggttcaccagatcgcgttgagaatggaagtgttgggttgcgaggctcaggatctttattag

SEQ ID NO: 4839 - RNA, 999 nt, synthetic construct
  misc_feature 1..999: note = source = /note="Description of Artificial Sequence: Synthetic coding sequence"
  source 1..999: mol_type = other RNA
atggggagacctctgcatttggtgctgctctcagcttctttagccggactccttctgcttggtgaaagcctttttatcaggcgcgagcaggcaaataatatcctagccagagttaccagagccaactctttcttggaggaaatgaaaaaagggcacttagaacgcgagtgcatggaggagacctgtagttatgaagaggccagggaagttttcgaagacagcgataagactaacgagttttggaacaagtacaaagatggagaccagtgcgaaacgagtccctgtcagaaccaaggaaagtgtaaggacggactcggcgagtacacctgtacatgtcttgaggggtttgaaggaaaaaattgtgaacttttcacgcggaagctttgtagcctggacaacggtgattgcgatcagttctgtcatgaggagcagaattcagttgtctgcagctgcgcaagaggttataccttagccgacaatggaaaagcgtgcatcccaaccggaccctatccttgcggcaagcaaacattggagcgcaggaaaagatcggttgcccaggctacttcttcctctggagaggcaccagattctataacttggaagccttacgatgctgcagacctcgatcccaccgaaaatccatttgatctgctggactttaatcaaacccaacccgagcggggggataacaacttgactcggattgtgggtgggcaggagtgtaaagacggcgaatgcccatggcaggcactgctcatcaacgaagaaaacgaagggttttgtggcggtactattctctctgagttctatatcctcacagcagctcactgtctataccaggccaaaaggttcaaaggtacggggactcgtagccgccggagggccgttcgacggtgtacacgatggcgatggagtagctctacgacaggcagccaaagacgcccaatgaccagcacttctccttgctctggttctcggccccctagcccttcggcctag

SEQ ID NO: 4840 - RNA, 1467 nt, synthetic construct
  misc_feature 1..1467: note = source = /note="Description of Artificial Sequence: Synthetic coding sequence"
  source 1..1467: mol_type = other RNA
atgggaagacccctgcatctcgtcttacttagtgcaagtcttgccggtcttctcctgctgggcgaaagtctgttcattcgaagggaacaggccaacaatattctggcacgcgtgactcgtgccaattcttttctggaggaaatgaaaaagggccacctagaacgtgaatgcatggaagaaacatgctcttatgaggaggcgcgggaagtgtttgaggatagtgacaagaccaacgagttctggaataaatacaaggatggcgatcagtgtgaaacgtccccctgtcagaaccagggcaaatgtaaggatggacttggggagtatacttgtacatgtctcgagggctttgaaggcaagaactgcgagctgttcactcggaagctttgtagcttggacaatggcgactgtgaccagttctgtcacgaggagcagaactcggtggtgtgttcttgtgcgagaggatacaccctggctgacaatggtaaggcttgtatacctaccggcccatacccctgcgggaaacagaccttagagaggcgcaagagatctgtggcacaggccaccagtagctctggcgaggcgcctgattctatcacttggaaaccctacgacgctgctgatcttgacccaactgagaatcccttcgacttactcgattttaatcagacacagccggaacgaggagataataatctaacccgcatcgtgggaggtcaggaatgcaaagacggcgaatgcccctggcaagccttgttgatcaatgaggaaaatgaaggtttctgtgggggaacgatcttgagtgagttctacattcttactgccgctcattgtctgtaccaggccaaacgttttaaagtgcgtgtcggggaccgcaacaccgaacaagaagagggcggagaagccgtccacgaggtagaagtggtgattaagcataataggtttaccaaggaaacctacgatttcgatattgctgtcctgaggctcaagacacctataacctttcgcatgaacgttgctcctgcatgtctgcctgagagagattgggcagaatcgacacttatgacacagaaaacaggaattgttagtgggttcggacgcacgcacgaaaaagggagacagtctacaagactgaagatgctagaagtgccgtatgttgacaggaatagttgtaagctgagctcgtcttttatcataacacagaacatgttctgcgctggctacgatacgaaacaagaggatgcttgtcagggtgactcagggggcccgcacgtgactagatttaaagatacatactttgtgactgggatagtgtcttggggagaggggtgtgcccgtaaaggcaagtatgggatctatacaaaagtcactgcgtttttgaaatggatagaccggtctatgaagactaggggacttcccaaggccaagtctcacgctcctgaagtgatcacttcctctcctcttaagtag

SEQ ID NO: 4841 - RNA, 1005 nt, synthetic construct
  misc_feature 1..1005: note = source = /note="Description of Artificial Sequence: Synthetic coding sequence"
  source 1..1005: mol_type = other RNA
atgggccgccctttacatctagtgttgctcagcgccagcctggccgggctcctgttgctgggagagagtctcttcatccgaagagagcaggcgaacaatatcctcgctagggttaccagagctaacagcttccttgaggagatgaaaaaaggccacctagagagagagtgcatggaagaaacttgtagctacgaagaagctagagaggtatttgaggactctgataagactaatgaattctggaataaatacaaagatggggatcagtgcgagacctctccatgtcaaaaccaagggaaatgtaaagatgggctgggcgagtacacttgcacctgtctggagggcttcgaagggaagaattgtgaactctttacccggaagctgtgtagcctcgacaacggagattgcgaccagttttgtcatgaggaacagaatagcgtggtttgtagttgcgccagaggatatactctcgctgacaatgggaaagcgtgcattccaaccgggccatatccctgtggaaagcaaacgttagaacggcgaaagagatctgttgcgcaggccacctcatcgtcgggcgaagcaccagactccataacctggaaaccatacgacgcagccgatctagaccccactgagaacccattcgatctgctagattttaatcagacacaacccgagagaggcgataacaatctcacccgtatcgtgggagggcaggagtgcaaagatggcgagtgtccctggcaagctctgctgataaatgaagagaacgaggggttctgcggcgggaccattctgtccgagttctacattctgaccgcagctcattgtctgtatcaggcgaagaggttcaaggttcgcggcactggtactagaagccgacgacgggccgtcaggagatgtacccggtggaggtggtccagctccaccaccggaagccaaaggcggcctatgacttcgacatccccctgtagcggctctcgtccaccaagtccctcagcttag

SEQ ID NO: 4842 - RNA, 1722 nt, synthetic construct
  misc_feature 1..1722: note = source = /note="Description of Artificial Sequence: Synthetic coding sequence"
  source 1..1722: mol_type = other RNA
atgatatttctctatcaagtggtgcacttcattctcttcacatccgtgtcaggcgagtgcgtgacgcaattgctgaaagacacatgcttcgaaggcggcgatataacaaccgtgttcaccccctccgccaaatattgtcaagtggtctgtacctatcatcctcggtgcctgctattcaccttcacagccgagagtccctcagaggatccaacgagatggttcacttgcgtcttgaaagactccgttactgagacactgccaagggtaaaccgtacagcagcaataagcggttactctttcaaacagtgtagtcaccagatatcagtcaataatatttgcttgctcaagcatacccagacaggcacaccaacccggataaccaagttagacaaagttgtgagcggtttcagcttgaagtcttgtgcactttccaatttggcttgtatacgtgatatttttccgaacaccgtttttgccgacagcaacattgactctgtaatggcccccgatgcatttgtgtgcggtcgaatttgtacgcaccatcctggctgtctattctttactttcttcagtcaggagtggccaaaggagtctcagaggaatctgtgcttgcttaaaacttcggagtccggactaccatccactaggataaagaagtcgaaggccctcagtgggttctccctgcaatcctgtcggcactccatcccagtcttttgccatagctccttctaccacgatactgactttctgggcgaagaacttgacattgtggccgccaagtcacacgaagcctgccaaaaactttgtaccaacgctgtgcgttgtcagttctttacgtacacgcctgcacaggcatcatgtaacgagggaaaaggaaaatgttatttaaaacttagctcaaatggcagcccaacgaaaatcttacacggaaggggcggcatctcagggtacactctgagactttgcaaaatggataatgaatgcacaacgaagatcaaaccaaggatagtcggaggaacagccagtgtccgaggagaatggccgtggcaagtgactctacatacgactagccctacgcagcgccatctgtgcgggggctccattattggcaatcaatggatcttgacagctgcccactgcttctacggcgtggagtcgcccaaaattcttcgggtgtatagcggaatccttaatcagtcagagataaaggaggatactagcttctttggcgtgcaggagatcataattcatgaccagtataagatggcagaatcaggatatgatatagccctgctaaaattggagaccactgtgaattacactgatagccagcggcccatttgcctgccgtctaaaggagatcgtaacgtgatctatactgattgttgggtcacgggatggggctacagaaaacttcgggacaagatccagaacactctgcagaaggccaaaattcccctcgtgaccaacgaagagtgtcaaaagcgctaccgggggcacaaaatcacccataagatgatctgtgccggatacagggaggggggaaaggacgcatgtaagggagattctggcgggccactgtcttgtaaacacaatgaagtatggcatctggtggggatcactagctggggggaaggctgcgcccagcgcgaacgccctggagtttacactaacgtggtagaatacgttgattggattttagaaaagactcaggctgtatag

SEQ ID NO: 4843 - RNA, 1878 nt, synthetic construct
  misc_feature 1..1878: note = source = /note="Description of Artificial Sequence: Synthetic coding sequence"
  source 1..1878: mol_type = other RNA
atgatatttttataccaagttgtgcattttatcttgttcacatcagtgtcaggagagtgtgtcacccagctgctgaaagacacttgctttgaaggaggtgacatcaccaccgtcttcaccccttcagcaaagtattgccaggtggtgtgtacctaccaccctcggtgtctgctgtttacctttactgccgaatccccttcagaagatcctacgagatggttcacatgtgtacttaaagactccgtcactgagaccttgccaagagttaaccgcacagcagcgatatccggctactccttcaaacagtgcagccatcagatatccgcctgtaacaaagatatttacgtcgatctggacatgaaaggaattaactacaatagtagcgttgccaaatccgcccaggagtgccaagagcgctgcactgatgatgtccactgccacttcttcacttacgccacacgccaatttccctcactggaacacagaaacatctgtctgctgaagcacactcagactggcacccccacacgtataaccaaactcgataaggttgtttccggcttctcacttaaatcttgtgccctctcgaacctggcctgtataagggacatcttcccaaataccgtgttcgccgactctaacatcgatagcgtgatggcacccgacgccttcgtttgtggacgaatttgcacccaccaccctggatgtctgttctttacctttttcagccaggagtggcccaaggagtcgcagcggaacctgtgcctgctgaagacatcagagtctggcctgccaagcacccgcatcaagaaaagcaaagccctcagcgggttttcattacagtcatgccgacactcaattcccgtcttttgtcatagctctttttaccatgatactgacttcctgggagaggaactggacatcgtggcagctaaaagtcacgaagcttgtcaaaaattatgtaccaatgccgtgcgctgccagtttttcacatacacaccggctcaggcgtcctgcaacgaggggaaaggaaagtgttaccttaagcttagcagtaacggctccccaaccaaaatactgcacggacgcggtggcatttctggctacacgcttcgcctgtgtaaaatggacaatgagtgcaccacaaagatcaaaccacggatcgtgggcggcaccgcctcggtccgcggcgagtggccgtggcaggtgacactccacacaacctcgcccactcaaagacatttgtgcgggggcagcatcataggcaaccagtggattctcacagctgcacactgtttctacggcgtcgagtcaccaaaaatactccgtgtctatagtgggattctgaatcagtccgagataaaggaagatacaagtttttttggggtccaggagatcattattcatgatcagtacaaaatggccgaatccggatatgacattgcattactgaaacttgaaaccacggtcaattacacagattcccagaggcctatttgtttgccaagtaagggcgatagaaatgtgatttacacagactgctgggtgaccggatggggatacagaaaactgagggataagatccagaatactctgcagaaggcgaagatacccctagtgactaacgaagagtgccagaagcggtaccgcggacataaaatcacacataaaatgatttgcgcaggatacagggagggtggcaaagatgcctgcaagggtgacagtggcggccccctctcttgtaagcacaacgaagtgtggcacctggttggcatcacatcgtggggagaaggatgcgcccaaagggagaggcctggggtctacacaaatgtagtggagtacgttgactggatccttgagaagacacaagctgtgtag

SEQ ID NO: 4844 - RNA, 633 nt, synthetic construct
  misc_feature 1..633: note = source = /note="Description of Artificial Sequence: Synthetic coding sequence"
  source 1..633: mol_type = other RNA
taatctggattctctctgaaatcttgtgctctgtcaaatcttgcttgcatacgcgatatcttccccaatactgtcttcgccgactctaacatcgattctgtaatggcccccgatgctttcgtctgtggacggatatgtacccatcaccccgggtgtcttttctttacattctttagtcaggagtggcccaaagaatcccagcgtaatctgtgcttgctgaagacatctgaatcaggcttaccctcgacgcggataaagaaatccaaagcacttagtggattctcgctgcagtcttgtcggcattctatccctgtcttctgtcatagcagcttttatcacgatacggattttctgggcgaggaactggacatcgtggccgcaaagtcccacgaagcgtgtcagaagttatgcacaaacgcagtgcggtgccagttctttacgtatacccccgcccaagcatcgtgcaacgagggaaaggggaagtgttatttgaagctgtcctctaatggctcaccaaccaagatcctgcacggtagaggtggcatatcaggctatacactccgcctctgtaaaatggacaatgaactgaggggagcaccaatgaaaatatctggctggcttaaaacatcgtag

SEQ ID NO: 4845 - RNA, 8835 nt, synthetic construct
  misc_feature 1..8835: note = source = /note="Description of Artificial Sequence: Synthetic coding sequence"
  source 1..8835: mol_type = other RNA
atgacattgcgtctcctggttgctgctctgtgtgccggaatcctggcagaagccccacgtgtgcgcgcccagcacagggaacgggttacttgcacccggctatacgcagcagatatagtcttcttgctggacggcagttccagcatcggccgcagtaatttccgggaggtcagaagcttcctggaaggcctcgtgctcccgtttagcggggcggctagcgcgcaaggcgtgagattcgccacagtccaatattcagacgaccccaggactgagttcggcctcgacgccctgggatcgggcggggacgtgattagagcaatacgagaactgtcttacaagggtgggaatacacggaccggagcagctatccttcatgtcgccgatcatgtttttctcccccagcttgcccggcccggggtaccaaaagtttgcatactgatcacagacggaaaaagccaggacctcgtcgatacagctgcgcagaggctgaagggccaaggagtgaaactgttcgccgttggtattaaaaatgcagacccagaggagctgaagcgggtggcatctcagcccacttcagacttcttcttttttgtgaatgatttctcaatcttaagaactttattgcccctggtgagtcggcgggtctgcacaaccgcgggcggggtgcccgtgactagaccgcctgacgactcaacatccgcaccaagagatttagttcttagtgagcccagcagtcaaagtctgcgggtccaatggacggcagcctccggaccagttactgggtataaggtgcagtatacccccctgactggactcggtcagcccctcccttctgaacggcaagaggttaatgtaccggccggcgagacatcagttcgccttagaggacttcggcccctcacagagtaccaggtaacagtgatcgctctgtacgcaaacagcatcggagaggccgtgtctggtacagcaagaacaactgccctcgagggcccagagctcactatccagaatactacggcacacagtctgctcgtagcgtggcggagcgtgcctggtgctactggataccgagtgacgtggagagtgcttagcggtggccccacccagcaacaagaacttggacctggtcagggtagcgtactgttaagggacctggaaccaggaaccgattacgaggtcaccgtgtcaacgctcttcggccggtctgtgggacccgctacttctttgatggcacgaacagatgcgtccgtggaacagactctgagacctgttattctagggccaacatccattctcctgtcttggaatctggttccagaggcgaggggttatcgtttggagtggaggagggagaccggtctggagccaccacagaaggtggtcttaccctccgacgtgacgcgctatcagctggacggattacagcccggtactgaatatagactgactctatacacgctgctcgagggtcacgaagtcgccaccccagctacagtagttccgaccggacccgagctgcccgtctccccggtaaccgatttgcaggcaactgaacttcccggacaacgcgtcagagtgtcatggtcccccgtaccaggagccacacagtacaggatcatagtgaggtcgactcagggggtggaacgcaccctggtgctgcctgggtctcaaacagcctttgacctggacgacgtccaggcgggcctgtcttatactgtgagggtgagtgctagagttggaccgagggaagggagcgcctccgtgctgactgtcaggagggagccggagacaccacttgccgtgccaggcttaagggttgtggttagcgacgcaacacgggtcagagtcgcatggggacccgtgccaggcgccagtggctttcggatcagttggtccacgggcagcggccctgagagctcccagactttaccccccgactccacagctacagacatcacagggctccagcccggaacaacctaccaggtcgcagtgagtgtactcagagggcgtgaagagggacccgccgccgtgatagtcgcccgtaccgatccactggggccagttaggacagttcatgtgacgcaggcttctagttcttctgttactatcacctggactagagttcccggggccactggctatcgcgtgtcttggcacagcgcgcacggccccgaaaaaagccagctggtgagtggggaggcaactgttgctgaactcgacggactcgagcctgataccgaatacaccgtacacgtgcgagcacacgtggctggggtggacggaccccccgccagtgtggtcgtgagaacagcacctgagccagttggacgagtgtcccggttacagatactgaatgccagctccgatgtcctgaggatcacttgggtgggcgtaaccggcgctactgcctaccgactggcctggggtcgctcagaaggcgggccaatgaggcaccaaattctgcctgggaatactgacagcgccgagatcagggggctcgaaggcggagtatcatacagcgtgcgcgtgaccgccttggtaggggaccgggagggtactccggtctctatcgtggtcaccactcccccggaagcgcccccagcattaggaacactgcacgtggtccagaggggggagcactctctccgattgcggtgggagcccgttcccagagcccagggattcctgctccactggcaacctgaaggcggccaggaacaatcccgcgtgttagggcctgaattatcctcttaccatctcgacggcttagaaccggccacgcagtatcgagtacggcttagtgtcctgggtcccgctggagagggcccttccgctgaagttaccgcgcggactgagtctccccgcgtgccctccatcgaattgagggtcgtggacacgtctatcgatagtgttacgttagcatggacccccgtgtctagagcctcttcctacatcctgagctggagaccattgcgtggacctggccaggaagtgccgggaagtccacagacactacctggaatttcaagctctcaaagagttactggactggagcctggcgtttcctacatcttttcactgacacccgtgctagatggagtgcgcggaccagaggcctccgttacccaaactccagtgtgtccccggggcctggcggacgttgtatttctcccacacgccacgcaggacaatgctcatagagcagaggcaactaggcgggtactggagcgcctggtgctcgctcttggcccactgggaccccaggccgtacaggtgggactcctgagctactctcatcggccttcacccctctttccactcaatgggtctcatgatctaggcattatactgcagaggatccgggatatgccctatatggaccctagcgggaataatcttgggaccgcagttgtgaccgctcatcgatacatgttggcgcccgatgctcctggcagaaggcagcatgtccccggtgtgatggtcctgttggtcgatgagccattaagaggggatattttctccccgatccgagaagcccaggcttcaggcctgaacgtcgtcatgctggggatggccggcgcggaccctgaacagcttcgccgactggcgcccggaatggattccgttcagacctttttcgctgtggacgatggtccctctctggatcaagcggttagtgggttggctaccgcactgtgtcaagcatccttcactacacagcctcgccctgagccctgccccgtgtactgtccaaagggtcagaagggcgagccaggggagatgggattgagaggccaggtagggccaccaggagacccaggtttacccgggaggacaggggctcccggcccccaagggcctccggggagcgcaaccgccaagggcgagagagggttccccggcgccgacggtagacccggatccccagggagggctggcaatcccggaacccccggtgctcctggtctgaaaggctcaccaggcctccctgggcctcgaggtgatcccggtgagcgaggtcctcgcggcccaaagggagagcctggcgctcccgggcaggtgatcggaggcgagggccccggcctccccgggcgcaaaggagacccgggaccttctggccctcctgggccccggggacctttaggggatccagggccaaggggacctccaggacttccaggcacagcaatgaagggagataagggcgatagaggagaaaggggcccccccgggcctggcgaggggggcattgcccctggggagccaggcctgccgggcttacccggatcaccggggcctcaaggtccagtaggtccccctggcaagaaaggagagaaaggtgattccgaagacggtgcccccggattgccaggacagcccggaagccccggcgagcagggccctcggggccctcccggcgccataggcccgaaaggcgatagggggttcccaggtccactgggcgaggctggcgaaaagggcgagcgcggtccacctggcccagctggaagccgaggcttgcccggagttgctggtagacccggagctaaaggccccgaggggccccccggaccgactggcaggcaaggggaaaaaggagagcccggaagaccgggggaccctgcagtggtagggccagctgtcgccggacctaaaggcgaaaagggagatgtgggccctgcaggacctcgcggcgccactggtgtgcagggagagagaggtccacctggcctagtcttgcctggcgaccccgggccaaaaggtgatccgggagacagggggcccatcggactcacaggccgcgccgggccccctggagatagcggtcccccaggggagaaaggcgacccggggcgacctgggcctcccgggcctgtgggaccgaggggccgagatggcgaagtcggagagaaaggtgatgaaggccccccaggcgaccctggcctgcctggcaaagccggtgaaagaggccttagaggagctcccggggttagaggcccggtgggggaaaagggagaccagggagatccaggcgaagatggtagaaatggttctccagggagtagcggacctaagggggataggggcgagcccggccccccggggccccctggccggctcgttgacaccggtcctggcgccagggagaagggcgaaccaggtgaccgtggacaggagggacccagagggccaaaaggtgaccccggtcttccaggcgcgccaggcgaacggggcattgagggctttagaggaccgccaggtccccagggagaccctggagtccgcgggcccgcaggggagaaaggcgaccgagggccccctggcttagacggaaggagcggcttagatggaaaacctggagcggccggtccgtctgggcctaacggagccgcaggtaaagctggggatccaggccgtgatggcctgccaggtctcaggggggagcaagggctgcctggcccatctggcccaccaggccttccgggcaagcctggggaggacggtaaacccgggttgaatggcaagaacggcgaaccaggagatccgggcgaggacggcagaaaaggggagaaaggagacagtggagcgagcgggcgggagggacgggacggccccaaaggagaacgaggcgctcccggaattttggggcctcagggtcccccggggttgccaggcccagtgggtcctcctggccaggggttccccggcgtgcccggtggaacgggaccgaagggcgacagaggagagaccgggtccaagggtgagcagggtcttccaggggaaagggggctgaggggggagccgggatctgtgcccaacgtcgacagattgctggagaccgccgggattaaagcgtcggctctaagggaaatcgtggaaacctgggacgagtcttccggcagcttcctccctgtgcccgaacgccgcaggggacctaaaggcgattccggtgagcaggggccccctggcaaagaaggcccaatcggattcccaggcgaaagaggactcaaaggggaccggggcgacccagggccgcagggaccacccggactggcccttggcgaacgcggtccccctggtccctccggcctcgcaggggaacctggcaaaccgggaatccccggactgccaggtagagccgggggggttggagaggccggtcgtcccggagagagaggggagcgaggcgaaaagggcgagcggggggaacaagggcgcgatggtcctcctgggctgcctggcactcctggccctcctggtccacccgggccaaaggtttcagtcgatgagccaggaccaggactgagcggagaacaggggccacctgggttgaagggggctaagggagagcctggaagcaacggggaccaaggcccaaagggagacaggggagtacccggaatcaagggcgatcgtggggaacctggacctcgcgggcaggatgggaatccagggttacccggggagaggggaatggctgggccagaaggaaagcctggccttcagggccctcgggggccacccggcccagtgggtggtcacggtgatcccggaccaccaggggcaccgggtctcgctggacctgctggaccccaaggcccatcaggccttaaaggagagcccggagagaccggtcccccaggcagaggccttaccgggcctactggggccgttggacttcctggtcctcccggacccagcggactggtcggcccacaggggagtccaggattgccaggccaggttggagagacaggcaagccaggagcacctgggagggacggggctagtggaaaggacggagataggggctcacccggcgtgcccggctctcccggcctgccaggacctgtggggccgaaaggagagcctgggccgactggcgctcccgggcaagctgtcgtggggttaccaggtgcaaagggcgaaaagggcgcacctggtggactagccggtgacctggtgggcgagccaggggccaagggcgataggggcttgcctggtccccgtggggaaaagggggaggcgggaagagctggcgagcctggggaccctggcgaggacgggcaaaaaggcgctccaggccccaagggctttaaaggggaccccggggtgggcgtgccagggtcaccaggcccccccggacctcccggagttaagggcgatctcggattgccaggtttaccgggagctcccggagttgtgggatttcccggacagacaggtcctaggggcgagatgggacagcctggccccagcggtgagagaggacttgcaggcccccccgggcgggaaggtatacctggcccactgggaccccctggtccccctggaagcgtgggtccacctggagcctcaggtctaaagggcgacaaaggcgaccctggagttgggctcccggggcctaggggtgagcgaggtgagcctggcatacggggtgaagacgggcggcctggccaggagggccctagaggactgacggggccgcccggttcccgcggagaacgcggggaaaagggagacgtgggttccgccggcctcaagggcgataaaggagacagcgctgtcattctgggacctcctggccctaggggtgccaaaggtgacatgggggagcggggtccacgcggcctcgacggcgataaagggccacgaggtgacaacggcgaccctggggataagggctccaagggtgagcccggggataaaggctcggctgggttacccggactccgcggactgctgggaccccagggtcagcctggagctgctggcatccccggcgacccaggctcccctggcaaagacggtgtgcccgggattcggggggaaaagggcgacgtgggctttatgggaccaagagggctgaagggtgagagaggagtcaagggtgcctgtggcttagacggggagaaaggagacaaaggtgaggccgggcctcccgggagacccggattggccggacataagggggagatgggagaaccaggagttcccggccaaagcggcgctccaggcaaggaaggcctgattgggccaaagggagaccgcggctttgacggccagcctggtccgaaaggagaccagggtgagaaaggtgaaagaggtacacccggcattggaggctttccaggaccatcaggtaatgacggctccgccggccctccggggccccccggctccgtgggcccccgcgggccagaagggcttcagggccaaaagggggaacgaggcccacctggtgaaagagtagtcggggccccgggggtccccggcgctcctggggagaggggcgagcaagggcgcccagggcccgcaggaccacggggcgagaagggggaagccgctctgacagaggacgatatcagagggtttgtacgacaggaaatgtctcagcattgtgcttgccagggtcagtttattgcctcaggatcgcgtcctctcccatcctacgccgctgatacggcagggtcacaactgcatgcggtgccagtcttacgagtctcccatgctgaggaagaggaaagggttcctcccgaggacgatgaatacagtgagtatagcgaatactctgtggaggaataccaggaccccgaggcgccatgggactctgacgacccatgcagcctccccctggacgaggggagctgcacagcctataccctacggtggtatcaccgagcagtaaccgggagtactgaggcgtgtcatcctttcgtgtacgggggatgcggaggcaatgccaacagattcggtaccagggaggcctgtgagcggaggtgccctccccgcgtagtccaatctcagggcactggtactgcccaggactag

SEQ ID NO: 4846 - RNA, 8739 nt, synthetic construct
  misc_feature 1..8739: note = source = /note="Description of Artificial Sequence: Synthetic coding sequence"
  source 1..8739: mol_type = other RNA
atgacactgcgcctactggtggctgccctgtgtgctggtattttagccgaggctcctagggtgagggcccagcaccgtgaaagagttacatgtacccggctgtacgccgcagatatcgtattcctcttggacggttcttcctctatcggcaggtcaaattttcgtgaggttaggagctttctcgagggtcttgtgctgcctttttctggggctgcgtccgcccagggggttagattcgcaaccgtgcaatattccgacgacccacggaccgaatttgggcttgacgccctcgggtcaggcggcgacgtgatccgcgccatcagagagctgtcttataaaggcggcaatacacggacaggcgcggccatcttacatgtcgccgaccacgtctttcttccccaactggccagacctggtgtccctaaggtatgcattctcattacagatggaaaatctcaagatctggtcgataccgccgcccagagactgaaggggcaaggcgtgaaactgtttgcggtgggtatcaaaaacgctgatcccgaagaactcaaacgtgttgcctcccaacctacgtcggacttcttcttcttcgtgaatgactttagcatcctgagaactctgctccctctggtgtccaggcgtgtttgcactaccgcaggtggcgtgccagtgactcgcccccctgatgactccacatcagcccctcgtgaccttgttctcagcgaaccctcatctcaatcacttcgcgttcagtggacagcagcatctgggccggttacgggatacaaggtccagtacacaccactgacaggcctgggccagccccttccttccgaaagacaggaggttaacgtgcctgctggtgagacgtccgtgcgtttaagaggtcttcggccgctgactgaatatcaggttacggtgattgctctgtatgccaatagcatcggggaggcggtgtctggcactgctcggaccaccgcattggaaggccccgaactgacaattcaaaatactaccgcccactctctattagttgcctggagatcggtgcctggggccactggttaccgcgtgacgtggcgcgtgctttcgggtggccctacgcagcaacaggaactcgggcctgggcagggcagcgtcctgctgagagacctggaacccggtaccgattacgaagtgacagtttctactctctttgggaggtcagtcggccccgctactagcctaatggcgcgaaccgatgctagcgtggaacagactctgcggcctgtcattctgggacccaccagtatcctgctaagctggaacctagtccctgaagcacgcggctataggctcgagtggaggcgtgaaactgggttggagcccccacagaaagtggtgctgccatctgatgttacccgctaccagctggacggactgcagccagggactgaataccgattgacattgtacaccttgctcgagggtcacgaggtggctacacctgcaacggtggttcctaccggccccgaactgcctgtatcccccgtgactgatttgcaagcgacggagcttcctggacagcgcgtcagggtatcatggtctcctgtccctggggccacccagtacagaatcatagtgagatcgactcaaggcgtcgagagaaccctggtgcttcccgggagccagaccgcctttgacctggatgatgtgcaggcaggcttgagttataccgtcagggtgagcgccagagttggaccaagggagggcagcgcttccgttctcactgtgcggagagagccagagactcccctggcagtccctggtctgcgggtggtggtgtccgacgccacccgtgtgcgcgtggcatggggcccagtgcctggagcaagtggtttccgcatctcgtggtctacaggatccggccctgagtcctcacagactctacctccagattcaacggccaccgatatcactggtctccaacctggaaccacgtatcaagtagcggtatcagttctgcgtggaagggaggagggacctgcggccgtgatagtagccagaaccgatccattggggcccgtaaggaccgtgcacgtaactcaggcatcctccagctctgttacaataacatggaccagagtgcccggcgcaactgggtaccgcgtgtcctggcattctgcccacggcccagaaaagtcgcagctcgttagcggggaggccaccgtcgccgagcttgatggcctggagccagatacagaatatacagtgcatgtcagggctcacgttgccggcgtagatgggccccccgcatctgttgtggtgcggaccgccccagagcccgttggccgggtcagcaggctacagattctgaacgcttcgtccgacgtgctgcgcatcacatgggtgggagtgacaggagcgactgcttatcggctggcatggggacgcagcgaaggcggccccatgaggcatcaaattctgcccgggaacactgactcagccgaaatccggggacttgaaggcggagtctcctatagcgtgcgcgttaccgctctggtcggcgatcgggagggtactccagtgagtattgtcgtgaccacacctcctgaggctccaccagccctgggaacattgcatgtcgtacaaagaggcgagcattccctgcgcctccgctgggaacccgtgccccgagctcagggtttcctgctgcattggcagcctgagggcgggcaggagcagagccgagtgctggggcccgaactttctagttaccacctcgacgggttagagcctgcaacccagtatagggtgcggctatcagtcctgggaccggcaggggaaggtcccagcgcagaggtcacagcacgcaccgagtctccacgcgtaccatctatcgagctgagggtggttgacacatctatcgattcagttactctggcctggacacccgtgtcacgagcctccagctacattctgagttggaggccattacgcggaccagggcaggaggtaccaggatcaccacaaacgctgcccgggatcagttcctcacagcgcgtgaccggacttgaaccaggcgtgtcttatatattttccctgacaccggtgctggacggcgtccgcggcccagaggcaagtgtgacccaaactcccgtgtgcccacgaggccttgccgatgtagtgttcctgccgcatgccacccaagataatgcacatcgggccgaggctacaagacgggtcctcgagagactcgtgcttgcactgggtccgcttgggcctcaggccgtgcaggttggcttgctgagctatagccaccggcctagtcctctgttcccactcaacgggtcacacgatttgggaatcatcttacagaggatccgggatatgccatacatggacccatctggtaacaatctgggaacagcagttgtcaccgcgcaccgttacatgctggcccccgacgcacccggccggcggcaacatgtgcctggagtgatggtgttactcgtagatgagccacttcggggcgacattttttctccaatccgcgaagctcaagcctctggcctaaatgtcgtcatgctgggcatggccggtgccgacccggagcaactccgtaggctggcacctgggatggacagcgtgcagactttcttcgcagttgatgatgggccttctctcgaccaagcagtgagcggcctggccaccgcactgtgccaggcctcattcacaacgcagccaagaccggagccttgtccagtgtactgcccaaagggccagaagggtgaacccggcgagatgggactgcgcggtcaggtgggacctccaggggatcctggattgcccgggaggactggggcaccaggtccccaggggccacctggatctgcaaccgccaagggcgaacgtgggttccctggggctgatggcaggcccggttctcctggaagagcggggaatccgggcactcctggagccccaggactgaagggtagtcccggtctgccaggaccccgcggcgatccgggcgaacgtggaccaagaggcccgaagggtgagccaggcgcacccggacaggtgataggtggagaaggtcccggcttacctggtaggaagggggatcctggacctagtggccctcctggtccccgggggcctttgggcgacccgggacccagaggaccccccgggctgcctggcaccgccatgaagggtgataaaggagatagaggcgagaggggcccacccggccccggagaaggtggaatcgcacccggcgagccaggtctgcccggcctccccggtagcccagggccccagggacccgtagggcccccaggcaaaaagggagaaaaaggcgactctgaggatggagcccctggattgcctgggcagcctgggagccctggcgaacaggggccacgtggaccgccgggggccatcggccctaaaggcgaccgcggtttcccggggcccctgggcgaagccggggaaaagggggagcggggcccgcctggccctgcgggatctcgcggcctgcccggggtggccggacggcccggcgccaaggggcctgaaggtcctcctggcccaacaggcaggcagggtgagaagggcgaaccgggaaggccaggtgacccagctgtagtcggccctgccgtggccggccccaaaggcgaaaagggcgatgtgggtccagccggccctagaggggcgacaggggttcaaggcgagagggggccccctgggctcgtactgcccggagatcctgggccgaaaggagatcccggcgacaggggcccgattggactgaccggcagagcgggcccccccggtgacagcgggccacccggcgagaaaggggatccaggccgaccaggacctccaggtcctgtggggcctaggggtcgtgatggagaggtcggagaaaagggggacgaggggccacctggggatccagggcttcctggaaaggcaggtgagcgcggtctcaggggagcacccggagtccgcggccctgtaggggagaaaggtgaccagggggatccaggtgaggatggacgaaatggcagtcctgggagctctggacccaagggagaccgaggcgaaccaggtcctccaggcccccctggccgcctcgtggataccggccccggagcaagagaaaaaggcgagccaggagatagaggacaggagggccctcgcggcccaaagggggatcccggccttcccggagcccccggagaacgcggcatcgaaggattcaggggcccacctggtccgcaaggggacccaggggtgcgtggccctgctggtgaaaagggagatcgcggaccccctgggctggatgggcgctccggcctggatggcaagccgggagccgccggaccatccggccccaacggggctgctggtaaagcaggggacccgggccgagacggactcccagggctgagaggcgagcagggtttgccagggccctccggaccacctggacttccagggaaacccggggaggatggaaaaccgggcctcaatggcaaaaacggcgaacctggcgaccccggtgaggatggaagaaagggcgagaaaggagacagcggcgcttcagggagagaggggttcccaggagtgcctgggggcaccgggcctaagggtgatcgcggggagactggatctaaaggcgagcaaggtctaccgggtgaaagggggctgcgcggcgaacctggatctgtgcccaatgtggatcgcttgctggaaactgccggaataaaagcttccgcgcttcgggagattgtggaaacttgggatgaatcaagcggctcatttttacccgtccctgaaaggagaagaggtccaaagggtgatagtggagaacagggccctccaggcaaagaaggcccaatcgggttcccaggagagcgtggactaaagggtgatagaggagatccgggtcctcaggggccgccaggactggcccttggagagcgggggcctcccggacccagtgggctggccggagagccgggcaagcccggcattccgggcctccctggccgggcaggtggcgttggtgaggccggcagacccggggaaaggggtgagcgcggggaaaagggggagcggggtgaacagggtagggatgggccccctgggttacctggaacgcctggcccgccaggtcctcctggtcctaaggtttcagtcgacgaaccaggtcccggactgtccggagagcagggcccccctggcctgaaaggtgctaaaggggagcccggtagcaacggggatcagggacctaaaggggacagaggggtgccaggtataaaaggggataggggggagcctgggccacggggccaggacggtaatcccggtctgcctggcgaaagaggcatggccggacctgaggggaaaccgggactgcagggtcctcgcggaccaccaggtccggtgggggggcacggggatcctggcccgcctggcgcaccggggttagcaggacctgcaggcccgcaagggcctagcggtctcaaaggcgaacctggagaaaccggcccgccaggccgcggcctcactggtcccactggtgcggtgggcctgcctggtcctccaggccccagcgggttggttgggcctcagggcagtcccggtttaccagggcaagtaggcgagacaggaaaacccggagcccctgggagagatggtgcttctggcaaagatggcgatcgcggaagtccaggagtgcctggaagccctggtttacccggacctgtgggccctaaaggggaacctggacctaccggagcccccggccaagcagtagtcggtctacccggagccaaaggcgaaaagggagcccccggtggtctcgccggggacctggtgggagaaccaggagctaagggtgataggggcctccccggaccacgtggagagaagggagaggctggcagagccggcgagcccggcgacccaggcgaagatggacaaaagggcgcacccggacccaaagggtttaagggggatccaggagtgggcgtgcctggatctccagggcccccagggccccctggggttaaaggtgaccttgggctgccagggcttcctggggctcccggggtggtgggcttccctggccaaactggcccaaggggggagatggggcaacctggaccctcaggagagcgcggcctggccggaccccccggtcgtgaggggatcccaggccccctgggccccccaggcccccccggctcagttggcccacccggagcttctgggttgaaaggagacaagggcgatcccggtgtcggtcttccaggtccgcggggagaaagaggtgaacccggaattcgaggcgaggacggccgccccggccaagagggcccccggggtctcacaggcccccccgggtccagaggggaacggggcgagaagggggatgtaggttcagccgggctgaaaggggataagggtgacagtgcagtcattctgggcccaccaggaccgcgcggcgccaagggtgatatgggtgagcgaggtccacgcggacttgacggtgataagggacctcgtggcgacaatggcgatcccggcgacaagggcagtaaaggagagcccggagataaaggctcagcaggattgcctgggttgagaggattactgggaccacagggacagcctggcgccgccggtatccccggtgatccaggaagtccaggcaaagacggcgtgccggggatccggggcgaaaaaggggacgttgggtttatgggtccgcgcggattaaagggggaaaggggcgtgaaaggggcctgcgggctggacggagaaaaaggcgacaagggtgaggcaggacctcctggcaggcccggcctcgcgggacataagggggagatgggggagcccggcgtccccggccagtctggcgcgccaggcaaagaaggacttattggtcctaagggtgaccggggattcgacggccaacccggtcctaaaggcgatcaaggagagaaaggcgagaggggtaccccaggcattggcggctttccagggccctcgggaaacgatggatcagccggaccccctggcccaccaggcagcgtgggtccaagaggacccgaggggcttcaaggccagaaaggagaaaggggaccacctggtgaaagagtggttggggcccccggcgtgcctggagctcccggggaacggggagagcagggccgcccaggacctgccgggcccaggggtgagaagggagaggctgcgttgaccgaggatgacatcagaggcttcgtccgccaagagatgtcccagcactgcgcctgccaggggcagttcatcgcctcaggtagtcgtcctctgccgagttatgcagcggacactgccgggtcccaactgcacgctgtgcctgtgctgagagtctcccacgcagaggaggaagagcgggtgcccccagaggacgatgagtactctgaatacagtgagtattctgtggaagaatatcaggatccggaagccccatgggacagcgatgatccctgctcgctgcctctcgatgagggcagctgtactgcttatactctccggtggtaccaccgtgccgtgactggcagtactgaagcttgtcatccctttgtttacggcggatgtggcggtaacgccaatcgcttcggcacacgcgaggcatgtgaaagaagatgcccacccagagttgtccagtcccaaggaaccggaaccgcccaagactag

SEQ ID NO: 4847 - RNA, 435 nt, synthetic construct
  misc_feature 1..435: note = source = /note="Description of Artificial Sequence: Synthetic coding sequence"
  source 1..435: mol_type = other RNA
atgtggctgcagtcacttctactccttggcaccgtcgcctgctctatatccgcccctgcacggtccccaagcccatcaactcagccatgggagcacgtgaacgcaatccaagaggccagaagactgttgaaccttagcagagataccgccgccgaaatgaatgagaccgtggaggtgatcagcgagatgttcgacttacaagaaccaacctgtctgcagacacgattggagctttacaagcaaggattacgaggctcactgacaaaactaaaaggacccctcaccatgatggccagtcattataagcagcattgtcctcccaccccagagaccagttgtgccacgcagattatcacttttgagagttttaaggaaaatctcaaagatttccttctggttattccatttgactgttgggagcccgttcaagagtag

SEQ ID NO: 4848 - RNA, 603 nt, synthetic construct
  misc_feature 1..603: note = source = /note="Description of Artificial Sequence: Synthetic coding sequence"
  source 1..603: mol_type = other RNA
atgtcccctgaaccagccctcagccctgcactacaactgcttttgtggcacagcgctctctggacagttcaggaggcaacacccctgggacccgcatcctctttaccacaatcttttctgctgaagtgcctggaacaagtgcgcaaaatccaaggcgatggcgctgccttgcaggagaaactgtgtgcaacttacaagttgtgccaccccgaagagctcgttttattgggacactctctgggtattccatgggcgcccctctcaagctgtccttcccaggccctgcaactagctggatgcctttcccagttacactcagggttgtttttgtatcaggggttgctccaggcactggaggggatatcacctgagctcggcccgaccctcgacacgcttcagctggacgtcgccgacttcgccactacaatctggcagcagatggaagagcttggcatggcgcctgcactccagcctactcagggggctatgcctgctttcgcttcagcctttcaaaggagagcaggaggagttttagtggcttcccaccttcagagcttcctcgaggtcagctaccgggttctgcggcatctggctcaaccatag

SEQ ID NO: 4849 - RNA, 516 nt, synthetic construct
  misc_feature 1..516: note = source = /note="Description of Artificial Sequence: Synthetic coding sequence"
  source 1..516: mol_type = other RNA
atggcgggtcctgctacacagtccccaatgaaactgatggctctccagttactgctgtggcactcggccctttggactgttcaggaggctacccccctgggccccgctagttcccttccccaaagctttttactgaaatgcctggaacaggtgcggaagatccaaggcgacggcgccgctctccaggagaaattggtatccgaagctggttgtctcagccagttgcactctggtctgtttttataccaagggttgctgcaggcccttgaaggaatttctcccgagctgggacctacgctcgacactctccagctggatgtggcagactttgcaactactatctggcagcaaatggaagaactggggatggccccagcactccagcccacacagggggccatgccggctttcgcttctgccttccaaagacgagcaggaggtgtgttggtcgcttcccacttacaatccttcttagaggtctcatacagggtcctacgacatctggcacaaccttag

SEQ ID NO: 4850 - RNA, 615 nt, synthetic construct
  misc_feature 1..615: note = source = /note="Description of Artificial Sequence: Synthetic coding sequence"
  source 1..615: mol_type = other RNA
atggcaggacctgctactcaaagcccaatgaaacttatggcccttcagctattattgtggcactccgcgctctggaccgttcaggaggccacccctctcggccctgcaagctccctccctcagagtttcctacttaagtgcttagagcaagtccgcaaaattcagggcgatggagctgccttacaggaaaaactgtgcgccacctacaaattatgtcatccggaggagctggtacttctcgggcattccctgggaattccatgggctccactcagctcttgtccaagtcaagcattgcaattagctgggtgcctttctcagctgcattcaggcctgtttctctatcaagggttgttacaggctctagagggcattagcccagagctgggacctaccctcgacacactgcaacttgatgttgccgatttcgcaacaacgatctggcagcaaatggaggaactgggcatggccccagctctgcagccaacccaaggagcaatgcctgccttcgcaagcgccttccaacgcagagctggcggcgtgttggtggcttcccacctccagtcctttctagaagtatcttaccgggtcttgagacatctggcccagccctag

SEQ ID NO: 4851 - RNA, 3696 nt, synthetic construct
  misc_feature 1..3696: note = source = /note="Description of Artificial Sequence: Synthetic coding sequence"
  source 1..3696: mol_type = other RNA
atgagattgttagccaaaatcatttgcttgatgctctgggccatttgcgtagctgaagattgtaatgaactgccaccaaggcgcaacacagagatcttgactggcagttggtcagaccagacctatcctgaaggcacccaggctatctataagtgcaggcccgggtatcgctccttgggcaacgtgattatggtatgtcgcaaaggggagtgggttgccttgaatcccctgagaaagtgtcagaagcgaccctgtggtcatccgggtgacaccccctttgggacatttacactgaccggagggaacgtgtttgagtacggcgtcaaagcagtgtacacctgtaacgagggctatcaattacttggagagattaattacagggagtgcgacactgatggctggaccaacgacatacctatttgtgaggtggtgaagtgccttccagtcacagcgccagaaaatggtaaaattgtttccagcgcgatggagcctgatcgggaataccacttcggccaggctgtgaggttcgtctgcaacagcggttacaaaattgagggggacgaggagatgcactgttccgacgatggtttttggtctaaagaaaagcccaagtgcgttgaaataagctgcaagagcccggatgtgataaatggaagcccaattagccaaaaaattatctataaggagaatgagcgctttcagtacaaatgcaacatgggctacgagtacagcgagaggggagacgccgtgtgcactgagagcggatggaggcctctaccaagttgcgaggaaaagagttgtgataacccatatatccctaatggcgattatagccccctgagaatcaagcaccgtacaggcgacgaaatcacttatcagtgtagaaacggattttatccagcaaccagaggcaatactgccaagtgtacttcaaccgggtggattcctgctccccgctgtacattgaagccatgcgactatccagatatcaagcacgggggactctaccacgagaatatgcggcgtccctattttcccgtggcagtcggaaaatattattcctactactgtgatgagcattttgaaacacctagtggtagctactgggatcacatccactgtacacaagacgggtggtcacctgccgtaccttgcctccggaaatgctacttcccttacctggagaatgggtataaccagaaccacgggcgaaaattcgttcaaggtaaatccattgatgttgcttgtcaccccggctatgccttgcccaaggcacagaccacagtgacttgcatggagaatggatggtcccctacgccacgatgtatacgcgtgaagacgtgcagcaaatcatctattgatatcgaaaatggatttatttctgagtcccagtatacatatgccctgaaagagaaagccaaatatcagtgcaaactcggctatgtcaccgccgatggcgaaacttccggttcgattacttgcggaaaagatggatggagcgcccaacccacctgcattaagagttgcgatattcccgtgtttatgaatgcgcggacaaaaaatgatttcacatggttcaagcttaacgacaccttagactacgagtgccacgatggctatgaaagcaacacaggctcaacaacaggaagcattgtgtgcggttacaacggatggtcagacttacccatttgctacgagcgagagtgcgaactgcccaagattgacgtacaccttgtgccggaccggaagaaagaccaatacaaagtgggcgaggttctgaaattctcctgtaagccagggttcacaattgtagggccaaattctgttcagtgctaccacttcgggctctctcccgacctgcctatctgcaaggaacaggtgcagagctgtggcccaccgcctgaactgttgaacgggaacgtcaaagagaagacgaaggaagagtacgggcactctgaagttgtggagtactactgcaacccaagatttcttatgaaaggacctaacaaaatccagtgcgtggacggcgaatggaccaccctcccagtatgcatcgttgaagaatccacgtgtggggatatccccgagctggagcacggctgggcccaactgtcttcacctccctattattatggcgacagcgttgaattcaattgctccgaatcgttcacaatgatcggacatagatccatcacttgcatccacggtgtatggacccagctgccccagtgcgttgccatcgacaaacttaaaaaatgcaaaagttcaaatttgattatcctcgaggagcaccttaagaataaaaaagaattcgaccacaacagcaatatccggtatagatgtcgaggcaaggaaggctggattcatacggtgtgcattaacgggaggtgggacccagaagtgaattgtagcatggcccaaatccagctctgccctccaccgccacaaatcccaaatagccataatatgaccacaacgctcaattaccgtgacggtgaaaaggtaagcgtgctatgccaagaaaactaccttattcaggaaggtgaggagattacatgcaaggacgggcgctggcagagcatacccctttgtgtggaaaagatcccatgctcgcagccacctcagatagaacatggcacgattaactcttcccggagctctcaggagtcatacgcccatggcaccaaactctcttatacatgtgaaggaggatttcgcatcagcgaggagaatgagactacgtgttatatgggcaaatggagttctcccccccagtgtgagggcttaccatgtaagagcccgcccgaaattagccacggggtggtggcacatatgtctgattcctatcagtacggggaggaggtaacatacaaatgtttcgagggattcggcattgacggccccgccattgctaagtgtctcggcgaaaagtggtcacatccaccaagctgcatcaagacagactgtctgagtttgccttctttcgaaaacgccattccaatgggggaaaaaaaggatgtttataaggccggcgagcaagtgacctatacttgcgcaacttattataaaatggacggcgcttcaaacgtcacctgtataaacagccgatggaccggcaggcccacttgtcgcgatacctcatgtgtaaatcccccaacagtgcagaacgcgtatatcgtttctagacagatgagcaagtacccttccggcgagagggtgcgctatcagtgcagaagcccctatgaaatgttcggcgacgaggaggtgatgtgtctaaatggtaactggaccgagccgcctcaatgtaaagactctactggtaagtgtggcccacccccaccgattgataatggagatatcacatcgtttccactgagtgtgtacgcacctgcaagttccgtggaatatcagtgccagaatctgtatcaactagagggcaacaaacgtattacatgcaggaacggtcaatggagcgagcctcccaagtgcctccacccatgcgtgatttctagggaaataatggagaattacaacatcgccctcaggtggacagccaaacagaaactgtactccagaacaggcgagagtgtggagtttgtctgtaagagggggtatcgactatcatcacgcagtcatacattgcgaacaacctgttgggacgggaagctagaataccctacttgcgccaagagatag

SEQ ID NO: 4852 - RNA, 1350 nt, synthetic construct
  misc_feature 1..1350: note = source = /note="Description of Artificial Sequence: Synthetic coding sequence"
  source 1..1350: mol_type = other RNA
atgcgcctcctcgcaaagatcatctgcctgatgctctgggccatctgtgtggcggaagactgcaatgaacttcccccaagaaggaacaccgagatcttgacgggctcatggagtgatcagacataccctgaaggaacccaggctatttacaagtgtagacctggctatcggagtcttggcaacgtgatcatggtgtgcagaaaaggggaatgggtggctctgaaccctctaagaaagtgccagaaaaggccctgcggtcatcctggggatacaccattcggaacgtttacacttacaggaggtaacgtgtttgaatacggggtcaaagccgtctacacctgcaacgaaggttaccagcttctgggagagatcaattaccgcgaatgcgacaccgacggatggactaatgacatcccgatctgcgaggtagtcaagtgtcttcctgtaactgcaccggagaatggaaagattgtgtcttcagcaatggaacccgaccgggaataccatttcggccaggcagtgcggttcgtctgcaactccggatacaaaattgagggtgacgaggagatgcattgctcagacgacggtttttggagcaaagaaaagccaaagtgcgtggaaatttcctgtaaaagtcctgatgtgattaatgggagtcctatttcccaaaaaatcatctataaagaaaatgagcggttccagtacaaatgcaatatggggtacgagtatagtgaaagaggcgatgccgtgtgtacagagtcaggctggagacccctgccctcatgtgaagagaaaagctgcgataacccttatatacctaacggtgactactccccccttcgcatcaagcatcgcacaggtgacgaaatcacttatcaatgccgcaatgggttctatccagctacgcgggggaataccgcaaagtgtacatctactggctggatacccgcaccacgatgcaccctgaagccctgcgactatcctgacataaagcatggtggcctatatcacgagaacatgagaaggccctatttccccgttgcggtcgggaaatattatagttattactgtgatgaacactttgagacaccaagcggctcctattgggatcacatccattgcacccaagatggttggagtccagccgtgccctgcctgaggaaatgttacttcccatatctggaaaatgggtacaatcagaaccacgggcgtaaatttgttcagggaaaatctatcgacgtggcttgtcacccgggatacgccctcccgaaagcacagacaacagtgacctgcatggaaaacggatggtctcctactccacgctgcatcagggtaatcttccagctgtag

SEQ ID NO: 4853 - RNA, 1350 nt, synthetic construct
  misc_feature 1..1350: note = source = /note="Description of Artificial Sequence: Synthetic coding sequence"
  source 1..1350: mol_type = other RNA
atgcggctactggccaagatcatctgcctaatgttgtgggccatctgcgtggccgaggattgcaatgaactgccgcctcggaggaataccgagattctgaccggatcttggagtgaccagacataccccgaaggcacccaagctatctacaaatgcaggcccggatatcgttctcttggtaatgttatcatggtatgcagaaaaggcgagtgggtggcacttaatcctcttagaaagtgccaaaaacggccttgcgggcacccaggcgacaccccttttgggacttttaccctcaccggtggaaatgtgttcgaatatggcgtgaaggctgtgtacacatgtaacgagggttaccagttactcggtgaaataaactatcgggaatgtgacactgatgggtggacgaatgatattccaatttgcgaagtggtgaaatgtctaccagtcacagcccctgaaaatggcaaaatagtctcatccgccatggaacctgaccgcgaatatcacttcgggcaggccgtccggttcgtatgcaactccggctacaagattgagggtgacgaagagatgcattgtagtgacgatgggttttggtcaaaggagaagcctaagtgcgtagagatctcctgtaagtctccagacgtcattaatggcagccctatttcacagaagattatttacaaagaaaacgaaagatttcaatacaaatgcaacatgggttacgagtattccgagagaggcgatgcggtgtgcacagaaagcggctggagaccacttccctcatgcgaagagaagagttgcgataatccatacattccaaacggagactattctccgctccggatcaagcaccgtacaggagacgagattacctatcaatgccggaatggattctaccccgctactcgaggtaacacagctaagtgcacgtctaccggctggattcctgccccacgttgcaccttaaaaccttgcgattatcctgatattaaacacggtggcttgtaccacgaaaacatgagacgcccatacttcccagtcgctgttgggaaatactactcttactactgcgatgaacactttgaaaccccctccgggtcttattgggaccatatacattgtacgcaggatggatggtcacccgccgtcccatgcttacgaaaatgttacttcccctatctcgaaaatggttataaccagaatcacggtagaaaatttgtacagggaaaatcaattgacgtagcatgccatcccggctacgctctgcctaaggcccagacgaccgtgacctgcatggagaatggatggtcgcccacgcctcgttgtatcagggttagtttcacactatag

SEQ ID NO: 4854 - RNA, 591 nt, synthetic construct
  misc_feature 1..591: note = source = /note="Description of Artificial Sequence: Synthetic coding sequence"
  source 1..591: mol_type = other RNA
atgcggctgccactgctggtttctgccggagtgctgctggtcgctcttttaccttgtccaccttgccgggccctgttgagcagaggcccggtgccaggcgctcgacaagccccacaacacccacagcccctggacttttttcagcctccacctcaatccgagcagccccagcaaccccaagcccgcccggtactgttacgaatgggcgaggaatacttcctgcgactcgggaatctaaataaatcccccgccgcccctctttctccagcctcgtcactgctagccgggggcagtggcagcagacctagtccggagcaggccactgccaatttttttagggtccttttgcagcagctcctcttacctcggcgatcattggattccccagcggctctggctgaacgtggcgcaagaaatgcactcggcggacatcaagaggcccccgaaagagaaaggagaagcgaagaaccacccatctccctagatctcacatttcatttgttacgtgaagtcttagaaatggcaagagccgagcaactggctcagcaagctcactctaaccgaaaattaatggagatcattgggaaatag

SEQ ID NO: 4855 - RNA, 4443 nt, synthetic construct
  misc_feature 1..4443: note = source = /note="Description of Artificial Sequence: Synthetic coding sequence"
  source 1..4443: mol_type = other RNA
atgcagcgctccccgctggaaaaagcctcggtcgtatcaaaactgttcttctcatggacacggcctatcctgcggaagggataccgccaaaggctcgagctgagtgatatctaccagatacccagcgtagacagtgccgacaatctctccgaaaaactagaaagggaatgggatcgtgaactcgctagtaagaaaaaccctaaattgatcaatgccttgcgaagatgctttttttggcgatttatgttctatgggatctttctgtacctcggcgaagttactaaggccgtgcagcctctgcttttgggacggatcatcgcctcatacgaccctgataacaaagaagagaggtcaattgctatttacttgggaattggcctgtgtcttctttttatagttcgaacgttgcttttacacccagccatcttcgggctgcaccacattggcatgcagatgaggatcgctatgttctcactgatctacaaaaagacccttaaattgagtagtagagtactggacaagatctctatcggtcagctggttagcctcttgtctaacaatctcaataaattcgacgagggcctggctctggcacacttcgtgtggattgcccccctgcaggtggccttgctcatgggtctaatttgggaacttctgcaggcttcagctttctgcgggctgggattcctgatcgtgctcgccttatttcaagcgggcctaggtaggatgatgatgaagtaccgggatcagagagccggaaaaattagtgagcgcctggtgattacttcggaaatgattgaaaatatacagagtgtcaaggcatactgttgggaggaggctatggaaaagatgatagagaacctgcggcagactgaattgaaactgacacggaaagcagcctatgtccggtactttaacagctctgcctttttcttcagtggttttttcgtggtgttcttgtccgttctgccttacgccctgattaagggtataatattaagaaagattttcactactataagcttttgtatcgtgctccgaatggcggtcacgcgtcagttcccttgggcagtacagacatggtacgattcgctgggcgctatcaataagatccaggatttcctccagaaacaggaatataaaacactcgagtataatctgaccactacggaagtggtgatggagaacgtgacggcattttgggaagaaggctttggggagcttttcgagaaggccaagcagaataacaataatcgtaagacatccaacggtgacgactccctgttcttctccaacttcagcttactgggcacgcctgtgctcaaagatattaatttcaagattgaaaggggccagctgctagcagtcgccggttccacaggggcaggtaaaacatcactgcttatggtgattatgggcgaattggaaccgtctgaaggcaagatcaagcactccggacggatcagcttctgcagccaattctcgtggatcatgcctgggacaatcaaggaaaacattatctttggcgttagctatgacgagtatcgatacagatccgtgattaaggcctgccaactggaggaagacatatcaaaatttgctgaaaaagacaatatcgtgctaggggaaggagggatcacactcagtggtggtcagcgcgcccgaatctcacttgcgcgggcagtctacaaagatgccgatctgtacttgcttgatagtcccttcgggtacctggacgtccttacagaaaaagagatctttgagtcttgcgtgtgtaaattgatggccaacaaaactaggattttggtcacttcgaagatggaacatctgaagaaggccgacaaaattttaatcctccacgagggttcttcctacttttatggaacatttagcgagctccagaaccttcaacccgatttttcaagcaagctgatgggatgcgattcattcgatcagttcagcgccgagcggagaaactcaatcctcacagaaactctccaccggttctctcttgaaggggatgcccctgttagttggactgagaccaagaagcagagcttcaagcagactggcgagtttggagaaaagagaaaaaacagtatcctgaatccaatcaatagcatccggaagttcagcatagtgcagaagacgcccctgcagatgaatggtatcgaagaggatagcgatgagcctctggaacgccggctttctttggtcccagactctgagcaaggcgaagcaatcttgcccagaataagtgtcattagcacaggcccgacgttacaagcacgccgtcgacaatcggtgctcaatctaatgacccattcagtcaaccaaggccagaacatccacaggaaaactactgcatccacgcggaaggtgtcgctggcaccacaggccaaccttacagaattggatatctatagccggagactgtcgcaggagactggcctggaaatctccgaggaaattaatgaggaagacctgaaggagtgcttttttgacgacatggagagtattcccgctgtgaccacctggaacacttacctgaggtacatcaccgtgcacaaatcacttatcttcgtgctcatctggtgcctcgtgatattcttggcagaggtggcggcctccctcgtggtgctttggctgttagggaacaccccactgcaagataaaggaaatagtactcatagtcgcaataactcttacgctgtgattattacctctacatcctcatattatgtcttttatatatatgttggcgtggcagatacgcttttggccatgggattctttcggggcctccctcttgtgcacactctgattaccgtttccaaaattctgcatcataaaatgctgcattcagtcctgcaggcgcccatgtctacactcaacactctaaaagctggaggaattcttaacagatttagtaaggatatcgccatactcgacgacttgttacccttaactattttcgacttcatccagttgcttctaatcgttataggcgctatcgctgttgtagctgtcctgcagccctatatctttgttgcaactgtcccagtaattgtagccttcatcatgttgcgtgcgtattttctgcagaccagccaacagctcaagcaacttgagtcagaaggaaggagtcccatttttacccacctcgtgacctccctgaagggtctttggactctccgcgctttcggccgtcagccctatttcgagacactgttccacaaggccctcaacctgcatactgcgaactggtttctgtacctcagcacgctgagatggtttcagatgcgtatagagatgatctttgtgatatttttcatcgccgtcaccttcattagcattttaactaccggagagggggaggggagagttggaatcatcctgactctagccatgaatattatgtcaaccctccagtgggcggtcaatagttccatcgatgtagactcactaatgaggtcggtcagcagggtgtttaagtttatcgacatgcctactgaggggaaaccgacaaagagtacaaagccttataaaaatggccagctgagtaaagtgatgattatcgaaaattcccatgtgaaaaaggacgacatctggccctccggaggccaaatgacggtcaaggacctcaccgctaaatacacagaaggcgggaatgccatcctggagaatatatccttctcaatctcgcctggccagagggtgggtttgctggggaggaccggcagcgggaagagtacactgctgagcgctttcctcaggctactcaacaccgaaggtgaaatccagatcgatggagtgagctgggactctatcaccttacaacagtggaggaaggccttcggcgtgataccgcaaaaagtcttcattttctccggaacatttaggaagaacctagacccttacgaacagtggtccgaccaggaaatctggaaagtggccgatgaggtgggactgagaagcgtcatcgaacagttccctgggaagttggatttcgtcctggtggacggcggttgtgttctgtctcacggccacaagcagctcatgtgcctcgccagatcagtactatccaaggctaaaatactattgttggacgagccttcagctcacctggaccctgtaacttaccagattataaggaggactttaaaacaggcattcgcagactgtactgtcatcctctgcgagcaccgtatcgaggcgatgttagagtgtcagcaattcctggtgatagaagaaaacaaagtcagacaatacgatagcatccagaaactcttgaacgaacgcagcctattcagacaggccattagtccttccgatcgtgtgaaactgtttccccatagaaactcatccaagtgtaagtcaaagccacagattgctgcactgaaggaggaaaccgaggaggaagtacaggatacaaggctatag

SEQ ID NO: 4856 - RNA, 4317 nt, synthetic construct
  misc_feature 1..4317: note = source = /note="Description of Artificial Sequence: Synthetic coding sequence"
  source 1..4317: mol_type = other RNA
atgcagagatcaccacttgaaaaggcaagcgtagtgagcaagctgtttttctcttggactagacctattctgaggaaaggctatcgacagcggttagaactgtctgatatctaccaaattccctctgttgattctgccgataatctctctgagaagttggaaagggagtgggacagagagctggcatctaaaaaaaaccccaagctgatcaacgcacttaggcgctgtttcttctggagattcatgttttacggtatatttttgtaccttggtgaggtaactaaggccgtgcagccccttcttttggggcgtattatcgcgagctatgatcccgacaacaaggaagaacggagcatcgcgatctatttggggattggtttgtgtctgcttttcattgtccgtacactcctcctgcaccccgccatcttcggactccatcatatcggaatgcaaatgagaattgccatgttcagtttgatatataaaaaaggactggcacttgcccacttcgtgtggatcgcccccctccaggtggccttgctgatgggcctgatttgggagttgttgcaggccagtgctttctgtgggctgggttttctgatcgtgctcgccctcttccaggcaggcctgggcagaatgatgatgaagtatcgggaccagagggctgggaagatttcggaacgtttagtaatcacctccgagatgatagagaatattcaatctgtgaaagcctactgttgggaggaagccatggagaagatgattgagaatttgcggcaaacggaactcaaactgactcgaaaagctgcatatgtcaggtattttaattccagtgctttcttcttctctgggtttttcgtagtgtttctctccgtactcccctatgcactcataaaagggatcatattgagaaaaatatttactactattagcttttgcattgtgctgcggatggcagtgacccgacagtttccttgggctgtccagacttggtatgacagtctcggcgctatcaacaaaatccaggactttttgcagaaacaggaatataagacgctcgagtacaacctgactaccacagaggtggtgatggaaaatgtgacagcattctgggaggagggattcggagaactctttgaaaaagctaaacagaacaacaacaaccgtaagactagtaacggcgacgattctctttttttctccaatttctcgctgcttggcacgcccgtcctaaaagatataaatttcaaaatcgaacgcggtcagctgctggcagtcgcaggcagtaccggtgccgggaaaacctcgctgctcatggtgataatgggagaactggaaccctccgaggggaagatcaaacattcaggcaggatctcgttctgctctcagtttagctggataatgcctggcaccatcaaggagaatattatcttcggtgtctcatatgatgagtacagatatcgcagcgtgataaaggcctgccagctcgaggaagatatatctaagtttgccgagaaagacaacattgtgctgggagaagggggcataacactgagtgggggtcagagagccaggatcagtctggccagagcggtctataaagatgccgacctgtacctgctggactccccttttggctatctggatgtgctcactgagaaggaaatcttcgaatcttgcgtgtgtaaactgatggcaaataaaacccgaattctggtgacatctaagatggagcacttaaagaaagcagataagatactgatactgcatgaagggagctcttatttttatgggacatttagtgaactccagaacctccaacctgatttcagctccaagttgatgggctgtgattccttcgatcaattctctgcagagagaagaaactcgatactgaccgaaactctgcacagattttcgctggagggggacgccccggtgagttggacggagacgaagaagcagagctttaagcaaacaggagaattcggcgagaagcgaaagaacagcatactgaaccctataaattcaatacgcaagttttccatcgtgcagaaaaccccactccagatgaatggcattgaagaggacagtgatgaacctctagaacggcggctcagtctggttcctgatagcgagcaaggcgaggctatcttgccccgaatctccgtgattagcactggtccaacactgcaggccagaagacgccagtcggtgttgaatctgatgacacactctgtcaatcagggacagaatatccacaggaaaacaactgccagcacaaggaaggtcagtcttgcaccacaagccaatctgactgaactggatatatactcgagaaggctgagccaggaaaccggactcgagataagcgaggagatcaacgaggaagatttgaaagagtgcttcttcgatgatatggagtctatcccggcagtgactacctggaatacctatctcagatatatcaccgtacacaaaagcttgatttttgttctaatctggtgcctggtcattttcttagctgaggttgcagcttcacttgtggtcctttggctgcttggcaacaccccattacaggacaagggaaattctacacattccaggaataactcatacgcagtgatcatcaccagcaccagttcttactacgtcttttacatctatgtcggggtcgctgacactctgttggcaatgggatttttccgaggcttgcctctggttcacacactcatcactgtatccaaaattcttcaccacaagatgctgcactctgttctgcaggctcctatgtctaccctgaatacgttgaaagctggaggcatcttgaatcgcttttcaaaggacatcgcaatcctggacgatctgctccctcttaccatcttcgattttattcagcttcttctcatagtcatcggagctatcgcagtggtcgccgttcttcaaccgtatatcttcgtagcaaccgtccccgtgatcgtggcatttatcatgctgcgcgcctactttctccaaactagccagcagctcaaacagctggagtcagaagggaggtcacctatttttactcacctggtcacatccctgaagggtttgtggactctaagagccttcggtcgacaaccctatttcgagacgctgttccacaaagccctgaacctccacaccgcaaattggttcttgtacctgtctacactcaggtggtttcagatgcggatcgagatgatcttcgttatcttcttcatcgctgtgacatttatctctatcctgacgaccggcgagggcgaaggccgggtgggcatcatcctaaccctggctatgaacattatgtccacactgcagtgggccgtgaatagttccattgacgtcgattctttgatgcgcagcgtttccagagtcttcaaatttattgatatgcctaccgaggggaaacccactaaaagcaccaagccctataagaacggtcaactgtccaaggtgatgatcatagagaattctcatgttaagaaagacgatatatggccctccgggggacagatgacagttaaggatctgactgcaaagtacacagaggggggcaatgccattctcgaaaatatatcattttccatctcgcctggacagcgtgtgggcctgctcggccgaaccgggagtggcaaatccaccctcctctccgcttttttaagactcctgaatactgaaggggaaatccagatagatggggtgagctgggattctatcaccctccagcagtggcgcaaagcgtttggggtgatcccgcagaaggtgtttatcttctcagggacgttcaggaagaatctggacccttacgagcagtggagcgatcaggagatctggaaagtggccgatgaggtcgggctccgcagcgtaattgagcagtttccaggaaaattggactttgtactggttgacggcggttgcgtactgagtcatggccacaaacagttaatgtgtttggctagatctgtcctatctaaggctaaaatcctgctcctggatgagcccagtgcccatttagaccccgtgacctatcagataatacgccgaaccttgaagcaagcatttgccgactgtacggtgattctgtgtgaacaccgaattgaggccatgctggagtgccaacaatttctagtgattgaggaaaacaaagtgcgacagtacgattctatccaaaaactccttaacgaacggagtctttttcgtcaggccatctcaccctccgaccgtgtgaaattattccctcaccggaacagttccaaatgtaagtcgaaaccccagatcgccgctctcaaatag

SEQ ID NO: 4857 - RNA, 4260 nt, synthetic construct
  misc_feature 1..4260: note = source = /note="Description of Artificial Sequence: Synthetic coding sequence"
  source 1..4260: mol_type = other RNA
atgcaaagatcgcctttggagaaagcatccgtcgtgagcaagttgttcttctcatggaccagaccaatcctgcgcaaaggctatcgccagagactggagttatccgatatatatcagatcccttccgtcgactccgcggataaccttagcgagaaactcgagcgtgaatgggacagagagctcgcatccaaaaaaaatcccaaactgatcaacgcactgaggcgatgcttcttctggaggttcatgttttatgggattttcttgtatctcggtgaagtaacaaaggcagtgcaaccgctgcttctcggccgtattatcgcaagctacgatccagacaataaggaagagcgctccatcgcaatttatctgggtataggtctatgtctcctgttcatcgttaggaccctgctgctccaccccgccattttcggcctgcaccacattggcatgcagatgcgcatagccatgttctctctcatctacaagaaaactctcaagctgtcttcccgggtgctagataagataagcattggccagcttgtatcacttctgtccaacaatttaaataaattcgatgagggactcgctcttgcacactttgtttggatcgcgcccctgcaagtggctctgctgatgggactaatctgggaactgctgcaggccagcgctttctgcggtctaggtttcttaatcgtgctagcactgtttcaggccgggctagggaggatgatgatgaagtaccgcgaccagagggcagggaagatctccgaaagattggtgattacatccgaaatgatcgaaaatatacagtcagtgaaagcttactgttgggaagaagcaatggaaaagatgatagaaaatctccgacagacagagctaaagctcaccagaaaggcagcttatgttcgctactttaacagctctgcctttttctttagcggatttttcgtcgtctttctctcagtgctaccctacgccttgataaaggggatcatcctgcgcaaaatctttacaacaatatccttttgcatcgtgctgagaatggccgttacgcgtcaatttccttgggccgttcagacgtggtacgatagtctgggtgctattaacaagatacaagactttttgcagaaacaggagtataagacattggagtataatttgaccacaacagaggtggtgatggagaatgtgactgccttttgggaagaaacatctctcttgatggtgattatgggggagctggagccctctgaaggcaagataaagcactcaggtagaatatcattttgctcgcaatttagctggatcatgcctggcaccatcaaagagaacatcatcttcggcgtgtcttacgacgagtaccgatatcgctccgtcatcaaagcatgtcaacttgaagaagacatctcaaaattcgctgagaaagataatatcgtcctcggagagggcggtatcactctctctggtggccagcgagcccggatctctctggctcgtgcggtgtacaaggacgctgacctgtaccttctcgattctccttttggctatcttgatgtgctgaccgagaaagagattttcgagagctgcgtttgtaagttgatggcgaataaaactcgaatcctcgtcacctctaaaatggagcacctgaagaaagccgacaagatactaattctgcatgagggatcatcttacttctacgggaccttctcggagctgcagaatctgcaaccagacttttcaagcaaactgatgggatgcgattcctttgaccagttttcagccgaacgccggaatagtattttgactgagaccttgcatagattttctctcgaaggcgatgcaccggttagctggacggaaactaaaaagcaatccttcaagcagacgggggaatttggagaaaaacggaaaaactcgatcttgaaccccatcaacagcattcgaaagttttctatcgttcagaaaacgccgctgcagatgaatggtatcgaagaggactctgacgaacctttggagagacgactgtcactggtccccgactctgagcagggagaggcgatcctgccacgtatcagtgtcataagcaccggcccgaccttacaggcccgccgccgacaatcagttcttaatcttatgactcacagtgtaaatcaaggccaaaacatccatagaaagaccaccgcctccacacgaaaggtcagcctcgccccacaagcaaatctcactgaattggatatctactctcgcagactgtcacaggagaccggattagagatctccgaggagataaatgaagaagatctgaaggagtgcttctttgacgatatggagtctattcccgccgtcacaacctggaacacctatcttcgctacataacagtacacaagtctttgatattcgtgctgatttggtgcctggtaatttttctggccgaggtggcagcctcgctggtggtgctgtggctgctaggaaatacccctctgcaggacaagggcaatagcacgcacagtcgaaataatagttatgccgttattatcacatctacctcttcttactatgttttctatatatatgtcggcgtcgcagatacacttctggctatgggcttttttcgcggactccccctcgtccataccctgatcactgtgagtaaaatcctacatcacaaaatgctgcactcagttctccaagctcccatgagcacactgaacacactgaaagccggtggcatattaaaccggttctccaaagacatcgccattctcgacgacctgcttcctctgaccatattcgactttattcagcttctccttatagttatcggtgctattgctgtggtggccgtactgcaaccctacatctttgttgccactgtgcccgtgatcgtggccttcatcatgctgcgcgcttactttttacaaacgtcacagcagctgaaacagctggagagcgaaggacggtctccaatattcactcaccttgtgacctcgttaaagggactctggacattgagagcattcggccggcaaccctacttcgagacattatttcataaggctctgaaccttcacaccgccaattggttcctgtatctttcaacactccggtggttccagatgagaattgagatgattttcgtgattttttttatcgccgtgactttcatcagcatcttaaccacaggggaaggagagggccgtgtggggatcattctcactctcgccatgaacatcatgtcgaccctgcagtgggctgtgaatagctctatcgacgtcgattcacttatgcgttccgtctcccgcgtgtttaagtttatagatatgccaaccgagggaaagcccacaaaaagtacgaagccctacaagaacggccagctctctaaggtgatgattattgaaaatagccatgtgaaaaaggacgatatatggccatccggcgggcaaatgacagtgaaggatctgacagccaagtacaccgagggtgggaatgcaatcttggagaatatttcgttctctatctcaccaggtcagcgcgtgggtttgctaggcaggactggctcaggcaagtcaaccctactgtctgctttcctgagactgctcaatacggagggagaaattcagattgacggcgtgtcgtgggacagcatcacgcttcagcagtggcggaaggcctttggggtgatccctcagaaggtgttcatcttcagtggcactttcagaaagaatctggacccatatgagcagtggagtgaccaagagatctggaaggtggcggatgaggtggggcttcgcagtgtgatcgagcagtttcctggtaagttggactttgtcctggtagatggcggctgtgtcctgtcccatggccataagcagttgatgtgcctggctcgctctgtacttagtaaagcgaaaatcctgctgttggacgaaccaagtgctcacctggatccggttacgtatcagataatcaggagaactctgaagcaggccttcgcagattgtacagttatcctgtgtgagcatagaatcgaggctatgctagaatgccagcagtttctggttatcgaagagaacaaagttcgacaatatgattctattcagaaactgctaaatgaacgcagcctgtttcgccaggcaatctccccttccgatcgcgtcaaattgttcccacatcgcaattcttccaagtgcaaaagcaaaccacaaatcgccgctctgaaagaagagacagaagaagaagttcaagatacccgcctctag

SEQ ID NO: 4858 - RNA, 573 nt, synthetic construct
  misc_feature 1..573: note = source = /note="Description of Artificial Sequence: Synthetic coding sequence"
  source 1..573: mol_type = other RNA
tgaaaaggtctttggacattgcgggccttcggcagacagccctactttgagactctctttcacaaagcactcaatcttcacactgcaaattggttcctgtacctcagcaccctgcggtggtttcagatgcgaatcgagatgatttttgttattttttttatagcagtgaccttcatctcaattttaacaaccggagaaggcgaaggcagagtgggcataatcctgacgctagctatgaatataatgtccaccttacaatgggctgtaaatagttcgatagatgttgatagcctaatgcggtcagtcagtcgcgtattcaagtttatcgatatgcccaccgaaggcaaacccactaaaagcaccaaaccatataagaacggtcagctgagtaaggtcatgattatcgaaaacagccacgtcaagaaggacgatatttggcctagcggcggacagatgacagtgaaggacctcacagcaaaatacactgaaggaggcaacgctattctggaaaacatttccttcagtatctctccaggacaacgcgtacgcttcgaacactgccttctctgttag

SEQ ID NO: 4859 - RNA, 1104 nt, synthetic construct
  misc_feature 1..1104: note = source = /note="Description of Artificial Sequence: Synthetic coding sequence"
  source 1..1104: mol_type = other RNA
atgataagaaattggctcacaatcttcattttgtttcctctcaagctagttgaaaaatgcgagagctctgtgtctcttacggtgcctcctgttgtaaagttggagaacggatcatcgaccaatgttagccttacactcagacctccactgaacgctacgctggtgattacatttgaaattacctttagatctaagaatattacaatcctcgagctccccgacgaggttgtcgtgccaccaggcgtgactaattcatcctttcaggttacgtcccaaaatgtcggtcagttgactgtgtacttgcatggtaatcattctaatcaaactgggcctagaataagatttctcgtcattagatccagcgccatatctatcattaaccaggtaataggctggatttattttgttgcttggagcataagtttctacccgcaagtaattatgaactggcgccgaaagtctgttattggcctctcctttgatttcgtagcactgaacctgactggattcgtggcatatagtgtgtttaacataggactgttgtgggtgccttatatcaaggagcagtttctcctaaaataccccaatggcgttaaccccgtgaacagtaatgacgtttttttttcactgcatgccgttgtgcttacgctgataatcattgtccagtgttgtctctacgagagagggggacagcgggtctcgtggcccgctataggcttcctagtgcttgcctggctgttcgctttcgtgaccatgatcgtggctgccgttggggtgacaacatggctgcagttccttttttgtttctcttatatcaagctggcagtcactttggtaaagtatttcccacaggcctatatgaacttttattacaaatcaaccgaaggttggagcattggaaacgtgctgctcgatttcacagggggaagtttcagtctgcttcaaatgttcttgcagagttacaacaatgaccaatggacattaatttttggggatccgactaagttcggcctgggagttttcagtattgtctttgatgtggtcttctttattcaacacttctgtctttatcggaaacgaccaggatacgatcagctcaactag

SEQ ID NO: 4860 - RNA, 204 nt, synthetic construct
  misc_feature 1..204: note = source = /note="Description of Artificial Sequence: Synthetic coding sequence"
  source 1..204: mol_type = other RNA
atgcggattcattacttgctctttgctctcctgtttttatttttggttccagtgcctggtcacggagggattattaatactttacagaagtattattgccgagtacgcggaggtagatgcgccgttctgtcatgtctgccaaaggaggaacaaatcggtaaatgctccactcgcggaagaaaatgctgcagacgtaagaagtag

SEQ ID NO: 4861 - RNA, 204 nt, synthetic construct
  misc_feature 1..204: note = source = /note="Description of Artificial Sequence: Synthetic coding sequence"
  source 1..204: mol_type = other RNA
atgagaatccattaccttctttttgcccttctatttctgtttctcgtgccagtgccaggccacggtggaatcataaatacactccagaaatactactgcagggtgaggggcggccgctgcgcagttctctcgtgtctacccaaggaggaacaaatcggaaagtgctcaacgcgcggaagaaagtgttgccgaaggaagaaatag

SEQ ID NO: 4862 - RNA, 195 nt, synthetic construct
  misc_feature 1..195: note = source = /note="Description of Artificial Sequence: Synthetic coding sequence"
  source 1..195: mol_type = other RNA
atgcgagttctttatcttctttttagtttcttgttcattttcctcatgccactcccaggcgtatttggcggcatcggcgatcctgtgacctgcctcaaatccggcgccatctgtcaccccgtgttttgcccaaggcgatacaaacagattggtacctgtggcttgcccggtacaaaatgctgcaaaaagccctag

SEQ ID NO: 4863 - RNA, 195 nt, synthetic construct
  misc_feature 1..195: note = source = /note="Description of Artificial Sequence: Synthetic coding sequence"
  source 1..195: mol_type = other RNA
atgagagtattatatctcctgttctcttttctcttcatcttcctaatgccactgccaggcgtgttcggcggaatcggtgacccagtgacctgcctgaagtctggcgcaatttgtcatcccgtattttgtcctcgcagatacaaacagatcggaacctgtgggctgcctggaacgaagtgttgcaaaaaaccatag

SEQ ID NO: 4864 - RNA, 849 nt, synthetic construct
  misc_feature 1..849: note = source = /note="Description of Artificial Sequence: Synthetic coding sequence"
  source 1..849: mol_type = other RNA
atgaggggcatgaagttgctaggggccctcctcgcacttgctgcgctgctccaaggagctgtatccctgaagattgcggcctttaacatccagacttttggggagaccaagatgagcaacgctacattggtgtcatacattgtccagatcttgtcgcgctacgatatagctttggttcaagaagttcgcgatagccaccttacagcagtcgggaagctgcttgacaacctcaatcaggatgcccccgacacttatcattacgtagtgtccgaacctcttggcagaaactcctataaggaacggtatctgttcgtctaccggcccgatcaggtatccgccgtcgacagttattattatgacgatggatgtgagccctgtggtaacgacaccttcaatagagaacccgcaatcgtgagattcttcagtcggtttacagaagttcgggaatttgctattgtacctctgcacgctgcccccggagatgcagtcgctgaaatcgacgcactgtacgacgtttatttagatgtccaggagaagtggggcctcgaagatgtgatgttgatgggcgacttcaacgcaggttgctcctatgtgagacctagccagtggagttctattcgactgtggacatccccaacatttcagtggctcatcccagattctgccgatacaacagctaccccaactcactgcgcatacgacagaatcgtggttgcagggatgcttcttaggggggctgtcgtgccagactcggccctccctttcaacttccaggcagcttacggactaagtgatcagctcgctcaggccataagtgaccattacccagtggaagtgatgctaaaatag

SEQ ID NO: 4865 - RNA, 849 nt, synthetic construct
  misc_feature 1..849: note = source = /note="Description of Artificial Sequence: Synthetic coding sequence"
  source 1..849: mol_type = other RNA
atgcggggcatgaaactgctgggggcccttttagctcttgccgccctgctgcagggagccgtgtccctgaagatcgcagcctttaacatacagacgtttggagagactaagatgtctaatgccacactcgtgtcttacattgtacaaattctcagtcgttatgatatcgctttggttcaggaagtgagagacagtcatcttacagctgtgggaaaactgctggacaatttgaaccaagacgctcccgacacctaccactatgtggtctctgaacctctgggcagaaattcatacaaagaaagatatttatttgtgtaccgccccgaccaggtgagcgccgtagattcctattattatgatgatggctgcgagccttgtggtaatgacacgttcaacagagagcccgccatcgtccgctttttctcaagattcaccgaagtgcgggaattcgctatcgtgcctttacatgctgcaccaggcgacgcggtcgctgagattgacgccctatatgatgtgtatctcgacgttcaggagaagtggggtcttgaagacgtgatgctgatgggtgactttaatgccggatgctcttacgtccgtccgtcccagtggtcttcgattcgactgtggaccagtcccacttttcaatggctgattcctgactctgccgatactacagctacgccaacacactgtgcttatgaccggatagtggtcgccggtatgttactgcgcggagcagttgtgccagatagcgctttgccctttaactttcaagcagcatatggcttgtcagaccaactggcacaagccatctccgatcattaccctgtggaagtgatgcttaagtag

SEQ ID NO: 4866 - RNA, 564 nt, synthetic construct
  misc_feature 1..564: note = source = /note="Description of Artificial Sequence: Synthetic coding sequence"
  source 1..564: mol_type = other RNA
atgcatcaaactcctatcaccacatggtctgtaagccactgggacggcactgcaattcggagcgccacctgctcctgcacaggtcttactcgctgtttgcggtggaccgctacaaccaccatgatggctgcatctcctgccggaactaccccaagtacggaatctcagccactctctggctcaagccctggatcacaagacgtcatgctgatgggtgattttaatgccggttgctcttacgtaaggccttcgcagtggagctcaattcgtctctggacaagccctaccttccagtggctgattccagattctgcggatacaacagctacaccaactcactgcgcatacgatcgtattgtggttgccggaatgctcctccgcggcgcagttgtgccagactccgctctgccatttaacttccaggctgcctacggtctgtcggatcagctgttctccgtacacacatgttccggcgctggtcttggagaaagacacggcctgcccgcttccgcagccctcccatctaatacctgtcgcgctggcacgcatagagtgtccacctag

SEQ ID NO: 4867 - RNA, 6243 nt, synthetic construct
  misc_feature 1..6243: note = source = /note="Description of Artificial Sequence: Synthetic coding sequence"
  source 1..6243: mol_type = other RNA
atgctgcgggtgttcatcctctatgcagaaaatgtgcacacacccgatacagacatttctgatgcatattgtagtgcggtgttcgccggggtgaagaaaagaaccaaagttatcaaaaattccgtaaacccagtctggaacgaaggatttgagtgggacttaaagggcattccgcttgaccaaggcagcgagctgcacgtcgtcgtcaaggatcatgagacaatgggtcgaaatcgattcctgggagaggcgaaagtcccactgagggaggtgttggctaccccaagtctgtccgctagctttaacgcaccactccttgataccaaaaagcagcccactggagcttcattggtgctccaggtgagttatacccctctccccggcgcagtgcccctatttccaccaccaacccctctggagccctctcccacattgccagatctggacgtggtagctgacactggcggggaggaggatactgaggatcagggcctgacaggcgacgaggccgagccttttctcgaccaatcaggtggtcccggcgcgcccaccacacctcgtaagctgccttcacgtcctcctccacactacccagggatcaagagaaagcgctcggcacccacgtctagaaagctcctgtccgacaaaccccaggactttcagatacgtgtacaagtgattgaaggcaggcaactgcctggcgtcaatattaaaccagtcgtgaaggtgacagcggctggccagaccaaaagaactagaattcacaagggcaactcccccctatttaatgagaccttgttctttaatctcttcgactctccaggtgagctgttcgatgagcccattttcatcaccgtcgttgattctcggtctttacgtacagacgcgttgctgggcgagtttcgcatggatgttggcactatttatagggagcccaggcacgcatacctcaggaaatggcttcttctctccgacccggacgacttttcagcaggagctcgcgggtatctaaagacttccctgtgcgtgttggggccaggagacgaggcacccctagaaaggaaggatccatccgaagacaaggaggacatcgagtctaacctcctgcggccaactggtgtcgcccttaggggtgcccatttctgcctcaaggtctttagggctgaagatctgccacagatggacgatgcggtgatggataacgtgaaacaaattttcggcttcgaatccaataaaaaaaatcttgtggacccctttgtggaggtgtctttcgccggtaagatgctatgctcaaagatcctggaaaaaaccgccaatccacagtggaatcagaatatcacgttaccagcaatgttcccatctatgtgcgagaaaatgcgaattcgcatcatcgattgggatagactgacccataatgatattgtggccaccacctatctttcaatgagcaaaatttctgccccaggaggcgaaatcgaggaggaaccggcaggggcagtgaaaccatcgaaagccagtgatttagacgattacttaggcttccttcctactttcggcccttgttatatcaatttatatgggtccccgagggagtttactggtttccctgatccctacacggaacttaacactggaaagggtgaaggcgtggcataccgtggcagactgctcctgtctctggaaacgaagttggtggaacattccgagcaaaaggtggaggacttgcccgcggatgatattcttagggtggaaaaatacttgagacgcagaaagtacagtttgttcgcggctttctacagcgcaacaatgttacaagacgtggacgacgccattcagttcgaggtaagcataggtaattacgggaacaaattcgatatgacctgcctcccgctggccagcacgacccaatacagcagagccgtgtttgacggctgccactactattatcttccttggggcaatgtcaagccagtggttgtactgagctcctactgggaggatatcagtcaccgaatcgagacacagaatcagctgctgggaatagcagatcgcctagaagctgggcttgagcaggtgcatctcgcccttaaggcacagtgcagcactgaagatgtcgatagcctggtggcacagctgaccgacgaactaatcgccggttgcagtcaacctttgggcgacattcatgaaacacctagtgcgacgcacctggaccagtacctgtaccagctgcgaacgcatcacctgtcccagatcacagaagcagctctggcactcaagcttggtcattcagagctccctgcggcgctggaacaggcagaggattggctgctgcgcctgcgagcattggctgaggaaccccaaaatagcctgcctgacatagttatctggatgttgcagggtgacaagcgcgtggcctatcaacgcgtgcccgcacatcaagtgctgttttccaggcgcggggcgaactattgcggcaagaattgcggcaaactacagaccatctttttaaaatatccaatggaaaaggtgccgggggcgcggatgcccgttcagattcgcgtgaagctctggtttggcctgtctgtggacgagaaggaatttaatcaatttgccgagggaaagctgtctgtatttgccgagacctatgaaaacgagaccaaactggccctcgtgggtaattggggcacaaccgggctgacgtatccaaaattcagcgatgttaccggaaaaataaagctacctaaagattcgttcagaccctccgccggttggacttgggccggagactggtttgtgtgccccgaaaaaactctgctgcatgatatggatgccgggcatctttccttcgtagaagaggtgttcgaaaatcaaacgcggctccccggggggcagtggatatatatgtcagacaattatacagacgtgaacggtgagaaagtgctgccaaaggatgacatcgaatgtccactcggatggaagtgggaagacgaagagtggtccaccgacctgaaccgggctgtagatgaacagggctgggagtactcaattaccatcccaccagagcggaagccaaagcattgggtcccagccgaaaagatgtattatacccatcggcgcaggagatgggtgaggctgagacggagggacctgagccagatggaggctttgaaaagacaccggcaggctgaggctgagggcgagggatgggaatacgcgtccctatttggctggaaattccatcttgaataccggaagaccgatgcgttccgcagacggaggtggagaaggcggatggaaccgttagagaaaacaggccctgcggccgtctttgcccttgagggcgcactgggcggcgtcatggacgacaaatcagaagatagcatgagtgtcagtaccctgagttttggtgtgaacaggccaaccatctcatgtatcttcgactacggaaaccggtatcatctcaggtgttacatgtaccaggcacgagatctggcagccatggacaaagattcatttagtgacccctacgcaatcgtctcgttcctacaccaatcccagaaaacggttgtagtcaagaatacactaaaccccacatgggatcagaccttgattttctacgagatagaaatctttggtgagcctgcaaccgtggctgaacagccaccaagcattgtggttgaactctatgatcatgacacctatggagctgacgaattcatggggcggtgcatatgtcagccctccctggagagaatgccaagattggcctggttcccactcacccgcggcagccagcccagcggggaactcctggcgagttttgagctaatccagcgcgagaaacctgccattcatcacatacctggatttgaagtgcaagagactagccgaatccttgacgaatccgaggatactgatcttccctatccaccacctcaaagggaggcgaacatttatatggttccacagaacatcaagcctgcactccagagaactgctatcgaaatcctcgcctggggactgcgcaacatgaagtcctaccaactggctaacatttcttctccttcactggtcgtcgaatgcggcggtcagacagtccagagctgtgtcatcagaaatctgagaaaaaatcctaactttgacatctgtacactcttcatggaagtgatgctgcctcgcgaagagttgtattgtccccccattaccgtgaaggtgatcgacaatcgccagttcggacgcaggcccgtagttggtcagtgcacaattcggtctctcgagagtttcctctgcgacccatactctgccgaatccccgtcccctcaaggcggccccgatgacgttagcctgttgagccctggcgaagatgtcctaattgatattgacgataaggaacctctgatacctattcaagaggaggagttcattgactggtggagtaagttcttcgcctcaattggagagcgggaaaaatgcggcagctatcttgaaaaggacttcgataccctgaaggtatatgacacacagctcgaaaacgtcgaggcattcgagggcctgtctgacttctgtaatacattcaagttatataggggtaagactcaggaggagacggaagacccctcggtcatcggtgaatttaaaggcctctttaaaatctatcccctccctgaggacccagccatccctatgccacctcgccagtttcaccagctggccgcacagggcccccaggaatgtctcgtgcggatctacatcgtacgcgcctttggcctacaaccgaaggacccaaacgggaaatgtgacccatacataaagattagtattggcaaaaagtctgtcagcgaccaagataactacataccctgtaccctggagcctgtattcgggaagatgtttgagttaacatgcacactgcccttagaaaaagatctcaaaattactctctacgattatgacctgctctctaaggacgagaaaataggagaaacagtcgtggatctggagaacagactgttgagcaagttcggcgctagatgtgggttgccccagacctattgcgtctccgggcccaaccaatggcgcgatcaattgaggcccagccagttattacatctgttctgtcagcagcaccgggtgaaggcccccgtataccgaactgacagagtgatgtttcaggataaagagtactcaattgaagaaatcgaggctggtaggatccccaaccctcatctcggacccgtagaagagaggctggctttacacgttctgcagcagcagggattggtcccggagcacgttgagagtagacctctatacagcccactccagccagacatcgagcagggaaaactccagatgtgggtggaccttttccctaaagccctcggccgcccaggccccccgttcaacatcaccccacgaagggctcggcgattttttctcaggtgcatcatctggaacactcgggacgtcattcttgatgatctgagcctgaccggcgaaaagatgtccgatatctatgtcaaaggctggatgattggctttgaggaacacaagcagaaaactgatgttcactatcggtctctgggcggcgaaggaaatttcaattggcggttcatcttcccgtttgattacctccctgccgagcaggtctgtaccatagcaaagaaagatgccttctggcgtctagacaagacagagagtaagatccccgcaagagttgtgtttcagatatgggacaacgacaaattttcctttgacgacttcttagggtccctccagctggatctaaatcgtatgccaaagcccgcgaagactgccaaaaagtgtagtctggaccagctcgacgatgccttccaccccgaatggtttgtgagcctctttgagcagaagacagtgaagggttggtggccctgtgttgcagaagaaggcgagaagaaaatactggcaggcaaactggaaatgacactggaaatcgtggccgaatcagaacacgaagagcgacctgctggacaagggcgagatgaacccaatatgaaccccaagctggaagatccacgcagacctgatacctcatttctgtggtttacttctccttataagactatgaaattcatcctgtggcgaagatttagatgggcaatcatcctcttcatcatcctgtttatcttactgctgttccttgctatctttatttacgctttccctaattacgctgccatgaaattagtcaaacccttcagctag

SEQ ID NO: 4868 - RNA, 6246 nt, synthetic construct
  misc_feature 1..6246: note = source = /note="Description of Artificial Sequence: Synthetic coding sequence"
  source 1..6246: mol_type = other RNA
atgctctgttgtctcttggtgcgagccagcaacttaccgtctgccaaaaaagacagaagatctgatcctgtagcctcactcacatttaggggggtgaagaagcggacaaaagtaatcaaaaatagtgttaaccctgtttggaatgaaggatttgaatgggacctgaaggggattcccttggatcagggaagcgagctacacgtcgttgtgaaggaccatgagaccatggggaggaacaggttcttgggggaggctaaggtccccctccgcgaggttctagcaaccccctccctttccgccagcttcaacgcgcccctgctggataccaaaaagcagcctaccggggcctctctggtcctccaggtgagctataccccattgcctggtgctgtacctctgttccccccacctacgcctctggagccatcaccaacgttgcccgacctggatgttgtagctgacactgggggtgaggaagataccgaggaccagggtctaaccggagatgaagccgaaccttttctcgaccagtccggaggacccggggcaccgactacaccacgaaagctcccttcccggcctccccctcactatccaggaatcaaacgaaaacggagcgccccaacctcacgcaagcttctgagcgataaaccacaggacttccagatacgcgttcaagtgattgagggccgccagctgccgggtgtgaatataaagcctgtcgtgaaggtgaccgctgctggtcagactaaacgtactaggatccataagggtaattcaccactgtttaacgagacactgttcttcaacctcttcgattcccctggtgagcttttcgacgagcctatctttatcaccgtggtcgattcaaggagtctgaggaccgatgctcttcttggcgagttccgcatggatgtagggactatttaccgggagcccagacatgcctacctgcgcaagtggttactgttgtctgatcctgacgacttcagtgctggagcgaggggatacttgaaaaccagcctttgtgtcctggggcccggggatgaggcccccctagagagaaaagacccatcggaggacaaggaagatatagagtctaatctgctacggccaactggggttgcattaaggggggcacacttttgtctgaaagtttttagggctgaggacctccctcaaatggatgacgccgtaatggataatgtaaaacagatattcggttttgagtctaataaaaaaaatctcgtcgatcctttcgtcgaggtttccttcgccggaaaaatgttgtgcagcaagatcttagaaaaaacagctaacccccagtggaaccagaacatcacactccctgccatgtttccttcaatgtgtgaaaaaatgagaattcgaattatcgactgggaccgattgacccataacgacattgtggctaccacatatctcagtatgtctaagattagtgctccaggaggtgagatagaggaggagcccgccggcgcggtcaagcctagcaaagcctccgacttggatgattatctcgggttcttgcccacgtttggcccatgttacatcaatctttacggtagccctcgcgagttcactggctttccggatccctacacggaactaaatactgggaagggcgagggagtggcgtatcggggacggctgctgcttagtctggagaccaaactggtggagcatagcgaacagaaggttgaagatcttcccgccgacgacatattgcgagtagaaaagtacctcagacgcaggaagtactccctatttgcagctttctattcggccacaatgctgcaagacgtggatgatgcaatccagttcgaagtttccataggaaattatgggaataagtttgacatgacctgtctccctctagcttccacaacacagtactccagagctgtgttcgatgggtgtcattattattacttgccctggggcaatgttaagcctgtggtggtcttgagtagttattgggaggacattagtcatcgcatagaaacacagaaccagcttctagggattgctgatcggttagaagcaggactggagcaggtacacttggcgctcaaagctcagtgttctaccgaggatgtcgacagtctagtcgcccagctaaccgacgagttgatcgcaggctgtagccagcccctgggggacatccacgagacccctagcgccacacacctggatcagtatctttaccagctccggacacaccatctgagccagattacagaagccgctcttgccctcaaactaggccactctgagttgcctgctgccctagagcaagcggaagattggctcctgcgcctgagagccctggccgaagagcctcagaacagccttcccgatattgttatctggatgctacagggtgacaaacgcgttgcctaccaacgcgtgccggctcaccaggtactgttctcccgtcggggagcgaattactgcggaaaaaactgtggaaaactgcaaacgatcttcttgaagtaccctatggaaaaagtgcccggagccaggatgcccgttcaaattcgagtgaaattatggttcggccttagtgtagatgaaaaagagttcaatcagttcgctgagggtaaactcagtgtttttgctgagacttatgaaaatgaaactaaactggcacttgtcggtaattgggggaccaccggactaacatatccgaagttcagcgatgtgacagggaagatcaagctgcctaaggattcattccgtcccagcgcaggatggacttgggcaggtgattggttcgtgtgccccgagaagactctgctgcatgatatggatgccggtcatctctcctttgtagaggaggtgtttgagaaccagaccagacttcccggggggcagtggatctatatgtcagataactataccgatgtgaatggggaaaaagtactccctaaggatgacatcgaatgcccactgggctggaaatgggaagacgaggagtggtcaaccgacttaaaccgcgcggtggatgagcagggctgggagtattcgatcaccatccctccagagaggaagccgaaacactgggtacctgccgaaaagatgtattacactcacaggcggaggagatgggtgcgactgagacgccgggatttgagccagatggaagccctgaagaggcaccgtcaggcagaggctgaaggggagggctgggagtatgcgagcctgttcggttggaagtttcatttagagtaccgcaagacggacgcgttcaggagacgacgctggcggaggagaatggagcctcttgagaagacaggtccagccgcagtatttgccctcgagggagctctcgggggagtgatggatgataagagtgaggattccatgtcagtttcgaccttgtcgttcggcgtaaatagacccacaatctcctgtatcttcgactacgggaacagataccacttgcgttgttacatgtaccaagcccgtgacctcgccgcgatggataaagactctttctctgacccctacgccatcgtcagcttccttcatcagtcccagaaaacagtcgttgtgaaaaataccctgaacccgacttgggatcagacactgatcttctatgagattgagatcttcggggagcctgccacagtcgccgagcagcccccctccattgttgttgagctttatgatcacgatacatacggcgccgacgaatttatgggacgctgtatttgtcagccgagcctggagagaatgccaagacttgcctggtttcctctgaccagaggaagccaaccttccggagagcttctcgcctcattcgagctgatacaacgggagaagcccgctattcatcatattcctggattcgaagtgcaagaaaccagcaggattctcgacgaatccgaagatactgacctgccttacccaccaccacaaagggaagcaaatatttacatggtgccacagaacatcaagcctgctttgcagaggaccgccattgaaatccttgcatggggacttcggaatatgaaatcttaccagctggctaacatatcctccccctctcttgtggtcgagtgtggagggcagaccgtgcaaagttgcgtgattagaaatctgcgtaagaaccccaatttcgacatttgcactctttttatggaggtgatgctgcctcgcgaggaattgtattgtccacccattacggtaaaggttatcgataataggcaattcggacgcaggcctgtggttggacagtgtacaatcaggtcactggaatcctttctgtgtgacccctacagcgctgaaagtcctagcccacagggggggcctgatgacgtgtcactgttatcccccggcgaagacgtgctcattgacatcgacgacaaagagcccttgattccaatacaggaggaagaatttatcgattggtggtctaagttcttcgcatctatcggcgaacgggagaaatgtgggagctatctcgaaaaggatttcgacaccctgaaggtgtatgacacgcaactggaaaacgtggaggcttttgagggcctgagcgatttttgtaatacctttaaattatatagaggaaagactcaggaagagaccgaggacccctccgtaattggagaatttaaggggctctttaagatttaccctttgcctgaggatcccgccatccccatgcccccaagacagttccaccagctggccgctcaaggaccccaggaatgccttgttagaatttacattgtgagagcctttggcctgcagccgaaagatcccaacggtaaatgtgatccgtacattaaaatcagcataggtaaaaagagtgtgagcgaccaggataactacattccctgtacattggagcccgtgttcggaaagatgttcgaactcacatgcactctcccactggaaaaggacctgaaaataaccttgtatgactacgacctgctttcaaaggacgaaaaaatcggggaaactgtagtggacctggagaaccgtctgctgtccaagtttggagctagatgtggactcccccagacctattgcgtctctgggcccaaccagtggagagatcagttaagaccttcccagttattacatttgttttgccagcagcacagggtaaaagcacctgtttacaggactgaccgggtgatgtttcaagacaaagaatattctatcgaggagattgaagccggccgcatccctaatccccatctgggccctgtggaggaacgcctggctttacatgttctacagcagcagggtctggtacctgagcatgtcgagtcgaggccactgtactcacctctgcagccggacatagaacagggcaagctgcaaatgtgggttgatctgtttcccaaggctctgggaagacctggtccacctttcaacattacccctcggagggcacgcagattctttctccggtgcatcatttggaacacaagagatgttatcctcgatgatctctctttaacgggcgagaagatgagcgacatctacgtgaagggatggatgattggattcgaggagcacaagcagaaaaccgatgtgcactacagaagtttagggggagaaggaaacttcaattggcggtttatcttcccattcgattacctcccggctgaacaggtctgtacgatagccaagaaggatgcattctggcggctggacaaaacagagagcaagattcccgccagagtggtctttcagatttgggataatgacaaattctcttttgacgacttcctcggatccttacaactagatctgaataggatgccaaaaccggccaaaacagcaaagaaatgcagtctggatcagctggacgatgctttccaccccgagtggttcgtgtcattgtttgagcagaaaacggtcaaaggctggtggccctgcgtggccgaggagggcgaaaagaagattctcgctggaaagttagaaatgaccctggaaattgttgcggagagtgaacacgaggagagacccgctgggcaagggagagacgaaccaaacatgaatccaaagttagaggatccaagacggcctgatacgtcttttctctggtttacgagcccctataagacaatgaagtttattctctggcgcagatttcggtgggcaatcattcttttcataatcctgtttatacttcttcttttcctggctatttttatctacgccttcccaaactacgctgcgatgaaactagtgaagccattctcctag

SEQ ID NO: 4869 - RNA, 6309 nt, synthetic construct
  misc_feature 1..6309: note = source = /note="Description of Artificial Sequence: Synthetic coding sequence"
  source 1..6309: mol_type = other RNA
atgttgtgttgtcttttggtcagagcatcaaatctgccctcagccaagaaggacaggcgctctgacccagttgcctctctgacctttcgcggtgtgaagaaacgtactaaggttatcaagaattctgtgaaccctgtgtggaacgaggggtttgaatgggatttaaaaggcatcccactggaccaagggagtgaattgcacgtggtagtgaaagaccacgaaaccatgggaagaaatcggtttctgggggaggccaaggtccctctgcgtgaagtgctcgctacacctagcctgtccgcatctttcaacgcacctttattagacacaaagaagcaacctacaggtgcttccctggttctgcaggtgtcctatactccactgcctggcgcggtgcctctgttccctccaccaacgccactagaaccctccccaactctgcctgacctcgacgtcgtggcagacaccggaggcgaagaagacaccgaagatcagggcctgactggcgatgaggccgagccttttctggatcaaagcggcggtcccggagcccccaccaccccgagaaagctcccttctagacccccacctcattatcctggaataaagcggaagcgatctgcgccaacatctaggaagctactgagtgacaaaccccaggatttccaaattcgtgtgcaggtgattgagggacgacagctgcctggagtcaatatcaaacctgtggtcaaagttactgccgctggccagaccaaaaggacgaggatacacaaaggtaacagtcccttatttaatgagaccctgttttttaatttgttcgacagccctggggagctcttcgacgaacctatatttattacagtggtggatagtcggtctctacgtacagatgctttgctgggagaatttagaatggacgttggcacaatttaccgggagcctaggcatgcctacctcaggaaatggttattactgagcgaccctgatgacttctctgccggcgctaggggatatctcaaaaccagtctctgcgttctcggtccaggtgatgaagccccacttgaaagaaaagatccatccgaggataaagaggacattgagtctaacctcctccgaccaacaggcgtggccctccgcggggctcatttctgcctcaaggtttttcgggcggaggacttaccccagatggacgacgcagttatggacaacgtcaaacagatcttcggcttcgaatcaaacaaaaagaatctcgtggacccattcgtcgaagtgagctttgctgggaagatgctgtgcagcaagatcttagagaagaccgcaaacccacagtggaatcaaaacatcacccttccagcaatgtttccttcaatgtgtgaaaaaatgagaatcaggatcattgactgggatagactcacccacaacgatatcgtcgccactacatacctgagcatgtcaaaaatttccgcaccaggcggtgaaatcgaagaggagcctgccggcgccgtgaaaccgagcaaggcatcggacctggacgactatctgggctttctccctactttcggcccctgttacattaacctctacggttctccgcgggaatttacaggattccctgacccctatacggagctcaacacggggaagggcgaaggggtggcctatcggggacgtctgctactttcactggagacaaagctcgtcgaacacagcgaacaaaaagtggaagatcttccggctgacgatatcctgcgagtggaaaaatacctgcgccgccgaaagtattccttatttgcagccttctactcagccacaatgcttcaggacgtcgatgacgcaatacaattcgaggtaagcatcggcaattatggaaataagttcgacatgacttgcctgcccctcgcatcaaccacgcaatactcaagagctgtatttgacgggtgtcactattattatcttccgtggggaaacgtcaagcctgttgtcgtgctctcttcttattgggaggacatctcgcaccggatcgaaacacagaaccagctgcttggcatagcagataggctggaggctggcctagagcaggtccacctcgccttgaaggcccaatgctccacagaggatgtcgactcactcgtggcccagctgacggacgagctgatagccggatgttcacagccgttaggagacatccatgagactccttctgccactcatctagatcagtacctttaccagctcaggactcatcacctgtctcaaattaccgaagcggcactagccctgaagctaggacactctgagttgcccgcagctctggaacaggcagaggactggctgctgcgactccgcgctttagcggaggagccgcagaattctcttcccgacattgtcatctggatgctgcagggggacaagagagtggcctaccagcgggtgccagcgcaccaggtgctgttctcacgtcggggtgcaaactattgtggaaagaattgtggcaaactccagactatatttttgaaatacccgatggaaaaggttcctggggcccgcatgcctgtgcagattcgtgtgaaactttggtttggtttgtccgtggacgagaaagagtttaatcagttcgcagaaggaaagctcagtgtgttcgcagagacgtacgagaatgagacaaaacttgctctggtgggtaactggggaacaacaggactcacatacccaaagttcagtgatgtgacgggaaaaatcaagctccccaaagatagcttccgcccctccgctggctggacatgggctggagactggtttgtttgcccagagaagaccctcctgcacgatatggacgctggtcacttaagcttcgttgaggaggtgttcgaaaatcaaacgcgattgccaggggggcagtggatttacatgagcgataactacaccgacgtgaacggcgagaaggttttaccgaaggatgacatcgagtgcccccttggatggaagtgggaagatgaagagtggagtactgatctgaacagggctgtcgatgagcaaggttgggagtactccattactatccctccagagaggaagccaaaacactgggtgcctgctgaaaaaatgtattacacccatagaaggagaaggtgggtgagactgaggagacgggacctctcacaaatggaagccttgaaacgccatcgacaagccgaggccgaaggggaaggatgggaatacgcctccctattcggatggaagttccacctggagtacagaaagacggatgctttcaggcggagaaggtggcgcagacgaatggagcctttagaaaagactgggcctgcagctgtattcgctctggagggagcactcgggggtgtgatggatgacaagtctgaagacagcatgagcgtttccacgctttcctttggtgttaaccgtccaacaatctcttgcattttcgattatggtaaccggtaccatctcaggtgttatatgtatcaggccagggaccttgccgcaatggataaagacagcttctcggatccatatgctatcgttagcttcctccaccagagtcagaagaccgtggtcgtgaagaacaccttaaatccaacttgggaccaaactttaattttttacgaaatcgagatctttggggagcccgccacagtggccgagcagcctcctagtattgtggtcgaactgtacgatcacgacacctacggtgcagatgaatttatgggtagatgtatctgccagccctcactagagcgcatgcccagactggcttggttcccactgactcgaggatctcagccgagtggagaattactggccagcttcgagttgattcaaagggaaaaaccagccatacatcacatccccggctttgaggtgcaggagacatcacggatcctcgatgaaagtgaggacacagacctcccttaccctcccccacagcgcgaagccaatatctatatggtgccacagaacatcaagcccgctttgcagcgcacagccatcgaaatcctggcctggggactgcggaatatgaagagctatcaactggcaaacatctcaagccctagcctggtagttgaatgtggcgggcagaccgtgcaaagctgcgtgattcgaaacctgaggaagaaccccaatttcgatatttgcacacttttcatggaggttatgctgccaagggaagagctctactgcccacccatcacagtaaaggttattgacaaccgccagtttggaagacgcccagtggttggacagtgtacaattaggagcctggagtcctttctgtgtgatccttatagtgcagaatccccaagtccacaaggtggccccgatgatgtctcactgctgagtccaggtgaagacgtgctgatcgacatcgatgacaaggagcctctcatccccatccagcttgcagacgggctgagttctctggcccccactaataccgcaagcccgccctcatccccacacgaggaagaatttatcgactggtggagtaaattctttgctagcatcggagaaagggaaaagtgtgggagttacctggaaaaggatttcgatacgttgaaggtttatgacactcaattggagaatgtcgaggcattcgagggccttagcgatttctgcaacactttcaagctctaccgaggtaaaacacaggaagagacagaagatccctctgtcatcggcgaattcaaaggactgttcaagatttacccccttccagaagaccccgctatcccaatgcctcccagacagttccatcagctggccgcccaggggccacaggagtgcctcgtgcgtatttatattgtccgagcattcggattgcagccaaaagatcctaatggcaaatgcgacccctatattaaaatatcaatcggtaagaagtctgtgtccgaccaagacaactatatcccctgcactctggaaccggtttttggaaaaatgtttgagctgacatgtaccctacccctggaaaaggacttaaagatcacattgtatgactacgatctgctgtctaaggacgagaagataggggaaacggtggtagacctggagaacaggctgttgtctaaatttggcgcccgctgcggtctgccacagacgtattgtgtttccgggcctaatcaatggagagaccagttgagaccttcgcagctactccacttattctgtcaacagcaccgggtcaaggctccagtttaccgcaccgatcgggtaatgttccaggacaaggagtattcaatcgaagagatcgaagcaggaagaatcccaaacccccatctgggtccggttgaagagcgacttgccctgcacgtgcttcaacagcagggcttggtccctgaacatgttgaaagtaggccactctactcaccgctgcagcccgacattgaacagggaaagttgcaaatgtgggtggacttatttcccaaagcactcggtagacctggcccccccttcaacattactccacgacgagctagaaggtttttcttaagatgcattatttggaacacaagggacgtaattctggatgatctctcactcactggagaaaaaatgagcgacatctatgtgaaggggtggatgataggctttgaagagcataagcagaaaacggacgtccactataggagtctgggaggcgaaggtaattttaactggcggtttatctttccctttgactatcttcctgcagagcaggtgtgcaccattgcgaaaaaggatgcattttggcggttagataagaccgagtctaagatccccgctcgtgttgtgttccagatctgggataatgataagttcagcttcgacgacttccttggtagtctgcagcttgacctcaacaggatgccaaaacccgccaagacagccaaaaaatgctccctcgatcagctggacgacgcatttcaccccgaatggtttgttagtttgtttgagcaaaagaccgtgaaaggatggtggccctgcgtggccgaagagggagaaaagaagatccttgccgggaaactggagatgactctggaaatcgtggccgagagtgagcatgaagagcggccagcaggacagggaagggatgagccaaacatgaaccctaagctagaggatcccagaagaccagacacaagttttctgtggtttacctcgccctacaaaacaatgaaatttatattgtggcggcggtttcgctgggccatcatcttgttcatcatcctcttcatccttctgcttttcctggccatcttcatttatgcatttccaaactacgccgcaatgaaactcgtcaaacctttttcttag

SEQ ID NO: 4870 - RNA, 6357 nt, synthetic construct
  misc_feature 1..6357: note = source = /note="Description of Artificial Sequence: Synthetic coding sequence"
  source 1..6357: mol_type = other RNA
atgctaagagtgtttattctatacgcagaaaatgtgcacacacctgatactgatatcagcgacgcctactgttctgccgtgtttgctggtgtcaaaaaaaggaccaaggtgattaaaaatagtgtaaatccggtgtggaatgagggattcgaatgggacttaaaaggaataccgctcgaccagggttccgagctgcatgtggtggtgaaggatcatgagaccatgggtcggaaccgcttcctaggggaagccaaggtaccactcagggaggttctcgccacaccatctctgtcagcctccttcaacgccccccttctggacaccaaaaagcagcctacaggagcctctctggtattgcaggtatcttataccccccttcctggggccgtacctctttttcccccaccaactccattggagccgagcccaactctgcctgatctagacgtcgtggcaggaggcggacaatccagggccgagacatggagtctgttgtccgacagcactatggacacccgctactctggtaagaaatggcccgccccaaccgacacaggaggggaggaggataccgaggatcagggcctgacgggagatgaagctgagcccttcttggaccagagcggcggaccaggagccccgactacaccaagaaagctgccatccagaccgccccctcactatcccggcattaagaggaagcgcagcgctccaaccagtagaaaacttctgtccgacaagccacaagactttcaaattagagtgcaagtgattgagggaaggcaactacctggggtcaatatcaagccagtagtgaaggttaccgctgccggacaaaccaagcggacacggattcacaaaggtaacagtcctctcttcaacgaaacactattctttaacctgtttgatagcccaggcgagttgtttgatgaacccatctttattacagtcgtggactctaggtcactgagaacagatgcactgctcggcgagttccgcatggacgtgggaactatctacagagaaccgcggcatgcgtatctgagaaaatggctcctcttaagcgatcccgatgacttctctgctggagcaagggggtaccttaaaacctctctgtgtgtgttaggacccggcgacgaagccccactggagagaaaggatccaagcgaggataaagaggatatagaatccaatctgttaaggccaaccggggtagctttgagaggggcccatttttgtctgaaagtgttccgggccgaagacctaccacagatggatgacgctgttatggacaacgttaaacagatcttcgggttcgagtctaacaaaaagaacctcgtggatccgtttgtagaagtttccttcgccgggaaaatgctgtgtagcaaaatcctggagaagaccgcaaacccccagtggaaccagaatataaccctcccggcaatgtttccctcaatgtgcgaaaagatgagaatcagaatcatcgattgggaccggctgacccacaacgacatcgtcgctaccacctacctgagcatgtcaaaaatcagcgccccaggaggtgaaattgaagttgacgactacctaggatttctccccacatttgggccttgctacatcaacctgtatggatcaccaagagagttcacggggtttcccgacccctatactgaattgaacaccgggaagggagagggggtcgcatatcgcggaaggctcttgctgtctctcgaaactaagttggtcgaacattctgagcagaaggtcgaagacctccccgctgatgatatactgagagtcgagaagtatctccggcgccggaaatactcactgtttgccgccttctactctgctactatgctccaagacgtggacgacgctatccagtttgaagtctcgatcggaaactatggcaacaaatttgacatgacttgcctacctctcgctagcactacgcaatactcaagggcagttttcgacggctgtcactattactacttaccctggggaaatgttaagcccgtcgtggtcttatcctcttattgggaggatatctctcacaggatcgagactcagaatcagctgcttggcatcgctgaccgactggaggccggcctggaacaggtgcacctggctcttaaagcccaatgtagtaccgaggacgtggatagtctggtagcccagctaactgacgagctcattgccggctgttctcagcccctgggtgacattcacgaaacgcctagtgccacgcatctggatcaatatttatatcagttaaggacgcatcatttgtcccagatcacagaggccgccctcgctctgaaactgggccattccgaattgccggcagctctggagcaagcagaggactggttgttgagacttagagcattagcagaagaacctcaaaactctctgccagatatcgttatctggatgttgcaaggtgataagagggttgcatatcaacgggtgccagctcaccaggtgcttttcagcagaaggggggctaactactgtgggaagaattgtggaaagctccagacgatcttccttaaataccccatggagaaagttcctggagcacgtatgccagtgcagatccgggtgaagctgtggtttggactaagcgtggacgaaaaagaatttaaccaatttgccgagggtaagttatccgtgttcgcagaaacatatgagaacgagacaaagctggcactggtgggaaattgggggactactggtctgacttatcctaaatttagtgacgtgacgggaaagatcaagcttcccaaagattcatttaggccaagtgccgggtggacctgggccggagattggttcgtttgtccagaaaagactttactgcatgacatggacgccggacatctctccttcgtcgaggaagttttcgaaaatcagacccggttaccgggtgggcaatggatctatatgagtgacaactacacggacgttaacggggagaaggtgctgcctaaagacgatatagagtgtcccctcggttggaagtgggaggacgaggaatggagtacagatctcaatcgagcagtggacgagcagggttgggaatacagcattacaattccacctgagagaaaacccaaacattgggtgccagccgagaaaatgtactacacccataggcgtagacgatgggttagactccgccgccgcgacctgagccagatggaggcactaaaacgccacagacaggcagaggcagagggcgaaggctgggagtacgcaagtctatttggatggaaattccacctggaatacagaaagacggacgcttttcgcaggaggcggtggcgacggcgcatggaacccctcgaaaaaacagggccagccgcagtgttcgcactggaaggtgcccttggcggggttatggacgataaatcagaagacagtatgtcagttagcactctcagcttcggcgtgaaccgcccaaccatcagttgtatttttgattatgggaataggtaccacttgcgttgctatatgtaccaggcacgcgacctggccgccatggacaaggattcattttcagacccctatgcaatagtgtcctttctgcatcaaagtcaaaaaaccgtggtagttaagaataccttaaacccaacttgggatcagaccctcatattttatgaaattgagattttcggggagccagcaaccgtagcagagcagccccctagcattgtggtggaattatacgatcatgacacctacggcgctgatgagtttatgggtcgatgtatttgtcagcctagcttagaaagaatgcctcgcctggcttggttcccgttgacccgaggttctcagcccagtggggagctgctggcttcttttgagctgattcaacgcgagaagcctgccatccatcacatccccggttttgaagttcaggagacctcccggattctcgacgaatctgaggatacagacctgccttacccacctccccagcgcgaagccaacatttacatggtcccccaaaacatcaaacctgctctgcagaggacagcaatcgaaattttggcctggggcctccggaatatgaagagttaccagttggccaacataagttctcctagtttggtggtcgaatgcggcggtcagaccgtgcagagctgcgtcattcgcaatttaagaaagaatccaaatttcgacatttgcaccttgtttatggaggtgatgctgccacgagaagaactctactgcccacccatcacagtgaaagtgatcgataaccggcagtttggcaggcgcccagtcgtcgggcagtgtactataaggagtctcgaatccttcctctgtgacccatactctgccgaaagtcccagccctcagggggggcccgacgatgtgagccttctttctccaggagaggatgtccttatcgatatcgacgataaagagcccctgatccctatacagttagctgatggtctcagcagcttggcaccaaccaatacagcttcacccccaagttcaccccacgaggaggagtttatcgactggtggtccaaattctttgctagtattggcgaacgggagaagtgtgggagctacttggaaaaagattttgataccctgaaagtgtacgatacccaactagaaaacgtcgaagcatttgagggtctcagtgacttttgcaatacatttaaactgtacaggggcaagacgcaggaagagacagaagatcctagtgtgataggagaatttaagggcctcttcaagatttatcccctaccggaagatccagccatccctatgccaccccggcagttccatcagcttgccgctcaagggcctcaggaatgtctggtgcgaatctatatcgtgagggctttcggtctgcaaccaaaggatcccaatggcaagtgtgacccctatatcaaaatctcgatcgggaagaaaagtgtctcggatcaggataattacattccctgtacactcgagccagtgttcgggaagatgttcgagctgacttgcaccctgcctttagaaaaggacctgaaaatcaccctttacgattatgatctcttaagtaaggacgagaaaatcggcgagacggtagttgatctcgagaatagactccttagtaaattcggcgcgaggtgtggtttgcctcagacctattgtgtgtcgggaccgaaccagtggagggatcaactgaggccttcacaactgctgcacttgttctgccagcagcatcgtgtgaaagctcccgtctatcggaccgaccgtgtgatgttccaggacaaggagtacagtatcgaggaaatcgaggctggacgtatccctaatccccatctgggaccggtggaagagcgacttgccttgcacgtgctgcaacagcaggggcttgttccagaacatgtggagtctcggccattatattccccattgcaacccgatatcgagcaggggaagctccagatgtgggtggacctgtttccaaaggcccttgggagaccaggccccccattcaacattaccccacggagagcgcgccgttttttcctgagatgcatcatctggaatacccgtgacgtgattctggatgatctgtcgctcacaggtgagaaaatgtccgacatttacgtcaaaggctggatgatcggctttgaagagcataaacagaagaccgacgtgcattacagatctctgggcggggagggtaatttcaattggaggttcatttttccctttgactatttgcctgccgagcaggtgtgtacaatagctaagaaagatgctttctggcggctcgacaaaacagagtcaaaaatacccgcaagagtagtgttccaaatttgggataatgataagttttccttcgatgactttctcggatcccttcagctggacctgaaccggatgcccaagccagcgaagactgccaagaagtgctctctggatcaactggacgacgctttccatcctgagtggtttgtgtcactgttcgagcaaaagaccgtgaaaggatggtggccttgcgttgctgaggagggtgagaagaagatcctcgctgggaaactcgaaatgactctcgaaatagttgccgaatctgaacacgaggagagacctgctgggcagggtagagacgagcctaacatgaatccaaaactcgaagacccgcggaggcctgacacctcctttctctggtttacaagcccttacaagactatgaagtttatcctttggcggcgcttccgctgggcgattatactgttcattattttgttcatactgcttctgttcctggcaatcttcatttatgcattcccgaactacgccgcaatgaagctggtaaaacccttttcttag

SEQ ID NO: 4871 - RNA, 6339 nt, synthetic construct
  misc_feature 1..6339: note = source = /note="Description of Artificial Sequence: Synthetic coding sequence"
  source 1..6339: mol_type = other RNA
atgctgtgctgtcttctcgtccgcgctagcaatctccccagtgccaagaaggaccgccgatcagaccccgttgctagcttgactttccgcggagttaaaaaacggactaaggtaattaagaattctgtcaaccccgtgtggaatgaaggcttcgagtgggacctgaaagggataccactggatcaggggtctgagctgcatgtggttgtgaaagaccatgaaacaatggggcggaatagatttctaggtgaagccaaggttccgttgcgagaggtgctcgctactccatctctgagtgcaagctttaacgcgcccctgttagacaccaagaagcaacccaccggcgcctctctggtactgcaagtttcctatacaccgctcccaggtgctgtccctctgtttcctccaccaacccctcttgagccgagcccgacacttcccgacttggacgttgtcgccggtggcggtcagagtagagctgagacgtggagcctattgagcgatagcactatggatactcggtatagcgggaaaaagtggccggcccccactgatactggaggcgaggaggacaccgaggaccaggggctgactggtgacgaggctgaaccctttcttgaccaaagtgggggccccggcgctccaactactccacgcaaactcccatctcggcccccgccacattaccccgggatcaaaagaaagcggtccgccccaactagccgcaagctcttgagcgacaagccccaggactttcagatccgagtgcaggttatcgaaggcagacaacttcctggagtcaacatcaagcctgtggtgaaagtcacggcggccggccagaccaagagaaccagaatccacaaaggtaacagccccctgttcaacgagactctgttttttaacttgtttgactcacctggtgagctgtttgatgagccaatctttatcacagtagtcgatagccgcagtctccgcactgacgctctgctgggagaatttaggatggatgttgggaccatctatcgagagcctcgccatgcctatcttaggaagtggctgttattatcggatcccgatgatttttccgccggtgccagggggtacttaaagacaagcctgtgtgttctcggccctggcgatgaagcccccctggaacgcaaagacccttcggaggataaagaggacatcgagtccaatttactgagaccaaccggagtcgccctccgcggtgcacacttctgtctgaaagttttccgggccgaggacttacctcaaatggatgacgcagtgatggacaacgtgaaacaaatctttggcttcgagtcaaacaaaaaaaatctggttgaccctttcgttgaagtcagcttcgctggcaagatgttgtgcagtaaaatcctggagaaaacagctaaccctcagtggaatcagaacataactctgcctgccatgtttccctctatgtgcgaaaagatgaggataagaattatcgattgggacagattgacacacaacgatattgtggcaacaacttacctgtccatgtcaaaaattagcgctcctgggggcgaaatcgaggaagagcctgccggcgccgtcaaacccagtaaggcatccgatctcgacgattatctcggatttttacccaccttcggcccctgctatatcaatctgtacggaagccctcgggagttcaccgggttccctgacccatacacagagctgaacacaggaaaaggggagggggtggcctaccggggccgccttctccttagcttggaaaccaaacttgtggaacattcagaacagaaagtggaagacctgcctgcagatgacatcttaagagttgagaaatacttgcgtcggcgaaagtactcattgttcgccgccttttatagcgcgactatgctgcaggacgtggatgatgctattcaatttgaggtgtctatcggtaattacggcaacaagttcgatatgacatgtcttcctctcgcctctacaacacagtattcaagagctgtgttcgacgggtgtcattactactatctcccctggggcaatgtgaaacccgtggtcgttctatctagctactgggaagatatcagtcaccgcatagaaactcaaaaccaactcttagggatcgccgaccggttggaagcaggactcgagcaagtgcacctggccctcaaagctcagtgtagcaccgaagatgtggatagtctggtagcacagctaaccgacgaactgattgctgggtgttcacaaccactgggagatatacacgagacccccagcgcaacacatctggaccagtacctctatcaactcagaacccaccacctcagtcagatcacagaagctgccctcgctctgaagctgggccactccgagctgccagccgctcttgagcaagctgaggactggctgctgagactgcgggcgctagctgaggaaccccagaactctctgcccgacattgtgatttggatgctgcagggtgataagcgcgtcgcctaccaacgcgtgcccgcccaccaagtgctgttctcacgacggggggctaattactgtggcaaaaactgcggcaagctgcagactatttttctgaaatatccaatggaaaaagtccccggcgcaaggatgcccgtgcaaattcgggttaagctctggttcggactcagtgtggacgagaaagagtttaaccagtttgccgagggcaagttgtccgtcttcgctgagacttacgagaatgaaactaagttagctctcgtgggtaattgggggaccaccggcttgacctaccctaagtttagcgatgtaacaggaaaaatcaagctgccaaaagatagtttcagaccgagcgccgggtggacttgggctggagattggttcgtgtgccccgagaagaccttactccacgacatggacgcggggcacctgtccttcgttgaagaagtgttcgagaaccagacgaggctaccaggcggacagtggatctatatgagtgacaactacaccgacgtgaatggagaaaaagtcttgcctaaggacgacattgagtgtccattaggttggaaatgggaggatgaggagtggtcaactgatctcaatagggctgtcgacgaacagggatgggaatacagcatcaccattcctccagagcgaaagcctaagcactgggtgcctgctgaaaagatgtactacacacaccgccgtcgaaggtgggttcgcctccgcagaagagacctgtcacaaatggaagccttgaaaaggcataggcaagcggaagcggagggggaaggctgggaatatgcatccttgttcggctggaagtttcacttggagtatcgaaagacagatgccttccgaaggcgaagatggagaagacggatggagccgttggagaaaactggacctgccgccgtattcgcactggagggtgccctcggcggcgtcatggatgataagtcagaggactccatgtctgtctcaacattatctttcggagtaaatcgtcccactatttcatgtatcttcgactatggcaaccgctatcatttgcgttgctacatgtatcaagcgcgtgatctggctgcaatggacaaggatagttttagcgatccgtacgccatcgtgtctttcttgcaccagagtcagaagaccgtcgttgttaagaacacgttaaaccctacatgggaccaaactctaatcttctacgaaatcgagatttttggggagcccgcaaccgtcgctgaacaacccccctctatcgtggtggaactttacgaccacgacacatacggtgccgacgagtttatgggtaggtgtatctgccagccttcacttgagaggatgcctcggctggcctggttccctctcacccgcggaagccagccctctggcgaattgcttgcctctttcgagctgatacagcgggagaagccggcgattcatcacatacccggttttgaggtccaagagacatcgcgaatcttggacgaaagtgaggataccgacttgccttacccaccaccacagagagaggcaaatatatacatggtaccgcagaatatcaagcccgcacttcagagaacagcaatagaaattctagcctggggcctaaggaacatgaaatcctaccaacttgccaatatcagctccccgtcactcgtggtggagtgtggcgggcagactgtgcagagttgcgttattagaaacctgagaaaaaatcctaacttcgacatatgtactctattcatggaggtgatgctaccgagggaggagctttactgtcccccaatcacggtaaaggtgatcgataatcggcagttcggacggcggcccgtggtggggcagtgtaccataaggagtctggagtcattcctgtgtgatccgtactcggccgaatctccaagtccccagggaggcccggatgatgtctcgctgctgagccctggagaggacgtccttatcgacatcgatgacaaggaacctctcattcccatccaggaggaagagttcattgactggtggtctaaattctttgcatctataggagagcgagagaagtgtggctcttacctggaaaaagactttgacacattgaaggtctacgacacgcagctggagaatgtagaggcttttgagggtctgtcagacttctgcaatacattcaagctctatcgcggcaagacacaagaggagactgaagatccatccgtgatcggtgagttcaagggcctcttcaagatctatcctctccctgaggatcctgccattcctatgccccctaggcagttccaccaactggcggcgcaagggccccaagaatgtctggttaggatttatattgtcagagcgttcggtttgcagcctaaagaccctaacggtaaatgcgatccgtacatcaagatttctattggaaagaagagtgtaagtgaccaggacaattatattccctgtaccctggagccggtgtttggcaaaatgttcgaactgacatgtacactgcctcttgagaaagaccttaaaattaccctttatgattatgatttgctcagtaaggacgagaagattggcgaaaccgtcgtggatttagaaaaccgactgctttctaaattcggggcccgatgcggcctccctcagacgtactgcgtctccggcccaaatcagtggcgcgaccagctcagaccctcacaattactgcacttgttttgccagcagcatagagtcaaagcccccgtatataggacggatcgagttatgttccaggacaaggagtacagcattgaggagattgaggctggcaggattcccaaccctcacctgggccccgtcgaagaaagacttgcactgcatgttctgcaacagcagggtctggtgcccgaacacgtggagtcacggcccctgtatagccctctccagcccgatattgagcaaggaaaattacagatgtgggtggacctatttcccaaagcactaggtcggcctggtcctcctttcaacatcacaccccgacgagcaagacgcttctttttgcgatgtataatttggaacactcgtgacgttatcctcgacgacctgagtctgaccggagagaaaatgagcgatatctacgtgaagggctggatgattggatttgaggagcataagcagaaaaccgatgtccattaccgatccttgggaggtgagggcaatttcaactggcgatttattttcccctttgactacctgccagctgaacaggtatgtacgatcgccaaaaaggacgcattctggcggctcgataagactgagagcaaaataccagcacgcgtggtgtttcagatctgggataatgacaagtttagcttcgacgattttctgggctccctgcagctggatctgaatcgtatgccaaaaccggcaaagaccgccaagaaatgctcgcttgaccagttggacgatgccttccacccagaatggttcgtaagcctgttcgagcagaaaactgtgaaaggctggtggccttgcgtggcagaagagggagaaaaaaagatactcgccggtaaactggagatgaccctggagattgtggcagagagcgaacacgaagagcgacccgccggacaaggccgcgatgaacccaacatgaatccaaagctcgaagatccacgacgtccagacacttccttcctctggttcacgtctccctataagactatgaagttcatactctggaggagatttaggtgggctatcattctgtttattatcttattcattttgctgctgtttttggccattttcatctacgccttcccaaactacgccgctatgaagcttgttaaacctttcagctag

SEQ ID NO: 4872 - RNA, 6267 nt, synthetic construct
  misc_feature 1..6267: note = source = /note="Description of Artificial Sequence: Synthetic coding sequence"
  source 1..6267: mol_type = other RNA
atgctgtgctgcctacttgtgagagcgtccaacctgccttcagcgaagaaggaccggcgctcagatcctgtcgcaagcctgacattccgtggagtgaagaaaaggaccaaagtgatcaaaaattccgtgaaccccgtgtggaacgaggggttcgaatgggatctgaaggggattcccctcgaccaggggagcgaacttcatgtagtggtgaaagatcacgaaacgatgggtcgcaatcggttcctcggggaagcaaaggttcccctacgcgaggttctggctacgccctccctttccgcaagcttcaatgcgcctctgctggataccaagaaacagcctactggagcaagcctcgtgctgcaggtcagctacacaccattgccaggcgctgtacctctgttccctccccccacgccacttgaaccttcccctaccctaccagaccttgacgttgtggcagatactggaggcgaagaagataccgaagatcagggtctgactggagacgaagccgaaccgtttttagatcaatctggaggccccggcgctcctaccacaccccgtaaactcccctccagacctcctccacactacccagggattaagagaaaacggagcgcccctacatctaggaaattgttgtccgacaaaccccaggacttccagatcagggtccaggtcatagagggccgtcagttgcccggagttaatataaagccggttgtgaaggtaactgctgccggacagacaaagcggacaaggatccacaagggtaattcacctctctttaatgaaactcttttttttaatctctttgactcccccggcgaactctttgacgagcccatattcatcaccgtggtggacagccgcagtctgcgtaccgatgcgctgctcggagagttccgaatggacgtgggaacaatttatcgagaaccccgccacgcttacctcagaaagtggctgctcctcagcgacccagatgatttctcagctggcgctcggggttacttaaaaacatcgttgtgcgttctgggacccggcgacgaagcgccacttgagagaaaggacccaagtgaggacaaagaagacatcgagagcaacctcttacgaccgactggagtggcattgcgtggagcccacttttgcctcaaggtttttagggccgaggacctgccacagatggatgacgccgtgatggacaacgtcaaacagattttcggatttgaaagcaacaagaagaacctcgtggaccctttcgtcgaagttagtttcgcagggaaaatgctgtgcagcaagattctagagaagactgccaacccccagtggaaccagaacattacccttcccgcaatgttcccctccatgtgcgagaaaatgagaatcaggatcatcgactgggaccgcctcacacacaacgatattgtcgcgacaacatatctgtctatgagcaagatatctgcacccggaggagaaattgaggtggatgactacctgggttttttgcccacatttggcccctgttatattaatctttatggcagtccacgcgaatttaccggattcccagatccatataccgagcttaacacgggcaaaggcgagggcgtggcatacagaggtagactcctcctgtcactcgagactaaattggtggagcatagtgagcagaaagtcgaggatctgcctgccgatgacatcttacgggtggaaaagtacctccgcagaaggaaatatagtttgtttgccgctttctattcggcaacaatgcttcaagatgtagatgacgccatccagtttgaagtgagcataggaaactacggaaacaagttcgacatgacttgtctccccttggccagtactacccagtactcaagagctgtttttgacggctgtcactactattatctgccatggggaaatgtgaaacccgtagtggtgctgtcttcgtactgggaagatatttctcaccggatagagactcagaatcagcttctggggatcgccgatagattggaagcgggtcttgagcaggttcatctggcgttaaaggctcagtgcagcacagaggacgtggacagtttggtcgcccagctgaccgacgagttaatcgctggctgcagtcaacctctgggtgacatccatgaaacgccctcagcaacgcacctcgaccaatatctgtaccagttgcggacccaccatctgagccaaattacagaagccgccttggccctgaaattgggccactctgagctgccggccgcccttgaacaggctgaagactggctgttgagacttcgggctcttgccgaggagccacagaactccctgccagatattgtgatctggatgctccagggcgataaaagggtcgcttaccagagggtgccagcacatcaagtgctattctcaagaagaggggcaaattactgcggaaaaaattgcggaaagttacagaccatatttctgaagtatccaatggagaaggtgcccggagcgcggatgcccgtccagatacgcgtgaaactttggtttggcctgagcgtggacgagaaggagttcaaccagttcgctgaaggcaaactgtctgtcttcgctgagacctacgaaaacgagacaaagctcgctttagtgggaaattgggggacaacaggcttaacgtacccgaagttctcagacgtaaccggcaaaataaagctgccaaaagactcgtttcggccgtctgcagggtggacgtgggccggagattggtttgtatgtcctgagaaaaccctgctgcacgacatggatgccggtcacctgagcttcgtggaggaggtgtttgaaaatcagactagactccctggtggccaatggatttacatgtcggataactatacagacgtcaacggcgaaaaggtactccctaaagatgacatcgaatgcccattgggatggaagtgggaggatgaggagtggtctactgacctgaaccgggcagtcgatgaacagggctgggagtattctattactatccctcccgagaggaaacctaaacactgggtaccggcggaaaagatgtactacacacaccgacggcggcgttgggtgcgactccgccgaagagatttgtcacagatggaggccctgaagcgccatcgacaggcggaagctgaaggtgaaggatgggagtatgcttcattattcggttggaaatttcacctggaatacagaaagaccgatgcattccggaggagacgctggcgacggcggatggaacccctggaaaagactggtccagccgcagtctttgcattagaaggagcgttagggggagtgatggacgataagagcgaggattctatgtccgtctccactcttagttttggggtgaacagacccactatttcttgcattttcgattacggaaaccgttaccacctgagatgctacatgtatcaggctcgcgacctagccgccatggataaagattcattttcagatccctacgccattgtgagctttctgcatcagagtcagaaaaccgtcgtggtgaagaataccttgaatcccacctgggaccagacgctgattttctatgagatcgagatcttcggggagcctgccacagttgctgaacagcctccgagtatcgttgtggagctgtacgaccatgatacatatggcgcggatgagtttatgggcaggtgcatttgtcaaccgtctttagagcgcatgccacggttggcatggtttccactgacaagaggctctcaaccaagcggggaattgctggcctcttttgagctaattcagcgagaaaaaccagcaattcatcatatacctggttttgaggtgcaagagaccagcaggatactggacgagtccgaggacactgatctgccgtatcctccaccacagagggaagccaacatatacatggttccccagaacatcaagcctgcgctccagcggacagctattgagattcttgcatggggacttagaaacatgaagagctatcagcttgccaacatttcttcgccatctctggttgtggagtgcggaggccagaccgtccagtcttgtgtgattcgcaatctacggaagaatcctaattttgacatctgcaccttgtttatggaagtgatgctgccgcgggaggaactttactgtccgccaattacagttaaagtgatcgataatcggcagtttggaagacggcccgtggtaggacagtgtactatacggagccttgaatcatttctgtgcgacccctacagtgcagagagcccctctcctcagggcggtcccgacgatgtgtcactcttaagcccaggcgaggacgtgttaattgatattgatgacaaggagcccttaattcccatccagttggccgacgggttgagtagccttgctccaaccaacacagcatcaccccctagcagccctcacgaggaggagtttatagactggtggagtaagtttttcgcgtctattggagaacgagaaaagtgcggatcatatctggaaaaggacttcgatacccttaaggtctacgatacgcaactggagaatgtcgaggctttcgaaggcctgtctgacttctgcaacacctttaagctctaccgggggaagacacaagaagaaacagaggaccctagcgtaattggagagttcaaaggattgtttaaaatctacccacttccagaggaccccgcaattccaatgcctccgaggcagtttcaccagctcgcagcccagggaccacaggagtgtctcgtccgcatttacattgttcgggcctttgggctgcaaccaaaggatcccaatggcaagtgcgacccatatattaaaatttcaataggcaagaagagtgtttcagaccaagacaactatattccctgcacgctggaacccgtgttcggaaagatgttcgagctcacatgtactttgccgttggaaaaggacctaaaaattaccttgtacgattatgacctgctcagcaaggacgaaaagattggggaaacagtcgtcgacctcgagaaccgtctgctatctaagttcggtgcacgatgtggtttgcctcaaacatattgcgtgagcggccctaaccaatggagggatcagctcagacccagtcagcttctacacctattttgccagcaacatagggttaaggctccagtctatcggaccgaccgggtgatgttccaggacaaggagtatagcattgaggaaattgaggcaggtagaattcctaacccccacctgggccccgtcgaggaaaggctcgccctccacgttctgcagcagcagggactggtgccagaacatgttgaatctcggcccctgtattcccccctgcagccagacattgagcaaggaaagttgcagatgtgggtggatctgtttcccaaagcgctaggacggcccggcccaccattcaatatcactccgagacgagctcgacgcttctttttacgatgtattatctggaacacccgggatgtgattctcgacgacctcagccttacaggtgaaaagatgtccgacatctacgtgaaagggtggatgattggctttgaagaacataaacaaaaaacggatgttcattaccggagtttggggggcgaaggcaactttaactggagattcatctttccttttgattatcttccggccgagcaggtctgcaccatcgcaaagaaggacgcattttggagactcgacaagactgagagcaaaattccggccagagtggtgttccagatctgggacaatgacaagttcagctttgatgacttcctgggctcacttcagttggaccttaaccgtatgcccaaaccagccaaaacagccaagaagtgtagcctggatcagctggatgacgccttccacccagaatggttcgtgtcactttttgaacagaagaccgtcaaaggatggtggccatgtgtggccgaagagggcgaaaaaaaaatcctggctggtaagctcgaaatgaccctagaaattgttgccgagtccgagcacgaggagcggcccgccgggcagggacgcgatgaaccaaacatgaatccgaagctggaggatcctaggcgccccgacacctcttttttatggtttacatctccctacaaaactatgaagttcatcctgtggcgacggtttagatgggccattattttatttattattctattcatcctactgttgtttctggccatttttatctacgcgttcccaaattacgccgcaatgaagctggtgaaaccttttagttag

SEQ ID NO: 4873 - RNA, 6294 nt, synthetic construct
  misc_feature 1..6294: note = source = /note="Description of Artificial Sequence: Synthetic coding sequence"
  source 1..6294: mol_type = other RNA
atgctaagggtgttcatactatatgccgagaacgtacatactccggacaccgacatctccgatgcctattgctcagcggtttttgctggtgtgaaaaagaggaccaaagtgataaaaaactcagtcaatcctgtgtggaatgagggtttcgagtgggatctcaagggtatacccctggaccagggctccgaactgcatgtggtggtgaaggaccacgaaacaatgggacgaaaccgattcctcggtgaagctaaagtgccccttagagaagtcttggccaccccctctttgagcgcctcattcaacgcccccctgctggacaccaaaaaacagccaacaggagcctccctagtgctgcaggtttcctatacaccattacccggcgccgttcccctatttccccctcctacacccctggagccaagcccgaccctcccagacctcgacgtggtggccggcggaggacagagtagggccgaaacctggagcttgctgagcgactcaaccatggatactcggtactccggcaagaaatggcctgctccgacagacacaggcggtgaagaagataccgaggaccagggcttgactggcgatgaagccgagccctttctggatcagagcggaggacccggggcccctactactcccagaaagctgccttcccgccccccccctcactaccccgggatcaaaaggaaaaggagcgctcccaccagccgtaaactgctgagcgacaagcctcaggatttccagatccgagtgcaggtcatcgaaggaaggcagctgccaggagtcaacattaaacccgttgtgaaagtgacagctgcaggacaaaccaagcgcactaggatccataaagggaattcaccactcttcaacgagacacttttttttaatctgtttgactcacctggcgagctatttgatgagcctatttttataacagtcgtggatagccgaagcttgcggaccgatgctctacttggggaattccgcatggacgtcgggacaatttaccgcgaaccacgtcatgcctatcttagaaaatggttgctgctctctgatccagatgatttctctgccggagctagggggtacttgaagacaagcctctgtgtgcttgggccaggcgacgaggcgcccttagagcgaaaggacccgtcggaagataaagaagatatcgaatctaatctgctgcgcccaactggggtcgccttacgaggggcccacttttgcctgaaggtatttagggctgaggacctacctcagatggacgatgctgtgatggataatgtcaaacagatctttggatttgaaagcaacaaaaagaacctggtggatcctttcgtagaggtttcctttgccggcaagatgctctgctcaaagatattggaaaagacggccaatcctcaatggaaccagaatatcaccctcccagccatgtttccttcaatgtgcgagaaaatgcgaatcaggatcattgattgggatagactaactcacaacgatattgtcgccactacttatctgagcatgtctaagatctccgcgcccgggggagaaattgaagtggacgattatttgggctttctgcccacgttcgggccttgctatatcaatctttacggcagccccagggagttcacaggcttccccgacccttacaccgagctcaatactggcaagggggagggggtggcgtatcgggggcgcttgcttctgtctttggagactaagctggtggagcatagtgagcagaaagtcgaggacctcccagcggacgatatcctaagagtggaaaagtacctgcggcgacggaaatatagcctgttcgccgcattttacagcgcaacgatgttgcaagacgtggacgatgctatacagtttgaggtttccataggcaattatggaaacaagttcgatatgacctgcttgccattagcatccaccactcagtactcgagggcagtgttcgacgggtgccactattattatctgccatggggaaatgtaaagccagttgtggtcctgagcagttactgggaggacatctcccatcggattgaaacccaaaaccagctcttaggcattgccgacaggttagaagccggtctggaacaggtgcacctggctctgaaagcccagtgtagtacagaggatgtggattccctggtagcccagctgactgacgagcttattgccggttgcagccaacccctcggtgacattcatgagactccatccgcgactcatctggaccaatatttgtaccagctcaggactcaccatctctcgcaaatcaccgaagcagccttggccttgaagttgggccactcagaattaccagcagcacttgaacaggccgaggattggcttctccgtctcagggctctcgccgaggagcctcaaaacagccttcctgacattgtgatctggatgctgcagggcgataagagggtcgcctatcaaagagttccagcgcaccaagttctgttttctcgccgaggtgctaactattgcggcaagaattgcggaaagttacaaactatattcctcaagtatcctatggaaaaggttcccggcgcaagaatgccagtccagattcgggtgaagctttggttcgggctgtccgtagatgaaaaggaattcaaccaattcgctgaaggtaagctgtccgtttttgctgagacatacgaaaacgagacaaaactggcactcgtggggaactggggcacaactggactgacctatcccaaattttcggacgtcacaggtaaaattaagcttccaaaggactcctttcgtccttcagcagggtggacctgggcaggagactggttcgtgtgcccagagaaaaccctactacatgacatggatgcgggccacttaagtttcgtcgaagaggtgtttgaaaaccagacgagacttcctggtggccaatggatctacatgtctgacaattacactgatgttaatggcgagaaggtgctgccaaaagacgacattgagtgccctttgggctggaaatgggaggacgaagaatggagcacagacctgaatcgggctgtagatgaacagggatgggaatattccattactataccccccgaaaggaagcctaagcactgggttcctgctgagaaaatgtactacactcatcgcaggagacgctgggtacggttgcgtcgaagagatttatcccaaatggaggcgctcaaacgtcataggcaagcagaggccgagggcgagggctgggaatatgcctccctattcggttggaagttccacctagagtatagaaagaccgacgcatttagacggaggagatggaggcggcgaatggagcccctggaaaaaactgggccggccgccgtcttcgctctggaaggcgctctaggtggggtgatggacgacaaaagtgaggactccatgtcagtatcaaccctgtcctttggagtcaataggcctaccatctcgtgtatctttgattacggaaaccgctatcatctccgctgttacatgtaccaggcgagggacctggcagcgatggataaagatagcttctccgacccttacgcaatagtgtccttcctgcaccagtctcagaaaaccgttgtggtgaaaaataccttgaaccccacctgggaccagacactcatcttttacgaaatagaaatcttcggcgaacctgcaacagtggccgaacagcccccctctatcgtcgtggagctgtacgaccacgatacctatggtgcagatgaattcatgggtcggtgtatctgtcagccctccctcgagagaatgcctcgtttggcttggttcccgctaacgagagggtcacagccaagcggcgaactgctggccagtttcgaattgattcaaagagagaagcccgccatccaccacatcccaggatttgaggtccaggaaactagcagaatcctcgatgaatcagaagacacggatctaccttatcctcccccccagagggaagccaatatatatatggtaccacaaaacatcaaacccgctttgcagcgcacagccattgaaattctcgcttggggcctccgtaacatgaagtcctaccaactcgccaatatttcctctccttccttagtcgtggagtgcggcggccagacagttcagagttgtgtgattcggaacctgcgaaaaaatcccaactttgatatctgcactttgtttatggaagttatgctgcccagagaagaattatattgcccacccatcacagtcaaagtgattgacaaccggcaatttgggcgaaggcccgtggtcggacagtgcacaattcgatctctcgagagtttcttgtgcgatccctacagcgcagaatcaccctcacctcagggcgggccagatgatgtatccttattatctcctggcgaggatgtcctaattgatatagacgataaagaacctctgattcctatccaagaggaggaattcatcgactggtggtcaaagttcttcgcttccatcggggaacgggagaagtgcgggagctatctggaaaaagattttgacactctgaaagtttacgatacccaattggaaaacgttgaagcattcgaaggactgagtgacttttgcaacacctttaagctctaccgaggtaagactcaagaagagaccgaagatcccagcgtgataggcgagttcaaagggttgtttaaaatttaccccctgcctgaggatcccgccatccccatgccaccccgccagtttcaccagctcgctgcccaaggaccgcaggaatgcctggtgagaatctatatcgtgcgcgcttttggacttcagcccaaggatcctaatggcaaatgtgatccttatatcaaaatatccattggtaaaaagtccgtctccgaccaggacaactatatcccatgtactctggaacctgtgtttggtaaaatgttcgaacttacatgcaccctgcctctcgaaaaagacctgaagatcaccctgtacgactatgaccttctatccaaggacgagaaaatcggcgagactgttgttgatcttgaaaatcggctactgtcgaaatttggagctcgctgtggcttaccacagacttattgcgttagtgggcccaaccagtggcgggatcaactacgaccgtcacagcttctccatttgttctgccagcagcatcgagttaaggcccctgtatacagaacagaccgcgtaatgtttcaggacaaagaatattctatcgaagagattgaggcaggtagaattccgaacccacacctcggacccgtggaagagagactggcgctgcacgttctgcaacaacagggcttagtcccagagcacgttgagtctcgaccactgtatagcccactgcagcccgatatagaacaggggaaacttcaaatgtgggtcgacctttttccaaaggctttgggcagaccgggccccccctttaacataactccgcgccgggccaggcgcttttttctgagatgcataatctggaatacacgagacgtgattctagatgatctgtctctgacaggtgagaagatgagtgatatttacgtaaaagggtggatgattgggttcgaggagcacaagcagaagaccgatgtgcactatcgctccttaggtggggagggaaatttcaattggaggtttattttcccctttgattatcttcctgcagagcaggtgtgtacgatagccaaaaaggatgccttttggagactggacaaaacagagtctaaaattccggcaagagttgtgtttcagatatgggacaacgataagttttccttcgacgacttccttggttccttgcagctggacttgaaccgtatgcctaagcctgccaagacagcgaaaaagtgctctctcgatcaactggacgatgccttccaccctgaatggtttgtgagtctgttcgagcagaagactgtgaagggatggtggccatgtgtagcagaagagggggagaaaaaaattctcgctgggaaactggaaatgacacttgaaatcgtagccgaatcagaacatgaggaacgtcccgcgggacaaggcagggatgaaccgaacatgaatcccaagttagaagacccgcgcaggccagatacctcattcctgtggttcacgtctccgtataagacgatgaaattcattctctggaggaggtttagatgggcgattatactgtttattatactgttcatcttgcttctgtttctggcaatcttcatttacgctttccccaattatgcagcgatgaagctggttaagccattctcttag

SEQ ID NO: 4874 - RNA, 6360 nt, synthetic construct
  misc_feature 1..6360: note = source = /note="Description of Artificial Sequence: Synthetic coding sequence"
  source 1..6360: mol_type = other RNA
atgctgtgctgcctgctggtccgagcgtctaaccttccttcggctaaaaaagaccgtcgaagcgatcccgtcgcttccttgacattccgaggggtgaagaaacgaacaaaggtcatcaagaattctgttaatcccgtctggaacgaaggcttcgaatgggacctgaagggcatcccgctggaccagggatccgagctgcacgttgtcgtgaaagaccacgagactatggggcgcaacagattcctcggcgaggcaaaagtcccactgagagaagtgttagcaacccctagcctgagcgcttccttcaatgcccccctcttggacacgaaaaagcagccaacgggtgccagcctggtgctgcaagtcagctatactcccttgcctggggctgtccctctgtttcccccacctacacctcttgaaccctctccaaccctccctgatctggacgtggtggccggcgggggtcaatcgcgggccgagacgtggtctctgttaagcgacagcacaatggatacacgctatagtggtaagaaatggccggctcccacagacaccggaggtgaggaggacactgaagatcagggcctaactggagacgaggccgagccattcctcgaccagtctggcggtcccggtgcacccaccacaccgcgcaaactgccatcaagaccgcctccccactacccaggcattaaacggaaaagaagcgctcccacctctcggaagttactgagtgacaagccgcaagatttccagatcagggtgcaagtgattgagggacgccagctgccaggggtgaacatcaaacccgtggtaaaggtcaccgccgctggacagactaagcgaacgcggatccataaaggcaattcccctctgtttaacgagactctgttcttcaacttatttgattcgccaggcgaattgtttgacgagcccatcttcattactgtggtcgacagccggtcacttaggaccgatgctctgcttggcgaatttaggatggatgtgggtaccatctatcgagagccccgacatgcctacttgagaaagtggctcctactttcggacccggatgacttctcagcaggcgctcgcggatacctgaaaacttctctgtgtgtactcggacctggtgacgaggccccactggagcgcaaggatccgtcggaagacaaagaagacatcgagagtaatctgttgcgcccaaccggagtggccctgaggggcgcccatttctgcctgaaggtgttcagggccgaagatctgcctcagatggacgacgctgtgatggacaatgtgaaacaaatcttcggcttcgaatccaataagaagaaccttgtcgacccgtttgtggaagttagctttgcaggcaaaatgttgtgtagcaagatacttgagaagactgccaatccacagtggaatcagaacatcacactgccagcgatgttcccctccatgtgtgagaagatgagaattcgtataatcgattgggatcgcctcactcacaatgatatcgttgcgactacttatttgagcatgagcaagattagcgctcccgggggtgaaatcgaggtcgacgactatctgggctttctgccaacctttggtccatgctatatcaatctatacggctctccccgcgaatttaccgggtttcctgacccttacactgaacttaacacaggcaaaggagagggcgtcgcttaccgtgggcgcctgctactgtcccttgagacaaaactcgtggagcactcagagcaaaaagtcgaggatctccctgccgatgacatccttcgcgtggaaaaataccttaggagacgcaaatactcattattcgccgctttctactcagcaactatgttgcaggatgtggacgatgcaattcagtttgaagtcagcattgggaactacgggaataagttcgatatgacctgccttccactggcatccacaactcagtattcaagggccgtgttcgacggatgtcattactactatctgccttggggaaacgtgaaacctgtcgtcgtgctttcttcatattgggaggatattagtcatcgcatagagactcagaatcagcttctgggaatcgccgaccgcctggaagcgggacttgaacaggtccacctggccctcaaagctcagtgtagtaccgaagatgttgacagccttgtggctcagttgacagatgaattgatagcggggtgtagtcaacctcttggcgacattcacgaaactcccagcgccacccaccttgatcagtatctgtaccagttgcgtacccaccacctctcacagatcaccgaagccgctcttgctcttaagctgggccatagcgagctgcccgctgccctggagcaggcggaagattggctgctgcgcctcagagctctagctgaagaaccacaaaactccctgcccgatatcgttatctggatgcttcaaggtgataagcgagtggcctaccagagggtacctgcgcaccaggtactttttagtcgacgcggggcaaattattgcggaaagaattgcgggaaacttcagaccattttcctgaagtaccccatggaaaaagtcccgggtgcccgaatgccagttcagataagagtgaagttgtggttcggccttagcgtcgacgaaaaagaattcaatcagttcgcagaagggaagctgagcgtttttgcagaaacatacgaaaacgagaccaagcttgccctggtggggaattgggggacaactggactgacatatccaaagttttctgacgttacgggcaagataaagttgccaaaggactcatttcgcccttctgctgggtggacctgggccggcgactggtttgtctgcccagaaaagacactcttgcacgatatggatgctggacacctatcttttgtggaagaggtgttcgagaaccaaacgagactgcccgggggccagtggatttacatgtccgacaattatactgatgtgaacggagagaaagtattgcccaaagacgacatcgaatgcccacttgggtggaagtgggaagacgaagaatggagcaccgacctcaacagagcagtggacgagcagggatgggagtacagtatcaccatcccacccgaacggaagcctaagcattgggttcccgctgagaaaatgtactatacgcaccgaagacgtcgctgggtacggctgaggcgtcgtgacctgtctcagatggaggcgctcaagagacaccgacaggccgaagctgagggcgaaggttgggaatacgcatcactgttcggatggaaattccatctagagtaccgcaagaccgacgcttttagacgacgccgatggcgccggaggatggaacccctagagaagacaggaccagccgccgtgttcgctttagaaggtgcactcggaggcgtgatggacgacaaatcggaggatagtatgtccgtgtccactctgtcatttggagtcaaccgccctacaatctcctgcattttcgactatgggaacagataccacttgcggtgctatatgtatcaggctcgggacttagcagcaatggacaaggacagcttctctgacccctacgctatagtatctttccttcaccagtctcagaaaaccgtggtagtaaagaacaccctgaaccctacatgggatcagactttgatcttttatgaaatcgaaatctttggtgaacccgcgaccgtcgctgagcagcccccatctatcgtggtggagctgtacgaccacgacacgtacggggctgatgagtttatggggcgctgtatttgccagccatcactggagaggatgcccagattagcctggtttccactgacaaggggctcccagccatctggtgaattattggctagctttgaactgatacagcgggaaaaaccggccattcatcacattcccggctttgaggtccaggaaacttctcggatactggacgaatccgaagacacagacctgccataccccccaccacaacgtgaggcaaatatctacatggtgccccaaaatatcaagcctgccctgcaacgaacagcgatcgagatactcgcctgggggctcagaaatatgaagtcctaccagctcgcaaacatatcgtctcccagcttggtggtcgaatgcggaggtcaaacagttcagagctgcgttatacggaaccttcgaaagaacccaaattttgatatatgcacgctattcatggaggtaatgctgccccgggaggagctctactgtcccccaatcaccgttaaagtgattgataatagacagttcggacggcgacctgttgttggacaatgtactatacgaagtctagagagctttctgtgtgacccgtattcggcagaaagcccctccccccagggaggccccgacgatgtgtccctactcagccccggcgaggacgtgctcattgacattgacgataaagagccattaatccctattcagctcgcagacgggctttctagtctggctccaactaatactgccagccctccatccagcccacatgaagaggagttcattgactggtggagcaagttctttgccagcattggagaaagagaaaaatgcgggtcttatctcgagaaggattttgataccctgaaagtgtatgacactcagctggagaatgtggaggcctttgaaggcttgtctgatttttgtaacacatttaagctgtaccggggcaagacacaggaagaaaccgaagatccatcagtaatcggagagttcaaaggcctgttcaagatctacccactgccagaggatccggctatacctatgcctccaaggcagttccaccagctggctgctcaaggaccacaggaatgcttagtgcgtatttacatcgtgcgtgccttcggactgcaacctaaggacccaaatggtaagtgtgatccatacataaaaatctctatcggtaaaaagagtgtgtctgatcaggataactatatcccttgtactctcgagccagtgtttggcaaaatgtttgagcttacgtgcactctgcccctggaaaaggacctaaagataaccctgtacgactatgatctgctgtcgaaggatgagaagattggggagacagtggtcgatttggaaaatcgcttactgagcaagtttggagctcggtgcggccttccacagacctattgcgtgtcaggccctaaccagtggcgagaccagttgcgcccgtcgcaattgctgcacttgttttgtcaacagcatcgcgtgaaagccccggtctatcgtacagatcgcgttatgttccaggataaagagtactccatagaggagatcgaagcaggtcggatacccaatccacatctcggcccagtggaggagcggctggccctgcacgtgctgcagcagcagggacttgtcccagagcatgttgagtctcgtccactttactcccctttgcagcccgacattgaacagggaaaattgcagatgtgggtcgatctattcccgaaagctctaggccgacccggtcccccgttcaacatcacaccacgacgagctcgcaggttctttctccggtgtataatatggaacactagagatgtgatcctggatgatctttctctgaccggggaaaaaatgagtgacatctatgtaaagggctggatgatcggcttcgaagaacacaagcagaaaaccgacgttcactacagatctttaggtggtgaagggaattttaattggaggtttattttcccattcgactacctgcccgccgaacaagtctgtacaattgctaagaaggacgcattctggagactcgacaagactgaaagcaaaattccagcaagagtggtgtttcaaatttgggataatgataagttcagtttcgacgattttctcggctccttgcaactggacctaaacagaatgcccaaacccgctaagaccgcaaaaaagtgctccctggatcagctcgacgacgcatttcacccagaatggttcgtgtcacttttcgagcagaaaaccgtcaagggctggtggccctgtgtggccgaagaaggcgagaagaagattctcgctgggaaattagagatgacgctagagatcgtcgctgagtccgagcatgaagagcgacctgccggacagggcagagacgagcccaatatgaacccaaaattagaagacccccggcggcctgacacatcattcctctggtttacctcaccttacaaaacaatgaaatttattttatggaggcgctttaggtgggccattatcctcttcatcatacttttcattctgctgctgtttctggcaatattcatttacgcctttcctaactacgccgctatgaagctcgtgaaacccttctcttag

SEQ ID NO: 4875 - RNA, 6297 nt, synthetic construct
  misc_feature 1..6297: note = source = /note="Description of Artificial Sequence: Synthetic coding sequence"
  source 1..6297: mol_type = other RNA
atgctttgctgtttactagtgagagcatcaaacctgccctccgccaagaaggatagaagaagtgacccagtggcatcactgacgtttcggggcgtgaaaaagagaactaaagtaatcaaaaactctgttaaccccgtttggaatgaaggctttgaatgggacctgaaaggaatacctttagaccagggaagtgaactgcacgttgtagtcaaagatcatgagactatgggtcgtaatagattcctcggggaagcaaaagtgcctctgcgcgaagttctggcaaccccctctctgagcgccagctttaacgcgccattgctggatacgaagaagcagcctactggggcgagtttggtgttgcaggtctcatacacacctcttcctggcgctgtcccactgtttcctccaccaacaccccttgagccctccccaacccttccagacctggatgtagtggcaggcggcggacagtctcgcgctgaaacgtggtctctcttgtccgacagtaccatggacacaagatattcagggaagaagtggccggcccctacagatacagggggggaggaggataccgaagatcaggggctgacgggtgacgaggctgaaccctttctggaccagagtggaggacctggcgctcccaccacccctcgcaagcttccatctcgaccacctcctcactaccccggaattaagcgaaaacgcagcgctcctactagcaggaagttgttgtcggacaaacctcaagattttcagattcgggttcaagtgattgaaggcagacagctacccggagtgaacataaagcccgttgtcaaggtcacagcagcaggacagaccaagagaacccggattcataagggcaacagtcctctctttaatgagacccttttttttaatctttttgacagtccaggcgagcttttcgacgaaccgattttcatcactgttgttgacagcaggagcctgcggacagatgcacttctcggggaattcagaatggacgttggcaccatctatagggaacctcgacatgcctatttgcgcaagtggttgctattgagtgatcccgacgacttctccgctggagcacggggttacctaaagacatcgttatgcgtcttggggcccggggatgaggcccctctcgagcgcaaggatcctagcgaggataaggaggacatcgaatccaacctgctgaggccaacaggagtggcactgaggggggctcacttttgcttaaaagtttttagggctgaggacttacctcaaatggacgacgcggtcatggacaacgtcaaacaaattttcggctttgagtctaataaaaagaacctcgtagacccttttgtggaggtcagtttcgctgggaagatgctgtgtagtaagatcttagaaaagactgccaatccacagtggaaccaaaatataacccttcctgccatgttcccatcaatgtgtgagaaaatgcggatacggatcattgactgggatcggctgacccacaacgacatcgtcgcaaccacttatctgtccatgagtaagatatctgccccagggggagagatagaagttgacgactacctcggtttcctgcctacctttgggccgtgttatattaatctatacgggtctccccgtgaatttaccggcttcccggacccatataccgaactcaacactgggaaaggagagggcgttgcctacagaggtagactgttattgagtttagagacaaaacttgtcgagcattcggagcagaaagtggaagatctgcctgccgacgacatactgcgggtcgagaagtacctgcggcgcagaaagtacagcctctttgctgccttttactcggccactatgttgcaggatgtcgatgacgctatacagttcgaagtctccatcggtaactacgggaacaagtttgatatgacatgccttcccttagccagcactacccagtactcccgggccgtcttcgacggctgccattactattatcttccttgggggaacgtcaagcccgtggtagttttgtcttcttattgggaagatattagccatcgtattgagacccaaaatcaactcctggggattgcagatcgtcttgaggccggactggaacaggtacacctcgctctcaaggcacaatgctcaaccgaggatgtggactctctggtggcacaactgaccgatgaactgatcgccggctgctctcagccattgggcgacatccacgagactccgagtgcaacacatctcgatcagtacctctaccaactgagaacgcaccatcttagccaaattacagaagcggcgttagctctgaagctaggtcactctgaactccctgccgccttagagcaggctgaggactggctgctgcgcctgagggccctggctgaggagcctcaaaacagcctgccggacatcgtgatctggatgctacagggagataaacgcgtagcctaccagcgcgttccggcccatcaggtgctgttctctcgcagaggtgccaactactgtggaaagaactgcggcaagttgcaaacaatattcttgaagtatccgatggagaaggtacccggggcaaggatgcctgttcaaatccgcgtgaagctgtggtttggtctgagcgtggacgagaaggagttcaaccaatttgccgaaggcaaactctccgtattcgccgaaacctatgagaatgaaactaaactggcactggttgggaactggggcacgacgggactgacataccccaagttttcagacgtgaccggtaagattaagctgcctaaagactcatttaggcccagtgctggctggacatgggccggggattggttcgtgtgtccagagaagacactgctccatgatatggacgccggccacctgagctttgtggaagaggtctttgagaaccagacaagactgccgggcggccaatggatctatatgagtgataattatacagacgttaacggagagaaagtgttgccaaaggatgacatcgagtgtcctctgggatggaaatgggaggatgaggaatggagtacagatcttaatagagccgtggacgagcagggctgggagtacagcatcaccatccctcccgagaggaagcctaagcactgggtgcccgctgaaaaaatgtactatacccacagacggcgccgctgggttcgattgaggaggcgggacctgtctcagatggaggccttgaaacgtcataggcaggccgaggccgagggagaaggatgggaatacgcctccctttttggatggaagtttcatctggagtatagaaagaccgacgcatttaggcggcgccggtggagaagaaggatggaacctttagagaagacgggacctgccgccgtgttcgccctcgaaggcgcgctgggcggagtgatggatgacaaatctgaggacagcatgtctgtgagcaccctctcattcggcgtcaatagacctacgatttcctgtatttttgattacggaaaccggtatcatctgcggtgttacatgtatcaggccagagacctggcagccatggacaaagattcattttccgacccctacgccatcgtctcattcctgcaccaatcgcagaaaacagtggtggtgaaaaacacactaaacccgacttgggatcagacactaatattttacgaaatcgaaatcttcggcgagcccgcaacagtcgccgagcagcctcccagtattgtagtggagctatatgaccatgatacatacggagccgatgaatttatgggtaggtgcatttgccagccttccctggaaaggatgcctcgactcgcgtggttcccattgactcggggctctcagcccagtggcgaattactggccagcttcgaacttatccagcgtgaaaaacccgcgattcaccatatacctggattcgaagtgcaggagacaagtagaattctagatgagagcgaagacaccgacctcccatatccccccccacagagggaagctaacatctacatggttccacagaacatcaaacccgcactgcagcgaactgccatcgagattcttgcttggggcctgagaaatatgaagtcataccagctggccaacattagtagcccctccctggtcgtggaatgcggtggtcagaccgtccagtcttgcgttatcaggaatctgcgaaaaaatcctaactttgacatctgtacactgttcatggaggtcatgctacctcgtgaagagctgtactgccccccaatcacagtcaaagtgatcgataatcggcagtttggccgccggcccgtggtgggacaatgtacaatcaggtccctagagtcctttctgtgcgacccttactctgccgaatctccttcaccccaagggggccctgacgatgtgagtctgctgtctcctggggaggatgttctgatcgatatcgacgacaaagaacccctgatacctattcaggaggaggaattcattgattggtggtccaagttcttcgctagcatcggagagagagagaaatgcgggtcctacttagaaaaggacttcgacaccctcaaggtttatgacacacagctcgaaaatgttgaggcatttgagggcctaagtgatttctgcaacaccttcaaactttacagaggcaagacccaagaagagactgaagatccgtctgtgattggtgaattcaagggcctgtttaaaatatatcccctgcctgaagatcccgctatcccaatgccccctcgacaattccatcagctcgcggcacagggaccacaggaatgccttgtgaggatttacatcgtgagggcttttggcctgcaacctaaagatccaaacggtaagtgcgatccctatatcaagatctcgataggaaagaagagcgtttctgaccaggacaactacatcccttgcacgctggagcccgtcttcgggaagatgttcgagctgacctgcacactcccccttgagaaggacctaaagattacactgtacgattacgaccttctaagtaaggacgaaaagatcggcgaaacagtagtcgatctggagaaccgcctgctctcgaaattcggggcacggtgtgggctgccacagacttattgcgtgtcaggacctaatcagtggcgagaccagctccgcccatctcagctgcttcatctcttctgtcagcagcaccgtgtcaaagcaccggtttatcggaccgacagagtcatgttccaggataaggagtattctatcgaagagatcgaggcgggtagaattcctaaccctcatctaggccccgtagaggaacgcctggcattacacgtgctccagcagcaggggctggtgcctgaacacgttgagtctaggcccctctactcacctcttcaacctgacatcgagcagggcaaactccaaatgtgggtggaccttttcccgaaggccctgggcagaccaggccctcctttcaatattacgcccagacgagcacgacggttttttttaagatgcattatttggaacacccgtgatgtgatccttgacgacctctccctgaccggcgaaaaaatgagcgacatctacgtgaagggatggatgatagggttcgaagaacacaagcagaagaccgacgtgcactatagaagcctgggcggggaggggaacttcaactggcgatttatcttcccgttcgattatctgcctgccgagcaggtgtgcactatcgccaagaaggacgcattctggaggctagacaaaacagaatctaaaataccagctagagttgttttccagatctgggacaacgataagttttcttttgacgatttcctaggctccttgcaacttgacctgaatcggatgccgaaacctgccaagactgcgaaaaaatgttcactggaccagctagatgacgccttccacccagagtggtttgtgagcttgtttgaacagaaaaccgtcaaagggtggtggccatgtgtggcagaggagggagaaaagaagattctcgcgggcaagctggaaatgactctggagatcgtggctgaatctgaacacgaggaaagacccgccggacagggccgcgatgaaccaaatatgaaccctaaactggaagatccaaggcgccctgacactagcttcctctggtttacctcaccatataagactatgaagtttatcctgtggcggcggttcaggtgggcaataatcttattcatcatcctgtttatcttactactctttctcgcaatatttatttacgcttttccgaactacgccgccatgaagctggtgaagccttttagttag

SEQ ID NO: 4876 - RNA, 6336 nt, synthetic construct
  misc_feature 1..6336: note = source = /note="Description of Artificial Sequence: Synthetic coding sequence"
  source 1..6336: mol_type = other RNA
atgctaagggtcttcattctttatgccgagaatgtccacacacccgacaccgacatctccgatgcgtattgctcggccgtcttcgccggagtaaaaaagcgcactaaagtcataaaaaattccgttaaccctgtgtggaacgagggcttcgaatgggatctgaagggtattcctcttgatcagggtagtgagctccatgtcgtggtcaaagaccacgagaccatggggaggaacaggtttcttggtgaggcgaaggttccattaagggaggtgcttgccacacctagcctatccgcatcctttaacgcccccctattggacaccaaaaagcagcccaccggagcgtcactggtgctgcaggtatcttataccccactgccgggcgcagtgcctctgtttccacctcctacacccttagagcctagccctacactacccgaccttgacgtcgttgctggtgggggacagtccagagctgaaacttggtcacttctgagcgatagtacgatggacactcgttattcaggaaagaaatggccagcccccactgacactggtggagaagaggataccgaagatcaggggctgacgggggacgaggcggagccatttctagaccagtccggaggacccggcgcccccactacaccacggaagctgccatctcgcccacctccccactaccccggcattaaaaggaaaagatccgccccaacctcccgtaagcttctctcagacaaaccccaggatttccagatcagggtgcaagtgattgagggtaggcaactcccaggagttaatataaagccagtggttaaagttaccgccgcaggacagactaagcgaacaagaatccacaagggcaactcacccttatttaacgagacactcttcttcaacctatttgattctccaggcgaactgttcgatgagcctattttcattaccgtggttgacagcaggtctctccgcacggacgccttactgggggagtttcgaatggatgtgggaaccatctatcgtgaacctagacacgcctacctcagaaagtggttactcctctcagatcccgacgatttttcagccggcgccagagggtacttaaagacatcactgtgcgtattaggtcccggcgatgaagcgcctctggaacgtaaggatccgtcagaagataaggaggacatagagagcaacctgctgcgtcccaccggtgtggccttacgaggcgcacacttctgtctgaaggtgttcagagcagaggatctgccacagatggacgacgctgtgatggataatgtaaaacagattttcggttttgaatctaacaaaaaaaatctggtggatccattcgtcgaggttagcttcgcaggcaagatgctgtgttcaaagattctggaaaaaacagccaacccacagtggaatcagaatatcacattaccggccatgttcccctccatgtgtgaaaaaatgagaatacgcatcattgattgggatagactcacccataatgacatcgtggccactacatacctgtctatgagcaagatatctgcccccggtggggaaattgaggaggaaccagcaggggccgtcaagccctctaaggcaagtgatctcgatgattaccttgggttcctgcctacattcggtccctgctatataaacctgtatggctcgccacgggaatttaccgggttccccgacccctataccgagctgaataccgggaaaggagaaggagtggcctatagaggtcggctgctgctgtccctcgagactaaactggtagaacatagcgaacagaaggtggaagatcttccggcggacgacatcctccgcgtggagaagtatttgcgtcgaaggaaatacagcttgttcgctgctttttacagcgctaccatgctgcaagatgtggatgacgccattcagttcgaagtttccataggcaattatggcaacaaattcgacatgacttgcttgccacttgctagtactacacagtattctagagctgtgtttgatgggtgccattactactatctgccctggggtaacgtcaagcccgtggtcgttctgagctcatattgggaggacatctcacaccggatagaaacccagaatcagctcctgggcatcgccgaccgtcttgaggctggtcttgagcaggtgcatctcgcccttaaagcgcagtgttcaactgaggacgttgacagtctcgtcgcacagctcactgacgagctgatagctgggtgcagccagcctctgggggatattcatgagactccgagcgcgacccaccttgaccaatatctgtatcagctgagaacacaccacctgagtcaaattactgaggctgccctggcgttaaaattgggccactccgagctgcctgccgcactcgagcaggctgaggactggttgctgagactgcgggctctggccgaagagccccaaaatagtctgccagatatcgtgatttggatgctacagggggacaaaagggtcgcctatcagcgtgtgcctgcccatcaagtcctgttttcacgcaggggcgctaattattgcgggaaaaattgtgggaagctgcagaccatttttctcaagtacccaatggaaaaggtgcccggggcccgcatgccagtacagatccgcgtgaaactgtggtttggcctgtctgtggatgaaaaagagtttaatcagtttgctgaaggcaagctgagcgtgtttgctgaaacatacgagaatgaaacaaagttagccctggttgggaactgggggaccacaggccttacttaccctaaattctctgatgtgaccggcaaaatcaagctgccgaaagactcatttagaccctcggcaggctggacatgggcaggagactggtttgtatgcccagaaaagacactcctccacgacatggacgccggacatctaagtttcgttgaggaggtttttgagaatcaaacgaggctgcctggaggccagtggatttacatgtccgacaactatacggacgtcaatggagaaaaagtgctgccaaaggacgacattgagtgtcccttagggtggaaatgggaagacgaagagtggtctacagacttaaaccgggctgtggacgaacagggatgggaatactcgatcacaatcccacctgaaagaaagcccaagcattgggtgcccgctgagaaaatgtattacacacataggcggaggagatgggtaaggttgagaagaagagacctatcccagatggaggcccttaaaaggcacaggcaggctgaggctgagggtgaggggtgggaatacgcttctttatttggatggaagttccacctagaataccgtaaaactgacgccttcagacgcagacgttggcgcaggagaatggaacctttggaaaagactgggccagctgcagtgtttgctctggagggggctttaggaggggtaatggatgataagagcgaagattctatgtcggtgtccacactaagttttggggtgaataggcctactatctcttgtattttcgattatgggaaccgctatcacctgagatgttatatgtatcaagccagggacctcgcagcgatggataaagacagtttttccgacccctatgcaattgtgtctttcttacaccaatcccagaaaactgtcgtcgtgaaaaacacactcaatccaacctgggatcagaccctgatattctacgaaatcgagattttcggggagccggccacagtcgccgagcagccaccctctatcgttgtcgagttgtatgaccatgacacgtacggcgcagatgaatttatggggagatgtatttgtcaacctagtctcgagaggatgcctcgcctcgcctggttcccgcttactcggggatcccagccttccggggagctgttagcctccttcgagctcatccaacgcgagaaaccggcaatccaccatataccagggtttgaggtgcaagaaacttctaggattctggacgagtctgaagacacggatctcccatatccccctccgcagcgtgaagcaaacatttatatggtcccccagaacattaagccggctctacaaagaactgctattgagatccttgcttgggggctgcgcaacatgaagtcataccaattagccaacatttcttcaccttcactggtcgttgagtgtggtggacaaaccgtgcagtcctgtgtgataagaaacctccgtaagaaccctaactttgacatctgcactcttttcatggaggtgatgctcccccgggaggaattgtattgtcctcccataacagtgaaagtaatcgacaatcggcaatttggccggcggccagtagtcggacagtgtaccataaggtcccttgaatcgtttttgtgtgacccttactctgccgaatccccatcaccacagggggggcccgatgacgttagtttactcagcccaggggaggacgtactgattgatatagacgacaaggagcccctgatcccaatacaggaggaagaattcatcgactggtggagcaagtttttcgcaagtattggagagagggaaaagtgtgggagctatcttgagaaggattttgacactctgaaggtgtatgatacccagttagaaaacgtcgaagcctttgagggattgtcagacttctgtaatacattcaaattataccggggcaaaacacaagaagaaaccgaggaccctagtgtaataggagagtttaaaggactctttaagatctacccgctgcctgaggaccctgccatcccaatgcctcctcggcagtttcatcagctggcagcccaaggaccacaggagtgtctagtgcggatttacattgtgcgagcttttggacttcagccaaaggatcctaacggaaagtgtgatccttatattaagatatcaatcgggaaaaagtccgtcagcgatcaggataactacatcccgtgcactctggaacctgtttttggaaagatgttcgagttgacatgcactctgccgctcgagaaggatctcaaaattaccttgtatgactacgatctactttccaaagacgaaaaaattggtgaaaccgtggtcgatctggaaaaccggcttttatcgaagtttggagccagatgtgggctcccacagacttattgcgtcagcggaccgaaccagtggcgtgatcagctgaggccctcccaactgttacacctgttttgtcagcagcatcgcgttaaagctcctgtgtataggaccgaccgggtcatgtttcaggataaggagtactcaatcgaagagattgaagcagggaggattcccaatccccacctggggccagtagaagaaaggcttgcactccatgtactccagcagcagggcctggtgccagaacacgtagagagtcgacctttgtacagtccactgcagcctgatatcgaacagggaaaactgcagatgtgggtagatctttttcctaaagctctgggacgccccggccccccttttaatatcactccccgccgagcaagaagatttttcctgagatgtatcatctggaacactcgagacgtgatactcgatgacctcagcctaacaggggaaaaaatgtctgacatctatgtaaaaggctggatgataggattcgaggagcataaacaaaagactgacgtgcactaccgatcccttggcggcgagggaaattttaactggcggtttatattcccgtttgattacttgcccgctgagcaagtgtgtactattgctaaaaaggatgccttttggcgtcttgacaagactgagtctaagattccagcgagagtggtatttcagatctgggacaatgacaaattcagtttcgatgattttctgggtagtctgcaattagatttgaacagaatgcccaagcctgccaagacagccaagaaatgctcactcgatcaactggacgacgctttccatccagaatggtttgtctctctgttcgaacagaaaacagtaaaggggtggtggccatgtgtcgctgaggagggcgagaagaaaatactggccggcaagctagagatgacactggaaatcgtcgccgaaagcgagcacgaagagagaccggcggggcaggggcgggatgagcctaatatgaacccaaaattggaagacccccgcagacctgacacctctttcctgtggtttaccagcccttataaaaccatgaaattcattctgtggagaagattccgctgggctattattctattcattattctctttatactgctcctcttccttgcaattttcatttacgccttcccaaactatgccgcaatgaaactcgtcaaacccttttcttag

SEQ ID NO: 4877 - RNA, 6306 nt, synthetic construct
  misc_feature 1..6306: note = source = /note="Description of Artificial Sequence: Synthetic coding sequence"
  source 1..6306: mol_type = other RNA
atgctgcgcgtgtttatcctgtatgctgaaaacgtccacaccccggataccgatattagcgatgcctattgttcagctgttttcgccggtgtgaaaaagcgtacgaaagtcatcaaaaattcagttaaccctgtctggaatgaaggctttgaatgggacctgaaaggcattcccctcgaccagggctcggaacttcacgtggtggtgaaggaccacgaaactatgggcaggaacagatttttgggagaagccaaagtcccgctgcgtgaagttctcgctaccccgagtctgtccgcctccttcaacgcccccttgctcgacactaagaaacaacccacaggagcttcactggtgctccaggttagctacaccccactcccgggggccgtgccgctgttccctcctcccactcccctggaaccgtcccccactctgccagatctggatgtcgtggccgatactggcggcgaggaagataccgaggaccaaggattaactggggacgaggcagagccatttctcgatcagagcggaggcccaggcgcgcccaccacaccaagaaaactgcctagccgcccccctccccactatcctggcataaaaaggaagagaagcgccccaacctcccggaaacttctgtcagataaaccccaagatttccagatacgagttcaagtcatcgaggggcgacagttgcccggggtaaacatcaagccagtggtcaaagtgaccgctgcaggacagacgaagcgaactagaattcacaaagggaattcaccacttttcaatgagactctcttctttaatctgttcgactctccgggagagctattcgacgagcctatcttcatcactgtcgtggacagccgctccttgcggacagatgctctgttgggcgaattccggatggacgtcggaaccatctatcgtgagcctcgtcatgcatatctgagaaagtggctgttactgagcgatcctgacgacttcagcgctggcgctaggggatatctcaaaaccagtctatgtgtgttgggccctggcgacgaggcaccactagagcgtaaggacccgtccgaagataaagaggacatcgagtctaacctgctccgaccgacgggggtggctctcagaggggctcatttttgcctcaaggtgttccgcgccgaggatctgccccaaatggatgacgccgttatggacaatgtgaaacagatttttggctttgaatcaaataagaaaaacttggtggaccccttcgtcgaagtgtcctttgcaggaaaaatgttgtgctccaagatcctggaaaaaaccgctaacccccagtggaaccagaacatcacactcccagctatgtttccctctatgtgcgagaaaatgagaattcgtatcattgattgggaccgtctgacccataacgatatagttgccaccacttacctgagcatgtctaagatctctgcacctggcggcgaaatagaagaagaaccagccggagccgtgaaaccctctaaagccagtgatctggatgattatttaggatttttgcccacatttggcccctgttacatcaatttatacggcagccctcgcgaatttactggcttcccagatccatacaccgagttgaatactggaaagggtgagggcgtggcataccgtggaaggctactgctatcattggagaccaagctggtggaacattctgaacagaaggtcgaagatctccccgccgatgacatacttcgagtagagaaatacctgaggagacgcaaatactccctatttgccgccttttactcagcaacaatgctgcaggatgtcgatgatgccatccagttcgaggtcagcattggaaactatggaaacaaattcgacatgacctgcctgcctctagcctccactactcagtactcacgggccgtgttcgacggatgtcactactactatcttccttgggggaatgtaaaacccgttgtagtcctgtcctcgtactgggaagacataagccatagaatagagacccagaaccagctgcttggcatagcagatcggttggaggctggcctggagcaggtacacctggcccttaaggcacagtgctctacagaagacgtggactcactggtggcgcagctgacggatgagctaatcgccggctgctcacagccgctaggagacatacacgaaacacctagcgcaacgcatttggaccagtacctatatcagttgagaacgcatcacctgtctcaaattaccgaggctgccttggctctgaaactcggccactctgaactgcccgccgccctggagcaggccgaagattggctgctccggctcagggcactggcggaggagcctcagaactcccttcccgatatcgtgatctggatgttacaaggtgacaagcgggtagcctatcagcgcgtgccagcacatcaggtgcttttttcccgccgtggagccaactactgcggaaaaaactgtggaaagctgcagaccatcttcctcaagtacccgatggagaaggtacctggggcaaggatgcctgttcagatcagagtaaagctgtggtttgggctgagtgttgatgaaaaggaatttaatcagttcgcagaaggtaaactctcagtgtttgccgagacatacgagaatgagaccaagctggcactggtaggcaattgggggactacaggtcttacctatcccaagttctcagatgtaacaggcaaaatcaaactccccaaagatagctttagaccctccgcaggatggacttgggccggcgactggtttgtgtgccctgaaaagacccttcttcacgatatggatgcaggtcatctgtccttcgtggaagaagtatttgagaaccaaacgagactgcctggaggccagtggatctacatgtctgataattacacagatgttaatggtgaaaaagttttaccaaaggacgatattgaatgcccactcggctggaagtgggaagatgaggagtggtcaacagacctgaaccgggcagtcgacgagcagggatgggagtattccattaccattccaccagaacgcaagccaaagcattgggttcccgctgagaagatgtactacacccaccgccgacggaggtgggtcagattgaggaggcgtgatctaagtcagatggaggcccttaagagacatagacaagccgaagctgaaggggagggatgggagtacgcttccttgtttgggtggaaattccatctggagtatcgaaagaccgacgcctttcgccggagacgttggcggaggagaatggagccactcgagaaaaccggacccgcagccgttttcgccctggagggcgctcttggaggagtcatggacgataaatctgaggactctatgagtgtttcaacattgagttttggcgtgaaccgtccgaccatctcttgtatattcgactacggtaacagatatcatctccgctgctatatgtatcaggcacgggacttggccgcaatggataaagacagtttttcagacccctacgccatcgtttcctttcttcaccaatctcaaaagactgtagttgtcaaaaatactctgaatcctacttgggaccagacactaatcttctacgaaattgaaatctttggagaaccagctacagtagcggaacagcccccctcaattgtggtagaattatatgaccacgatacatatggggccgacgagttcatgggaaggtgcatatgtcagccatcccttgagcggatgccgcgcctagcatggttcccactcacaagagggagccagcctagcggggaactacttgctagctttgagctgattcagagagaaaaaccggccattcatcacatccctggtttcgaggtgcaggaaacctcacgaatactggatgaatcagaggacacagacctgccttatcctcccccccagcgcgaggccaacatctacatggttccccagaacatcaaaccagcactgcagcggaccgccatcgaaatcctagcctggggcctacgcaacatgaagtcctaccaattggccaacatctcttctcctagcctggtggtcgaatgcgggggccagaccgtgcaatcttgtgtgataaggaatctgaggaagaaccccaacttcgatatctgtaccctctttatggaagtgatgctcccccgagaagagctttattgccccccaataaccgttaaggtcatcgataacaggcagtttggaaggcgcccagttgtgggccagtgtaccatcaggtcattggagtcctttctatgcgatccttattctgccgagtcaccatcaccacaggggggtccagatgacgtctcacttctcagtcctggggaggacgtgttgattgatatcgatgacaaagaacctctcattccaatccaactggccgatggactgagctcactggccccaaccaacacagccagccctccaagttcacctcatgaggaagaatttatcgattggtggtcaaagttttttgctagcatcggagagcgcgaaaagtgcggcagctatctcgagaaggattttgataccctgaaggtgtacgatacacagctggagaatgtcgaagcttttgaggggctgagtgacttctgcaacacattcaaactgtatcgggggaaaacacaggaagagaccgaagatccctccgtgatcggggaattcaaaggcctcttcaagatctatccactgcctgaggatcctgccattcccatgccgcccaggcagtttcaccagttagctgcgcagggcccacaggagtgtctagtgagaatatatatcgtgagagcttttggcttgcaacccaaggaccctaatgggaaatgcgatccgtatataaaaatttccatcgggaaaaagtccgtaagcgaccaggacaactatatcccttgtactctggaacccgtattcggtaagatgtttgaactgacatgtactctgcccttggaaaaagacctgaaaataaccctgtacgactacgacttgctgtccaaagacgagaagatcggagaaactgttgttgaccttgaaaaccggctgctgtcaaagttcggagcccgatgcggcctcccacaaacgtactgtgtgtccggcccaaaccagtggcgcgaccaattgaggccaagtcagctcttacaccttttttgccagcagcatagggtgaaagctccagtatataggaccgatagggtgatgtttcaggataaagagtatagcattgaagaaatagaagcgggaaggattcctaatcctcaccttgggccagtggaagagcgattggcactgcacgtcttgcagcaacagggtttggtgcctgaacacgtcgagtcaagacctttatactcccctctacagcctgatattgaacaagggaagttgcagatgtgggttgatctgttcccaaaggccctgggtcggcctgggccccctttcaacatcacccctagacgcgcccgtcgcttcttcctcaggtgcattatatggaacacaagggacgtcatcttggacgatctgtcactgaccggggaaaagatgagcgacatctacgtgaaaggctggatgatagggttcgaagagcataagcagaaaaccgatgttcattatcgatccctggggggtgaagggaattttaactggcggtttattttccctttcgactaccttccagcagagcaggtctgcacaatagccaaaaaagatgcgttttggcgtcttgataagactgagagtaaaattcccgcccgagtcgtgttccaaatatgggataacgataagttctcatttgatgattttctgggctccctccaactggatctcaacagaatgcccaaacccgctaagacagctaagaagtgtagtctggatcagctggatgacgctttccatccggagtggttcgtctctctgtttgaacagaaaacagtgaagggctggtggccctgcgtggccgaggaaggggagaaaaagatattggccggtaaactcgagatgactcttgagattgtggccgagagcgaacatgaagagaggccagcgggccagggacgcgatgaacctaatatgaaccctaaattggaggaccctagacgaccggacacaagttttctctggttcacttctccctataaaaccatgaagttcatcctgtggagacgtttcaggtgggccatcattctcttcattattctgttcatcctattactgttcctggccattttcatttatgcctttccaaactatgctgctatgaaactcgttaagccattttcttag

SEQ ID NO: 4878 - RNA, 447 nt, synthetic construct
  misc_feature 1..447: note = source = /note="Description of Artificial Sequence: Synthetic coding sequence"
  source 1..447: mol_type = other RNA
atgggatatccagaggtggaaagacgagagcttctccccgccgctgctccaagggaaagagggagccaaggatgcggttgtggaggagcacctgctagggcgggagagggaaactcttgcctgctattcttaggcttttttggactgagcctggctctccatctccttacgttgtgctgctacctcgagttgagatctgaactccgtagagaacgcggcgcagaaagccgcttgggcggatcgggtacgcccggtacatcaggcactctttcctccctgggtggtctcgatcccgactccccaattacatcacatcttggccagcccagtccaaagcagcagccactggaacctggagaggctgccctgcacagtgactctcaggacggacatcaagacttcgattacatcatctccttcagctacggactgcaagggttttgctag

SEQ ID NO: 4879 - RNA, 1176 nt, synthetic construct
  misc_feature 1..1176: note = source = /note="Description of Artificial Sequence: Synthetic coding sequence"
  source 1..1176: mol_type = other RNA
atggggtatcccgaagtggaaagaagggaactgttgccagccgcggcaccaagagaacggggaagccaggggtgtggttgcggtggggcacctgccagagctggcgagggaaactcatgcttgctgtttctgggcttttttggtctgagccttgccttgcatcttctgacactttgttgctacctggagttaagatcagaacttcggagggaacgcggagctgaaagccgcctgggtggatccgggactcctgggactagcggtactctctcttcactcgggggactcgatcctgactctccaatcacgtcacacctgggccaaccaagtcccaagcagcagccactcgaacccggagaagccgccctgcattctgatagccaggatggccaccagatggccttactgaactttttttttcccgacgaaaagccctacagcgaagaggaatctagaagggttaggagaaataagcgaagcaaatccaacgagggtgctgatggccctgtgaagaataagaagaagggcaagaaggccggccctccaggcccgaacggaccccctggacctcctggaccccccggcccacaggggcccccgggcattcctggcatacctggtatccccgggacgacagtcatgggacccccagggcctcctgggccacccgggccacagggtcctcccggccttcaaggaccgtccggggccgctgataaggcaggcacgcgcgaaaaccagcctgctgtcgtacacttgcaagggcagggcagtgcgatccaggttaagaatgatctttcaggaggcgttttgaatgattggtctagaatcacaatgaatccaaaggtttttaagctacacccccggtcaggtgagctggaagtcctggtggacggaacgtattttatctattcacaggtagaagtgtattacattaatttcactgacttcgcaagttacgaggtcgtggttgatgagaaaccatttttacagtgcacacggagcattgagactggcaaaactaattacaacacgtgctatactgctggagtgtgtcttctgaaggcaaggcaaaaaatcgcagtaaaaatggtccatgccgatatctcaattaatatgtcaaagcatactaccttcttcggagctataaggctgggggaggcacccgctagttag

SEQ ID NO: 4880 - RNA, 1170 nt, synthetic construct
  misc_feature 1..1170: note = source = /note="Description of Artificial Sequence: Synthetic coding sequence"
  source 1..1170: mol_type = other RNA
atgggctatccagaggtggagaggagggaactgctgcctgcagcggcccctagggaaagaggttctcagggttgcggctgcggtggggcccccgcgcgagccggcgagggcaacagctgtctcctattcctcggtttttttggactgtctctggccctccaccttctaacactttgctgttatctcgaactgagatcagaactgcgccgcgaacggggggcagagtcaagactagggggttcaggaactcctggaacatcagggaccctgtcttcattagggggcctagaccccgactcgcctataacatcacatctcggccagccgagtcctaagcagcagcctcttgagcccggtgaagctgcccttcatagcgactcacaggacgggcatcagatggccttgctaaattttttctttccagacgaaaaaccctactctgaggaggagtctcggcgcgtgcgtagaaacaaaagatcaaaatctaatgagggagccgacggtcccgtcaaaaataagaaaaaaggtaaaaaggctggtcctccaggtcccaatggtcctcctggccctccaggccctcctggaccccaaggccctccaggaattccagggatccccggcataccagggacaactgtgatgggccctccagggcctccggggcctcccggtccccaaggcccgccagggctgcaggggccttccggggctgctgacaaggccggaaccagggagaatcagcccgccgtagtccatttgcagggccaaggctcagcgatacaggtgaagaacgacctgagtgggggagttctaaacgactggtcacgcatcacaatgaaccctaaggtgtttaagttgcatccacgatccggcgagctagaagttctggtggatggcacctattttatatactcccaggtttactatatcaattttacagatttcgcatcttacgaagttgtggttgacgagaagcccttccttcagtgtacaaggtctattgaaacagggaagacaaattacaacacctgttacacagccggcgtttgcctgctgaaagccagacagaaaattgcagtaaagatggtgcacgcagatatctcaatcaatatgtccaaacataccaccttctttggcgccattcggctgggagaggcacccgcttcatag

SEQ ID NO: 4881 - RNA, 408 nt, synthetic construct
  misc_feature 1..408: note = source = /note="Description of Artificial Sequence: Synthetic coding sequence"
  source 1..408: mol_type = other RNA
atgggttaccctgaggtggaaagaagagagctattaccagctgctgcccccagagaaagaggatcacagggatgtggttgtggcggcgccccggcaagggccggagaaggcaactcctgtctcctgttcttaggcttcttcgggctctcccttgctttacatttgctgaccttgtgctgctatttggagttgagaagcgaactcagacgagaaagaggggcagaatcgcgactgggcgggtccggcactcccggcaccagcggtactctgtctagccttggcggcttagaccccgactccccgatcaccagccatttaggacagccatctcccaagcaacagccgctggagcccggtgaagccgctttacatagtgacagtcaagatgggcatcagggccatcagtag

SEQ ID NO: 4882 - RNA, 1161 nt, synthetic construct
  misc_feature 1..1161: note = source = /note="Description of Artificial Sequence: Synthetic coding sequence"
  source 1..1161: mol_type = other RNA
atgggttaccctgaagtcgaacgtagagagctgctgccagctgccgcgccccgcgagagaggatcccagggctgcgggtgcggaggagcgcccgctagggccggagaagggaactcctgcttgctgtttctcgggttctttggactgtcgcttgctctccacttacttactttatgttgttacttggagctgaggagcgaactgagacgggagcggggcgctgagagcaggctgggcggctccggtacacctggcacaagcggcaccctgtcctcactaggaggtctggatcccgattctcctattacttcccacctcgggcagccatctcccaagcagcagcctctggagcccggagaagctgccctccattccgacagccaggatgggcaccagatggcactccttaacttcttttttccagatgagaagccctactctgaggaagaatcccgacgggtccgaagaaacaagagaagcaaatctaatgagggagctgatggccccgttaagaataagaaaaagggcaagaaagcaggccctcctggacctaatggcccccctggccctcctggcccccctggtcctcagggccctcccggaataccaggcatccccggcatccccggcaccacagtgatggggccaccgggaccccccggaccaccagggccacagggaccacctggcttacagggtcccagcggggcggccgataaggctgggacgcgtgagaaccagccggcagtcgtgcacttacagggccagggcagcgcaatccaagtgaagaatggcggcgtcctaaacgactggtccagaataacgatgaaccctaaggtcttcaagcttcaccctcgctctggggaactggaagttctcgttgacggtacttactttatttacagccaggtttattatatcaactttacggacttcgcaagttacgaggtcgtcgtcgatgaaaagcccttcctccaatgcacccgatccattgagacgggtaaaacaaattacaacacctgctataccgctggggtttgcttactgaaagcaagacaaaaaatcgctgttaagatggtgcatgccgatatttccatcaacatgtctaagcacactacattttttggcgccatcagactgggagaggcacccgccagctag

SEQ ID NO: 4883 - RNA, 447 nt, synthetic construct
  misc_feature 1..447: note = source = /note="Description of Artificial Sequence: Synthetic coding sequence"
  source 1..447: mol_type = other RNA
atgggatatcctgaagttgagagacgggaacttcttccagcagcagcaccgagagagagaggatcccaaggctgcggctgtgggggagcaccggcacgggccggagaggggaatagctgcctactgtttttagggttcttcgggttgagtctggcccttcacctgttaacactgtgctgctacctggaactgagatcggaattaagacgggaaaggggagccgagagcagactcggtggatcagggacccctggaaccagcggcaccttatcgtcgttaggcggcctggatccagattctcctattacaagccacctgggacagcccagtccgaaacagcagccactggaacccggagaggccgcattacattccgattcccaggatggtcatcaggacttcgattacatcatttctttcagctacggattacaggggttttgctag

SEQ ID NO: 4884 - RNA, 3429 nt, synthetic construct
  misc_feature 1..3429: note = source = /note="Description of Artificial Sequence: Synthetic coding sequence"
  source 1..3429: mol_type = other RNA
atgctggtcctcaggtgccggctaggaacctccttccctaagcttgacaaccttgttcccaaaggtaagatgaaaatccttctggtttttctaggtctactcggcaacagcgtggcaatgcccatgcacatgccccggatgccgggttttagcagcaaatccgaggagatgatgcgttacaaccagttcaattttatgaatggcccacacatggcccacctgggcccattctttggcaatggccttcctcagcagtttccgcagtatcagatgcctatgtggcctcagcccccccccaacacgtggcatcccagaaaatcgtccgcacctaagaggcataacaaaaccgaccaaacccaagaaactcagaaaccgaatcagacacagtccaaaaaaccacctcagaaacgacctctgaagcaaccctcccataaccagccacaacccgaagaagaagcccagcctccacaggcgttccctccttttggaaacggactgttcccatatcagcaaccgccttggcaaattccccagcggctgcctcctcctggttacggaaggccaccaatatccaacgaggaaggaggcaacccgtactttgggtactttggctaccatggctttggcggtcgacctccgtattactccgaggagatgtttgaacaggacttcgagaagcccaaggaggaagacccgcctaaagctgagagtccaggtaccgagccaacagcaaattctacagtgacagaaaccaactccacccagcccaatccgaaaggcagccaaggcgggaacgacacaagcccaactggcaattccactccgggattaaacactggcaacaacccccctgctcagaacgggatcgggccacttccagccgtcaacgcctcgggtcagggggggccggggtcacaaatcccatggaggccatcccagcccaacattcgagaaaaccacccctacccaaatatacgcaattttccctcaggacgccagtggtactttaccggaacagtgatgggtcatagacagaatcgtccgttctatcgtaatcagcaagtccagagaggcccacgctggaacttctttgcctgggaaaggaagcaggtggccagaccgggcaatccagtttaccacaaagcataccccccgacaagtcggggaaactatcctaactacgcaggtaatcctgcaaaccttcgccggaaaccgcaggggcctaacaagcacccggttggcacaaccgttgcacccctgggaccaaagcctggccctgtcgtgcggaacgagaaaattcagaatcccaaggaaaagcctctcggacctaaggaacagataattgtccccaccaaaaacccaacctccccctggcgaaactctcagcagtatgaggtgaataagagcaactataagctaccccactccgagggctatatgcctgtgcccaattttaactcagtagaccagcatgaaaattcttattatccccggggcgatagcagaaaagtcccaaatagcgacggccaaacccaaagccagaacctccctaaaggaatcgtactgggttcacgccgcatgccatacgaaagtgagactaaccagagcgagttgaagcattcttcatatcaaccagccgtttaccccgaggagataccgtctccagcaaaggagcatttcccagccggaagaaatacttgggaccatcaagaaatttcccctccgttcaaagaggacccggggagacaggaggaacacctcccacatccgtctcacggttctagggggtccgtgttctaccccgagtacaatccttacgatcctcgagaaaattcaccatatctgagagggaacacatgggacgagcgggatgattctcctaacacaatggggcagaaggaatcacctctttatcctataaacaccccagatcagaaggagattgtgccatacaatgaagaagatccagtggacccaacaggtgatgaagtcttccctggacagaacaggtggggagaagagctctcatttaaaggcggtccaacggttcgtcactacgagggcgaacaatataccagcaatcagccaaaggaatacctgccgtactcgcttgacaacccgtctaaacctcgcgaggacttctactattccgagttttatccatggtctcccgatgagaactttccctcctacaatacagcttctactatgcctcccccaatagagtctcgggggtactacgtaaacaacgcagctgggcccgaagaatcgaccctatttccttcaagaaatagctgggatcacaggattcaggcacaggggcagagggagaggcggccttattttaacagaaacatctgggaccaagctacccatcttcaaaaagcgcccgccagacctccggatcagaaggggaaccagccatattattcaaatacaccagccgggttgcagaaaaaccctatatggcacgaaggtgaaaacctcaactatggtatgcagataacgcgaatgaactccccagagagagaacactcaagttttcctaattttatcccgccaagctaccccagcggccagaaggaggcacacctctttcatttgtcccaacgcggatcatgctgcgctggatccagtaccggcccaaaagacaatcccctcgctctgcaagattacactcctagctacggcctagcacctggcgagaaccaggacacctctcctctctatacagacggcagtcacacaaaacaaactcgggacattatttcacccacgtctatcctgccaggccagcgtaatagctccgaaaagcgtgagagccagaacccgtttcgtgatgacgtcagcacactcaggcgaaacaccccatgctctattaaaaaccagcttgggcaaaaagaaatcatgccgtttcccgaggcctcctcactgcagtccaagaataccccatgtctgaaaaatgatctgggaggcgacggtaataacatcctagagcaagtgttcgaggacaaccagttaaacgagcggaccgtcgacctgaccccagaacagctcgttattgggacccccgacgaaggatctaaccccgagggcattcaaagccaggttcaagagaacgaatcggaaagacagcagcagaggccctcaaacatcttacacctgccatgctttggaagtaaacttgctaagcaccattcatccactaccgggacccctagtagcgatggacgacagagcccctttgacggagacagtatcacgcctactgagaaccccaacacacttgttgaactggctacagaagagcagttcaaatcaatcaatgtggaccccttggatgctgacgagcatagcccattcgaattcttacagcgggggacaaacgtccaggatcaggtgcaggattgcctcctcctacaagcgtag

SEQ ID NO: 4885 - RNA, 582 nt, synthetic construct
  misc_feature 1..582: note = source = /note="Description of Artificial Sequence: Synthetic coding sequence"
  source 1..582: mol_type = other RNA
atgggtgtgcacgaatgtcccgcgtggctgtggctgctactgagccttctctctctgccacttggactgcctgtactcggtgccccccccaggttgatttgcgacagtagagtattggagcgttacttgctcgaggccaaggaggcggaaaacattactactggatgcgctgagcattgcagcctgaacgaaaatattactgtgccagacaccaaagtgaacttttacgcctggaaaaggatggaagtcgggcagcaggccgtggaggtgtggcaaggcctggcacttcttagcgaagctgttcttagaggacaagctttactggtgaacagcagccaaccatgggagccacttcagttacacgtcgataaagccgttagcggtctgcgtagtctgaccactctcctacgcgccctgggagctcagaaagaggcaatctccccccctgacgcagcgtccgctgcccctctgcggaccattacagccgacactttccggaagctgttccgcgtgtactcaaattttcttagaggcaaattgaaattgtatacaggcgaggcatgtcgtaccggcgatagatag

SEQ ID NO: 4886 - RNA, 192 nt, synthetic construct
  misc_feature 1..192: note = source = /note="Description of Artificial Sequence: Synthetic coding sequence"
  source 1..192: mol_type = other RNA
atgcccagtagcgtgtcctggggcatattactgcttgccgggttgtgctgtctcgtgcccgtatctttggctcacggagaaggaaccttcacgtcggacctttctaagcaaatggaagaggaggctgtgcggttatttattgaatggcttaaaaacggaggcccatcatccggcgcgccaccacctagttag

SEQ ID NO: 4887 - RNA, 390 nt, synthetic construct
  misc_feature 1..390: note = source = /note="Description of Artificial Sequence: Synthetic coding sequence"
  source 1..390: mol_type = other RNA
atgaagactttgcagttcttctttctattttgttgttggaaagcaatttgctgtaatagctgtgaacttacgaatatcacgatcgcaattgaaaaggaagaatgtagattctgtatcagtatcaatacaacctggtgcgctggctattgttatactcgcgatctggtttataaggatccagcccggcccaaaatccagaaaacctgtaccttcaaagagcttgtatatgaaaccgtccgagtgcctggctgtgctcaccatgcagatagtctctatacctacccagtggcgacacagtgccattgcggaaaatgtgacagcgacagcactgattgtaccgtccgggggctaggaccgagttattgcagtttcggcgagatgaaagagtag

SEQ ID NO: 4888 - RNA, 390 nt, synthetic construct
  misc_feature 1..390: note = source = /note="Description of Artificial Sequence: Synthetic coding sequence"
  source 1..390: mol_type = other RNA
atgaagacactgcagttttttttcttattttgttgttggaaagccatatgttgcaacagctgcgaattaactaacattacaattgcaattgaaaaagaggaatgtcgtttttgtatttcgatcaataccacttggtgcgccggatattgttatacacgcgacctggtctacaaggaccctgcccggccaaagatccaaaagacctgtacatttaaggaactggtgtatgaaacggtcagggtgccgggatgtgcacatcatgccgatagcctgtacacttatccagtagcaactcagtgtcattgcggcaaatgcgattcagactccacagactgcaccgtgcgaggcctgggcccctcttactgctcattcggagagatgaaggagtag

SEQ ID NO: 4889 - RNA, 390 nt, synthetic construct
  misc_feature 1..390: note = source = /note="Description of Artificial Sequence: Synthetic coding sequence"
  source 1..390: mol_type = other RNA
atgaagacactacagttcttttttctgttttgctgctggaaagccatctgctgcaattcttgcgagctcacaaacataaccattgcaattgaaaaagaagagtgcaggttttgcatttcgattaatactacctggtgcgccggatattgctatactagagatctcgtctacaaggatcctgcccgtccgaaaatccagaagacttgcacatttaaagagttggtatatgaaaccgtgcgcgtacctggatgtgcccaccacgccgacagtctctatacctacccggtagcaactcaatgtcattgcgggaaatgtgactccgacagcaccgattgtaccgtgagagggttaggcccctcctattgctcgttcggcgagatgaaggagtag

SEQ ID NO: 4890 - RNA, 1569 nt, synthetic construct
  misc_feature 1..1569: note = source = /note="Description of Artificial Sequence: Synthetic coding sequence"
  source 1..1569: mol_type = other RNA
atggcagccgtggtcgcggcgacaagatggtggcagttattgctggtcctgagcgcagcgggcatgggcgcaagcggagcaccccaacccccaaatatactgcttctcctgatggacgacatgggatggggcgacctgggcgtgtacggtgaaccctcccgggaaactccaaatttggataggatggctgccgaagggctcttgttccctaacttctattccgctaaccccctctgctccccctcacgcgccgctttgctgactggacggcttcccatccgtaacggtttttatacaactaacgcgcacgcacgaaacgcctacacaccccaagagattgtgggtgggatccccgactccgagcagctgctcccagaattacttaaaaaagctggctacgtctcgaaaattgtgggcaagtggcacctgggtcaccggccccaattccaccctttaaaacacggtttcgacgaatggttcggctcccctaattgtcatttcgggccatatgataataaggccaggccgaacatccctgtctaccgagattgggaaatggtgggaagatattatgaggaattccccattaacttaaaaaccggtgaggccaacttgactcagatctacctgcaagaggcccttgactttataaagcgacaggcccggcatcaccccttctttctttactgggctgttgacgccacccacgctccagtctacgcttccaaacctttcctcggcacttcacagagaggtcgatacggcgacgcggtgcgcgagatcgatgacagcataggcaaaatccttgagctcttgcaggatctacacgtggcagacaatactttcgtttttttcaccagtgataatggagccgccctgatttccgctccagagcagggcggttctaacggtccctttctgtgtgggaaacagaccaccttcgaaggaggtatgcgagagcctgccctggcctggtggcctggccacgtgacagcaggccaggtctcccaccagttagggtcgattatggacctcttcaccacctctctcgcattagctggccttactccgccctcagaccgcgcaatagacggtcttaatttactcccaacacttctgcagggacgccttatggatcgccccattttctactacagaggggataccctgatggcggcgacactcggccagcacaaagctcacttctggacttggacgaatagctgggaaaatttccgacagggaatcgacttttgcccaggacagaacgtgagcggggttactactcacaaccttgaagaccacacaaagcttcctctgatctttcatctgggacgagatcctggggaacggttcccactgagttttgcaagcgcagaataccaggaggctctttctcgaattaccagcgttgtccaacagcaccaagaggcgctggtgcctgcccaaccacaattaaacgtctgcaattgggccgttatgaactgggcaccgcccggatgtgagaagcttggcaagtgcctgactccaccagagtccatcccaaaaaagtgcctatggtcccactag

SEQ ID NO: 4891 - RNA, 261 nt, synthetic construct
  misc_feature 1..261: note = source = /note="Description of Artificial Sequence: Synthetic coding sequence"
  source 1..261: mol_type = other RNA
atggccgctgtcgtggctgcgacaaggtggtggcaactgctgctagtcctaagtgctgcaggaatgggcgcctccggagctcctcaaccccctaatatccttttacttctaatggacgacagaggacggcattgctcccaggatggatatcccagcgccatggccagtaccccacctacccccatgccagagaccccaactcaccggcgtaggctgtgggctgctagccaaaccaggagttcatcatgtagaagtttctag

SEQ ID NO: 4892 - RNA, 1344 nt, synthetic construct
  misc_feature 1..1344: note = source = /note="Description of Artificial Sequence: Synthetic coding sequence"
  source 1..1344: mol_type = other RNA
atggctgcagttgtcgcagccacccgctggtggcaattgttacttgtgctaagcgctgctggcatgggcgcctctggagcccccgggcagagggcatacaccccacaggagatagtaggaggcattcccgactctgagcagctgctacccgagctacttaaaaaggccgggtacgtctccaaaatcgtcggcaaatggcacctcggccacagacctcagtttcacccgttgaaacacgggttcgatgagtggttcggatctcccaattgccactttgggccgtacgacaataaagcacgacccaacattccagtgtacagggactgggagatggtaggacgctactacgaggagttccccattaatctcaagactggtgaagctaacctgacacaaatttacctgcaggaggcgttggactttatcaagcgacaggcacgccatcacccttttttcctctactgggccgtagatgccacacacgcccccgtgtatgcctctaagccatttcttggaacttcccaacgaggtcggtacggcgacgctgtgagggagatcgacgactccatcggcaaaatcctggagctgctgcaggatttacacgtggcagataacacttttgtgtttttcacgagcgataatggcgccgccctcatctccgccccagaacaaggtggttcgaatggaccattcctttgcgggaaacaaacaacctttgaaggcgggatgcgtgagccagcgcttgcttggtggccagggcacgtaaccgccggccaggtctcccaccagctgggctccattatggatctgttcacgacttctctagcccttgccggcctgacacctccatccgacagagctatcgacggactgaatctgcttcctacattgcttcaaggaaggctgatggatagacctatcttttactacaggggcgataccctgatggctgcaaccctcgggcagcataaggcacacttctggacctggactaacagctgggagaactttcgccaaggcatcgacttttgtcccggtcagaatgtcagcggcgtgactacccataacttggaagatcacactaaattgccccttatctttcatcttggccgcgatcccggtgaacgctttcccctctccttcgcctccgccgaataccaagaagcgctctcacggattactagtgtcgtgcagcagcaccaggaggcactcgttcctgctcaaccccagctcaatgtttgtaactgggcagtgatgaactgggctccacctggatgtgagaagcttggaaaatgcctaacacctcccgagtctattccaaagaaatgcctctggtcccactag

SEQ ID NO: 4893 - RNA, 636 nt, synthetic construct
  misc_feature 1..636: note = source = /note="Description of Artificial Sequence: Synthetic coding sequence"
  source 1..636: mol_type = other RNA
atgaaattatgggacgtagtggccgtgtgtttagtcctgctccacacagcttctgctttccccttgcccgcaggcaaacggcctcccgaagctcccgccgaagaccggagcctcggcagacggagggcgccctttgccctaagtagcgactccaacatgccagaagattacccagaccagtttgatgacgttatggactttatccaagctacaataaagcgactgaagagatcacctgacaagcagatggccgtgctgccccgccgggaacgtaatagacaggctgcagcagcaaaccctgagaactcccgcggtaagggtaggagagggcagagaggtaagaaccgaggctgtgtcctcacagcaattcacctaaacgtaacagatctagggctgggctacgaaaccaaagaggagttgatattcaggtactgctcaggaagctgtgatgctgccgaaacaacatacgacaaaattttgaaaaatttgtcacgtaaccgacgcctcgtttccgacaaagtgggccaggcctgctgcagaccaattgcgtttgacgacgatctcagctttctcgatgataaccttgtttaccacattctcaggaagcactctgccaagagatgcggctgcatttag

SEQ ID NO: 4894 - RNA, 558 nt, synthetic construct
  misc_feature 1..558: note = source = /note="Description of Artificial Sequence: Synthetic coding sequence"
  source 1..558: mol_type = other RNA
atgaagctttgggacgtcgtggcagtgtgcttagtgctgctgcatactgcctcagccttcccattaccagccgccaacatgcccgaggattaccccgatcaattcgacgacgtcatggactttatacaggcaactataaagcggttaaagaggtcaccagacaaacaaatggctgtcttaccaagaagagagcgcaaccgccaggccgccgccgctaaccctgaaaactcgcgcggtaaaggccggagaggacagcgtggcaaaaatagagggtgtgtgctcaccgcaatccacctgaacgttacagacctgggactggggtatgaaacaaaggaggagttgatatttaggtactgttcaggttcatgcgatgccgccgaaacgacatatgacaaaattctgaaaaacttgagtcgcaatcgacgcctcgtgagtgataaagtcggacaagcttgttgtcgaccgatcgcctttgacgatgacctctccttcctagatgataatctggtgtaccacatattgagaaagcacagcgcgaagagatgtggctgcatatag

SEQ ID NO: 4895 - RNA, 687 nt, synthetic construct
  misc_feature 1..687: note = source = /note="Description of Artificial Sequence: Synthetic coding sequence"
  source 1..687: mol_type = other RNA
atgcagtcactgccaaacagcaacggagcagctgctggaagagacttcaagatgaagctgtgggatgtggtcgctgtatgtctggtattgttacacacagctagcgccttccccttgccggccggaaagcggccacctgaagcacctgctgaggacagaagcctcggacgcaggagagctccctttgctctttctagcgacagcaatatgccagaggactacccagatcaattcgacgacgttatggacttcatccaggctaccattaaacggttgaaacgctccccagacaagcagatggccgtccttccgagaagagagcgcaatcgccaagccgcagccgctaatccagagaattccagaggaaagggccgacgtggccagcgcggcaaaaatagaggatgtgtgctgacagccatccacctcaacgtaacagacctcggcctggggtatgagacaaaggaagagttaatctttcgctattgcagcgggtcgtgcgatgctgccgaaaccacttacgacaaaatactaaaaaacctcagccgcaaccgaaggctggtgtctgacaaggtgggacaggcctgctgcagaccgatagcgttcgatgacgatttatcattcctggacgataacctcgtgtaccatattctccgtaagcactctgccaagcgttgcggatgcatctag

SEQ ID NO: 4896 - RNA, 186 nt, synthetic construct
  misc_feature 1..186: note = source = /note="Description of Artificial Sequence: Synthetic coding sequence"
  source 1..186: mol_type = other RNA
atgaaactttgggacgtagtagctgtttgcctcgtgctgcttcacactgctagtgctttccccctccctgcggccaacatgcccgaagactatcctgaccaatttgacgacgttatggattttatccaagctaccatcaaacgcctgaaaagatcacccgacaaacaaatggcagtgttgccttag

SEQ ID NO: 4897 - RNA, 186 nt, synthetic construct
  misc_feature 1..186: note = source = /note="Description of Artificial Sequence: Synthetic coding sequence"
  source 1..186: mol_type = other RNA
atgaagctatgggacgtggttgccgtttgcctagttctacttcacactgcctctgccttccccttgccagctgccaacatgccagaggattatcctgatcaatttgatgacgtaatggattttatccaggccacaattaaacgtctcaagcgttctccagataaacagatggccgtactgccttag

SEQ ID NO: 4898 - RNA, 558 nt, synthetic construct
  misc_feature 1..558: note = source = /note="Description of Artificial Sequence: Synthetic coding sequence"
  source 1..558: mol_type = other RNA
atgaagttatgggacgttgttgccgtttgtcttgtactgttgcatacagcatccgcattcccgttgcccgctgctaatatgccagaggattatcccgaccaattcgacgacgtcatggattttattcaagccaccattaagcgcctgaaaaggtctccggacaagcagatggcagtactgccccggagagaacgtaaccggcaggcagccgccgcaaaccccgagaattcccgtggaaaaggacgtcgtggtcagcgaggcaaaaaccgtggatgtgtccttacggcgattcatctgaacgtgacagatttaggacttgggtacgaaaccaaggaggagctcatatttcgctattgttccgggtcctgcgatgctgcagaaacgacgtacgacaaaattctgaagaacctgtcgagaaaccgacgtctggtttctgacaaggttggccaggcctgttgtcggcctatcgctttcgatgatgatcttagcttcctcgacgataatcttgtttaccatattctccgcaaacattcagctaaaaggtgtggatgtatctag

SEQ ID NO: 4899 - RNA, 609 nt, synthetic construct
  misc_feature 1..609: note = source = /note="Description of Artificial Sequence: Synthetic coding sequence"
  source 1..609: mol_type = other RNA
atgcagagccttcctaattccaacggagcagccgcaggcagggatttcaagatgaaactgtgggatgtcgtagccgtgtgtctggtcctgttacacaccgcctcagctttcccacttccagccgcgaatatgccagaagattaccccgatcaatttgacgatgtgatggatttcatacaggcgaccatcaagaggttgaagaggtctccagacaaacagatggctgtgttacctagacgcgaacgcaaccgtcaagccgctgcagcaaatcccgaaaattcccggggtaagggcagacgcgggcagcgtggaaaaaatagaggctgcgtgctgacagccatccacctgaatgtaacggatctgggcctgggctatgaaaccaaagaagagttgatatttcgctactgttctgggagttgtgacgctgccgaaacgacatacgacaaaatcctgaagaatctgagtcgtaaccgtcgacttgtgtcagataaagtgggtcaggcatgttgccgcccaatcgcctttgatgatgatctctctttcttagacgacaatttggtttatcatatacttcgtaaacattctgcaaagcgctgcggctgtatctag

SEQ ID NO: 4900 - RNA, 543 nt, synthetic construct
  misc_feature 1..543: note = source = /note="Description of Artificial Sequence: Synthetic coding sequence"
  source 1..543: mol_type = other RNA
atgaaaagcatctacttcgttgccggtctgtttgtgatgctggtgcagggatcatggcagcgttcactacaggacaccgaggaaaagagccggagcttttcggcctcccaagcagaccctctgtccgaccccgaccaaatgaatgaagataagagacatagtcagggcacctttacatctgattatagcaagtacttagattctaggagagctcaagactttgtgcaatggctgatgaacacaaagaggaataggaataatattgccaaaagacatgatgagttcgaacgccatgcggagggcacctttacctctgatgtgagtagttatcttgaagggcaagcagcgaaagaattcatagcttggctagttaagggacgcggaagaagagacttccccgaagaggttgcaatcgttgaagaattaggcagacgccacgcggatgggtcttttagtgatgagatgaatacaatcctggacaatttggcagcgagagattttatcaactggcttatacagacaaagatcactgacaggaagtag

SEQ ID NO: 4901 - RNA, 543 nt, synthetic construct
  misc_feature 1..543: note = source = /note="Description of Artificial Sequence: Synthetic coding sequence"
  source 1..543: mol_type = other RNA
atgaaatccatatattttgttgccggtctctttgtaatgctcgtacaaggttcatggcaacgctcacttcaggacacagaagagaaatctaggtcatttagcgcttcccaggccgaccctttatcggacccggatcaaatgaacgaagataaaagacactcgcaagggaccttcacatcagactactccaagtatctcgattccaggcgggctcaagatttcgtgcaatggttgatgaacacgaagcgcaaccgcaataacatcgcaaagaggcatgatgagtttgaaagacatgctgaagggaccttcacaagcgacgtcagctcctacctagaggggcaagccgcgaaagaattcattgcctggctggtgaaaggaagggggcggagagattttcccgaagaggtcgccatcgttgaagaattaggtcggagacacgcggacggatccttctcggacgagatgaacacaatccttgataatttggccgcccgcgattttattaattggctgatacaaacgaaaatcaccgatcgcaagtag

SEQ ID NO: 4902 - RNA, 2859 nt, synthetic construct
  misc_feature 1..2859: note = source = /note="Description of Artificial Sequence: Synthetic coding sequence"
  source 1..2859: mol_type = other RNA
atgggagtacgacatcctccgtgctctcaccggctgcttgcagtttgtgccctagtgtctctggccaccgctgcattgttgggacacatactgttacatgacttcttgcttgtgcccagggagctgagtggaagttcccctgtgctcgaggaaacgcacccagcgcaccagcaaggcgcgagtcgccccgggccgcgtgacgctcaggctcatccgggtcgacccagggcggtccccacccaatgcgacgtgcctcctaattctcgtttcgactgtgcacctgacaaggctataacacaggagcaatgcgaggctagagggtgctgctacataccagccaaacaggggttgcaaggcgctcagatgggtcaaccttggtgttttttcccacccagctacccaagctataaactggagaacttgagctcaagcgagatgggatacacagccacacttacacgaaccacaccaacatttttcccgaaagacatccttacactacgacttgatgtgatgatggagacagaaaataggctgcactttacgattaaagacccggccaataggcggtatgaagttcctttggagaccccacatgtgcactcacgggccccctcaccgctgtactccgttgaattttccgaggagccgtttggtgtgattgttagacgccaacttgacggaagagtcctgctgaacacaactgttgcccctctgttcttcgcagatcagttcttgcagctcagtacttccctgccgtcacagtacatcactggactggccgaacacctgagccccttaatgctgtctacgagttggacacgcataactctgtggaatcgggacctggcccccacacctggcgctaacctgtatggctctcaccctttttacctggcccttgaggatggcggtagtgcccacggtgtattcctacttaacagcaacgccatggacgttgtcctccagccttcacctgcgctctcgtggcggtccactggtggaattctggatgtttatatcttcttgggtccggagcctaagtccgtggttcagcaatacctagacgtagtgggctaccctttcatgccaccgtattggggcctggggttccatctatgccggtggggctactcaagcacagccataacaagacaggttgttgaaaacatgactcgcgcacacttcccactggacgtgcagtggaacgacttagactatatggattcgcggcgtgattttacatttaacaaagacggcttcagggacttccccgccatggttcaagaactgcaccagggaggcagaagatatatgatgatcgtagaccctgctatttcttcaagtggtcctgccggttcctacaggccttacgacgaaggcctgagacgtggagtgttcatcacaaatgaaacaggacaaccactcatcgggaaggtttggccaggatccaccgcatttcctgactttacaaatccaacggcattagcatggtgggaggatatggtggccgagttccacgaccaggtgcctttcgacggaatgtggatcgatatgaacgagccttccaactttataagaggttccgaggacgggtgccctaataacgagctcgaaaaccccccttatgtgcctggcgtggttggaggcacgctgcaggccgctacaatttgtgccagtagccatcagttcctttccactcattataatttacataacttgtatggcctcacagaggctattgcatctcatcgggccctggttaaagcacgaggcacacgaccatttgtgatttcacgcagcacttttgccggacacggaaggtatgctggccattggaccggggatgtttggtcctcatgggagcagctcgcctcctccgtgccagaaatattacaattcaacctgctcggcgttcctctcgtcggagccgacgtgtgcggcttccttggcaacacgtccgaagagctctgtgtacgctggacacagcttggagccttctatcctttcatgcgtaaccacaatagtcttctatctttgccccaggaaccctactcgttctcggagcctgctcagcaagcgatgagaaaagctttaacccttcgctacgcacttcttccacatctttacactttgtttcatcaggctcacgtggccggggagaccgttgcgcgccctctgtttttggagttccccaaggatagcagcacttggaccgtggaccaccagcttctgtggggagaggctctccttattacaccggtgctgcaggcgggaaaagctgaggtgacaggttacttcccacttgggacctggtacgacttgcaaactgttcctgtagaggccctcggcagccttcctcctcccccggccgcacctagagagcctgccatacacagtgaagggcagtgggtgactttgcctgctccactcgacacgattaatgtgcacttgagggcaggctatattattccgttacaaggcccagggctcaccaccactgagtctcgtcagcaacccatggcactcgccgttgccttaactaaaggcggtgaagctcggggagaactgttttgggacgatggagaatcattagaagttttagaacgcggagcttacactcaagttatttttctggcccggaacaacacgatcgttaatgaactggtgcgggtgacgagcgaaggcgctggattacagctgcaaaaggtaactgtgttgggagtcgctaccgctcctcagcaggtgctgtccaacggtgtgcctgtttccaatttcacgtattctcccgatactaaagtacttgatatttgtgtgtctctcctcatgggcgaacaatttctggttagctggtgctag

SEQ ID NO: 4903 - RNA, 2859 nt, synthetic construct
  misc_feature 1..2859: note = source = /note="Description of Artificial Sequence: Synthetic coding sequence"
  source 1..2859: mol_type = other RNA
atgggcgtgagacacccaccctgcagccacagactactcgccgtgtgcgccctggtgagcctggcaactgccgccctgcttggccacattctgctacacgactttctcctggtgccaagggagctgtctggaagcagcccagtgctcgaagaaactcaccccgcacatcagcaaggggccagtcgccccgggccacgagatgcccaggcccacccgggaagacctagagccgtgcctacccagtgcgatgtcccccctaattcgagattcgactgcgctcccgataaagccatcacccaggagcaatgcgaggctcggggctgctgttatatcccagctaaacaaggcctgcagggggcccagatgggtcaaccttggtgtttctttcccccttcttacccatcctacaagcttgagaacctatcaagttccgagatggggtacacggccactttaactcgaaccacccccactttctttccaaaggacatactgacactgcgcctggacgtaatgatggagaccgagaacaggttgcattttaccataaaagacccagctaaccggcggtacgaagtgcccttggagacaccacacgtgcatagccgcgccccgtctcctttatactctgtggagttctctgaggaaccattcggtgtgattgtccgacgacagctggatggcagagtgcttctaaacacaaccgtcgctccactgttcttcgctgatcaattcctgcagctctcaacatcactgcccagtcagtatattacaggactggccgagcacctaagcccactgatgctctctacgagttggacaaggatcaccctttggaaccgagacctggctcctaccccgggcgccaatctctacggctctcaccctttctatctagctctggaagatggcggaagcgctcacggagtgttcctcctaaatagcaatgcaatggatgtcgtgctccagccctctcccgcactgtcatggcgatccacaggggggattttagacgtttacatttttctcggtcctgagcctaagtctgtggtccaacaatacttggacgttgtggggtaccctttcatgcccccttattgggggctggggtttcatctgtgtcgttggggctactcaagtacagccatcacaaggcaggtggtggaaaacatgactcgagcccattttcctctggacgttcaatggaacgatctagactatatggactctaggcgagacttcacatttaacaaggatggctttcgcgattttcccgctatggtccaagaacttcaccaaggcgggcggcgctatatgatgatcgtcgatcccgccatctcctcgtccggacccgcaggtagctatcgaccatacgacgaaggtctgcggaggggcgtgttcattacaaacgagacaggccagcccttaattggcaaagtctggccaggttctacagccttccctgacttcactaacccaaccgccctcgcatggtgggaagacatggtggctgagtttcacgatcaggtcccgtttgacggtatgtggattgatatgaatgaaccctcaaactttattcgaggttcagaggatgggtgtcctaacaatgagctcgaaaatcccccatatgtgcctggggttgtgggaggcactttacaggctgctacaatctgtgcttcaagccatcaatttctgagtacgcattataacctgcataacctgtatggtctcaccgaggctattgccagtcaccgggccctggtgaaggcacgcggaacacggccctttgtaatcagccgtagcacgttcgcgggccatggccgttacgccgggcactggaccggtgacgtctggagcagttgggaacagctggcatcctccgtgcctgagatcctccagtttaatcttcttggggtcccacttgtcggggcagatgtgtgcggatttctgggtaacacatctgaggaactgtgtgtgagatggactcagctgggtgccttttatcccttcatgaggaaccataacagtctgctgagtctaccccaggaaccctattcattcagcgaacctgctcagcaggctatgaggaaagcactgacactgcgatacgcccttctaccacacttgtacacactatttcaccaggctcatgtcgctggagaaactgtcgcccgtccgcttttccttgaattcccaaaggatagttcaacctggacagtcgatcaccagttgctgtggggagaggccctactaatcacccctgtcttgcaggccggcaaagccgaggtcactggctattttcctctcgggacgtggtacgatctgcagacagttcctgtggaagccctgggctcgttaccaccaccaccagccgctcccagagagcccgcaattcattccgaaggacagtgggtgacactcccagctcccctagatacaatcaatgtacacttaagggccggttacattattccactgcaaggaccaggtctgaccacaaccgaatccaggcagcagccgatggctctcgccgtcgctctcacaaagggtggcgaagctcgaggcgagttgttctgggacgatggggaatcacttgaggttcttgagaggggagcctacactcaggtgatattcttggcacggaacaatacaattgtgaacgagctggtcagagttaccagcgaaggagcggggctccagctccaaaaggtgacggtgcttggcgtcgctacagcaccgcagcaggttttaagtaacggggtccctgttagtaacttcacgtacagtccagatacaaaagtgctggacatctgcgtgtcactcctcatgggcgaacagttcctggttagttggtgctag

SEQ ID NO: 4904 - RNA, 1611 nt, synthetic construct
  misc_feature 1..1611: note = source = /note="Description of Artificial Sequence: Synthetic coding sequence"
  source 1..1611: mol_type = other RNA
atggaattttccagcccgagcagagaggaatgcccaaagccactgtcacgagtaagtatcatggctggtagtttgacaggactgctcctgcttcaagccgtttcctgggcttccggagcaagaccctgcatacccaaaagcttcggctactctagcgtcgtgtgcgtctgtaatgcgacgtactgtgattcgttcgaccctccaacattccccgctctgggcacattttctcggtatgaatcgactcgcagcgggcgccggatggaactgagcatgggcccaattcaagcaaaccatacagggactggactcctcttgaccctccagccagaacagaagtttcagaaggtgaaaggttttggtggggccatgacggatgctgccgcattaaatatactagcgctgagccccccggctcagaatctgctgctcaagtcctacttttcggaggaaggtataggatataacattataagggtccctatggcttcttgtgacttctctattagaacttacacttacgccgataccccagatgactttcagctccacaacttttccttgccagaggaggatacaaagctaaaaatcccactgattcaccgcgctctgcagttggcacaaagacctgtgtcacttctggcctctccttggacctccccgacatggcttaagaccaatggcgctgtgaacggtaagggatctctgaagggtcagccaggagacatctatcaccaaacctgggccagatattttgtgaagttcctggatgcctatgccgaacataaactgcagttttgggccgtaaccgccgaaaatgaaccaagtgcaggactcctgagcggatatccttttcaatgtctaggcttcactccagaacaccagagagactttatagcccgagacctgggtcccacactcgccaactctacacatcacaatgttagattgctcatgttagacgaccagagactgctccttcctcattgggcgaaagtcgtgttaacagatccagaggcggccaaatatgtccacggtattgctgtccactggtacctggacttcttggcccccgccaaagccacactgggggagactcatcggctctttccaaacaccatgctctttgcctctgaggcatgtgtgggctcaaagttctgggaacagtccgtacggctgggcagttgggaccgtgggatgcagtactctcattcgattattacgaacctgctctatcacgttgtggggtggaccgattggaatttggcactcaaccccgaaggaggcccgaactgggtacgcaacttcgttgactccccgattattgtggatattacaaaggacaccttttacaagcaacccatgttttatcacctcggacatttctcaaaattcattcccgagggctcccagagagtaggactggtggcgagtcaaaaaaatgatcttgacgccgtcgctttgatgcatcccgacggatcagccgtggtagtggtccttaacaggtcttcaaaggacgtgcctctcacaattaaagacccagcggtgggcttcctggagacaatcagcccaggttatagtatacacacatacttatggagaagacagtag

SEQ ID NO: 4905 - RNA, 1611 nt, synthetic construct
  misc_feature 1..1611: note = source = /note="Description of Artificial Sequence: Synthetic coding sequence"
  source 1..1611: mol_type = other RNA
atggaattctcctcccccagccgcgaggaatgccccaagccactcagtcgtgtctcaattatggccggaagccttaccgggttgttacttctacaggccgtttcatgggcaagcggcgccaggccctgcatcccgaaatcctttggatatagttcagtggtgtgtgtttgcaatgctacctattgtgacagttttgatccccctaccttccctgcacttggaacgtttagtcgctacgagtcaacccgatccgggagacggatggaactttccatgggcccaattcaggccaaccataccggtactgggcttctcctcaccttacagccagagcagaaattccagaaggtcaaaggcttcggaggtgccatgactgatgccgcagcattaaacattctggcgcttagtccccccgctcaaaatcttctgctcaaatcatacttctcagaggagggaatcggctacaacatcatacgggtcccaatggctagctgcgacttcagtatcagaacctacacctatgccgatacgccggatgatttccaactgcataatttctccctgcccgaagaagataccaaattgaagattccgctgatccatcgcgctctgcagcttgctcagcggcccgtcagtctcctggcatcaccctggacatcacccacctggctgaaaacgaacggcgcagtgaatgggaagggaagcttgaagggccagcccggtgacatttatcatcagacttgggctcgatacttcgtgaaatttctggatgcttacgctgagcataagttacagttttgggctgttacagccgaaaacgaaccttccgccggtctgctgtcaggttatccgtttcagtgcctaggcttcacgcccgagcatcaaagggacttcattgcaagggacctaggtcctacactggcaaatagtacccaccacaacgtccgactgttaatgcttgatgaccagaggctcctcctaccccactgggctaaagtagtcctgactgatccagaagcagcaaagtatgttcacggcatcgccgtacactggtatttagacttcctggcgccagcaaaagctactctgggagaaacccataggctgtttcctaatactatgctctttgcttctgaggcatgtgtcggaagcaagttctgggaacagagtgtacgcctgggctcttgggaccggggcatgcagtattctcactcaatcattacaaatctgctctatcatgtggtgggatggacggactggaaccttgccctgaatccggagggcggccccaattgggtccgtaattttgttgattcacccatcatcgtcgatattacaaaggacaccttctacaaacagcctatgttttaccaccttgggcattttagtaaattcatcccagaagggagccaacgagtgggattggttgcttctcagaagaacgacctcgatgccgtggccctgatgcaccctgatgggagcgccgtggtagtagtgctgaaccgctcctctaaggatgtgcccctgacgattaaagacccagccgttggcttcctggagactattagcccgggctatagcatacatacctacctgtggcgccgtcagtag

SEQ ID NO: 4906 - RNA, 1566 nt, synthetic construct
  misc_feature 1..1566: note = source = /note="Description of Artificial Sequence: Synthetic coding sequence"
  source 1..1566: mol_type = other RNA
atggaattctcatccccttcacgggaagagtgccccaagcctctctcaagagtctccatcatggctggttccctgaccggattgctgctacttcaggcagtgagctgggcctctggggctcgaccatgcattcccaaatcttttggctacagcagtgttgtctgcgtgtgcaacgccacctactgtgatagttttgatcctcccaccttcccagcactcgggacgttttcccgctacgaaagcaccagatcaggtcgtagaatggaactgagcatgggaccgatccaagccaaccacactggaacgggcctactcttgaccctccaaccagatgctgcagcactgaacatccttgcactaagcccaccagctcagaacctgctacttaaaagttacttctcagaagaagggatcggatataacatcatccgcgttccaatggcaagctgtgatttttccattcgaacatatacctatgctgatacccccgatgactttcagctgcacaacttttcattgcccgaggaggataccaagctgaaaatccctctgatccaccgggcgctgcaactggcacagcgacccgtttctttgttagcttcaccatggacaagtcccacctggttgaaaaccaatggggcagtcaacggaaaaggatctctgaaaggtcagcctggggacatataccaccagacctgggctagatattttgtcaaattcctggacgcttatgcagaacacaaactgcagttctgggctgtcacggctgaaaatgagcctagcgcgggcctgctctctggttatccattccagtgcttgggctttaccccagagcaccagagagactttatagctcgtgacctgggccctaccctcgccaactcaacacatcacaatgtcagactcttaatgctagatgaccaaaggcttctacttccccactgggccaaggtggttcttaccgacccggaagctgcgaaatacgtgcatggcatcgccgtccactggtatctggatttcctggcaccagctaaagcaacactgggcgagacacaccgtttgtttcccaacaccatgttgttcgcgtccgaggcttgcgttggctctaaattctgggaacagtctgtgaggcttggcagttgggacagaggaatgcagtatagccatagcatcatcacaaacctcctgtatcacgttgtggggtggacagattggaacctcgcattgaatcccgaggggggacctaattgggtaaggaacttcgtggatagtccaattatagttgatataacgaaagatacattctataagcagcctatgttctaccaccttggccacttctctaaattcatccccgagggctcccagcgcgttggcctcgtggcctcgcaaaaaaacgacttggacgctgtcgccctgatgcaccctgacggttctgccgttgtggtggtcttgaaccgatcctcaaaggacgttccccttactatcaaagacccagccgttggctttcttgagacaatatcacctggctattctattcatacatatctctggcgcagacagtag

SEQ ID NO: 4907 - RNA, 1464 nt, synthetic construct
  misc_feature 1..1464: note = source = /note="Description of Artificial Sequence: Synthetic coding sequence"
  source 1..1464: mol_type = other RNA
atggaattttccagtcctagtcgggaagaatgccctaagcctttgtctcgggttagcataatggccgggtcacttaccggacttctcctccttcaggccgtgagctgggcatcgggggcacgaccctgcatcccaaagtcatttggatattcttccgtagtgtgcgtctgtaacgcaacatattgtgatagtttcgaccctcctacctttccggccctaggcacgttcagcagatatgaaagtacaaggtcgggtcgccggatggaactcagcatgggccctattcaggctaatcatactgggaccgggattggttacaatattatccgagtgcctatggcaagctgtgatttctccatacggacttatacttacgccgatacacctgacgattttcaacttcacaatttcagtcttccagaggaggatacaaagctaaaaatacctttgatccaccgagcgctgcagcttgcacaaagacctgtctccctactggcttctccttggacctctcccacctggctgaagacaaatggtgccgttaacgggaagggttccctcaaaggccaacctggcgacatatatcaccagacctgggcgaggtactttgtcaaattcctggacgcctacgccgaacataagttacaattctgggctgtgaccgccgagaacgagccatcggcaggtctgctatctggctacccattccaatgccttggattcaccccggagcatcagcgagactttatcgcccgcgacctgggcccgactctggcaaattccacacaccacaatgttcggctgttgatgctcgatgatcaaagacttcttcttccacactgggctaaggtggtgctaactgaccccgaggccgcaaaatacgtacacggaatagccgtgcattggtacctggattttcttgcccccgcaaaggcaaccctaggtgaaacacacagactgtttcccaacacaatgctgtttgccagtgaagcttgcgttggctctaaattctgggagcagtcagttcggctcggctcgtgggacagaggaatgcagtatagtcatagtatcatcaccaatctactgtaccacgtcgtcggttggaccgactggaacttggccttgaatcccgaggggggacccaattgggtaagaaacttcgtagactccccaattatcgtggatattacaaaagatacgttctataagcagccaatgttttatcatttgggtcatttttccaaatttataccggagggctcccagcgggtgggtctggttgcctcacagaagaatgatcttgacgctgtggccctgatgcacccggatggcagtgcggtggtggttgtattgaatcgctcgtccaaggatgtccccctgaccatcaaggatcccgctgtgggcttcctcgagaccatctctccgggctacagcatccacacgtatctctggcgcagacagtag

SEQ ID NO: 4908 - RNA, 1350 nt, synthetic construct
  misc_feature 1..1350: note = source = /note="Description of Artificial Sequence: Synthetic coding sequence"
  source 1..1350: mol_type = other RNA
atggaactaagcatggggcctatccaggccaaccataccgggacaggactactcctcaccctgcagcctgagcagaaattccagaaggtgaaagggttcggcggcgctatgacagatgcagccgcactgaatattctggctttaagcccaccagctcagaatctgcttctcaaatcctacttctccgaggaggggatcgggtacaatataattcgcgtgcccatggcgtcttgtgacttttccattcggacctacacatacgctgatacacccgatgacttccaacttcacaatttctctctgccagaggaggatactaagcttaaaattcctctgatccacagagctcttcaactggcccaacgtcctgtttctttgctagcatccccttggacaagccccacttggctgaaaacaaatggagcggtgaatggaaaagggtcactgaaaggacagccgggggatatctaccaccagacatgggcccggtattttgttaagttcctcgacgcttacgccgagcacaagctccaattctgggcagttaccgcggagaacgaaccgtcagccggcctactaagcgggtatcctttccaatgtctgggcttcactcctgaacaccagcgcgactttatcgcccgcgacttgggacctactctcgctaactcaacacatcataatgtgaggttacttatgttggatgatcagcgcctgctcctgcctcactgggctaaggttgtgctcaccgatcctgaagccgccaagtatgtccatggaattgccgtccattggtatcttgacttcctagcaccggccaaagccaccctgggagaaacacaccgcttgttccctaataccatgctcttcgcctccgaagcttgtgttggaagtaagttctgggaacagtccgtgaggttaggctcatgggaccgtgggatgcaatactctcatagcatcattactaatttgctgtatcatgtggtaggatggacagattggaatctggcactcaatccagagggcgggcccaattgggtgagaaatttcgtggattcgcctataattgtggacataacaaaagataccttctacaaacagcctatgttttaccacctagggcacttttcaaagttcattccagagggctcacaacgtgtgggattggtggcctctcaaaaaaatgaccttgacgctgttgcacttatgcacccggatgggagcgctgtggtcgtagtactgaaccggagtagtaaagacgtgcccctgacaatcaaagatcctgccgtcggcttcttggagacaatcagtccggggtatagtattcacacatacctctggcgaagacagtag

SEQ ID NO: 4909 - RNA, 1482 nt, synthetic construct
  misc_feature 1..1482: note = source = /note="Description of Artificial Sequence: Synthetic coding sequence"
  source 1..1482: mol_type = other RNA
atgaccctaaggggttggagtttccaggtgctgccggagtctaatgctacatactgtgactcattcgacccacccacctttccagctctcggaacattctcccgatacgagtcgaccagatcgggtaggcggatggagttgtccatggggccgattcaggccaaccataccgggactgggctccttctgacactgcaacccgagcaaaagttccagaaggtgaaggggttcggaggcgctatgacagacgcggctgccctgaatatcctcgctctgtccccccccgctcaaaatctcctcctcaaatcatactttagcgaagaggggattggctataacattatcagagttcctatggcttcttgcgatttctccattcgcacgtacacttacgccgacacccccgatgatttccaactacacaactttagccttcctgaagaagacacgaagctgaaaatccccctaattcacagagcgctgcagctcgcccagcgtcccgtttctctactggcttctccctggacttcccctacatggctcaagactaacggtgccgttaacggaaaggggtctcttaagggccaaccaggagatatctaccaccagacttgggccagatatttcgtgaagttcctcgacgcatatgccgagcataaattacagttttgggcggtcacagctgagaacgagcccagcgctggactgctttccggatacccctttcaatgcttgggcttcacacccgaacatcagcgagattttatagcaagggatctagggcctacactcgctaattctacacatcataacgttcgactcctcatgcttgacgaccagcggctgctcctccctcattgggctaaagttgttttgactgatccggaggctgccaaatacgtgcacggtatcgccgttcattggtatctcgactttttggccccagcaaaagccacactaggagaaacacacaggctgttcccaaatactatgctcttcgcttccgaggcctgcgtgggctccaaattctgggagcagagcgtgaggctcggcagctgggatagaggcatgcagtactcacacagtattattaccaatctactgtaccacgtcgtcggctggactgattggaatttagctctcaaccctgaggggggtcccaactgggtgcgcaattttgtcgattcccccattattgttgatattacgaaagatacgttctacaaacagcctatgttctaccatctcggacacttttcaaagttcattccagaaggaagccagagggtcgggcttgttgcctctcaaaagaacgatctcgatgccgtagccttgatgcatccagatggatccgcagtggtggttgtgttaaatagatcatcaaaggatgtgccattgactattaaggatccagcagtaggctttcttgaaaccatcagccccggctacagcatacatacctacctctggcgccgccagtag

SEQ ID NO: 4910 - RNA, 1272 nt, synthetic construct
  misc_feature 1..1272: note = source = /note="Description of Artificial Sequence: Synthetic coding sequence"
  source 1..1272: mol_type = other RNA
atggaattctcaagtccaagcagggaagagtgccccaagccactgtcccgcgtatctattatggcaggcagcttgacaggactcctgttattacaggcagttagctgggccagtggcattggatacaacatcattagagtgcctatggctagctgtgatttctcaatacggacctatacctatgctgatactcccgacgattttcaattgcacaatttttcacttcctgaggaagatacgaagctaaaaattcctttaatacacagggcattgcagctggctcaaaggcccgtatctcttctagcatcaccgtggactagcccaacatggctgaaaaccaacggcgccgtgaatggtaaaggctccttaaagggccagccgggggacatataccaccagacctgggcccgctactttgtgaagtttctcgatgcttatgccgaacacaaactacagttttgggcagtgaccgcagagaacgaaccatccgccggcttattatctggctatccattccaatgcctcgggttcacacctgaacatcagcgggactttatagcccgcgacttagggccgactctcgcaaactcaacacaccacaatgtcagactacttatgctggatgatcaaaggcttcttctcccgcactgggccaaagtggtactgacagaccctgaagccgccaaatacgtccacggaatagccgtccactggtatctcgactttctggccccagctaaggccacactcggggagacccatcggctgttcccgaataccatgctcttcgcttccgaggcctgcgtgggctccaagttttgggaacaaagcgttaggctgggctcatgggatagaggcatgcagtattctcattccatcatcaccaacctgctctaccatgtagtcggctggactgattggaatctagcattgaatcctgagggtggacctaattgggtgagaaattttgtcgatagccctatcatcgtcgacatcacaaaagatacattttataaacaaccaatgttttatcacttgggtcattttagcaagtttatcccagagggctcgcagagggtgggattagttgcatctcaaaaaaacgatctggatgccgtggctcttatgcacccggacggttcagccgtggttgtggtcttaaaccgttctagtaaagacgtacctctgaccattaaagatccagccgtaggatttctcgagacaatcagtcccgggtactctatacacacctatttatggaggcgccaatag

SEQ ID NO: 4911 - RNA, 351 nt, synthetic construct
  misc_feature 1..351: note = source = /note="Description of Artificial Sequence: Synthetic coding sequence"
  source 1..351: mol_type = other RNA
atggattactacaggaagtacgctgctatctttctcgtcacgttgagcgtctttcttcacgtcctccacagcgcccctgatgtacaggattgcccagaatgtaccttgcaagagaatccattcttcagccagccaggcgcacccatcttacagtgtatgggttgctgcttctcccgggcctatcccactcctctccggtctaagaaaacaatgctggtacagaagaatgttaccagtgagtctacctgttgtgtcgcaaaatcctacaaccgggttactgtcatgggcggcttcaaagtcgaaaaccacactgcctgccattgttctacatgctattaccacaagagctag

SEQ ID NO: 4912 - RNA, 654 nt, synthetic construct
  misc_feature 1..654: note = source = /note="Description of Artificial Sequence: Synthetic coding sequence"
  source 1..654: mol_type = other RNA
atggctacaggatctaggacatctcttctgctggctttcgggttgctatgcttaccctggctccaagagggtagcgcatttcctacgatcccactgtcccggctttttgacaacgccatgcttcgggcccaccgcctgcatcaattggccttcgatacctaccaggagttcgaagaagcctacatccctaaagagcagaagtattcctttctccaaaacccccagacatctctttgcttcagtgaatccatacccactccgtcaaaccgggaggagacccaacagaaatctaatctcgagctcctgagaatctcactcctacttatccagagttggctggagcccgtccagttccttcgtagtgtgtttgccaatagtctagtatacggcgctagcgatagcaacgtctatgatctcctgaaagacctagaggaaggcatacagaccctcatgggtcgcctggaggatggttctcctcggactgggcaaatcttcaagcaaacgtactctaaattcgataccaacagccacaacgacgatgctctcttgaagaattatgggcttttgtattgtttcagaaaggatatggataaagtcgaaacattcctgaggatagttcagtgcagatctgtagaggggtcctgcggattttag

SEQ ID NO: 4913 - RNA, 369 nt, synthetic construct
  misc_feature 1..369: note = source = /note="Description of Artificial Sequence: Synthetic coding sequence"
  source 1..369: mol_type = other RNA
atggctacggggagtcgaacaagcctgttacttgcttttgggttactgtgcttgccttggctgcaggagggcagcgcgtttccaaccatccctctcagtagactgtttgataacgccatgctgcgcgcccaccgcctccaccaactcgcgttcgatacgtaccaggagttccggctggaggatggctccccccggactggacagatatttaaacaaacatattccaagtttgacacaaactcacacaatgacgatgcactgctgaagaactacggactcctctattgttttaggaaggatatggataaagttgaaacctttctccgaattgtacaatgcaggtccgttgagggcagttgtggattctag

SEQ ID NO: 4914 - RNA, 534 nt, synthetic construct
  misc_feature 1..534: note = source = /note="Description of Artificial Sequence: Synthetic coding sequence"
  source 1..534: mol_type = other RNA
atggccactgggtcccggaccagcctcctgcttgctttcggtctgttgtgcctcccttggttgcaggaggggtcggcttttcctactataccgctctctcgtttatttgacaatgctatgcttagagctcatagattacatcagcttgcatttgacacttatcaggaattcaaccttgagctcctccgaatctccctcctccttatccagtcatggctcgaaccggtacaatttttgcgcagcgtcttcgccaattctctcgtttatggggcgtctgattcaaatgtttatgatctcctgaaggatctcgaggagggtatccagacactcatgggcagattagaggacggttctcccagaactggccagatcttcaaacagacctactccaaattcgacaccaattcccacaatgatgatgcactgctgaagaattatggactgctgtactgctttagaaaggatatggacaaagtggagaccttcctgcgcattgtgcaatgccggagcgtcgaggggtcatgcggattttag

SEQ ID NO: 4915 - RNA, 609 nt, synthetic construct
  misc_feature 1..609: note = source = /note="Description of Artificial Sequence: Synthetic coding sequence"
  source 1..609: mol_type = other RNA
atggctaccgggtccagaacctccttattgctcgccttcggactactgtgcctgccttggctgcaggaaggttctgctttcccaactataccactgtccagattgttcgataatgccatgctcagagcccatcgcctgcaccagcttgcttttgatacgtaccaagaattcaacccacaaacaagtctgtgcttttccgaatctataccaacacccagcaacagagaggagacgcagcaaaagtccaacctcgagcttctcaggatctccctgctgctcattcagtcttggctggagccagtccaattccttcgcagcgtatttgcgaacagccttgtctatggggccagcgattccaatgtgtacgatctcctgaaagatctagaggaaggcatccaaacattgatgggacgtctcgaagatggcagtccaaggacaggacagatcttcaaacagacctattccaaatttgacaccaactcccacaacgacgacgctctcctgaaaaactatggactcctctactgcttccggaaggacatggataaggttgagaccttcctcaggatcgtgcaatgcaggtccgttgaaggatcttgtggattttag

SEQ ID NO: 4916 - RNA, 771 nt, synthetic construct
  misc_feature 1..771: note = source = /note="Description of Artificial Sequence: Synthetic coding sequence"
  source 1..771: mol_type = other RNA
atggcagcaggcagccgtacctcacttttgctagcctttggcttattatgtctgagctggcttcaggaaggctcagcgtttcccaccatacctcttagccggctgtttgacaacgcaatgttgcgagctaggagactttaccaacttgcctatgacacttatcaggagtttgaggaagcctatatattgaaagagcaaaaatattcgttcctacagaacccccagacctctctgtgtttctccgagagcatccctacgcctagcaatcgcgtaaaaacacagcaaaagagtaatttggaactactgaggatatcattacttctgatccaatcgtggctggagccagtgcagctgttacggagtgtcttcgctaactctctggtttatggagcgtccgacagcaacgtgtaccgccatctcaaagatttggaggagggaattcagacactgatgtgggttagggttgccccaggcattcccaatcctggcgccccccttgcatctagggactggggcgagaaacactgttgtcctttattttcgagccaggccctcacccaggagaattccccttactccagctttcccctcgttaatccaccgggtctgagtttgcaaccaggcggagaggggggcaaatggatgaatgaacggggacgggaacaatgcccttctgcgtggcccctcttgttatttctgcactttgccgaagctgggcggtggcaaccccctgactgggccgatttgcagtctgtgctgcagcaggtgtag

SEQ ID NO: 4917 - RNA, 654 nt, synthetic construct
  misc_feature 1..654: note = source = /note="Description of Artificial Sequence: Synthetic coding sequence"
  source 1..654: mol_type = other RNA
atggcagcaggatcacggaccagcctgctacttgcattcggcctgctgtgcttatcttggctccaggaaggtagcgcctttccaactatcccacttagtagactgtttgacaatgcaatgctgcgcgctagacgactctaccaactagcttacgacacgtaccaggaatttgaggaagcttatatcctgaaagaacagaagtattcctttctgcagaatccgcagacttccctgtgtttttcagagtctataccgacaccctccaatcgggtcaaaacccaacagaaatccaaccttgagctgcttagaatttctctgctgcttatccaatcttggttagagccggttcaacttctcagatcagtatttgcaaattcactagtatacggggcctctgattccaatgtctatcggcatttgaaagacctggaggaagggattcaaacccttatgtggcggctggaggatgggagcccaaggaccgggcagattttcaatcaatcttacagcaaattcgacactaagagtcacaatgacgatgctcttctaaagaactacggcctgctgtattgcttcagaaaggatatggacaaggttgaaacattcctcaggatagtccagtgcaggtcagtggaggggtcatgcggcttttag

SEQ ID NO: 4918 - RNA, 609 nt, synthetic construct
  misc_feature 1..609: note = source = /note="Description of Artificial Sequence: Synthetic coding sequence"
  source 1..609: mol_type = other RNA
atggcagccggttcccgtacttccttactgttggccttcggacttctgtgtttgtcttggttgcaggaagggtcagcattccccaccatacctctttcccgcctcttcgacaatgctatgctgcgcgcccgcagattatatcagctggcgtacgacacgtaccaagaattcaatccccaaacaagcctatgtttctctgaaagcattccgacaccgagcaatcgggtaaagacccagcagaagtcaaacctggagctcttgagaatctccctcctgctgattcagtcctggcttgaacccgtgcaattgctcagaagcgtgttcgccaattcactcgtctatggtgcctcagacagcaatgtgtatcgtcatctgaaagacttggaggaaggcatccagacactaatgtggcgcttggaagatggatcaccccgcaccggtcagatcttcaatcagagttactcaaagtttgacacaaaaagtcataatgacgacgcgctgctgaagaactacggattgttgtactgtttcagaaaagatatggataaggtggaaactttcctgcgcatcgtgcaatgtcgttcagtggagggctcttgcggcttctag

SEQ ID NO: 4919 - RNA, 738 nt, synthetic construct
  misc_feature 1..738: note = source = /note="Description of Artificial Sequence: Synthetic coding sequence"
  source 1..738: mol_type = other RNA
atggcggctggctcccggactagcttattacttgctttcggactgttgtgcctcagctggctgcaggagggctccgccttccctacaatcccactttctcggttgtttgacaacgccatgctgagggcgagacgactttatcagctggcttatgatacataccaggagtttgaagaggcctatatccttaaagaacagaaatactcctttcttcaaaacccacagacatctctgtgtttttccgagtctatccccaccccttcaaatcgcgtgaaaacacaacaaaagagcaacctcgaactattaagaatcagtctcctcctcattcagtcatggctcgaaccagtgcaactgctgaggtccgtgtttgctaatagtttagtctatggggcttccgactcaaatgtgtatcgacacctaaaggacttggaggaaggcatccagacattaatcggctggaaaatggccgcacctgggctcggcagatcttcaatctcccctaccgcctctctgacccagaaccgaaccactatgacccattgttctcgaaccactggttgcagtactgcctccgggcgcacttggacaaggtcccgccacagttgtgcgagttgttctgccgcgttatggcgggcggcagtagccagcagctgcccaggcgggatccctgtcactcccccacaatgcctatcatggtcttggaaagtgctgcttcagtgtcctccagcactctcttag

SEQ ID NO: 4920 - RNA, 753 nt, synthetic construct
  misc_feature 1..753: note = source = /note="Description of Artificial Sequence: Synthetic coding sequence"
  source 1..753: mol_type = other RNA
atggaaaagggacctgttagggcgcccgctgagaagccaaggggcgcaagatgttcaaatggctttccagagagagatcccccccgcccagggccatcccggccagcagagaaaccaccccgcccagaagctaaaagtgcccaacccgcggatggttggaagggagagaggccccggagtgaagaggacaacgaactaaatctgcctaatttggctgctgcatactcctcgattttgtcaagcctgggcgaaaatccacagcggcaaggcttactgaaaacaccctggagggctgcatctgctatgcaattctttacaaagggctatcaggaaaccatatccgacgtactcaacgatgctattttcgatgaagaccacgatgagatggtgatagtgaaagatatcgatatgttctccatgtgtgagcatcatctcgtaccattcgtagggaaagtgcacatcggctatctccccaacaagcaggtgctaggactgagtaagctggccagaatcgtagagatttattcacgaaggctccaggttcaagaacgccttacaaagcagattgctgtggcgataacggaagctttgcgccccgcgggggtgggcgtcgtggtcgaagctacccacatgtgtatggtaatgaggggagtgcagaagatgaattccaagaccgtgacaagcaccatgctcggagtgttccgtgaggaccctaagacccgagaggagtttcttactctgataaggagttag

SEQ ID NO: 4921 - RNA, 693 nt, synthetic construct
  misc_feature 1..693: note = source = /note="Description of Artificial Sequence: Synthetic coding sequence"
  source 1..693: mol_type = other RNA
atggaaaagggacctgtgcgcgcccccgcagaaaaaccaaggggcgccagatgcagcaatggcttccctgaacgcgaccccccccgccccggccctagtaggccggcggagaagcccccaagacctgaagcgaagtccgcgcagcctgccgacggatggaaaggggaacggccacggagcgaagaggacaacgaactgaacctgcctaatctcgcagcagcatattcatctattctgagcagtctgggagaaaacccccagcgccaggggcttctgaagacgccatggagggcagcctccgcgatgcagttttttacaaaggggtatcaggagactatctccgacgttctcaatgacgctatttttgatgaagaccacgacgagatggtgatcgtgaaagacattgacatgttttccatgtgcgagcatcatctggtgccattcgttgggaaggtgcacattggttatctaccaaacaagcaagttctgggcctgtcgaagttagccaggattgtggaaatttattcacgtaggctccaagtccaagagcgactgactaaacagattgccgtcgcgatcaccgaggctctgaggccagccggcgtaggagtggtagtggaggcaaccaagtcaaataaatacaataaagggctgtcatacttcctgctggcaacctttttgtggcagtattag

SEQ ID NO: 4922 - RNA, 753 nt, synthetic construct
  misc_feature 1..753: note = source = /note="Description of Artificial Sequence: Synthetic coding sequence"
  source 1..753: mol_type = other RNA
atggaaaaaggaccagtaagagccccagctgaaaaaccaaggggggctaggtgcagtaacgggttcccagagagagatccacctaggcctggaccttcccgacctgccgagaaaccccccaggccagaagcaaaatccgcacagccagccgacggctggaagggggaaagaccgagaagcgaggaggataacgaattaaaccttcctaacctggccgcagcttattccagcatcctatcatccctcggagaaaacccacagcgccaggggctgctcaaaacaccctggagagcagcttctgctatgcagttctttactaaaggctaccaggaaaccatttcagacgtgttgaatgatgccattttcgacgaagaccacgacgagatggtgatagtaaaagacatagacatgttttcaatgtgcgaacaccacttagtgccctttgtgggaaaggtacacattggctacctgccaaataaacaggttctcggcctgtctaagctggcaagaatagtcgagatctatagcaggagactccaggttcaggaaagactcactaagcaaatcgccgtagccattacagaagcccttaggccagctggcgtgggagtagtggttgaggctacacatatgtgtatggtgatgcggggggtacagaaaatgaatagcaagactgtgacaagcaccatgcttggcgtgttccgggaggatcccaaaacccgtgaagagtttctgaccctcattagaagttag

SEQ ID NO: 4923 - RNA, 642 nt, synthetic construct
  misc_feature 1..642: note = source = /note="Description of Artificial Sequence: Synthetic coding sequence"
  source 1..642: mol_type = other RNA
atggaaaagggtcccgtgcgggccccggccgaaaaaccaagaggagcccgatgttctaacggcttcccagaacgcgacccaccaagaccgggaccaagccgacccgcagaaaagcctccccggcccgaggctaagagtgcccagcccgctgacggctggaaaggcgaacggcctcggtcagaagaagataatgagctaaatctgccaaacctggccgccgcctactcctccatcctgtccagtctaggggaaaacccacagaggcagggactgctaaagacgccctggagagctgcatcagctatgcaatttttcacgaagggatatcaggagacaatcagtgatgtgttgaacgacgcaatcttcgacgaagatcacgacgagatggtgatcgtgaaagatatcgatatgttttcaatgtgcgaacatcacctggtgccatttgtcggcaaagtgcacatcggatatctacctaacaaacaggttctcggactgagcaaactggcgcgtattgtcgaaatctatagcaggcgactgcaggttcaggaaaggttgaccaaacaaatcgccgtggccataaccgaggcgctcaggccagctggagtaggcgtggttgtggaagctacttccgcggagccatag

SEQ ID NO: 4924 - RNA, 702 nt, synthetic construct
  misc_feature 1..702: note = source = /note="Description of Artificial Sequence: Synthetic coding sequence"
  source 1..702: mol_type = other RNA
atggagaaggggccggtccgggcccctgctgaaaagccacgcggagctaggtgttccaatggctttcccgagagggacccgccaagacccggaccctctcgacctgctgagaagcctccaaggccagaagccaaaagcgctcagccagctgatgggtggaaaggcgagaggccccgtagcgaagaagataatgagctgaacttacctaacttggccgccgcatatagttctatcctgtctagccttggagagaatccccagagacaggggttattgaaaaccccttggcgggcagccagcgcaatgcagttctttacgaagggatatcaggagaccattagtgacgtccttaatgacgcaatttttgacgaagatcacgacgaaatggtgatagtgaaggacattgatatgttcagcatgtgtgagcaccacttggtgcctttcgtaggcaaggtgcacatcggttatctcccgaataaacaagtcttgggcttatctaaactggcgaggatcgtagagatatattccagaagactgcaggttcaagagcgccttacgaaacaaatcgctgtggctataacagaagcattaagacctgccggcgtaggagtggtagtcgaagccacaaaatcaaataagtacaataaaggactgtcaccacttctgtcttcatgtcatctgtttgtagctatcctcaaatag

SEQ ID NO: 4925 - RNA, 1281 nt, synthetic construct
  misc_feature 1..1281: note = source = /note="Description of Artificial Sequence: Synthetic coding sequence"
  source 1..1281: mol_type = other RNA
atgggagaaccgggccagagtccctccccgagatcttcacatggctctccacccacactgagcactttaacactccttctgctcctgtgtggacacgctcactcccagtgtaagattttaagatgtaatgctgagtacgtcagttccacactgtccctccgtggcggaggaagtagcggcgcgcttcgcggtggtggcggcggcggccggggaggcggtgtgggatctggaggtctgtgcagagcgctgcgctcatatgctctctgtacccggaggacggcgagaacctgtcgtggcgacctggctttccacagcgccgtccatggcatcgaggatctgatgattcaacacaactgctctaggcagggacctaccgctccccctcccccacgcggccctgccctgccaggggccggcagcggacttccggctcctgacccttgcgactacgaaggcagattttcccgtcttcatggtcgtccacctgggttcttacattgtgcctcttttggtgaccctcacgtgcgatctttccaccaccacttccacacatgccgcgtgcagggtgcatggcctctgctggataacgacttcctgttcgtgcaggcaacttcttccccaatggccctcggagccaatgctacagcgacaaggaagttaaccatcatttttaaaaatatgcaggaatgcatcgatcaaaaggtctaccaagctgaagttgacaatctacccgtcgcatttgaggacggttcaataaatggcggagatcgccctggcggtagtagcctcagtattcagaccgcaaatcccggaaatcacgtcgagatccaagctgcttacatcggcacaactatcatcataagacaaactgccggtcagctgtctttttctatcaaagtggcggaggacgtggccatggcttttagcgccgagcaggatctccaattatgcgtgggtggatgcccaccaagccagcgtctgtcacgctccgaacgcaacagacgaggagcaatcacaattgacacagcccggcgactatgcaaggagggactccccgtagaagatgcctactttcattcctgcgtgttcgacgtgctaatttctggcgatcccaactttaccgtggcagctcaggctgctctggaagacgcaagggcctttttgccagatctagaaaagctgcacctttttcccagcgatgccggggtgcccttatcgagtgcaacactactggcccccttgctgagcggtctgtttgtactgtggctctgcatccaatag

SEQ ID NO: 4926 - RNA, 942 nt, synthetic construct
  misc_feature 1..942: note = source = /note="Description of Artificial Sequence: Synthetic coding sequence"
  source 1..942: mol_type = other RNA
atgatccagcacaattgttctcggcagggccccacagcaccaccacctccccgaggtcctgccctcccaggtgctggatctggcctgcccgcacctgacccctgtgactacgagggccgattttctcgcctgcatgggagaccccccggatttctgcactgtgcgtcctttggcgatccacacgtgagatcatttcaccaccattttcatacatgtagggttcagggagcatggccactgctggacaatgactttctgtttgtgcaagccacctcctccccgatggccctcggcgccaacgctacagcaactcgaaagctgaccattatcttcaagaacatgcaggagtgtatcgaccagaaagtgtatcaggctgaagtcgacaacttgcccgtggcttttgaggacggatccataaatgggggggatcgcccaggaggatcctccttgtcaatccaaacagcaaatcccggtaatcacgttgagattcaggccgcgtacataggcaccaccatcattatacgccagaccgccggacagctgagtttttctattaaggtcgcagaagacgtagccatggccttttctgctgaacaggacttgcagctgtgcgtgggaggatgtccccccagccagcggctgtcacggagcgaacgcaaccgcagaggagccataactatcgatactgcccgaaggctttgtaaagaaggactacctgttgaggacgcgtattttcatagctgtgtgtttgacgtgcttatcagtggcgaccccaacttcacagttgccgcccaagccgcactggaagatgctagagctttcctgcctgatctcgagaagctccacttgttcccatctgacgcaggggtccccctgtcctcagctaccctgctcgcccctttgctatcaggcttatttgtgctttggttatgcatccagtag

SEQ ID NO: 4927 - RNA, 282 nt, synthetic construct
  misc_feature 1..282: note = source = /note="Description of Artificial Sequence: Synthetic coding sequence"
  source 1..282: mol_type = other RNA
atgggcgagcccggtcagtctccttcaccccgaagttcccatggatcaccaccaaccctgagtacattaaccctcctactactcctttgtggccacgcccactcacagtgcaaaatcttgcgatgtaacgccgagtacgtgtcatccactctcagtttgcgcggcgggggaagctctggcgctttacggggtggaggcggaggaggcaggggcggcggggtcggaagcggaggcctctgtagagcccttcgaagctatgcgctctgcaccaggcgcacttag

SEQ ID NO: 4928 - RNA, 603 nt, synthetic construct
  misc_feature 1..603: note = source = /note="Description of Artificial Sequence: Synthetic coding sequence"
  source 1..603: mol_type = other RNA
atgcaggaatgtatcgatcaaaaagtttaccaagccgaagtcgataatctgcctgttgccttcgaagatggctctatcaatgggggcgatcgacccggaggctcaagtttatctatccagactgcaaatccaggcaatcacgtcgaaattcaggccgcctacattggcacaacaatcattatccgccagactgccggccagcttagctttagcattaaagtggcagaagatgtggcaatggcattcagtgcagaacaggacctccagttatgcgttgggggttgtcctccctctcagcggctgtcccgcagcgaaaggaataggaggggcgctataaccattgacactgcacgtaggctctgtaaggaaggcctcccagtagaagatgcctacttccactcctgtgtttttgacgtcctcatctctggggatcctaattttacggtcgccgcccaagccgccctggaagacgctcgcgcatttcttcctgacttggagaagctgcacctgttcccgtcggacgccggagtgcccctgagctctgctaccctgctcgcccccttactcagtgggctgttcgtgttatggctctgtatccagtag

SEQ ID NO: 4929 - RNA, 603 nt, synthetic construct
  misc_feature 1..603: note = source = /note="Description of Artificial Sequence: Synthetic coding sequence"
  source 1..603: mol_type = other RNA
atgcaagaatgtatcgatcagaaggtgtatcaggccgaggtagacaatctgcccgtagcgtttgaagacggatcaattaacggcggcgataggccaggagggagcagtcttagtatccagaccgccaatccaggtaatcatgtcgaaatccaggccgcttacatcgggactaccattatcattaggcagacagcaggacagctctcgttcagcattaaggtcgcggaagatgttgccatggcgttctccgccgaacaagacctgcagttatgcgtgggtggctgccccccatctcaacgactgtctaggagcgagcggaatagacgtggagctattaccatcgacactgctaggaggttgtgcaaagaaggactgcccgtggaggacgcttacttccactcctgtgtgtttgacgtactcatctcgggggatcctaacttcaccgtggccgcacaagctgctctagaggacgccagggcgttcttacctgatctggaaaaactgcacctattccctagtgacgccggcgtccccctcagttccgccaccctccttgctcctctcttgtctggattgtttgtgctctggctgtgcatacaatag

SEQ ID NO: 4930 - RNA, 1422 nt, synthetic construct
  misc_feature 1..1422: note = source = /note="Description of Artificial Sequence: Synthetic coding sequence"
  source 1..1422: mol_type = other RNA
atggcagtgatggctccaagaaccctagtgctcctgctgagcggcgcactcgctctgacacaaacttgggcagaagtgcagcttgttgaaagcggaggcggactcgtgcagcctggagggagcctgcggctgagttgtgccgcctcaggcttcaacatcaaggacacctatatccactgggtcaggcaggccccaggcaaaggtctggaatgggtcgctcgaatatacccaaccaacggatacactcgctacgcagacagtgtcaaaggcaggttcactatatccgcagataccagcaagaataccgcataccttcagatgaactctctgcgtgcagaagacaccgccgtgtattattgctccaggtggggcggagatggattctacgcgatggactattggggccaggggaccctcgtgacagttagttcagctagtaccaagggcccctccgtgtttcccctggcacctagctccaaatccacttccggaggcaccgccgcgttgggctgtctggtaaaagattacttccccgagcctgtcactgtatcgtggaattccggggcactaaccagcggagtacatacgtttcccgctgtcctgcagagcagtggcttatacagtcttagttctgtggtgactgtaccctcttctagcctaggcacccagacttacatctgcaatgtcaatcacaaaccatcaaacactaaagtggacaaaaaagttgaacctaagtcatgtgacaagacccacacatgtcctccctgtccggctccagaattgctgggtggacctagcgttttcctattccctccaaagcccaaggacaccctgatgatttcgcgcactcccgaagtaacttgtgtggttgtggacgtctctcacgaagacccggaagttaagtttaactggtacgtggatggcgtagaagtgcataacgcgaagacaaaacctagggaagagcagtataactctacttatagagtggtctcagtgctgacagtgctccaccaggattggctaaacggcaaggaatataagtgtaaagtctccaacaaagccctcccagcacccatcgaaaaaacaattagcaaagctaaagggcagccaagagaaccacaggtctatactctcccgccaagcagagacgaacttaccaaaaatcaggtctctcttacttgtctagtgaaaggcttttaccctagtgacattgccgtagagtgggagagtaacggacagcccgagaacaactataagactacgcctcccgtattagattcagacggctcctttttcctgtactccaaacttaccgtagataagagccgctggcagcagggcaatgttttctcctgttcagtgatgcatgaggccctgcataaccactatactcaaaaaagtctgtccctgtcacctggttag

SEQ ID NO: 4931 - RNA, 717 nt, synthetic construct
  misc_feature 1..717: note = source = /note="Description of Artificial Sequence: Synthetic coding sequence"
  source 1..717: mol_type = other RNA
atggctgtgatggctcctagaaccttagtactcttattatctggtgccctggctcttacgcagacctgggcagatattcaaatgacccagagcccctcaagcctgtccgcatcagttggggatagagtgaccattacctgccgagctagccaggatgtgaatacggccgtggcttggtatcagcagaaaccggggaaggcacctaaactcctcatatattctgccagctttctgtattcaggtgtgccctcacgattctccggttcccgatcagggaccgattttacattaacaatctcttcgcttcaacccgaagacttcgcaacctattattgccagcagcattatactacacctcctacttttggacagggaacaaaagtggagatcaaaaggactgtggcggcaccaagcgtgtttatcttccccccaagtgacgaacagctgaagtccggaacagcctcagtcgtctgcctgcttaacaatttctatcctcgcgaggccaaagtgcagtggaaggtggataatgctcttcaaagtggcaactcccaggaatcagtcactgagcaggacagcaaagacagtacatactctttgtctagtacactaacactctccaaagcagattacgaaaagcacaaggtgtacgcatgcgaggtcacccaccagggcctaagcagccccgtgactaaatcattcaataggggcgaatgttag

SEQ ID NO: 4932 - RNA, 657 nt, synthetic construct
  misc_feature 1..657: note = source = /note="Description of Artificial Sequence: Synthetic coding sequence"
  source 1..657: mol_type = other RNA
atggcaaccaggtccccaggcgtagtcatcagcgacgacgagcctggatacgatttagacttattttgcattcctaatcattatgctgaagatttggagcgggtgttcatcccccatgggcttataatggatcggactgagcgtctggcacgcgatgtaatgaaggagatgggcggacaccacattgtggcactgtgtgttttgaagggtggatacaagtttttcgccgacttacttgattatataaaggccttaaatcggaacagcgatcggtctatacccatgacagtggatttcattcgcctcaagagttactgtaacgaccagagtacaggtgatataaaggttattggaggtgatgatctgtccaccctgacaggcaagaacgtgttgatcgtcgaagacataatcgataccggcaaaaccatgcagacactgttatcactcgtacggcaatacaaccccaaaatggtgaaagtcgcttccctattagtgaaaaggacacctagaagcgtagggtacaagccggacttcgtaggatttgaaattccagacaaattcgtggttgggtatgccttggattacaatgaatactttcgcgacctgaaccatgtctgtgtgataagtgaaactggtaaggcaaagtacaaagcctag

SEQ ID NO: 4933 - RNA, 657 nt, synthetic construct
  misc_feature 1..657: note = source = /note="Description of Artificial Sequence: Synthetic coding sequence"
  source 1..657: mol_type = other RNA
atggctacccgtagccccggagtagtcatcagtgatgatgaacctggctacgacttagatctcttttgcatccccaaccattacgccgaagatctggaacgggtgttcatcccacatggacttatcatggaccgcacagagagacttgcacgagatgtgatgaaggagatgggcgggcatcacatagtagccctatgtgtacttaaaggcggctacaaatttttcgccgacttattagattacatcaaggctctgaacagaaactctgaccgtagtatcccgatgacagtagacttcatacggctcaagtcgtactgcaatgatcaatcaactggggacataaaagtgataggcggagacgacctgtctaccttaactggaaaatcaagactgctggcagaggacattatagacacagggaagacaatgcagacgttactgagcctcgtacggcagtacaaccccaaaatggttaaggtggcctccctgctggtgaaacggaccccccggagtgtcggatacaaacctgacttcgtaggctttgagattcccgataagtttgtggttggatacgcactggattacaatgaatactttagagacttaaaccacgtctgcgtcatatccgagactggcaaggccaagtacaaagcctag

SEQ ID NO: 4934 - RNA, 1653 nt, synthetic construct
  misc_feature 1..1653: note = source = /note="Description of Artificial Sequence: Synthetic coding sequence"
  source 1..1653: mol_type = other RNA
atgccgcctcctagaaccggtagaggactgttgtggttgggactcgtcttatcctcagtttgcgtcgccctggggtccgaaacacaggccaatagcacgactgacgcactcaacgtcctgctgattattgtagatgatcttcgtccaagcctggggtgctacggtgataagctggtgaggagccctaatatcgatcagctggccagtcattcacttctgttccagaatgcatttgcccagcaagcagtttgcgctccaagtcgcgtgagcttcctgactggtaggcggcccgacactactcgactatatgattttaattcatactggcgcgtacatgcaggtaacttcagcaccatcccacaatatttcaaggagaacggatacgttaccatgtccgtcggtaaggtgttccatcctggaatatcctccaatcacaccgatgattccccgtattcgtggagcttcccaccctatcaccccagctctgaaaaatacgagaacaccaagacttgcagaggcccagacggagagctgcatgctaacctgttgtgtcccgtggacgtgcttgatgtgcctgaaggaacactacctgacaagcaatccacggagcaagctatccagctgttggagaaaatgaaaaccagcgccagccctttcttcctggctgtaggttatcataaaccgcatattccttttcgctatccaaaggaatttcagaaactctatcctctcgagaacatcacattagcaccggaccctgaagtacccgacggcttacctcctgttgcttacaatccctggatggacattcgacagcgcgaagacgtgcaagcgctgaatattagtgtgccctatggacccattcctgtggatttccagcgaaagatccggcagagttattttgcatctgtttcatatttagatacccaagttggccgactgctcagtgctttagacgatctccaacttgccaacagcaccatcatcgcttttaccagcgaccatggctgggcactgggcgagcacggggaatgggctaagtactctaactttgatgttgctacccacgttccccttattttttacgtccccggccggacagcttctcttcctgaagctggtgagaagctgtttccatacctcgacccattcgattctgccagtcagctcatggaacccggcaggcagtctatggatctagtggagctggtgtcattatttcctacactcgccggactggctggtttacaggttcctccccgctgcccagttcctagcttccacgtggagctttgtcgcgagggtaagaacttacttaagcacttccgctttagagaccttgaagaggacccctatctcccaggaaaccctagggagctgatcgcatactcacagtacccgcgcccatcagatattccccaatggaattcagataagccctcgctgaaagatataaagatcatgggttatagtattcgcacgatcgattataggtatactgtgtgggtgggctttaatccagatgagtttctggctaactttagcgatattcatgcgggggagctatatttcgtagactcagatcccctccaggatcacaatatgtacaacgactcccagggaggagacctcttccagctacttatgccatag

SEQ ID NO: 4935 - RNA, 1032 nt, synthetic construct
  misc_feature 1..1032: note = source = /note="Description of Artificial Sequence: Synthetic coding sequence"
  source 1..1032: mol_type = other RNA
atgcctcctccacgcactggccggggtttgttgtggctcggcttggttttaagttctgtgtgcgtggctttgggctcggagactcaagcgaattcaactactgatgccctaaacgttttactcataattgtagacgatctcaggccaagtctgggatgctatggcgataagcttgtgcgcagtccaaatattgaccagttggcatcgcattccctgctttttcagaacgccttcgcacaacaagccgtatgcgctccgagccgcgtgtcttttcttaccggacggcgtccagatacaacaagactctacgactttaactcctattggagagtgcacgccggtaatttctcgacaatcccccaatatttcaaagaaaacggctatgtaactatgtcagtgggcaaggtcttccaccccggcatttcaagcaatcatacagatgattctccctactcctggtccttccccccttatcacccctctagcgagaagtacgaaaacacaaagacctgcagggggcctgacggagagctacatgccaatctcttatgccccgtagacgtcctggacgtccctgagggtacattacccgataagcaatctactgagcaagccatccaattgcttgagaagatgaagacttccgcgtcccctttctttctcgcggtggggtatcataagccacacattcctttccgttacccaaaggaatttcagaaactgtatcccctagagaacatcaccttggctcctgatccggaagttcccgacggcctgcctcccgttgcttacaatccatggatggatattcggcaaagggaggatgtgcaagccctgaatatttctgtgccttacggtccaattccagtggatttccagaggaagattcgacagtcctacttcgcctcagttagttatctggatacccaggttggacggctcctcagcgccctggacgatcttcaactggctaacagcacgatcatagcgtttacaagcgaccatggattcttaatgagaacaaatacgtag

SEQ ID NO: 4936 - RNA, 939 nt, synthetic construct
  misc_feature 1..939: note = source = /note="Description of Artificial Sequence: Synthetic coding sequence"
  source 1..939: mol_type = other RNA
atgcctcctccccggaccggccggggtctgctgtggctggggttggtgctctcctctgtctgcgtagcattaggaagcgagacacaggctaattccaccaccgatgccttaaatgttctgctgattatcgtggacgatctcagaccatcactcggatgctacggcgacaaactggttcgttctcccaacattgatcaattggccagccattcactcctgttccagaatgcattcgctcagcaagctgtttgcgccccaagccgagtttcattcctgacgggaagacgtccggatacaaccaggttgtatgacttcaactcttactggcgagtacacgctggcaacttctctacaattcctcagtattttaaagagaacggttacgtcacaatgtcagtgggcaaggtgttccacccaggtatctcctctaatcacacagatgatagcccatatagttggtcttttcctccataccatccttcaagtgaaaagtatgagaacactaagacttgtcgcggccccgacggggaactgcatgcaaacctgctatgccccgtggacgtgctggacgttcccgaagggaccctccccgataagcagagcacagaacaggctatccagcttcttgaaaagatgaaaaccagcgctagcccttttttcctcgccgtcggctatcataaaccacatatcccattcagataccccaaagaatttcagaaactgtatccactcgagaatatcaccctcgccccggaccccgaggtgcctgacggtctccctcccgttgcttataacccttggatggatattagacaaagagaagatgtgcaagcattgaacatcagtgtcccttatggcccgattcccgtggatttccaagaagaccagtcctcaactggattccgcctcaaaactagttccacaaggaaatataaatag

SEQ ID NO: 4937 - RNA, 540 nt, synthetic construct
  misc_feature 1..540: note = source = /note="Description of Artificial Sequence: Synthetic coding sequence"
  source 1..540: mol_type = other RNA
atgcctcccccgagaaccggacgcggactcctgtggcttgggctcgttctctcctccgtttgcgtcgcacttggctctgaaactcaggctaattctaccactgacgccctgaatgtcctgttaatcattgtggatgatctacgaccctcactcggctgctatggcgataagctggtacgctcacctaacatcgaccagttggccagccacagtctcctctttcagaatgcatttgcccagcaggctgtttgtgccccgtctcgggtgtctttcctcactggccgccggcccgacacaacacggctttacgatttcaacagctactggcgggttcatgctggaaatttttccacaataccccagtactttaaagagaatggatacgtcaccatgagcgtgggtaaggtgtttcatccaggcacagccccctgccctgaaagcggtttctcctggttcgtggtttctgagtcttcgattccaatcctgggaatgggtctctccctgcaatcccccctcctagctggtagagtgccccgctag

SEQ ID NO: 4938 - RNA, 261 nt, synthetic construct
  misc_feature 1..261: note = source = /note="Description of Artificial Sequence: Synthetic coding sequence"
  source 1..261: mol_type = other RNA
atgccaccaccgagaacaggacgcggtttgctgtggcttgggttggtcctttctagtgtatgcgtcgccctgggttccgagactcaagccaactccactaccgacgcgctgaacgtactgctcattatagttgacgacctccggccttcccttggctgttacggtgacaaactcgttaggtcacccaacatcgaccaactcgcttcgcattctctgctttttcagaacgcattcgcccaacaggctgtttgcgctccttag

SEQ ID NO: 4939 - RNA, 462 nt, synthetic construct
  misc_feature 1..462: note = source = /note="Description of Artificial Sequence: Synthetic coding sequence"
  source 1..462: mol_type = other RNA
atggacctggtcgagcttgttagcttatttccgacgctggctggactcgccgggctgcaagtgcctcccagatgtcccgtgccctccttccatgtcgagctgtgcagagaggggaagaatctgctgaaacatttccgttttcgagacttggaagaagatccatatctccccggcaacccccgagaactcattgcttactctcaataccccaggccatccgatatcccgcagtggaactccgataagccaagcctcaaagatataaaaattatgggatactcaatcaggacaattgactatcggtacacggtgtgggtgggctttaatcctgatgagtttcttgctaacttctctgacattcacgcaggcgaactgtattttgtggattccgacccgctgcaagatcataatatgtataatgattcccagggcggtgatctttttcaactactgatgccctag

SEQ ID NO: 4940 - RNA, 1020 nt, synthetic construct
  misc_feature 1..1020: note = source = /note="Description of Artificial Sequence: Synthetic coding sequence"
  source 1..1020: mol_type = other RNA
atgaaaacttctgcaagccctttctttctggcggttgggtaccacaagcctcacatcccatttagatacccaaaggagttccagaagctgtaccctttagagaacatcacactggccccagaccccgaggtaccggatgggctaccccccgttgcttacaacccgtggatggatattcggcagagagaagatgtgcaggcactcaatattagcgtcccctacggtccgattcctgtagacttccagagaaagatccgccagtcatacttcgcgagcgtttcatacctggatacccaggtgggcagattgcttagcgcgttggacgacctacaattagcaaacagcacaattatagcgttcaccagtgaccacggatgggccctgggtgaacacggtgagtgggccaagtattcaaactttgatgtggccacccatgtcccgctcattttttatgtgcctggacgcacagcatccttaccagaagcaggtgaaaaactgttcccatatctggatccattcgactccgcttcacagctgatggaacccgggcggcaatccatggatttggtggaacttgtttctctattcccaaccctcgctggccttgccggcctccaagtccccccccggtgccctgtgccatcatttcacgttgagctttgccgagagggcaaaaatctgctgaaacattttcgcttcagggacttggaggaagacccttacctacctggcaacccaagggaactgatagcttattcacagtatccacgtccatccgatatcccccaatggaatagcgataaacccagcctgaaggatattaagataatgggatactcaatccgcacaatcgattaccgctacactgtttgggtgggctttaatcccgatgagttcttggctaattttagcgacattcatgccggtgaactttacttcgtggattctgatcctctccaggaccacaacatgtataatgattctcaaggaggcgatctcttccaattactaatgccttag

SEQ ID NO: 4941 - RNA, 1962 nt, synthetic construct
  misc_feature 1..1962: note = source = /note="Description of Artificial Sequence: Synthetic coding sequence"
  source 1..1962: mol_type = other RNA
atgaggccattaagacctcgcgctgccctcttggcattattagcatcattactggcggctcctccagtcgcgccggcggaggcaccacacttggtgcatgtggatgccgcgcgtgccctttggccccttagaaggttctggcgctcaactggcttctgcccccctctgcctcattcccaggccgaccagtatgtgctgagctgggaccaacaactgaacctcgcttatgtcggggcggtaccccacagggggattaagcaggtgcgcacgcattggctgctggaactcgtgactactagaggctcaaccgggcgcgggctgtcctataactttacacacctggatggctacttggacttgctgcgggagaaccagctacttcccgggttcgaactcatgggctccgcgtccggccactttactgattttgaggacaagcagcaagttttcgaatggaaagacttggtgagctcgctcgctcgccgttatatcggcagatatggactcgcgcacgtgtccaagtggaatttcgaaacctggaatgagccggatcaccacgactttgacaacgtgtccatgacaatgcagggctttctgaattactatgatgcatgtagtgagggccttagagccgcctctcccgccttgaggctcggaggtcctggagatagcttccacactccacctcgttcacccttaagttggggactactgcggcactgccatgatggcacaaattttttcaccggagaggccggcgttcgacttgattatatttcactccataggaagggtgctcggtcgtcgatatcaatcctcgagcaggaaaaagtcgtggcccagcagatcagacagttatttccaaaattcgcagatacccccatatacaatgacgaggccgatccactggtaggctggtcccttccccagccatggcgtgccgatgttacctacgcggcgatggtcgtgaaggtgattgcccagcaccaaaatttactccttgctaacacaacctccgcatttccatacgcccttctttcaaatgacaatgctttcctgagctaccatccccatcctttcgcccagcgcactcttaccgcccgcttccaggtcaataatactcggccaccacatgtgcagttactgcgcaaacccgtacttaccgctatgggcttgcttgcactcttggatgaagaacagttgtgggcagaagtctctcaggcagggacagtgctcgatagcaatcacaccgtaggagtgttagccagcgcccataggccacagggacccgcagatgcatggcgagctgccgtcctgatttatgcctctgatgatactagagcacatccgaataggtctgtcgcagtgactctgcggctgcgcggggtgccccccggcccaggtctcgtgtacgttacaagataccttgataatggattgtgtagcccagatggtgagtggaggcgcctcggccgtcccgtgttcccgaccgccgagcaattccgccggatgagggctgctgaggaccccgtggccgcagccccccgacccctccccgccggtggtagactgaccctacggccagcattgcgtctgccaagcttgctgctcgtgcatgtgtgtgctagaccggagaagccgccaggtcaggtcacaaggctgcgagccctgcccttaactcagggacagttggtcctggtgtggagcgatgagcatgttggcagcaaatgtctgtggacctatgaaattcagttttcccaggatggtaaggcgtacacaccagtgtccagaaagccatccacgtttaaccttttcgtgtttagccccgacacaggagctgtgagcggatcttaccgggtgagagcgctcgattattgggcaagaccagggcctttttccgatcctgtcccttacttggaagtgccagttcctcgggggcctccttctcctggcaatccttag

SEQ ID NO: 4942 - RNA, 2028 nt, synthetic construct
  misc_feature 1..2028: note = source = /note="Description of Artificial Sequence: Synthetic coding sequence"
  source 1..2028: mol_type = other RNA
atgagaccccttcgccctagagccgcattgctggccctattagccagtctgcttgccgcacctcctgtggcccctgccgaagcaccacacctcgtgcatgtagacgcagcccgagccctgtggcccctccgtcggttttggagatcgacaggcttttggggtagtactggaagaggactgtcctataacttcacccatttggatggttacctcgacttgctcagggagaatcagctgctacccggttttgagctgatgggctcagctagtggccatttcacagacttcgaggacaagcagcaggtgttcgaatggaaggacctagtttcatccctggcaagaaggtacattggcagatatggattagctcacgtaagcaaatggaatttcgagacatggaatgagcctgatcaccacgattttgataacgtgtccatgaccatgcagggcttcctcaactattacgacgcctgtagtgagggcctgagggcagcttcccctgctctgcgcctgggcgggccaggtgacagcttccatactccaccacggtccccactttcatggggacttctgaggcactgtcacgatggcactaacttttttacaggcgaggccggggtaagactcgattacatcagtcttcaccgaaaagtgcgccctgccccacctagcgcacccgtcttttgcgctctctctagatgcgccccaggtagggctgatcctggcggagccgaagcagcccctccggcaggctgcgcccagttgcacctgcatccgggcgccggagaaggacgcagggctgccgaccccgctgcgctgccacaggtcaggggccacccacacctgcaacggcgcggagggccagccggaggcttggtgcccgcaactgccgtggaggggggacgtgatttgcgcggtcatggcggagaaggtggccccgcacagcgcccggctcggcctcccgccacatttctgccccgaagagatcgccgagctgtagccgccccaccaggcccctcctgtcccggccaccctcaagtgatcgctcagcatcagaatctgttactggccaatactacatcagcctttccgtatgcgttgctctctaatgacaacgccttcttgtcctaccaccctcacccctttgcccaaagaaccctgacagcgcgcttccaagtgaacaatactcggcccccacacgtgcagctgctgcgtaagcccgtcctcacggccatggggctgttggcactcctggatgaggaacagctctgggctgaggtatcgcaagcgggaacagttctggattctaatcacacagtgggagtcctggcatccgcccacagaccacaaggcccagcagacgcgtggagggccgctgtgctgatctacgcttcggacgatactcgagcccaccccaacagaagtgtggccgtcactcttagactccggggtgttccgcccggaccaggcctcgtctacgtgacccgttatctggacaacggcctctgctctcccgatggggagtggcggaggttggggcggccagtgtttccgaccgctgaacagttccggaggatgcgagcagctgaagacccagtggctgccgcccctcgacctctgcctgccggaggcagactcacgctcaggcccgcactgaggctcccctcactgctcctcgtccacgtgtgtgcccgccctgaaaagcctccgggacaggtgactaggctacgggctctacccctgacccaaggccaactagtactcgtctggtcagatgaacacgtaggatccaaatgcttatggacgtacgagatacagtttagtcaagacggcaaagcctacacacccgtcagtcggaagccaagtacttttaatctcttcgtcttctcacctgacaccggcgccgtttcgggctcataccgtgttagagcactggattattgggcacggcccggccctttttcagaccctgtgccgtacttagaagtgcctgtcccacgcggacctccatcccccggcaatccatag

SEQ ID NO: 4943 - RNA, 603 nt, synthetic construct
  misc_feature 1..603: note = source = /note="Description of Artificial Sequence: Synthetic coding sequence"
  source 1..603: mol_type = other RNA
atggctctgtggatgaggcttctaccactgcttgcgctcctcgctctatgggggcccgacccagctgctgccttcgtgaaccagcatctttgcggcagtcacctcgtcgaggctctttacctggtctgtggcgagcgcggatttttttatacacctaaaactcggagagaggcagaggacttacaggcgtcagctctttcgctctccagctctacgagtacttggccagaggggctggacgcaactgcccgcgcaccaccagccctcgtcgtgactgctaacataggtcaggctggcggctcgtcgtccagacaatttcggcaacgcgcactcgggacttctgatagtccggtgttattcatccattgtccgggtgcggccggaactgcccaaggtctcgaataccgcggtagacgtgtcacaactgagttggtatgggaagaagttgattcctccccacagcctcaaggttccgaatccctccctgcacagccccctgcccagccagctccacagccggagccacaacaggcccgagagccctcccctgaagtgtcttgttgcggcctgtggcccagaaggccccagagatcccagaattag

SEQ ID NO: 4944 - RNA, 333 nt, synthetic construct
  misc_feature 1..333: note = source = /note="Description of Artificial Sequence: Synthetic coding sequence"
  source 1..333: mol_type = other RNA
atggctctgtggatgagactgttgccgctgctggctctcctcgctttgtggggcccggatcccgctgcagctttcgttaaccagcatttatgtggatcacacctggtggaggccctttaccttgtctgcggggaacgtggattcttttatacaccaaaaactagacgagaggctgaggatctgcaggtgggacaggtagaactgggcggaggtccaggcgcaggctccttgcaaccgctggctctggaaggttcactacagaagaggggcatcgtagagcagtgctgtacttcgatatgttcactctatcagctggaaaactattgcaattag

SEQ ID NO: 4945 - RNA, 333 nt, synthetic construct
  misc_feature 1..333: note = source = /note="Description of Artificial Sequence: Synthetic coding sequence"
  source 1..333: mol_type = other RNA
atggccctttggatgcgcctgttgccgctgctggcacttttagctctgtggggacctgatccagccgcagcgtttgttaatcagcacctgtgcggcagccatttggtggaagccctttacctcgtatgcggcgagcgtggatttttttacacacctaaaaccaggagggaggccgaggacttacaggtaggccaggtcgaactcggaggcggcccaggggcaggtagtctgcagccactcgccctcgaaggaagtttacagaaaagagggatcgtcgaacagtgttgtacctccatctgtagcctgtaccaactggaaaattactgtaactag

SEQ ID NO: 4946 - RNA, 333 nt, synthetic construct
  misc_feature 1..333: note = source = /note="Description of Artificial Sequence: Synthetic coding sequence"
  source 1..333: mol_type = other RNA
atggccctttggatgagactgctgccgttgttggctttactcgctttgtgggggcccgatcctgccgcggcttttgtcaaccaacacctttgtggaagtcacctggtcgaggccttatacttggtgtgtggcgagagaggatttttctatacccccaagacaaggcgggaggctgaagatctgcaagtgggacaagtggaattggggggcggacctggggcaggcagccttcagccactggccctggaagggagcttacaaaagagaggtatcgtcgagcagtgctgcacatcaatctgttctttatatcagctcgaaaattactgtaattag

SEQ ID NO: 4947 - RNA, 297 nt, synthetic construct
  misc_feature 1..297: note = source = /note="Description of Artificial Sequence: Synthetic coding sequence"
  source 1..297: mol_type = other RNA
atggcattgtggatgcgcttgctacccctcctcgccctcctcgctctgtgggggcccgatcctgccgcagcgtttgtcaaccaacatctgtgcggcagtcatctcgtcgaggcactctatctggtctgcggtgaacgagggtttttctacactcccaagacacgacgtgaggccgaggatttacaggggtcactgcagccactggctctggaaggaagcctgcaaaaaagagggatcgtggaacaatgttgtacaagtatttgctcactttaccagctggagaattattgtaactag

SEQ ID NO: 4948 - RNA, 333 nt, synthetic construct
  misc_feature 1..333: note = source = /note="Description of Artificial Sequence: Synthetic coding sequence"
  source 1..333: mol_type = other RNA
atggcactttggatgcggctacttccgttactggccttactagctctttggggaccagatccagccgcggccttcgttaaccaacatctgtgtggctcacacctagtcgaagccctttatctggtgtgcggggaaagaggattcttttatactgataaaacccggagagaagccgaggacctgcaggtaggacaagtggagctgggcggaggccccggagcagggtccctacagcctctggccttagaggggtcgttgcaaaagagaggcatagtggaacagtgttgcactagcatatgttctctttatcagctggaaaattactgcaactag

SEQ ID NO: 4949 - RNA, 333 nt, synthetic construct
  misc_feature 1..333: note = source = /note="Description of Artificial Sequence: Synthetic coding sequence"
  source 1..333: mol_type = other RNA
atggccctatggatgcggttactgccacttcttgcccttttagccctttggggaccagatcccgccgcagcgtttgtaaatcagcacctgtgcggcagccaccttgtggaagcactttatctcgtgtgcggcgaacgcggatttttctacactcctaaaactcgcagagaggccgaagacctccaggtgggacaggtagagctgggcggtgggcctggagctggcagtctccagcccttagcactggaaggtagtctgcaaaaacgtggcattgtggagcagtgttgcacatctatttgcagtttgtatcagctcgagaattactgtggatag

SEQ ID NO: 4950 - RNA, 333 nt, synthetic construct
  misc_feature 1..333: note = source = /note="Description of Artificial Sequence: Synthetic coding sequence"
  source 1..333: mol_type = other RNA
atggcactgtggatgagattactccccttgctggcacttctggccttgtggggtccggaccctgctgccgcttttgtcaaacagcacttatgtggctctcatcttgttgaagctctgtacttggtatgcggcgaacgcggattcttctacacccctgaaactagacgtgaagcggaagacttgcaggtgggccaagtggagctgggtggtggcccgggggccggcagcctacagccgttggcgctggagggctcactgcagaaacgcggaatcgtggaacagtgctgcacaagcatatgctcattataccaactcgagaactactgtaactag

SEQ ID NO: 4951 - RNA, 333 nt, synthetic construct
  misc_feature 1..333: note = source = /note="Description of Artificial Sequence: Synthetic coding sequence"
  source 1..333: mol_type = other RNA
atggccctctggatgcgcctgcttcccttgcttgctttgttagcactgtggggaccagatcccgccgccgcattcgttaaccagcacctatgtggttcacatctggtggaagccctctatcttgtctgcggggagaggggctttttctatacgaagccaaccagaagagaagcagaggacttacaggtgggtcaggtcgaattgggtggcggcccaggcgccggttctttgcaaccgcttgcactcgaaggctctctccaaaagcgaggaatcgtggaacagtgctgtacatctatatgttcactctatcagctggaaaactactgcaactag

SEQ ID NO: 4952 - RNA, 570 nt, synthetic construct
  misc_feature 1..570: note = source = /note="Description of Artificial Sequence: Synthetic coding sequence"
  source 1..570: mol_type = other RNA
atggcactgagcttcagcctgctgatggccgttctcgttttatcgtataagtctatttgtagcctcggctgcgatttgccccagacccatagcctgggtaacagacgggctctaatattgctgggtcagatgggtcggatctccccttttagctgcttgaaagaccggcacgatttccgcattccacaggaagaattcgacgggaaccagtttcagaaggcacaagctattagtgttctacatgagatgattcagcaaacattcaatctgttctcgactgaagatagctctgctgcctgggaacagagtctgctagagaaattctcaacagaactgtatcaacagctgaacgatttggaagcttgcgtgatacaggaggtgggcgtagaagagacacctcttatgaacgaagacagtatactcgccgtcagaaagtatttccagaggatcaccctatatctgatcgagaggaaatattcaccgtgtgcttgggaagtggtcagagcggagataatgcggtccttgtctttttctaccaatctacagaagcgtctccgacggaaggattag

SEQ ID NO: 4953 - RNA, 573 nt, synthetic construct
  misc_feature 1..573: note = source = /note="Description of Artificial Sequence: Synthetic coding sequence"
  source 1..573: mol_type = other RNA
atgatggctagccctttcgccctgctgatggccctagtagttttaagctgcaaatcatcatgttcacttggttgtgatcttcccgaaacccatagtttagacaatcgccggacacttatgctgttggctcagatgtctcggattagcccgagctcatgtctcatggaccgacacgattttggatttcctcaagaggaatttgacgggaaccagttccagaaagccccagctatttccgttctgcacgagctgattcaacagatttttaatctgtttactacgaaggactcttccgccgcctgggatgaagaccttctcgacaaattctgtacagaactctaccagcagttaaatgatcttgaggcatgcgtgatgcaagaagaacgtgtgggagaaactccattaatgaacgcagactcaatcttggctgttaaaaagtattttagacgtatcaccctttatctcaccgagaaaaaatactcaccttgtgcttgggaagtggtgagggcggaaatcatgaggtcactgagcctaagtacgaacctccaggagcgacttaggcgtaaggagtag

SEQ ID NO: 4954 - RNA, 570 nt, synthetic construct
  misc_feature 1..570: note = source = /note="Description of Artificial Sequence: Synthetic coding sequence"
  source 1..570: mol_type = other RNA
atggctcttccctttgcgctcatgatggccctcgtggtgctgagttgtaaaagcagctgttcactgggctgcaatttaagccagacccattcactcaataatcggcgcaccctcatgctcatggctcagatgcgccggatctcgcccttttcctgcttaaaagatcgtcacgacttcgagttcccccaggaagagtttgacggaaatcaattccagaaagcacaagctatttccgtactccacgagatgatgcagcagacattcaacctgttcagtaccaagaactcatcagctgcctgggacgaaacactccttgaaaaattttacattgaactgttccaacaaatgaacgacctggaggcttgcgtaattcaagaggtaggcgtagaagaaaccccccttatgaatgaggacagtatcctagcagttaaaaaatactttcaaaggatcaccctctaccttatggaaaaaaaatactcaccctgtgcctgggaggttgtgcgggctgagatcatgagatcccttagtttctctaccaacctgcagaagcgactaaggcgaaaggactag

SEQ ID NO: 4955 - RNA, 570 nt, synthetic construct
  misc_feature 1..570: note = source = /note="Description of Artificial Sequence: Synthetic coding sequence"
  source 1..570: mol_type = other RNA
atggccctgtcattcagcctattaatggcagtgctcgtactttcttacaagtctatctgctctctcggctgcgatctgcctcagactcattccctgggcaacagaagagcgctgattctcttggcgcaaatgggacggatctctcacttttcttgcttgaaagaccgctacgattttggtttcccacaggaagtatttgatggcaaccagttccagaaggctcaagctatttctgcgtttcacgaaatgattcagcagacatttaatctgttcagcacaaaagatagctcagctgcttgggatgaaaccctgctcgataagttctacattgaactttttcagcaactgaacgatctggaggcctgcgtcactcaggaggttggcgtggaggagatagcgttaatgaacgaggactcgattctcgctgttcgaaaatactttcagaggattaccctttacttgatgggcaaaaagtattctccttgcgcttgggaagttgtgcgcgcagagattatgcgatcattcagcttcagcaccaacctgcagaaagggttaaggcgtaaagattag

SEQ ID NO: 4956 - RNA, 570 nt, synthetic construct
  misc_feature 1..570: note = source = /note="Description of Artificial Sequence: Synthetic coding sequence"
  source 1..570: mol_type = other RNA
atggccctaagtttttccctgctcatggctgtcctcgtgctctcatacaaatcgatatgctcgttgggatgcgacctgccacagacacattcacttggaaacagacgggcccttatcttactcgctcagatgggcagaatcagtccattctcctgcctaaaggatcgccacgacttcgggcttccccaggaagagttcgacggcaaccagtttcagaaaacccaggctatctcagtcctccatgaaatgattcagcaaacctttaatttattttccaccgaagattcttcagcagcatgggagcagtctctcctagagaagttttctacagagctatatcagcaactcaataacctcgaggcgtgtgttatacaggaggtcggcatggaagagacacctctcatgaacgaagatagtatcctagccgtgagaaaatatttccagcgaataaccctgtatctcaccgaaaagaagtacagcccttgtgcttgggaggtggtgcgggctgaaatcatgagaagcctgagtttctcaacaaacttacagaagatcttgaggcgcaaggactag

SEQ ID NO: 4957 - RNA, 567 nt, synthetic construct
  misc_feature 1..567: note = source = /note="Description of Artificial Sequence: Synthetic coding sequence"
  source 1..567: mol_type = other RNA
atggctttgacattcgccttgcttgttgctctgttagttctaagctgtaagtcctcttgttctgtgggatgcgacctcccacagacccatagcctcgggtcaaggcggacgctgatgctcctcgcccagatgagaagaatctcacttttcagctgcttaaaagacagacacgacttcggcttcccacaggaagagttcggcaaccagttccagaaggctgaaaccattcctgtcctgcacgaaatgatacagcaaatttttaatttattttcaactaaggatagtagtgctgcatgggatgaaacgttactggataagttttacaccgagctatatcaacaactgaacgatctcgaggcgtgcgttatccagggggtgggcgttaccgaaactccactgatgaaagaggattccatcctagcagttagaaagtatttccaacgaatcacgctctaccttaaagagaagaaatattcaccctgcgcatgggaagttgtgcgggctgagattatgaggagcttctctctgagtaccaaccttcaagaatctcttcggtccaaggaatag

SEQ ID NO: 4958 - RNA, 570 nt, synthetic construct
  misc_feature 1..570: note = source = /note="Description of Artificial Sequence: Synthetic coding sequence"
  source 1..570: mol_type = other RNA
atggcattatctttttcccttctgatggccgttctcgtgctctcctataaatctatctgctctttaggttgcgaccttccccaaacgcatagccttggaaatagacgcgcactgatcctcttagcacagatgggcaggattagtccattcagctgcctgaaggaccggcacgatttcgggtttcctcaggaggagttcgacggcaatcagtttcagaaagcccaagcaataagtgttctccatgaaatgattcagcagacctttaacctctttagcacgaaggacagtagtgctacgtgggaacagtcactgctggaaaagttctccacagaactcaaccaacaactgaatgatttggaagcttgcgtgatccaagaagtaggagtggaggagaccccccttatgaatgtggactcaatactggcggtcaaaaaatactttcaacgcatcactctgtatctcacagaaaagaaatacagtccttgtgcctgggaggtcgtccgcgccgagatcatgaggtcatttagtctctccaaaatatttcaggaacgactgcgtcgcaaagaatag

SEQ ID NO: 4959 - RNA, 570 nt, synthetic construct
  misc_feature 1..570: note = source = /note="Description of Artificial Sequence: Synthetic coding sequence"
  source 1..570: mol_type = other RNA
atggcactctctttctcactgttgatggcagtcctggttttgtcctataagtcaatctgcagcctgggctgcgatctgccccagactcattctctcggcaacagaagagccctgatcctcctggcacagatggggcgcatctcacacttttcatgcttgaaagataggcatgacttcggattcccagaggaggagttcgatggacaccagtttcaaaaggcacaggctattagcgtactccatgaaatgatccagcagacctttaatctcttcagtaccgaagattcgtccgccgcatgggaacaaagcctgctggaaaagttctcaacagaactgtatcaacagctgaatgatctcgaggcttgcgtcatacaggaggttggcgtcgaggagactccactaatgaatgaggatagcatcctggccgttcgcaaatacttccagcggattaccctttacctgactgaaaaaaagtacagcccttgtgcttgggaggttgttcgggctgaaatcatgcgctcgcttagtttctccacaaacttacagaaaagattaagaaggaaggattag

SEQ ID NO: 4960 - RNA, 570 nt, synthetic construct
  misc_feature 1..570: note = source = /note="Description of Artificial Sequence: Synthetic coding sequence"
  source 1..570: mol_type = other RNA
atggccttacctttcgtgcttctgatggcgctagtggtgctcaattgtaagtcgatatgctcacttggctgcgacttgccgcagacccattctctctccaaccgacggactttaatgatcatggcacagatggggaggattagccctttcagctgcctgaaagacagacacgacttcggcttcccacaggaggagttcgacggcaatcagttccaaaaagcacaggccatttccgtcctccatgaaatgatccaacaaactttcaacctgttcagcactaaagacagcagcgctacatgggatgaaactcttctggataaattctacaccgaactatatcaacagctcaatgacctggaggcctgcatgatgcaggaggtcggtgtcgaagatactccgcttatgaacgttgactccatcttaactgtgagaaagtactttcagcgaatcaccctgtatttaaccgagaagaaatactcaccatgcgcctgggaggtagtccgtgccgaaattatgaggagctttagtctgagcgccaatttacaggaaagattgagacggaaagaatag

SEQ ID NO: 4961 - RNA, 570 nt, synthetic construct
  misc_feature 1..570: note = source = /note="Description of Artificial Sequence: Synthetic coding sequence"
  source 1..570: mol_type = other RNA
atggccctcccattcgcactgctgatggccctggttgtcctatcctgtaagagcagctgcagccttgactgtgacctcccacagactcactccctaggccaccgaaggactatgatgctccttgcgcagatgaggcgaataagtctatttagctgcctcaaagatcgccacgatttcaggtttcctcaggaagagtttgatggaaatcagttccagaaagctgaggctatatccgtgctccacgaagttattcagcagacgtttaatttgtttagtaccaaggactcctccgttgcctgggacgaacgcctcctggataaactttatacggaattgtaccaacaactaaacgacctcgaagcgtgcgtgatgcaagaagtatgggtgggtggtactccgctcatgaacgaagattcaattttagcagttcgcaaatattttcagaggatcaccctgtacctaactgagaagaaatactccccttgcgcttgggaggtggtaagagccgaaataatgcgctcgttttccagttcgaggaacctccaggaaagactgaggcgaaaggagtag

SEQ ID NO: 4962 - RNA, 570 nt, synthetic construct
  misc_feature 1..570: note = source = /note="Description of Artificial Sequence: Synthetic coding sequence"
  source 1..570: mol_type = other RNA
atggcgcgcagtttctctctgctgatggtggtgctcgttctcagctacaaaagtatctgttctcttgggtgcgatcttccgcagactcactctttgagaaataggagagccctgatcctgctggcccaaatgggaagaattagccccttcagctgtttgaaagatagacatgagttccgattccctgaggaagagttcgacggtcaccagttccagaaaactcaggcaattagcgtcctccatgaaatgatacaacagactttcaatctcttttcgactgaggactccagcgcagcttgggagcaatcactcctagaaaaattttcaaccgaattgtatcagcaactgaacgaccttgaggcctgcgttatccaagaggtgggtgttgaagagactcctttaatgaacgaagattttatccttgcagttcgcaagtactttcagcggatcactttgtatttgatggagaaaaagtacagtccgtgcgcttgggaagtcgtcagggcagagatcatgagatccttctccttttccacgaatctgaagaagggccttcgacggaaggactag

SEQ ID NO: 4963 - RNA, 570 nt, synthetic construct
  misc_feature 1..570: note = source = /note="Description of Artificial Sequence: Synthetic coding sequence"
  source 1..570: mol_type = other RNA
atggctttgaccttctaccttctcgtcgccctggtagtcctgtcttacaaaagctttagtagtttgggttgtgacctgccacaaacacactcccttgggaacaggcgcgccttgattttgctagcccagatgcggcgtatatccccattctcttgcttaaaggatcggcacgactttgagttcccacaagaggaattcgatgacaagcagttccaaaaggcccaggctatttccgtcttgcacgaaatgattcagcagactttcaatctcttctccaccaaggattctagcgcagccttagacgagaccctgcttgacgagttttatatcgagcttgaccaacagcttaatgatctcgaatcctgtgttatgcaggaagttggagtgatcgagtcacccctaatgtacgaagattcaatcttagccgtcagaaaatattttcaacgcataacactctacctgaccgaaaaaaaatacagctcatgcgcatgggaagtcgtccgtgcagaaatcatgcgaagttttagcctgagtatcaacctgcaaaagaggctgaagtccaaggaatag

SEQ ID NO: 4964 - RNA, 564 nt, synthetic construct
  misc_feature 1..564: note = source = /note="Description of Artificial Sequence: Synthetic coding sequence"
  source 1..564: mol_type = other RNA
atgaccaataaatgcttactccaaatagcgcttttgctttgtttctccacaaccgccttatcaatgtcctacaacctgctggggtttctccaaaggagcagcaattttcagtgtcagaagctcttatggcagctcaacggaaggctcgagtactgcttaaaggacagaatgaactttgacatccccgaagagattaagcaactgcagcagtttcaaaaggaggacgcggctctgacaatctatgagatgttacagaatatattcgcaatttttcgacaggacagctctagtaccggatggaatgaaacaatcgttgagaatctgttggccaatgtgtaccatcagatcaaccacctaaagaccgtgttagaggagaagctggagaaagaggactttacaagaggcaagctgatgagtagtctgcacttgaaaaggtattacggacgtattttgcactatttgaaggcaaaggaatatagtcattgtgcttggacgatcgtgagagtcgaaattctgagaaatttctacttcatcaaccgcctgactggatacctccgcaattag

SEQ ID NO: 4965 - RNA, 534 nt, synthetic construct
  misc_feature 1..534: note = source = /note="Description of Artificial Sequence: Synthetic coding sequence"
  source 1..534: mol_type = other RNA
atgtttcacgtgtcatttaggtacattttcggtctgcctcctcttatactggtactgctccctgtggcttcttccgattgcgatattgaaggaaaggatggcaaacaatacgagtcagttctgatggtctccattgaccagctgctagatagtatgaaagagatcggttcaaattgcctgaataatgagtttaatttcttcaagaggcacatctgtgacgctaataaggaaggtatgttcctgttccgtgctgctcggaagctgcgacaattcctaaaaatgaattcaacgggagattttgacttacatctgctgaaagtaagcgaaggcacgacaattctgctaaactgtactggacaagtaaagggtcggaaacccgcagcccttggtgaagctcagcctaccaagagtctggaggagaacaagagcctgaaagaacagaagaagctcaacgatctgtgtttccttaagcgcctcctgcaagagattaaaacatgttggaacaagatcttaatgggaactaaagagcactag

SEQ ID NO: 4966 - RNA, 216 nt, synthetic construct
  misc_feature 1..216: note = source = /note="Description of Artificial Sequence: Synthetic coding sequence"
  source 1..216: mol_type = other RNA
atgtttcacgtcagtttccgttatattttcgggctgccccccttaatcctcgtgctcctacctgtggcttcatctgactgcgacattgaaggaaaagacggtaaacagtacgaaagcgtacttatggtaagtatcgaccagctcttgaaccagccctacaagaagaaagaaaaaaggaccgaacggaaacaacagtcggcaatgtccaacaactag

SEQ ID NO: 4967 - RNA, 393 nt, synthetic construct
  misc_feature 1..393: note = source = /note="Description of Artificial Sequence: Synthetic coding sequence"
  source 1..393: mol_type = other RNA
gtgagcttcaggtatattttcggattaccccccctgatccttgtcctactgcccgtggcttcctccgactgcgacattgaaggcaaagacggcaaacagtatgaatccgttctaatggtaagtatcgaccagctgctcgacagtatgaaggagataggttcaaattgtctgaataatgagttcaattttttcaagaggcatatttgtgacgccaacaaggtcaaggggcggaaacctgctgcactaggtgaagcccagccgaccaaaagcttagaggaaaataaatcactcaaggagcaaaagaaactcaacgacctgtgtttcctcaagcgactgcttcaagagattaaaacttgctggaacaagatcctaatgggcaccaaggaacactag

SEQ ID NO: 4968 - RNA, 216 nt, synthetic construct
  misc_feature 1..216: note = source = /note="Description of Artificial Sequence: Synthetic coding sequence"
  source 1..216: mol_type = other RNA
atgtttcatgtaagtttccgctacatattcgggcttccccctttgattttggtgttgttgcctgtcgcctccagcgactgcgacattgagggaaaggatggcaaacaatacgaaagcgtgctcatggtgtccatagaccagctgctgaatcagccctataaaaagaaagaaaagagaacagagagaaaacaacagtcagctatgtcaaataattag

SEQ ID NO: 4969 - RNA, 114 nt, synthetic construct
  misc_feature 1..114: note = source = /note="Description of Artificial Sequence: Synthetic coding sequence"
  source 1..114: mol_type = other RNA
atgtttcatgtttctttcaggtacatcttcgggctcccgccgttaattcttgtccttctccccgtagcaagcagtgattgtgatatcgaaggccaacacgagcgtaactggtag

SEQ ID NO: 4970 - RNA, 402 nt, synthetic construct
  misc_feature 1..402: note = source = /note="Description of Artificial Sequence: Synthetic coding sequence"
  source 1..402: mol_type = other RNA
atgttccacgtctcgtttcgctacatttttgggctgcctcctctcatcctggtcctgctgcccgtggcatcttccgattgtgacatcgaaggcaaggacggcaaacaatacgaaagcgtactgatggtaagcatagaccagctgctcgatagcatgaaagaaattggctccaactgtcttaataatgaattcaacttctttaaacgtcacatttgcgacgctaacaaggtgaaggggagaaaaccagccgccttgggggaggctcaacctactaagtctcttgaggagaacaaatccctaaaagaacagaaaaaacttaatgatctctgcttcttgaagcggctacttcaggagatcaaaacctgctggaataaaattctgatgggcaccaaagagcactag

SEQ ID NO: 4971 - RNA, 114 nt, synthetic construct
  misc_feature 1..114: note = source = /note="Description of Artificial Sequence: Synthetic coding sequence"
  source 1..114: mol_type = other RNA
atgttccacgtctcctttagatacattttcggcctgccccctctgattttggtgctgttacccgtggcaagctcagattgcgacattgagggccaacatgagcgaaattggtag

SEQ ID NO: 4972 - RNA, 195 nt, synthetic construct
  misc_feature 1..195: note = source = /note="Description of Artificial Sequence: Synthetic coding sequence"
  source 1..195: mol_type = other RNA
atgaaggagatcgggtctaattgtctaaataatgaattcaattttttcaagaggcatatttgtgacgcaaacaaagaagaaaataaatctcttaaggagcagaaaaaactgaacgatctttgttttctgaaaagacttttgcaggaaatcaaaacatgttggaataagatcctcatgggcaccaaagagcattag

SEQ ID NO: 4973 - RNA, 660 nt, synthetic construct
  misc_feature 1..660: note = source = /note="Description of Artificial Sequence: Synthetic coding sequence"
  source 1..660: mol_type = other RNA
atgaagatgaggttcctcggcctggttgtctgtcttgtgctctggacactgcatagcgaaggaagcggaggcaagctgaccgctgtggatcctgagactaatatgaatgtatccgaaattatcagttattgggggtttcctagcgaagaatacttggttgaaacagaagacggttacatactctgtctgaatcgcataccacacggccgtaagaaccattcagataagggccccaaaccagttgtgtttctgcagcacggtttgctggcggattcgtctaactgggtgaccaatctcgcgaactcaagcctcggattcattctcgccgacgccggctttgacgtctggatgggaaacagtcgtggtaacacttggtctcgcaaacacaagacactgtcagtgagccaggacgagttctgggctttctcttacgacgaaatggcaaagtacgaccttcctgcatcaataaatttcattttaaacaagacagggcaagaacaggtgtactacgtaggtcactcacagggtaccaccatcggctttatcgcgttttcccagatacccgagctggccaaaagaatcaaaatgtttttcgcgctgggcccagtggccagtgtggccttctgcacatcccctatggcaaagctcggtcggttgtag

SEQ ID NO: 4974 - RNA, 1200 nt, synthetic construct
  misc_feature 1..1200: note = source = /note="Description of Artificial Sequence: Synthetic coding sequence"
  source 1..1200: mol_type = other RNA
atgaagatgcggttcctgggactcgtagtgtgccttgtcctgtggaccctgcactctgaaggctccggcggtaagctgacagccgtcgaccctgagacaaacatgaacgtgtcagaaattatctcatactggggtttcccctccgaagagtaccttgtcgaaacagaagacggatatatactgtgcctgaatagaataccccacggccggaaaaatcacagcgataaaggcccgaaaccagtagtatttctgcagcacggcttgctggcagattctagtaactgggtgaccaatctggctaactcttccctgggcttcattctcgctgatgccgggttcgacgtgtggatggggaatagtaggggtaacacatggtcgcgcaagcacaaaaccttgagcgtaagccaagatgagttctgggcctttagctacgacgaaatggccaaatatgatctgcccgcttccatcaattttatactcaataagactggacaggagcaggtctactacgttggtcactctcagggcacaaccataggatttattgcctttagtcagattcccgaactcgctaagaggatcaaaatgtttttcgccctgggcccggtcgccagtgtcgcattttgtacatctccaatggcaaagttgggcagattgccagaccacctcatcaaagacctgtttggagataaggagtttctcccgcagtccgcgtttctcaaatggctggggacgcacgtgtgtactcatgtcatcctaaaggaattatgtgggaatttgtgttttctactgtgtggattcaatgaacggaacttgaatatgtcccgtgttgacgtgtataccactcattcaccggctgggacatccgttcaaaatatgttgcattggtcgcaggctgtgaagtttcagaaatttcaagcatttgactggggctcgagcgcaaagaactatttccattataatcagagttacccacccacttataatgtcaaagacatgctagttcccacagccgtgtggagtggggggcacgactggctggcggatgtgtatgacgttaacatcctactcacccaaattacaaatctcgtatttcatgaaagcatacctgaatgggaacacctagactttatctggggccttgacgccccttggaggctttacaacaagatcattaatctaatgaggaaataccagtag

SEQ ID NO: 4975 - RNA, 1074 nt, synthetic construct
  misc_feature 1..1074: note = source = /note="Description of Artificial Sequence: Synthetic coding sequence"
  source 1..1074: mol_type = other RNA
atgaaattgcgcacccttgccgtttctgccactgtcgtcaaagacggagtgagcggtgtgtgttcttttcggtgctctgacgtatctggtgttctgccaagcggtccaaagcccgtggtcttcttacagcatggattgctggcagacagcagtaattgggtcaccaatttggcaaattcttctctcggcttcatactagccgacgcaggcttcgacgtatggatgggcaactcgcgtggaaatacgtggtcccgcaaacataaaacgctctcggtctcgcaggacgagttttgggccttttcatatgacgaaatggccaagtacgacttgcccgccagtattaatttcattttaaataagacaggccaggaacaagtatactatgttggccactcccagggtacaacgattggattcatcgcgttctctcagattcctgagttggccaagcgcatcaaaatgtttttcgcactcgggcccgtagccagcgttgcgttctgcacatctcccatggcaaagctgggtcgactccccgatcacctgattaaagacctcttcggagataaagagttcctccctcaatcagcgttcctaaaatggctgggcactcatgtgtgcacccatgtaatcttgaaggaactctgtggcaatctctgctttctgttgtgcggcttcaacgagaggaatcttaatatgtctagagttgacgtttacacaacccatagccccgccggcacctctgtgcaaaacatgctccattggtcccaggccgtgaaattccagaagttccaagcgtttgactggggtagcagcgctaagaactattttcattataaccaatcttacccaccaacgtacaatgttaaggatatgctggtgcctacagccgtttggtctggcggccatgactggttagctgacgtttatgacgtgaacattcttctgactcagatcaccaaccttgtttttcacgagtccatccctgaatgggaacatttagacttcatctggggtctagacgccccttggaggctctacaataagatcattaatctcatgagaaaataccagtag

SEQ ID NO: 4976 - RNA, 1200 nt, synthetic construct
  misc_feature 1..1200: note = source = /note="Description of Artificial Sequence: Synthetic coding sequence"
  source 1..1200: mol_type = other RNA
atgaaaatgcgattcctgggcctggtcgtttgcctggtactgtggacacttcattctgaaggaagcggcggcaagttaactgcagtggacccagaaaccaacatgaacgtctcagaaattatcagttattgggggttcccgagcgaagagtacctggtggagactgaagacggttatattctctgcctgaaccggatcccgcacggccgtaaaaaccattcagataaaggccctaagccagtggtcttcctgcagcacggcttactggcggacagcagcaactgggtgacaaatctggccaattcatctctaggttttatcctggccgatgccggattcgacgtgtggatgggtaattcccgcggaaacacttggtcacgtaaacacaaaactctgtctgtcagccaggacgaattttgggcctttagctatgatgagatggcaaagtacgatttgcccgcttctatcaacttcattcttaataaaacaggacaggaacaggtgtactacgtcggacattcacaaggcaccacgatcggcttcattgcatttagccaaatccctgagctagcaaaaaggatcaaaatgttttttgcactggggccagtagcttcggttgcattttgtacttcccctatggcgaagttaggtaggctgcccgaccacctgattaaagacctctttggcgataaggaattccttcctcagtcagcttttttaaaatggctgggcacccacgtatgcactcatgtgatcctcaaggaactgtgcggtaacctttgtttcctgctatgtgggtttaatgaacgcaaccttaacatgtcgcgagtggatgtctacactactcacagccctgccggcacaagtgttcagaacatgttgcattggagccaggccgtgaagtttcagaagtttcaggcttttgactgggggagctccgcaaagaactacttccactataatcagtcatacccccccacttacaacgtcaaggatatgctggtgccgaccgccgtctggtctggaggccacgattggctggctgacgtctacgatgtaaatattctcctcacacagattacaaatcttgttttccacgagtctattcccgagtgggaacatctggactttatctggggcttagatgctccatggcgactgtataacaaaatcattaatttaatgcgcaaatatcagtag

SEQ ID NO: 4977 - RNA, 1032 nt, synthetic construct
  misc_feature 1..1032: note = source = /note="Description of Artificial Sequence: Synthetic coding sequence"
  source 1..1032: mol_type = other RNA
atggcttgtttggagtttgtgccctttgacgtccagatgtgcctcgagtttctgcccagtgggccaaagcctgttgtgttcctccagcatggccttctcgcagattcctccaactgggttacaaatctcgccaattcatctcttgggttcatactcgcagacgctggattcgatgtgtggatgggcaacagtagaggcaacacatggtcaaggaagcacaagacactttcagtctcccaggacgaattctgggcattttcttacgatgagatggccaagtatgacctccccgcctccatcaatttcattctcaataaaacaggtcaggagcaggtttattatgtgggacacagccagggaacgactataggattcatcgcttttagccaaattcctgagctggccaaaagaattaaaatgtttttcgccctgggaccagtggcaagcgtcgccttttgtacttccccaatggcgaaactcggaaggcttcctgaccatttgattaaggacctgttcggagacaaggagttcctgccccagagcgcatttttgaaatggttgggcacccacgtctgtacgcacgtgattttaaaagagttgtgtgggaatctgtgctttttgctctgtggctttaacgagcggaacctcaacatgtcccgggtggatgtctacactacacattcccccgccggaacctcagtacaaaatatgttgcactggagtcaagccgtcaaatttcagaagttccaagcctttgattgggggtccagcgccaagaattacttccattataaccaatcctatccccctacatacaatgttaaggatatgttagttccaaccgctgtctggtcaggcggccacgattggctggcagacgtgtatgacgtgaacattctcctcacccagattacgaacctggtttttcatgaatccatcccagagtgggaacaccttgacttcatctggggactagatgcaccatggagactgtacaataaaattattaacctgatgcggaaatatcagtag

SEQ ID NO: 4978 - RNA, 1206 nt, synthetic construct
  misc_feature 1..1206: note = source = /note="Description of Artificial Sequence: Synthetic coding sequence"
  source 1..1206: mol_type = other RNA
atggcgtgcttggagttcgttcctttcgatgttcagatgtgtttggaattcctgccatcaggagaatttgtggtcttattgacaagcggcgtgcaacttcaaacttttaccgtctcagtaactgatttaaaagggggcgcttcgggcgtggtccggtcaagccgctgggtgcgcggtttcaccgatttcagatcaaaagctgtggacttatgtggacccaaaccggtcgtttttctgcagcatgggctcctggcagacagcagtaattgggtaaccaatctagccaactcatcactgggcttcattttggccgacgccgggtttgatgtttggatgggtaactccagaggaaacacatggtcaaggaaacataaaaccctttcagtgagtcaggacgaattctgggccttcagagtaccctttctcgactattcctatgatgagatggcaaaatacgatttaccagcaagtataaattttattctgaataagaccggccaggagcaggtgtattatgtggggcacagccagggaacaaccatcggatttatagccttttctcagattccggaactagccaagagaatcaaaatgttcttcgccctgggccctgtcgcctcagtcgccttctgtacttccccaatggccaagttaggcagactgccagatcacttaataaaagatctcttcggcgataaagagttcctaccccaatctgcatttctgaagtggcttgggacacacgtatgcacccatgtgattctaaaggagctatgtgggaatctgtgcttcctcctgtgcggctttaacgaacgtaatctcaatatgtctagggtcgacgtgtacactacacacagcccagctggcactagcgtccagaatatgctccactggtcccaggcagttaagttccagaagttccaagcctttgattgggggtccagcgccaaaaattacttccactataatcaatcttacccacctacatacaatgtcaaagacatgctggtgccaacggcggtctggtccggcgggcatgactggctcgctgatgtctatgacgtaaatatccttcttacacagatcaccaacttagtattccacgagagtatccctgaatgggaacacctggattttatctggggcctggacgctccctggcggctttacaataagattattaatctcatgcggaaataccagtag

SEQ ID NO: 4979 - RNA, 873 nt, synthetic construct
  misc_feature 1..873: note = source = /note="Description of Artificial Sequence: Synthetic coding sequence"
  source 1..873: mol_type = other RNA
atgaagatgcgtttcctcggcctcgtggtctgtttagtcttatggacattgcactcagaaggcagcggcgggaaactgacggcagtggatcctgagactaacatgaatgtgtcggagatcatttcgtactgggggttcccctctgaagagtacttggtggagactgaggacggctacattctgtgtctcaataggattccccatggacgaaagaaccatagtgataaaggaccaaagccagttgtattccttcagcatggccttctcgcagactccagtaattgggtgaccaacctggcgaactcctcccttgggtttattttagcagacgccgggtttgatgtatggatgggcaattcgcgcggaaacacctggagtaggaagcataaaactctgtctgtcagtcaggatgagttttgggcattttcatatgatgaaatggctaaatacgacctgccagccagcataaattttatcctcaataaaacagggcaggaacaggtgtattatgtcgggcactcccaggggaccactatcggatttatcgcattctcacaaattcctgaactggctaaacgcataaaaatgttttttgccttgggacccgtagccagtgtggctttctgcaccagtccaatggccaaattagggcggttgcctgaccatcttataaaggatctgttcggggataaagagttcttaccacaatcagcttttctgaagtggttgggtacacacgtttgcactcacgtaattttgaaagaactctgtggaaatttgtgttttctgctctgcggcttcaacgaacgcaatcttaacatgtctagagtcgacgtgtatactacacattctccggcaggcacgtcagtttag

SEQ ID NO: 4980 - RNA, 1200 nt, synthetic construct
  misc_feature 1..1200: note = source = /note="Description of Artificial Sequence: Synthetic coding sequence"
  source 1..1200: mol_type = other RNA
atgaaaatgcgttttcttggcttggtggtctgcctggtactgtggacgctccactcagaaggttcaggtggaaaactgactgccgtagaccccgagacgaatatgaacgtgtccgaaattatctcttattggggttttccaagtgaagaatatcttgtagaaaccgaagacgggtacattctgtgtttgaaccgcataccccacggacggaagaatcactctgacaagggcccaaaaccggtagtgttcttgcagcatggtctgttggctgatagcagtaactgggttactaatctcgcgaatagttctctcggattcatactcgcagacgccggctttgacgtctggatgggcaattcacgaggcaacacctggtcccgtaaacataagactttaagcgtgtcacaggacgagttctgggctttctcatatgacgaaatggctaagtatgacttgccagcttccatcaatttcatcctcaataagactggccaggagcaggtgtactatgtaggccattcccaaggtactactatcgggttcattgccttttcccagatcccggagctcgcgaaaagaatcaagatgttcttcgctctgggccccgtggcgtcagtggcattttgtactagtccgatggccaagctcgggcggctccctgatcatctgattaaagatctctttggggacaaggagtttcttccccagtccgcatttttaaaatggctcggaactcacgtgtgcactcatgtcatcttgaaggaactctgtggcaacctgtgttttctgttgtgtggctttaacgaacgaaatctgaatatgtcccgagtcgatgtatacacaactcattcaccagccggtacatccgtgcagaatatgctgcactggtctcaagcagtgaagttccagaaatttcaagcttttgactggggctcttcagcaaagaattattttcactataatcaaagctatcctccaacatacaatgtaaaagacatgcttgtgccaacagccgtgtggagtggcggtcacgattggctggccgacgtatacgacgtaaacatcctgcttacacaaattacaaaccttgttttccatgagtctatccccgagtgggagcacctggattttatctggggactcgatgccccatggcggctttataacaaaataataaatttaatgcgcaaataccagtag

SEQ ID NO: 4981 - RNA, 87 nt, synthetic construct
  misc_feature 1..87: note = source = /note="Description of Artificial Sequence: Synthetic coding sequence"
  source 1..87: mol_type = other RNA
ctgtgttttttactctgtggattcaacgagcgaaacttaaacatggctgtgaaattccaaaaattccaggcctttgattgggggtag

SEQ ID NO: 4982 - RNA, 1200 nt, synthetic construct
  misc_feature 1..1200: note = source = /note="Description of Artificial Sequence: Synthetic coding sequence"
  source 1..1200: mol_type = other RNA
atgaaaatgcgcttcttgggcctcgtggtttgtctggtgctctggacactacactccgaaggttctggtgggaaactgaccgccgtcgatccagaaaccaacatgaatgtgagcgaaattatcagctactggggattcccatccgaagaatatcttgtggaaactgaggatgggtacatcctgtgcctcaaccgtatcccgcacggccggaaaaatcactccgataaggggcctaagcccgttgtattcctgcagcacgggctgctagccgatagctccaattgggtcacaaacctcgccaactcctcactgggcttcattctcgccgacgctggatttgatgtgtggatgggcaatagccgaggcaacacctggtcacgcaagcacaaaacactctcagtgtctcaagacgagttttgggccttcagctacgacgagatggccaagtatgacctgcctgcatccattaattttatcttgaataagactgggcaggaacaggtgtattacgtcgggcactcacagggaacaacgatcggatttatcgcattttctcagattcccgagctggctaaacgcattaaaatgttctttgctcttggcccggtcgcctctgttgccttttgtacctctccaatggctaagctgggtcgtctgcccgatcacctgatcaaagacctattcggggataaggagtttctccctcaatctgcgttccttaaatggctcggcactcacgtttgcacccacgtcattctgaaggaactgtgcggcaacttatgttttctattgtgcggatttaacgagcgcaacttgaatatgagcagagtcgacgtatacacaacacactcacctgcaggaaccagcgtgcagaatatgctccactggtcccaagctgtgaagttccaaaaattccaagctttcgattggggaagctctgctaaaaactacttccactataatcaatcatacccgccaacatacaatgtaaaggacatgctcgtgccaacggccgtgtggagcggcgggcacgattggctggcagacgtatacgatgtaaacatactgctcacacagattacaaacctggtctttcatgagtctattcctgagtgggaacatctcgactttatctgggggctggatgcaccttggcgcctctacaacaagataattaacctcatgagaaaatatcaatag

SEQ ID NO: 4983 - RNA, 411 nt, synthetic construct
  misc_feature 1..411: note = source = /note="Description of Artificial Sequence: Synthetic coding sequence"
  source 1..411: mol_type = other RNA
atgaagatgcgcttcctgggactggttgtttgtttggtgctgtggaccttgcacagtgagggcagtggaggtaagcttaccgccgtggatccagaaaccaacatgaatgtttctgaaattatttcctattggggatttccgtccgaggagtatttagtcgagactgaagacggttacatcctgtgcctgaacagaatacctcatggccgaaagaaccactcggacaagggccctaagcctgtcgtcttccttcaacatggactcttagctgactcatcaaattgggttactaacctcgccaactcatctctgggattcattcttgcggacgccgggtttgacgtgtggatgggcaactctcgggggaatacttggtcacgcaagcatgtgactctggagccaggctgctag

SEQ ID NO: 4984 - RNA, 1428 nt, synthetic construct
  misc_feature 1..1428: note = source = /note="Description of Artificial Sequence: Synthetic coding sequence"
  source 1..1428: mol_type = other RNA
atggagtccaaggcactgctagtgctgacactagccgtctggttgcagagcctaaccgcaagcagaggaggggtcgcagctgcagaccaacgacgggattttattgatatcgaatccaaattcgcccttaggacaccagaagatacagccgaggacacatgtcacttgatccctggggttgccgagtccgttgccacttgccacttcaatcacagtagcaaaacctttatggtcatacacggctggacagttactggaatgtacgaaagttgggttccaaagctggttgcggccttatataaaagagaaccagattcaaacgtcatcgtcgttgactggctgtcaagagctcaggagcattatcccgtttccgcagggtacactaagttagtgggtcaggatgtggctcgcttcatcaactggatggaagaagagtttaattacccattagataacgtgcaccttttgggctattccctgggtgcccacgctgctggcattgctggctccctcacaaacaagaaagtgaatagaatcaccggcctggacccagcagggccgaactttgaatatgccgaagcgcccagtagactctctccggacgatgcggatttcgtcgacgtcctgcatacctttacacgaggatcccctggtcgatcgataggcatacagaagccggttggtcacgtggacatctatcccaatggggggacgttccagcccgggtgtaacattggagaagccatcagagttatcgccgagcggggccttggggacgtggatcagctcgtgaaatgcagtcacgaacgttccatacacctgtttatcgatagtctactgaacgaagaaaatcccagcaaggcctaccggtgcagcagtaaagaagcttttgaaaaaggcttatgtctgagctgccgaaaaaatcggtgcaataatttggggtacgaaataaacaaagttcgcgctaagagaagctccaagatgtacctgaagactagatcccagatgccttacaaggtattccattaccaagtgaagatccatttttccggaacagaaagcgaaacccacaccaaccaggcctttgagattagcctgtatggcaccgtagctgaatccgagaacatcccctttacgctgcccgaagtaagtactaataaaacctacagctttctgatttatacagaagtggatattggcgaactgctgatgctgaagctgaagtggaagtcagacagctacttttcgtggagcgactggtggtcttcccccggatttgcaatacagaaaatcagggtgaaagccggagagacacagaaaaaggtgatcttctgtagcagagaaaaggtaagtcatctgcagaagggtaaggctccagcggtgtttgtcaagtgccatgacaaatccctgaataaaaagtccggctag

SEQ ID NO: 4985 - RNA, 348 nt, synthetic construct
  misc_feature 1..348: note = source = /note="Description of Artificial Sequence: Synthetic coding sequence"
  source 1..348: mol_type = other RNA
atggttatccatggctggactgtgactggcatgtacgaaagttgggttccaaaactggtggccgccctttacaaacgcgagccggattctaatgtgattgtcgtcgattggctttctcgcgcacaggagcattaccccgtgtcggcaggatatactaaattggttggtcaggatgtggcaagatttattaactggatggaggaggaattcaactacccccttgataacgtgcacctgttagggtatagtctgggtgcccacgccgccggtatcgctggctcactcacaaataagaaggtcaatcgaatcaccggccttgaccctgccgggcccaattttgagtattag

SEQ ID NO: 4986 - RNA, 321 nt, synthetic construct
  misc_feature 1..321: note = source = /note="Description of Artificial Sequence: Synthetic coding sequence"
  source 1..321: mol_type = other RNA
atggaatcgaaagctttactggtcctgacgctggccgtctggcttcaaagtttaaccgcctccaggggaggcgttgccgccgcagatcagaggcgtgattttattgacatcgagtctaaatttgcattacgcacaccagaggatactgccgaagatacctgtcacttaatccccggcgtagccgagagcgtggccacttgccatttcaaccatagttcaaaaacctttatggtcattcacggctggaccgtcaccggtatgtacgaatcttgggtgcctaaactggtcgctgcactgtacaagcgggaaccagattcttag

SEQ ID NO: 4987 - RNA, 393 nt, synthetic construct
  misc_feature 1..393: note = source = /note="Description of Artificial Sequence: Synthetic coding sequence"
  source 1..393: mol_type = other RNA
atggaaagtaaagcactactggtcctcaccttagctgtatggctgcagtctttgacagcgagccgcgggggggtggcagctgcagaccaacgccgggatttcattgacatagaaagcaaatttgccttacgcaccccagaagacacagctgaagatacttgccatctcatccccggcgtagctgaaagcgtggctacctgtcactttaaccacagttccaagaccttcatggtgatccacggctggactgtcacaggaatgtacgagtcatgggtgccgaagctggtggcggccttgtataaacgcgagcctgacagtaatgtcatagtggtggactggctgagccgagcccaagagcactaccccgtgagtgctggatatacaaaactgtag

SEQ ID NO: 4988 - RNA, 1386 nt, synthetic construct
  misc_feature 1..1386: note = source = /note="Description of Artificial Sequence: Synthetic coding sequence"
  source 1..1386: mol_type = other RNA
atggaaagtaaggcactactcgttttgacactagccgccgctgatcagcgcagagactttatcgatatcgaatctaaattcgctttgcgcacccccgaagacactgctgaagatacatgccaccttatccctggggtggctgaatccgtcgccacttgccatttcaaccattcaagcaagactttcatggtgatccacggatggacggtcacaggcatgtacgaatcctgggtgcccaagctcgtcgctgccctgtacaagagagaaccagactccaatgtcattgttgtcgactggctgagcagggctcaggaacattatcccgtgtctgctggatacacaaagctggtcgggcaagacgtagccagatttatcaactggatggaggaggaatttaactacccgctggacaacgtacatctgcttggttattccttaggggcccacgccgccgggattgcagggtctctgacgaacaaaaaggtcaatcggattaccgggctcgatccagccggtccaaatttcgaatacgctgaagcgccttcaagactgtccccagatgatgcagatttcgtggatgtcctacacacgtttactagaggatcaccaggacgcagtatcggaatccaaaaacccgtcggacacgtggatatctatcccaatggaggaactttccaaccgggatgtaatattggtgaggccatcagggtgattgccgaacgtggtttgggagacgttgatcaactggtgaagtgtagccacgaaaggagtattcatctgtttattgactcacttctgaatgaggagaacccctcaaaagcttacaggtgttcatcaaaggaggcatttgagaaaggcctttgtctgtcgtgcaggaagaatcgatgtaataatctcggatacgaaattaacaaggttagggcgaagcggagtagtaagatgtatttaaagacccgtagtcagatgccctacaaggtcttccactatcaagtgaaaatccacttttcgggcaccgaatccgaaacacacaccaaccaggccttcgagatttctttatatgggaccgtggccgaaagtgagaatatacctttcacattacccgaggtgtctacaaacaagacgtattccttcttaatttacacagaagttgacataggcgagctgctaatgctgaagctaaagtggaagagcgattcgtatttcagttggtcagactggtggtccagcccaggatttgcaatccagaaaattcgcgtcaaagccggtgagacacaaaaaaaagttatattctgttctagggaaaaagtgagccatcttcagaaaggtaaggccccagccgtctttgttaagtgccacgacaagtccctaaataaaaagtcaggctag

SEQ ID NO: 4989 - RNA, 828 nt, synthetic construct
  misc_feature 1..828: note = source = /note="Description of Artificial Sequence: Synthetic coding sequence"
  source 1..828: mol_type = other RNA
atggtgatccacgggtggactgtcactggaatgtacgagtcctgggtgccaaagttagttgcagcgctttataagagagaacctgatagcaacgttattgtggtcgactggctgtcccgcgcccaagagcactacccagtgtctgcgggttatactaagctggtagggcaggatgtggcacggtttataaattggatggaggaagagtttaattatcccctcgacaatgtgcatctgctcggctatagcttgggagcgcacgcagcagggatcgcgggaagtctaaccaataagaaggtgaatcgcattacagggcttgatcctgccggcccaaactttgaatatgctgaagccccctcacggctgagccctgacgacgcagattttgtcgatgtcctgcacactttcacacgcggctctcctggcagatctatcggcattcaaaaacccgtgggccatgtagatatttatcccaatggaggcacatttcaacctggatgcaacataggagaggcaataagggtaattgccgaaaggggcctgggcgacgttgatcagcttgtgaaatgctcacacgagcgtagcatccacttgttcatcgacagcctgttgaatgaggagaaccccagcaaagcctacaggtgctcaagtaaggaggcttttgaaaaaggtctttgtcttagctgccgaaaaaaccgatgcaacaatctgggctatgaaatcaataaagtaagggccaagcggtcctcaaaaatgtacgaagactctttttcggatgcactgcagagcctgccgttgccatcaaaagacagttttttctgggactag

SEQ ID NO: 4990 - RNA, 540 nt, synthetic construct
  misc_feature 1..540: note = source = /note="Description of Artificial Sequence: Synthetic coding sequence"
  source 1..540: mol_type = other RNA
atgggcagacctggacttggcgccgctgtgagtgacctgggcgaggctgtgtcactgtctcaaggcctgctgttgctgctgctgctaagcatggggggggcctgggcttctcgcgagccgcttcgaccgtggtgccaccccataaacgccattttagccgtggaaaaagaaggatgtcccgtatgcatcacggtgaacacaaccatttgtgcaggctactgtcctaccatgatgcgcgttctgcaggctgtgctgccccccttgcctcaggtagtgtgcacctacagggatgtaaggttcgagtccatcaggctgcctggctgtcccagaggagtggacccagttgtctctttccccgtagccctgagttgtcgttgcggtccctgcagaaggtctacgagcgactgtggtggcccgaaagatcaccctttgacatgcgatcacccacagcaggcatcatctagctcaaaagatcctcccagaagtttgccatccccgtccaggctccttgagcccgacacgccaattcttccacaatag

SEQ ID NO: 4991 - RNA, 2253 nt, synthetic construct
  misc_feature 1..2253: note = source = /note="Description of Artificial Sequence: Synthetic coding sequence"
  source 1..2253: mol_type = other RNA
atgctcagagccaagaaccagctattcctgctgtctcctcactacctgcgtcaggttaaagaatcatctggttcacgtcttatccagcaaaggctgctgcatcaacaacaacccctccatccggaatgggcagcgctggccaaaaagcaattaaaagggaaaaacccggaggatctcatttggcacacccccgagggaatttctatcaaacccctgtattccaagcgcgacacaatggatcttcctgaagaacttcccggcgtcaaaccgttcacacgagggccatatcccacgatgtatacattcagaccatggacaatccggcagtacgccggctttagcacagtagaggaaagcaacaagttttacaaagacaatattaaagcagggcagcaaggcctttccgtcgcctttgacctggctactcaccggggatatgattccgacaatcctcgcgtacgcggggacgtggggatggccggcgttgcaattgataccgtcgaagacactaagattctattcgatggaatcccacttgagaagatgagcgtctctatgactatgaatggcgctgtgatccccgtgttagccaactttattgtgacaggagaagagcagggcgtgccaaaggagaaactaaccggaaccattcagaacgacattctaaaggagttcatggtgcgaaacacatacatcttccccccggagccctcaatgaagataattgctgacatcttcgagtataccgccaagcatatgcccaagttcaattcaattagcatctccggctatcatatgcaggaagccggggccgatgctattctcgagcttgcctacactttggccgacggtctggagtactcccggacaggactacaggctgggttaacaattgatgagttcgctccgagattgtcctttttctggggtatcggcatgaacttttatatggaaattgcaaagatgagagcgggacggaggctgtgggcccaccttattgaaaagatgttccagcctaagaactctaaatccctgctgttgagagcgcattgccagacatccggatggagtctaaccgagcaggatccctataacaatatcgttcgaactgcgattgaggctatggcagcagtgttcggggggactcagtccttacatacaaattccttcgacgaagccctcggtttgccgaccgtcaaaagcgctcggattgcccggaacactcagatcatcatccaggaagagtccggaattcccaaagtggctgacccctggggtggttcctacatgatggagtgcctgacgaacgatgtgtatgatgcagcactgaagctgatcaatgagatagaggaaatggggggtatggccaaggcagttgcagaaggcattcctaaactcagaattgaagagtgtgcagcacgccggcaagcccgcattgactcagggtcagaagtaatcgtcggcgtgaataagtaccaactggaaaaggaagatgctgtagaagtactggcaatcgataatactagcgtgcgcaaccggcaaatcgaaaagttaaaaaagattaagtcctcgagggaccaggccttggctgaaagatgtttggctgccctcacggagtgcgccgcttcaggcgatggcaatatactggctttagcggttgatgcaagcagagcaaggtgtaccgtgggggagattactgatgcgctgaagaaagtatttggagaacataaagctaatgatagaatggtaagtggtgcctatagacaggaattcggcgaatcgaaggaaatcacatcagcgataaagagggtccacaaattcatggagagagaaggacgtaggccgcgcctgctggtggcaaaaatgggacaagacggccacgacaggggcgctaaagtcatcgcaaccgggtttgcagacctgggatttgacgtagacattggtcccctgtttcagacacccagagaggtcgctcagcaagccgtggacgcagatgttcacgcggttggcatctccacactggctgccggtcacaagacactagtccctgagctcataaaagaactgaactccttgggacgaccagatatcctggtgatgtgtggcggtgtgatccctcctcaggattacgaatttctgtttgaggttggcgtgtcaaatgtgtttgggcccgggaccaggattcctaaggccgcagtgcaggtgcttgacgacatcgaaaaatgcttggagaagaaacagcagtcggtgtag

SEQ ID NO: 4992 - RNA, 594 nt, synthetic construct
  misc_feature 1..594: note = source = /note="Description of Artificial Sequence: Synthetic coding sequence"
  source 1..594: mol_type = other RNA
accagatacctggcccgctgtacagtgggagagatcactgacgccctcaaaaaggtgttcggtgaacacaaagctaatgacagaatggtgagcggcgcctatagacaggagtttggcgaatctaaagaaataacgtcagctatcaaaagggttcacaaatttatggagagagagggtaggagaccccggttgctagttgccaagatgggacaggacggccacgacagaggtgccaaggttatcgccacaggattcgcggatttgggatttgacgtggacattggacccctctttcaaacgcctagagaagtggcccagcaagcagttgacgcggatgtccatgcagtcggtatttctacattggcagccggacataaaaccctggttccagagcttataaaagaactgaactcattagggcgtccggacatattggttatgtgtggcggcgtcatcccgccgcaggactacgagttcctgttcgaggtcggggtcagtaatgtgtttggtcctggcacccgcatacccaaggcagcagtgcaggttctagatgatatagagaagtgtttagaaaagaaacagcaaagcgtctag

SEQ ID NO: 4993 - RNA, 405 nt, synthetic construct
  misc_feature 1..405: note = source = /note="Description of Artificial Sequence: Synthetic coding sequence"
  source 1..405: mol_type = other RNA
atggacccacagacagctccatcacgagccctactgctcttattgttccttcatctggcctttcttggaggacgctcgcatccccttggtagtccaggatccgcatctgaccttgaaacatccggcctgcaggagcagaggaatcatttacaaggtaagctgagtgagctgcaagtcgagcagacgagtttagagcctttacaggaatctcctcgtccgaccggggtgtggaaatccagagaggtagctacagaagggattcggggacaccggaaaatggtactgtacaccctgagagccccacgctcacctaaaatggtccaaggtagcggttgttttggtcgaaagatggatcggatctcaagttcttcaggcctggggtgcaaagtgttgcgtcgccactag

SEQ ID NO: 4994 - RNA, 726 nt, synthetic construct
  misc_feature 1..726: note = source = /note="Description of Artificial Sequence: Synthetic coding sequence"
  source 1..726: mol_type = other RNA
atgtccatgctcttctacacacttatcactgcattcctgattgggattcaggccgagcctcactccgaaagcaacgtacctgccgggcatacaatacctcaagcacattggaccaagcttcagcattccctcgatacagcacttcggagagcccggtcagccccagcagctgccatagccgctcgcgtggcgggccagacgcgcaacattacggtggaccctagactgttcaagaaaaggcgactacggagtccaagggtccttttctctactcagccacccagggaggcagccgacactcaggatctggatttcgaggttggcggggcagcaccttttaatagaacgcataggtctaagagatcatcaagccatcctattttccatagaggcgaattttcagtgtgtgatagtgtcagcgtgtgggtaggtgataagacgacagccacagatattaagggaaaggaggttatggttctcggtgaggtcaacattaacaattctgtcttcaaacaatactttttcgaaacaaagtgcagggaccccaacccagtggacagcgggtgccgaggaatcgactctaaacattggaactcctactgcactactacacatacattcgtcaaagcgctcaccatggacgggaaacaggccgcttggcgcttcattcgcatcgacacagcctgtgtttgtgtcctgagtcggaaagccgtgcggagagcgtag

SEQ ID NO: 4995 - RNA, 1065 nt, synthetic construct
  misc_feature 1..1065: note = source = /note="Description of Artificial Sequence: Synthetic coding sequence"
  source 1..1065: mol_type = other RNA
atgttgtttaacctacgcatactcctcaacaacgcagcttttagaaacggccacaactttatggtgcgcaactttcggtgtggccaacctttgcagaataaggtgcagctgaaagggcgggatctgctgactttaaaaaatttcactggggaggaaatcaagtacatgctctggctctctgcagatttaaagttcaggattaagcagaaaggagagtacctgccactccttcaggggaagtcattaggcatgatctttgagaagcggagcacgcgcactcgactgtcaacggaaaccggattcgctctgctgggaggccacccttgtttcctcacaacccaagacattcatctcggcgtcaatgagtcgctcactgataccgcccgggtcctatcatctatggctgatgctgtgctggcccgcgtgtacaagcaaagtgatctcgacaccctcgccaaggaggcctcaattcctatcataaacggactttctgacctatatcatccaatccagatcctggcggactacctgactctgcaggaacactactcctctctgaagggattgacattaagctggatcggagatggcaacaacatcttacatagcattatgatgtctgctgcaaagttcggcatgcatctgcaggctgctacccccaaaggctatgagcccgacgcatctgtaacaaaactcgcagagcagtatgcaaaggaaaacggtacgaaattgctgctaaccaatgaccccttggaagccgcccacggggggaatgtgctcatcacagatacatggattagcatgggacaggaggaggagaagaaaaaaaggttacaggcattccagggataccaagtgacaatgaagaccgccaaagtagcagcaagcgattggaccttcctgcactgcctcccccgtaagcccgaggaagtggacgatgaagtattttatagtccacgtagtctggtgttccctgaggctgagaacaggaaatggactatcatggctgtcatggtgagtttacttaccgattactctcctcagttgcaaaaacccaagttttag

SEQ ID NO: 4996 - RNA, 348 nt, synthetic construct
  misc_feature 1..348: note = source = /note="Description of Artificial Sequence: Synthetic coding sequence"
  source 1..348: mol_type = other RNA
atgatccccgccaaagacatggccaaggtcatgatcgtgatgcttgcaatatgttttctaaccaagtccgacgggaagtccgtgaaaaaaaggtctgttagcgaaatccagcttatgcacaatctcgggaagcacttgaatagcatggagagagttgaatggttgaggaagaagctccaggacgtgcataattttgtagctctcggcgcccctctcgccccacgggacgctggcagccaacgccccagaaaaaaagaggataacgttcttgtggagagtcatgaaaagagcctcggggaagcagacaaagctgacgtcaacgtcttaacaaaagccaagagccagtag

SEQ ID NO: 4997 - RNA, 348 nt, synthetic construct
  misc_feature 1..348: note = source = /note="Description of Artificial Sequence: Synthetic coding sequence"
  source 1..348: mol_type = other RNA
atgattcccgcgaaggatatggccaaggtaatgatcgtgatgctggcaatttgtttcctcaccaagtctgatgggaagagtgtaaagaaacggtctgtttctgagattcagctgatgcataatctgggcaaacacctgaattctatggaacgcgttgaatggcttcggaagaaactccaagatgtccacaatttcgttgcgttaggcgcacccttagctcctcgagatgctggaagccagaggccacggaagaaagaagataacgtgctggtggagtctcatgagaaatcactgggcgaagcggataaggcagatgtaaatgtgttgaccaaagccaagagtcaatag

SEQ ID NO: 4998 - RNA, 354 nt, synthetic construct
  misc_feature 1..354: note = source = /note="Description of Artificial Sequence: Synthetic coding sequence"
  source 1..354: mol_type = other RNA
atgtcaacagccgtgttagagaatcccggccttggacggaagttatccgactttggacaggaaaccagttatattgaagataattgtaatcagaacggagcaatctcactcattttcagtctcaaggaggaagttggcgcactagcaaaggtgttgcgcttattcgaggagaacgatgtgaacctcacacatattgagtccaggccttcgcgcctcaaaaaagacgaatatgagttttttacgcacctggataaacgcagcctcccagccctaactaatattatcaaaatcctcagacatgacattggagccacagtccacgaattgtctcgagataagaaaaaagatacttag

SEQ ID NO: 4999 - RNA, 411 nt, synthetic construct
  misc_feature 1..411: note = source = /note="Description of Artificial Sequence: Synthetic coding sequence"
  source 1..411: mol_type = other RNA
atgtccacagccgtgctcgaaaaccctgggttaggtaggaaattgtctgatttcggccaagagacgagctacatcgaagacaactgcaatcagaacggggcaattagtctgatcttctctctaaaagaggaggtgggggccttagcgaaagtactgagactgtttgaagaaaacgacgttaatttgacacatattgaatctagaccctccaggcttaagaaagacgagtatgagttcttcacacacttggataagcgatctctcccagccttgactaatatcatcaaaattctgagacatgacataggcgctaccgtccacgagctctcacgggataaaaagaaggatactgtcccttggtttcctcgcactatacaggagctagatcgttttgccaaccaaatcctctag

SEQ ID NO: 5000 - RNA, 1359 nt, synthetic construct
  misc_feature 1..1359: note = source = /note="Description of Artificial Sequence: Synthetic coding sequence"
  source 1..1359: mol_type = other RNA
atgtccactgcagtcctcgaaaatccaggacttgggcggaagctgtctgatttcggacaagagacttcctatattgaggataattgtaaccagaacggggccatcagcttgatattctcattaaaggaagaggtcggtgccttggctaaagtattacgattgttcgaggagaatgacgtgaaccttactcatattgaatccagacccagccgactgaagaaggatgagtacgaattcttcacacacctcgacaaaaggagcctccccgccctgaccaacatcatcaaaattctccgccatgacatcggcgctaccgtccatgagctgagtcgcgacaagaaaaaggacaccgtgccctggttcccgcgcactattcaagagttagataggtttgccaaccaaatcttatcctacggagccgaactggatgcagatcatccaggttttaaagatccggtttatagagccaggagaaagcaatttgctgatatcgcatacaattatagacacggtcagcctattccacgggtggagtacatggaagaagagaaaaagacctgggggactgtgtttaagactctaaaaagcttatataagactcacgcatgttatgaatataaccatatcttcccactgttggagaagtactgtggttttcacgaagataatattccacagctcgaggatgtgtctcaatttctccagacctgcacaggctttcgcctccgcccagttgccgggctgctctcttccagggacttcctgggaggactcgcatttagagtgtttcattgcacacaatatatacgccatggatcaaaaccaatgtacactccagagcctgacatttgccatgagctgcttgggcacgtgccactgttctctgatcggtcattcgcacagtttagccaggagattgggttggccagtctgggagcccctgacgaatatatcgagaaacttgctacaatctattggtttacagtcgaattcggcctctgtaaacagggagacagcataaaagcctatggagccgggctgctcagttcgttcggggagctacagtattgcttatctgaaaagccaaagctcttgccccttgagcttgagaaaaccgccatccaaaattataccgtgactgagtttcaacccttatattacgttgctgagagctttaacgatgccaaggaaaaggtgagaaattttgcagccacaattccccggccattttccgtcaggtatgacccttacactcaacggattgaagtgctggacaacacacagcaattgaagatcctggcagattccatcaattccgagataggaattctatgctctgccttgcagaagatcaaatag

SEQ ID NO: 5001 - RNA, 882 nt, synthetic construct
  misc_feature 1..882: note = source = /note="Description of Artificial Sequence: Synthetic coding sequence"
  source 1..882: mol_type = other RNA
atggacgctatgaaacgtggtctctgttgtgtcttgctgctgtgcggggccgtcttcgtcagcccttctcaggaaatacatgccaggttccgccgcggagcgcggtcttatcaggtaatctgccgcgacgagaagactcagatgatttaccagcagcatcaatcgtggctcagacccgtccttcggagcaaccgcgtagaatattgttggtgcaatagcggccgggcacaatgtcattctgttcccgtgaaatcatgtagcgagccgagatgcttcaacggcggcacatgtcagcaggccctctatttctcggactttgtttgccaatgtcccgagggcttcgccggcaagtgttgtgagatcgacacgagagcgacatgctatgaggaccagggaatctcatatagagggacgtggtcaactgcagaatcaggcgctgaatgcacaaactggaactcctcagcactcgcccaaaaaccctattcagggaggaggccagacgctatcagactcggactggggaaccataactattgccgtaatccagatcgcgactcaaagccctggtgttacgtgttcaaggcagggaagtacagcagcgagttttgcagtacccccgcttgcagtgagggaaatagtgattgttactttgggaatggttctgcatacaggggtacccatagccttactgaatccggagcctcatgtctaccttggaattccatgatcctgataggaaaagtttataccgctcaaaacccctccgcacaggcactgggcttaggcaaacacaactactgtcggtgtagaacaggtcgaagcgtctcctcgccggcaaccgcttcaatgcgcccctgcctgctctccattagatctggctag

SEQ ID NO: 5002 - RNA, 1551 nt, synthetic construct
  misc_feature 1..1551: note = source = /note="Description of Artificial Sequence: Synthetic coding sequence"
  source 1..1551: mol_type = other RNA
atggatgccatgaaacgcggtctatgttgtgtccttctgctctgcggcgcagtttttgtgtccccttcacaggagattcacgcgaggttccgcagaggcgccaggagctaccagggatgctccgagcctaggtgtttcaacggggggacctgccaacaagccctgtacttctccgatttcgtatgtcagtgccccgaaggcttcgctggcaaatgttgtgaaatcgacactcgagcgacttgttatgaggaccaaggaatcagttatcgaggaacttggagtaccgccgaatcaggagctgaatgcactaactggaactcctctgctctggcccagaaaccatatagtggacggcgcccagacgccattcgtcttggacttgggaaccataattactgccgcaaccctgatagagacagtaaaccatggtgttacgtgtttaaagccggaaagtatagcagtgaattctgctctactcccgcttgcagcgaagggaattcagactgctactttgggaatgggtcagcctacagggggacccacagcctgacagagtccggcgccagttgtttgccgtggaacagcatgattctaattggcaaagtctataccgcgcagaacccctctgcacaggctctgggcctgggaaaacacaattattgcagaaatccggacggtgacgcgaagccttggtgccatgtacttaagaacagacgcctgacctgggaatactgcgacgttcctagttgttccacatgtggcctgagacagtactctcaaccccagtttcgaatcaaaggaggtttgtttgcagacatagcctctcatccctggcaggccgctatctttgccaagcatcgaaggagccccggagagcgtttcttgtgtggaggtattctcatcagttcctgctggattctgtctgctgcacactgtttccaggagaggtttcccccgcaccatctgacggtgattctggggagaacataccgagtagttcccggggaagaagaacaaaaattcgaagttgagaaatacatcgtccacaaagagttcgatgacgacacctacgacaatgacatagccctgctccagctgaaaagcgattcctcccgatgcgcccaggagtcctctgtggtccggaccgtctgtctcccaccggcggatctccaactaccagattggacagagtgcgagctcagcggctatgggaagcacgaagccttatctccattctactcagagaggttgaaagaagcccacgttagactctaccccagcagtcggtgtacatcccagcacctcctcaaccggaccgtgaccgataacatgctatgcgcaggagacactaggtccgggggcccccaggccaatttgcacgatgcctgccagggggattccggtggtcccctggtgtgtctgaacgacggacgtatgacactagttggcatcattagctgggggcttggttgcgggcagaaagatgttccaggtgtatacaccaaggtgaccaactacctggactggattcgagacaacatgcggccatag

SEQ ID NO: 5003 - RNA, 1689 nt, synthetic construct
  misc_feature 1..1689: note = source = /note="Description of Artificial Sequence: Synthetic coding sequence"
  source 1..1689: mol_type = other RNA
atggatgctatgaaaagaggactgtgctgcgttctgctgctatgtggggcagtcttcgtttcaccttcacaggagatacatgcacgcttcaggaggggagctcgcagttaccaagtcatatgtagagacgagaagactcagatgatataccagcagcaccaatcctggctaagaccagtccttcggagcaacagagtggaatattgttggtgcaattctggccgggcccagtgtcactccgtccccgtcaaatcttgcagcgagcccagatgctttaatggcggtacatgtcaacaggccctgtatttttccgattttgtttgccaatgcccagaaggcttcgcaggcaagtgctgtgagatcgacacacgtgcaacatgttacgaggaccaaggcatcagttatcgtggaacatggagcacagctgaatctggtgccgaatgtaccaattggaactctagtgctctggctcagaaaccctacagcgggcgcaggcctgatgctattcggcttggcttaggaaatcacaattactgccggaaccctgatcgagactcaaagccttggtgctacgttttcaaggcaggtaagtattccagcgagttttgctcaactcccgcttgctccgagggcaactctgattgctatttcggaaacgggtccgcatataggggcacccactctttgaccgagtccggcgccagctgcctcccctggaatagcatgatactcattgggaaggtatacaccgcccagaaccctagcgcgcaggcccttggtctggggaaacacaattattgtcgaaatcctgacggagacgcaaaaccctggtgccacgtgctgaagaaccgtaggcttacatgggaatattgtgacgttccaagttgctctacatgcggtttgagacaatattcacagcctcagttcagaatcaaaggggggctattcgcagatatcgctagccacccatggcaggctgcaatctttgccaaacatcgcagatctcctggcgaacgctttctttgcggtggcatcctgatctctagttgctggatcttgagcgcagcccattgtttccaggaacggttccccccccaccatctgactgtgatcctgggacgcacctatagagtcgttcccggcgaggaggagcagaaattcgaagtagagaaatacatcgtgcataaggagttcgatgacgacacatatgacaatgatatcgcactgctgcagctaaagagtgattccagcaggtgtgcccaagaaagttcagtagttagaacggtatgtcttcctccagccgacctgcaattaccagactggaccgaatgcgaactttcaggatacggtaaacacgaagctctgtcgcccttctactcagaaaggctgaaagaagcccacgtccgcctttacccttctagtagatgcacaagccaacatctgctgaaccgcacggtgaccgataatatgctgtgcgcaggcgatacaagatccggtgggccccaggccaatctgcatgatgcttgccagggagactcaggaggacctctggtgtgtctgaacgacggacgcatgacactggtgggaatcatttcatgggggctggggtgtggacagaaggatgtgcccggagtgtatacgaaggttacaaactatctcgattggatcagagacaatatgcggccttag

SEQ ID NO: 5004 - RNA, 1311 nt, synthetic construct
  misc_feature 1..1311: note = source = /note="Description of Artificial Sequence: Synthetic coding sequence"
  source 1..1311: mol_type = other RNA
atggacgcaatgaagcgaggtttgtgctgtgttttattactatgcggcgccgtttttgttagccctagtcaagaaatccatgccagatttcgcagaggagcgaggagctaccaagtgatttgtcgggacgagaagacccagatgatttatcagcagcatcagtcctggctcaggcccgtcctgcgaagcaatagagtggagtactgctggtgcaattcaggacgcgctcagtgtcactctgtgcctgtgaaacgcaactctgattgctactttggaaacggtagcgcatatagaggtacccatagcttaactgaaagcggcgccagctgcttaccctggaatagcatgatcctgataggtaaagtgtacacggcgcagaacccatcagcccaggccctgggcttgggcaaacacaattactgcaggaaccctgacggcgacgcgaaaccatggtgccatgttctgaagaatcggaggctcacctgggagtattgtgatgttccatcatgctccacatgcggattacgccaatactcacagccccagtttagaattaaaggaggcctgttcgcagacatcgcaagccacccctggcaggcggccatttttgcaaagcaccgacgtagccctggcgagagattcctctgcggcggtatcctcatctcttcatgctggatcctctcagctgcacactgtttccaagagaggttcccgccacaccacctgacagttattctgggacgaacctatcgcgtcgtccctggggaagaggaacagaaatttgaggttgagaaatacatcgttcacaaagaatttgacgatgatacatacgacaacgatattgccctgctgcagctgaagtccgatagctcacgatgcgcccaagaatccagtgtagtcagaaccgtctgcctccctcccgccgatctgcaattgcccgactggaccgagtgcgaactcagtggctacggcaaacacgaggccttgagccccttctattctgaaagactaaaagaggctcacgtgcgcttgtatcccagttccagatgtactagccagcacttgctgaaccgtaccgtcacagataatatgctgtgtgctggagatacacgctcaggcggtcctcaagccaatttgcatgatgcttgccaaggagatagtggcgggcccctagtatgtcttaacgatggaaggatgactctagttggcattatcagctggggtctcggctgtggccagaaagacgtcccaggtgtgtacacaaaggtcacgaactatctggattggattcgtgataatatgcggccttag

SEQ ID NO: 5005 - RNA, 1500 nt, synthetic construct
  misc_feature 1..1500: note = source = /note="Description of Artificial Sequence: Synthetic coding sequence"
  source 1..1500: mol_type = other RNA
atggacgcaatgaagcgtggcctctgctgcgttctgctcctgtgcggcgctgttttcgttagcccatcgcaggagatccatgctcgctttcgcagaggcgccaggtcctaccaagtgatttgtcgagatgagaaaacgcagatgatctaccagcaacatcagagttggttgaggcccgtcctacgcagcaatagagtcgaatactgctggtgtaattcagggagagcccaatgccactctgtgccagtaaagtcgtgttctgagccaaggtgttttaacggtggtacatgccagcaggctctgtatttttccgactttgtatgccaatgtccggaagggtttgccggaaaatgctgcgagatcgactcaaagccatggtgttacgtattcaaagctgggaaatattcaagcgagttctgctctactcccgcttgttcggagggtaactccgattgttattttggcaatggaagcgcatatagagggacacattctctgaccgagagcggcgcgtcttgtttgccgtggaattcaatgatcctgattggcaaggtgtacacagcacaaaacccgagcgcccaggccctcggattaggcaagcacaactactgtaggaacccagacggggacgcaaaaccttggtgtcacgtgctcaaaaaccgcagattgacatgggagtactgcgatgtgccaagttgttcaacatgcggactgaggcagtactcacagccgcagtttagaatcaaaggcggactatttgcagatattgcctcccatccttggcaggcggcaatcttcgctaagcatcgacgcagccctggtgagcggtttctgtgtggtggcattctaatcagctcttgttggatactctctgcagcccattgtttccaggaacgttttcccccccatcatctgacggtcattctgggaagaacgtatcgggtcgtccccggcgaagaagagcaaaagttcgaggtggaaaaatacattgttcacaaggagttcgatgacgacacttatgacaacgatatcgctcttcttcagttaaaaagtgactctagtagatgcgctcaggagagcagcgttgtcagaaccgtttgcctgcccccagccgacctacaactacccgattggaccgagtgcgaactttcagggtatggcaagcatgaggctctgagtccattttactctgagaggttgaaagaagcccatgttagactctatcccagttcacggtgtacttcacagcatctgcttaataggacagtgacagacaatatgctctgtgccggagacacccggtcaggtggaccccaagccaacttgcacgatgcctgtcagggagattctggcggacccctcgtgtgcctgaatgatggtaggatgaccctggtcggtattatctcctggggcctcggatgcggccaaaaagacgtgccaggtgtctatacaaaagtaacaaattatctggattggatccgggataatatgcgcccttag

SEQ ID NO: 5006 - RNA, 537 nt, synthetic construct
  misc_feature 1..537: note = source = /note="Description of Artificial Sequence: Synthetic coding sequence"
  source 1..537: mol_type = other RNA
atggacgcgatgaagagaggactttgttgtgtcctcctcttgtgtggcgctgtttttgttagtccaagccaggaaatacatgccaggtttcgccgcggtgcccgatcatatcaagtaatttgccgggacgaaaaaactcagatgatatatcagcaacatcagtcctggctgcgcccagtcttacgatccaatcgcgtagagtactgctggtgtaatagtggccgtgcccagtgtcactccgtgcctgtgaaatcctgttccgaaccaagatgtttcaacggcggtacctgccaacaggctctttattttagcgactttgtctgccagtgtccagaaggatttgctggcaagtgctgcgaaatcgacactcgcgctacctgttatgaggaccaaggaattagttatcgaggaacctggtcaacagctgagagcggcgccgaatgtacaaattggaatagcagcgctcttgcccagaaaccttacagtggccgccggccagatgccatccggttaggattagggaaccacaactactag

SEQ ID NO: 5007 - RNA, 474 nt, synthetic construct
  misc_feature 1..474: note = source = /note="Description of Artificial Sequence: Synthetic coding sequence"
  source 1..474: mol_type = other RNA
atggatgcaatgaagcgagggttgtgttgcgttttactcctctgtggagcagtctttgtcagcccaagccaggagatccacgctaggttccgaagaggcgcaaggtcttatcaggtgatttgcagagacgagaagacacagatgatctaccaacaacatcaatcttggttacgacctgtgctccgcagcaatcgggtggagtattgctggtgtaattctgggagggcacagtgccattctgtgcctgtaaagtcatgcagcgagcctagatgttttaacggagggacttgccaacaggccctgtacttttcagactttgtgtgccagtgtccagaaggctttgcaggtaaatgttgcgagattgatactcgagctacctgttacgaggatcaaggcatctcataccgtggtacgtggtccaccgcagaatcaggggcagagtgtacaaattggaactcatcagcacttgcttag

SEQ ID NO: 5008 - RNA, 1422 nt, synthetic construct
  misc_feature 1..1422: note = source = /note="Description of Artificial Sequence: Synthetic coding sequence"
  source 1..1422: mol_type = other RNA
atggatgccatgaaacgtggactgtgttgtgttctgttgctctgtggggcagttttcgtgagcccctcccaagagatacatgccagatttaggagaggagcaaggagctatcaggtgatctgccgcgatgagaagactcagatgatttaccagcagcatcagtcctggcttagacccgtgctgcgctcaaaccgagtggaatactgttggtgtaactctggacgggctcagtgtcactctgtgccagtgaagtcttgtagcgagccacgctgcttcaatggtggaacttgccagcaggcactttacttttcggattttgtgtgtcagtgcccagaggggttcgctggtaaatgctgtgagattggaaattcagactgttacttcggtaacggatcagcatacaggggcactcacagtctgacagagagcggggctagttgtctgccctggaattcgatgatcctgatagggaaagtatatacagcacagaaccccagcgcgcaggccctcgggttaggtaaacataattactgtaggaacccagatggagatgccaaaccatggtgtcacgtgctaaagaacagacgactcacctgggaatattgcgatgtccccagctgctccacgtgcgggttacgtcagtattctcagcctcagttcagaatcaagggaggcctttttgcggatatcgcctcacacccatggcaagcagctatcttcgcaaaacacagacgcagtccaggagaacgctttctttgcggaggtattctaatctcttcttgttggattctttcagccgcgcattgttttcaagaaagatttccgccacaccaccttactgtgattttagggcggacataccgcgtcgtgcccggcgaagaggaacagaagttcgaggttgagaaatatattgtccataaggaattcgatgacgatacatatgacaatgatattgcactcctgcagcttaaatcagactcatcgagatgcgctcaagaatcctccgtggtcaggacggtgtgcctcccacccgcagacctgcaattacccgattggacagagtgcgaattaagcggctatggtaaacacgaggcattgtccccattttactcagaacggctaaaggaggcccatgtaaggctgtatcccagttcgcgatgcacttctcagcacttgttaaatcgtacagtgaccgacaacatgctctgtgctggtgacacaaggtccggaggacctcaagctaacctgcatgatgcctgtcaaggggattctggcggtccattggtgtgcttgaatgacgggaggatgacattggtcggtattatttcttgggggcttggatgcgggcagaaggatgtgcccggcgtatatacaaaggtgacaaattatctcgattggatcagagataacatgcgtccttag

SEQ ID NO: 5009 - RNA, 1488 nt, synthetic construct
  misc_feature 1..1488: note = source = /note="Description of Artificial Sequence: Synthetic coding sequence"
  source 1..1488: mol_type = other RNA
atgtggcagctgacttcgctgctgctgtttgtcgctacatggggaatctcaggaacacccgcaccattagactctgtcttttcctcctcagaacgcgcccatcaggtcttgcgtattagaaagcgggccaatagctttttggaggagctccggcatagttctcttgaaagagagtgtatcgaggagatctgcgattttgaggaagctaaggagatattccagaatgtcgatgatacactggccttctggagcaagcacgttgacggagaccagtgtctagtcctgcccttggaacacccctgcgcatctctgtgttgtggccatggtacgtgtattgacggcataggttcgttcagttgtgattgccggtcaggttgggaaggaagattctgccagcgtggagagggggagagatggatgctcgctgggggaggcgcaggactcggtccgggatggggaagaggaacatctacttcatgcccaagacccccgctgccagcagaagtaagctttctcaactgctccttggacaacggcgggtgcacgcattattgcctggaggaagttgggtggcgccgctgttcttgtgctcccgggtacaagctgggggacgatctccttcagtgtcacccagctgttaaatttccgtgtggcagaccgtggaaaaggatggagaagaaaagaagtcatttaaagagggacacggaggatcaggaagaccaggtagaccccagactcattgatggtaaaatgaccagaagaggagactctccgtggcaggtggtcctactcgactccaagaaaaagctggcttgcggggccgtgctgatccacccatcctgggttctgacggctgctcattgtatggatgaaagtaagaagctgttggtgcgcttaggggagtacgatctgcgtcgctgggaaaagtgggagctcgacctggacataaaggaggtgtttgttcatcccaattatagtaagagcaccacagataatgatatagccctgctgcatctagcacagcccgccaccctcagtcagactatagtgcctatttgtctaccagattcagggctcgccgagcgagagctgaatcaggccggccaggaaaccctcgtcacaggttggggatatcattcctcgcgcgaaaaggaagctaaaagaaatcgcaccttcgtcctcaactttataaagatacctgtggttccccacaacgaatgctctgaagtcatgtcaaatatggtcagtgagaacatgctgtgtgcaggcatattgggcgataggcaagacgcatgcgagggagacagtggaggcccaatggtggccagctttcacggaacatggttcctggtggggctggtaagctggggggaaggttgtggtctgttacataattacggcgtgtatacaaaggtgtctagatatctggattggattcacggccatatccgcgacaaggaggcacctcaaaagagttgggcaccttag

SEQ ID NO: 5010 - RNA, 1386 nt, synthetic construct
  misc_feature 1..1386: note = source = /note="Description of Artificial Sequence: Synthetic coding sequence"
  source 1..1386: mol_type = other RNA
atgtggcaacttacctcgctgctgcttttcgtcgccacatggggcatatcagggaccccagctccgctggattctgtcttctcttccagcgagcgggcccaccaggtgttaagaattcgcaaacgtgcgaacagtttcttagaagagctgcgtcattcttctctagagcgagagtgcatcgaggagatttgtgattttgaagaagccaaggaaattttccagaatgttgatgacacactggcattttggtcaaagcatgtagatggggatcagtgcttagtgttaccccttgaacatccttgtgcatccctttgttgcggccacggcacctgcattgatggcatcggatcttttagttgcgactgccgctcagggtgggaggggaggttttgtcagcgagaggtttcattcctgaattgctccctggacaacggcggatgtactcattactgcctggaagaagtgggctggagacgttgcagctgcgccccgggctacaagctcggggatgatctgcttcagtgtcaccctgccgttaaattcccttgcggtaggccatggaagcgcatggaaaaaaaacgctcgcatctgaaacgggatacagaagatcaggaggaccaagtcgaccctaggctgatagatgggaaaatgacaagaagaggagatagcccgtggcaggttgtacttctagacagcaaaaagaagctcgcctgtggggcagtgctcatacacccttcctgggtcctgacggccgcccactgtatggatgaatccaaaaagcttctggtaagattgggtgagtatgacctacgccgatgggaaaagtgggaattagacctcgacatcaaggaagtttttgtgcaccctaattattcaaagtctactacggacaacgacattgccctcctgcacctagctcaacccgcaactttgtcacagactatagtcccaatttgccttcccgactcaggcctcgcagaaagggaactaaaccaggccgggcaggagaccctggtcactgggtggggataccacagttcacgcgagaaggaggctaaacggaaccgcacttttgtgctgaattttattaaaatacccgtcgttcctcacaacgaatgcagtgaagtgatgtccaacatggtttctgaaaatatgctgtgcgctggaatattgggcgacagacaggacgcatgcgaaggagatagcggcggcccaatggtagcctcttttcacggtacgtggttcttggtcggtctcgtgtcatggggggaaggctgtgggctcctgcacaattatggagtatacacgaaggtatcacgctatctcgattggatccatggccatattcgggacaaagaagcaccgcagaagagctgggccccatag

SEQ ID NO: 5011 - RNA, 351 nt, synthetic construct
  misc_feature 1..351: note = source = /note="Description of Artificial Sequence: Synthetic coding sequence"
  source 1..351: mol_type = other RNA
atgtggcagctcacaagtttgctcctgtttgtcgccacttggggaatttccggtacccctgcacccctcgattcagttttttctagtagcgagagagctcaccaggttctgcgcattcgcaaacgtgccaatagctttctagaggaactccgccactcttcattagaacgggaatgcatcgaggagatttgcgactttgaggaggcaaaagaaatctttcagaatgtcgacgacaccctggccttttggagcaagcacgtggatggggaccaatgtcttgtgcttcccctcgaacacccttgcgcctctttgtgctgtggacatgggacttgtattgacggaattggatag

SEQ ID NO: 5012 - RNA, 381 nt, synthetic construct
  misc_feature 1..381: note = source = /note="Description of Artificial Sequence: Synthetic coding sequence"
  source 1..381: mol_type = other RNA
atgtggcaattaacctctttactgttattcgtggcaacttggggtatttcagggacccctgctcccttggacagcgtctttagtagcagcgagcgagctcaccaagtcctaaggatacgcaaacgagctaattcttttctcgaggagcttcgacactcttctctggagcgcgaatgcatagaggagatatgtgactttgaagaagccaaggagatcttccagaacgtggatgacactttggccttttggtctaagcacgtagatggtgatcaatgcctagttctgcctcttgaacatccttgtgccagcctttgttgtggccacggaacctgcatcgatggaattgggagttttagttgtgattgtcgttcagggtggtag

SEQ ID NO: 5013 - RNA, 1551 nt, synthetic construct
  misc_feature 1..1551: note = source = /note="Description of Artificial Sequence: Synthetic coding sequence"
  source 1..1551: mol_type = other RNA
atggcggccggtcgacgcacttgttcaattagcaccacaagaccctgtgcgagcgcttcacgtatgtggcagctgaccagcctgttactgtttgtggccacctggggcatctctggtacgccagcccctctcgactcagtcttctctagctcagagagggcacaccaagtgttacggattcggaaaagggcgaattcattcttagaggagctgcgacattcttcgcttgaaagagagtgtatcgaagaaatctgcgactttgaggaggctaaagagatcttccagaacgtcgacgacaccctggctttttggtcgaagcacgtggacggggatcaatgcctagtcctccccctggagcacccttgtgcatctctgtgctgcgggcacggcacttgcatcgacggaatcggttctttctcctgtgactgcaggagcggctgggaaggcagattctgccagagaggcgagggggagcgatggatgctggctggaggcggagctggactcggccccgggtggggcaggggaaccagcacgtcctgtcctcggcctcctctgcctgctgaggtatcttttttgaactgtagcttggacaacggggggtgtacacactactgtctcgaggaagtgggttggcggcgttgtagctgcgccccgggatacaagctcggagatgacctgttgcagtgccaccccgctgtcaagtttccctgtggtaggccatggaaaaggatggagaaaaaaagatcccacttgaaaagagacactgaggatcaggaggaccaagttgacccaaggctgattgacggaaaaatgacaagacgaggtgattccccatggcaggtagtactcctggattcgaaaaagaaactggcctgcggagcagtgttgatccacccttcatgggtcttgactgccgcccattgtatggatgagtcaaaaaaattactcgtgcggcttggcgaatacgacctgcgtcgctgggagaaatgggagctcgatctggatataaaggaggtctttgtgcatccaaattactcaaaaagtactactgacaatgatattgcccttctccacttggcgcaacctgctactctcagtcagacgatagtgccaatatgtttgcccgactccgggcttgctgaaagagagttaaaccaagccggacaagaaaccctagtaaccggatggggatatcattcttctcgcgaaaaagaagcaaaacgcaaccgtacatttgtgttgaactttattaaaatccctgttgtaccccataatgaatgctcagaagtcatgagcaacatggtttctgaaaacatgctctgtgccggcattctgggcgacagacaggacgcatgcgaaggtgattccggcggccccatggtggcctccttccacggtacctggtttctcgtgggtctcgtgtcctggggggagggatgcggactgctgcacaattatggagtttacacaaaggtgagcaggtaccttgattggatccacgggcacattcgggacaaagaagcaccacagaaatcatgggcgccttag

SEQ ID NO: 5014 - RNA, 1263 nt, synthetic construct
  misc_feature 1..1263: note = source = /note="Description of Artificial Sequence: Synthetic coding sequence"
  source 1..1263: mol_type = other RNA
atgtggatgactcattggccaagtggaccgtcaacatccacagttacttccgcctggtcctgtccgtggagcacccgagcacccgcttgcgctgctgggaccgcgcgggcttccactgcatccgctgcatctgccgccacagcggccgccgccgggagggccgcatctgcttctgccgtgagaggacggggcggctgctggagggggggggctggcttaggcccaggttgggggcgcggtacctcaacttcatgccctcggcctcccctgcccgctgaagtttcattcttaaattgctcccttgacaatggtggttgcacccattactgtcttgaggaagttggctggcgtagatgcagctgtgcccccggatacaaactgggcgacgacctcttacagtgtcaccccgcggtaaagtttccatgtggccggccctggaaaagaatggagaaaaaacgatcccatctgaagcgcgatactgaggatcaggaggatcaggtggatccacgcttgatcgacgggaaaatgacccgcaggggagatagtccatggcaggtggtgttactggactctaaaaagaagctggcttgcggggcagtattgatacacccctcatgggtgttaaccgcagcgcactgtatggatgaatccaagaaattattagtcaggctgggcgaatatgacctccgacgctgggaaaaatgggaactagacctcgatataaaggaagtgttcgtgcacccaaactattcgaaatctacaacggataatgatattgcactgctgcacttagctcagcctgctactctcagccagacaattgtaccaatatgtcttcccgatagtggtctggccgaaagagaactgaatcaagctggacaggaaactctggttactgggtggggttatcacagctcccgtgagaaggaagccaagcgcaatcggacctttgtgctgaattttattaaaatccccgtcgtgccccataatgaatgtagcgaggtaatgtcaaatatggttagtgagaacatgctctgtgctggaatcctcggcgatcggcaggatgcctgtgagggcgactctggtgggcccatggtggcctcgtttcacggtacttggttccttgtgggccttgttagttggggtgaagggtgcggactcctgcataattacggcgtctataccaaggtctcccgatacctcgactggatccatggtcatattcgcgacaaggaggcccctcagaagtcatgggccccgtag

SEQ ID NO: 5015 - RNA, 1047 nt, synthetic construct
  misc_feature 1..1047: note = source = /note="Description of Artificial Sequence: Synthetic coding sequence"
  source 1..1047: mol_type = other RNA
atgaacggtaccgagggtcccaacttttatgtccctttttccaatgcaacaggagttgtgcgctccccattcgagtatcctcagtattatctcgccgagccttggcagttttctatgttggcagcctacatgttccttctcatcgttctgggatttccgatcaatttcttgactttgtatgttacagtgcagcataagaagctcagaacaccgctaaattatatcctgttgaacctggccgtagccgacctgtttatggttctgggaggctttacctcaaccctgtatactagcctgcatggctactttgtctttggaccaactggctgcaatctcgaaggcttcttcgctaccctcggaggggagattgccctgtggagcctggtcgtcttggccatcgagcgctacgttgttgtgtgcaagccaatgtcaaactttcgtttcggcgagaatcacgcaattatgggagtggcctttacgtgggttatggcccttgcttgtgcagcaccgcccctggcaggttggagcagatatatcccagaaggacttcagtgcagttgtggcatcgactactacacgctgaagcccgaggtcaataacgagtcgtttgttatttacatgttcgtggttcatttcacaatccccatgattattatattcttttgttacggacagctcgtgttcaccgtcaaagaagctgccgcccagcagcaggaatcagccaccactcagaaggccgaaaaggaagtgacccgcatggttataataatggtaattgcctttctgatctgttgggtgccatacgcgtctgttgccttttacatctttacacaccagggatctaacttcggacctatatttatgaccattcccgcgttctttgccaagtccgccgccatctataacccagtaatctacatcatgatgaataaacagtttagaaactgcatgcttaccactatctgttgcggcaagaatcccctgggagatgacgaggcttccgctactgtttctaagactgagacttctcaggtagctccagcttag

SEQ ID NO: 5016 - RNA, 1257 nt, synthetic construct
  misc_feature 1..1257: note = source = /note="Description of Artificial Sequence: Synthetic coding sequence"
  source 1..1257: mol_type = other RNA
atgccatcttccgtctcgtggggcattcttcttctggccgggctctgttgtctggtcccagtgagtcttgcagaggacccccaaggtgacgccgctcaaaaaactgacacctcgcaccacgaccaagaccatccaacattcaacaagatcacccccaatctcgcagagtttgcattctcactttacagacagctagcccaccaatcaaactctactaacatcttcttctccccagtctcgatagcaaccgccttcgccatgctttctttagggactaaggcagatactcatgacgagatcctggagggactgaactttaatctgaccgaaatccctgaggcccagatccatgaaggcttccaggagctattacggacccttaaccagccagattcacagctccagctgaccacaggtaacggactgttcctatccgaaggtctgaagctagtcgataagttcctcgaagatgtgaagaaactttatcacagtgaagcctttactgtcaactttggcgacactgaagaggctaaaaagcagataaacgactatgtggaaaagggaactcagggcaaaattgtggatctggtcaaggaactcgatagggataccgtgtttgctctagttaactacatttttttcaaaggaaaatgggagcgcccgttcgaggtgaaggatacagaagaagaggattttcacgtggaccaggtcacaaccgtaaaggttccaatgatgaagcgcctggggatgtttaacatacagcattgtaagaaactctcttcctgggtccttctgatgaagtatcttggcaacgcgacagccatcttcttcctacccgacgaaggaaagttgcagcacctcgaaaacgagctgactcacgatatcatcaccaaatttctggagaatgaggaccgccgtagcgcctctctgcacctgcccaaactctctatcacaggcacctatgatcttaaatccgttctgggccagctgggcattaccaaggttttttccaacggggcggatctaagcggagtgactgaggaagctcccctgaaactcagcaaggctgtccacaaagcagttctgaccatagacgaaaaaggcacagaggccgctggtgccatgtttcttgaggctattccaatgtccattccacccgaagtgaagttcaacaaacctttcgtctttctcatgatcgaacagaatacaaagtctcccctcttcatgggcaaagtggtcaatcctacccaaaaatag

SEQ ID NO: 5017 - RNA, 1257 nt, synthetic construct
  misc_feature 1..1257: note = source = /note="Description of Artificial Sequence: Synthetic coding sequence"
  source 1..1257: mol_type = other RNA
atgccaagctccgtgtcctggggtatcctgctgctggcaggtctttgctgtcttgtcccagtgtccctggctgaagatccccagggcgatgccgcacagaagaccgacacatctcatcacgaccaagatcaccctactttcaataaaatcacccctaatttagcggagtttgcgttctcactctacaggcagcttgcccaccagtcaaactccacaaacatattcttctcacctgtctcaatcgccactgcctttgctatgctgagtctgggtaccaaggctgatactcacgatgaaatcctcgagggtctaaattttaacttaaccgagattccagaggctcaaatacacgagggttttcaagaattgctcaggaccctcaatcagccggatagtcagttacaactcacaaccggtaacggacttttcctgtctgagggtcttaagctggtcgataaattccttgaggatgtaaagaagctgtaccacagtgaggcctttaccgtcaatttcggagacactgaagaagcaaaaaagcaaattaacgactacgtggagaaagggactcaaggaaagatcgtcgatctagtgaaggaattggacagagatactgtttttgcactggtgaattacatcttctttaaaggaaagtgggaacgtccatttgaggttaaagacaccgaggaggaggattttcacgtcgatcaggtgactactgtgaaggttccaatgatgaagagactcggcatgtttaacatacaacactgtaaaaagctttcttcatgggtcctgctcatgaaatacttgggaaatgcaacagccatttttttcctgcctgacgagggcaagctccaacatcttgagaatgagctaacccatgacattataacgaaatttctggagaacgaagatcgcagaagtgcctccctgcacctgccaaaactcagtataaccggtacctacgatctgaagtctgtcctgggccagcttggaattacgaaggtcttcagtaatggcgcggatctgtctggagtgaccgaggaagccccgttgaagctctccaaggccgtgcacaaggcggttcttactattgatgaaaaaggtacggaagccgcaggcgcaatgttcctggaggcaatcccaatgtccatacctccggaagtgaagttcaacaagcctttcgtcttcctgatgatcgaacagaacaccaaatcccctctattcatgggaaaagtcgtgaatcctacacagaaatag

SEQ ID NO: 5018 - RNA, 1257 nt, synthetic construct
  misc_feature 1..1257: note = source = /note="Description of Artificial Sequence: Synthetic coding sequence"
  source 1..1257: mol_type = other RNA
atgcctagtagtgttagttgggggattctcttattggccggtctctgctgtcttgttccagtgtcattggcagaggaccctcagggcgatgcagcacaaaagactgatacttctcaccacgatcaagaccaccctacgtttaacaagatcacacccaatcttgctgaatttgcattcagcctctacagacagctcgctcatcagagtaactctactaacatcttcttcagccctgtctctatagccaccgccttcgccatgttatcactcgggacaaaagcagacacacatgacgagattctcgaaggcttaaactttaatttaaccgagatccccgaagcccaaattcacgagggttttcaagagctactgcggaccctgaaccagccagacagccagttgcagctcaccaccggcaatggcctttttctgtctgagggtctgaaactggtagacaaattcctcgaggatgtaaagaaattgtatcactcagaagcgtttactgtgaactttggtgatacagaagaggcaaaaaagcagataaatgactatgtcgaaaagggcacccagggaaagattgtggacctggtgaaggaacttgacagagatacagtattcgctcttgtcaactatatcttctttaaaggcaagtgggagaggccattcgaggtgaaggataccgaagaggaagatttccacgtcgatcaagtcaccacagtgaaggtgcctatgatgaagaggcttggaatgttcaatatccagcactgtaagaaactcagcagttgggttctcctgatgaagtacctagggaacgccacagctatatttttcctgccagacgaggggaagctccagcacctcgagaatgagctgactcacgacatcatcacaaagttcctggaaaatgaagataggcgatctgccagtcttcacctcccaaaactgtctattactggcacatacgacctgaagtccgtcttgggtcagctggggataaccaaggtgttcagcaatggcgcagatctgtctggggtcacagaggaagccccccttaaactctccaaagctgtgcataaggcagtcctaacaatcgatgaaaagggcactgaggccgccggagctatgttcctagaggctatacctatgtcgatccctccggaagttaagttcaataaaccgttcgtattcctcatgatagagcagaacaccaaatcacccctgttcatgggaaaagtggtcaaccctacacagaaatag

SEQ ID NO: 5019 - RNA, 1080 nt, synthetic construct
  misc_feature 1..1080: note = source = /note="Description of Artificial Sequence: Synthetic coding sequence"
  source 1..1080: mol_type = other RNA
atgccctccagcgtttcctgggggatcctgctcctggccggcctgtgctgtctcgtgcccgtgtcgctcgccgaggatccccagggggacgccgcccagaaaacagatacctcccatcacgatcaagatcatcctacctttaataagattactcctaatctagcggagtttgccttttccctatacaggcagcttgcgcaccaatcaaattccacaaatatttttttttctccggtatcgatcgccaccgctttcgccatgctgagccttggcactaaagctgatacacatgacgagattttagaaggtctgaactttaacttgacagagatacctgaggcgcagattcacgaaggtttccaggaattgctgcgcacgctgaaccaacccgattcgcaactccagttaaccactggcaacggccttttcctgtccgagggcctgaaactggttgataaattcttagaagatgtgaagaagctctatcacagcgaggcatttaccgtgaactttggtgacacagaagaagcaaagaagcagattaatgattatgtcgagaaggggacacagggcaagattgtggacctggtgaaagagctggatcgagataccgttttcgccctggtgaactatatattttttaaaggaaagtgggaaagaccattcgaagtgaaggacaccgaagaagaagactttcacgtggaccaggtaactacagttaaagtgcctatgatgaaacggctgggaatgtttaatatccagcactgcaaaaaattaagtagctgggtgttgctgatgaaatatctagggaacgcgacagctatcttcttcctcccggatgaagggaagctccagcacttggagaacgaattgacgcacgatatcattactaaattcctggagaatgaagaccgccgctccgcctcattgcatctgccaaaactctcaatcacgggaacttatgacctgaaaagcgtgctgggtcagttaggcatcacaaaggtgttttcaaacggagccgacttaagcggcgtgaccgaggaggcccccctgaaactgagcaaggttagaagcccatag

SEQ ID NO: 5020 - RNA, 1257 nt, synthetic construct
  misc_feature 1..1257: note = source = /note="Description of Artificial Sequence: Synthetic coding sequence"
  source 1..1257: mol_type = other RNA
atgccttcttccgtttcatggggaattctgctactggccggattgtgttgtctggtgccagtgagtttagcagaggatccccagggggatgccgcccaaaagacagatactagccaccatgatcaagaccatccaacatttaacaagataaccccgaacctagccgaatttgctttctccctgtacagacagttggcccatcaatccaactctaccaatatattcttctcaccagtttccatcgctacagcctttgcgatgctgtctttggggaccaaagccgacacacacgacgaaattctggaagggctcaatttcaatttaacagaaatcccagaagcccagatccacgagggattccaggaactgctgaggactctcaaccagcctgatagtcagctgcagctcaccaccggcaacggtctttttcttagcgaaggccttaagttggtggacaaattcctggaagatgtcaaaaaactctatcactctgaggcgttcacagttaactttggcgacaccgaagaggccaaaaagcagattaatgactacgtggaaaagggaacccagggaaaaatcgtggacctcgtgaaggagttagacagagacacagtttttgccttggtgaactacatctttttcaagggaaaatgggaacgacccttcgaagtaaaggacacagaggaagaagattttcatgtggaccaggttacaaccgttaaggtgcctatgatgaaaagactgggaatgttcaacatacagcactgcaagaaattgagcagctgggtactgctaatgaagtatttggggaatgcaacagccattttctttctgcccgacgagggtaaactgcagcaccttgagaacgaactgacacatgacattattaccaaatttcttgaaaacgaagacagaagaagtgcgtcactgcatctgccaaagttgtccatcaccggtacatacgatttaaaatccgtgctcggccagttaggcatcaccaaggtgtttagcaatggcgcagatctatccggtgtaactgaagaggccccactgaagctgtcaaaggccgttcacaaagcagtactgaccatcgatgagaagggcacagaggccgccggcgctatgtttctggaggctattcccatgtcaatcccccccgaagtgaagttcaataagccctttgtcttcttaatgattgaacagaatactaagtcacccctgttcatggggaaagtcgtgaatccgacccaaaagtag

SEQ ID NO: 5021 - RNA, 1257 nt, synthetic construct
  misc_feature 1..1257: note = source = /note="Description of Artificial Sequence: Synthetic coding sequence"
  source 1..1257: mol_type = other RNA
atgcccagctcagtctcatggggaattttgctgctggccggcctgtgctgcttggtgcccgtcagccttgcagaggacccccagggagatgccgcacagaaaaccgatacctctcaccacgatcaggaccatccaaccttcaacaaaattaccccaaacctcgcagaatttgccttttccctctataggcagcttgcccaccagtccaacagtactaacatcttttttagcccggtatccatcgccaccgcctttgccatgctaagcctcgggacaaaagccgacacacacgacgaaatcctggaagggctgaattttaatctgactgagatacctgaggcgcagattcacgagggtttccaagaactattaaggacgctgaaccagccggactctcaactgcagctgactactggcaatggtctttttctcagtgagggtctcaagctggtcgataagttcctagaggatgtgaaaaaactctaccattctgaagcatttaccgtgaactttggtgacacagaagaggccaaaaagcaaattaacgactatgttgaaaagggcactcaggggaagatagtggatttagtgaaagagttagacagggataccgtgtttgctctcgtcaattatatattttttaaaggcaaatgggagcgcccattcgaggtcaaggacaccgaggaagaggacttccacgttgaccaggtaaccactgttaaggtccctatgatgaagcgactggggatgttcaacatacagcactgcaagaagttgagttcttgggttctcttgatgaagtatctggggaatgccaccgcaatcttttttcttcctgacgaaggcaagctgcagcacctggaaaacgagctgacccacgatataattacgaagttcctggagaatgaagacagacgaagtgccagtctgcaccttccaaagctgtcaatcacaggcacgtatgacctcaagtcagtgctcggccagttgggcatcacaaaggttttctccaatggcgctgatcttagtggggtcactgaagaagcacccctcaagctgtcgaaagcagtgcacaaagctgttctgacaatcgatgaaaagggtactgaggccgctggtgccatgtttctggaagcgatccctatgagtattcctcccgaggtgaagttcaacaaacccttcgtgtttttaatgattgaacagaacactaaaagccctttgttcatgggaaaagtggttaatccaacacagaaatag

SEQ ID NO: 5022 - RNA, 1257 nt, synthetic construct
  misc_feature 1..1257: note = source = /note="Description of Artificial Sequence: Synthetic coding sequence"
  source 1..1257: mol_type = other RNA
atgccatcttcagtatcctggggcatcttgttgttagccggcttgtgttgcctggttcccgtgtccctggcagaggatccccaaggtgacgcagcgcaaaaaacggatacaagtcaccacgatcaggaccatcctacattcaacaagattactcctaacttggcagagttcgccttctctctgtacagacagcttgcacatcagtcgaattctactaacatttttttcagtcccgtgagtatcgccaccgcctttgctatgctttctctgggtactaaagctgacacccacgacgaaattctggaggggctgaactttaacctgaccgaaattcctgaagcacagatccacgaaggctttcaagagctgctgcggactctcaaccagcctgacagccaactgcagttgactaccggaaacggcctgttcctaagcgaaggcctgaagttggtcgataagtttttggaagatgttaagaagttataccattcggaagcatttactgtaaacttcggcgacacagaagaggccaagaaacagatcaatgattacgtcgaaaaagggacgcaaggaaagatcgtcgaccttgttaaagaactggaccgagacacagtcttcgcacttgtgaattacatattctttaaaggcaaatgggagcgacctttcgaggtaaaagacacagaagaggaagactttcacgttgatcaggtgaccacagtgaaggtgcccatgatgaaaaggctaggtatgtttaatattcagcactgtaagaagctcagtagttgggtcctgcttatgaaatacctaggcaacgcgacggccatcttttttcttcctgatgaagggaagttgcagcacctggaaaacgagctgactcatgatatcattactaaatttctcgagaatgaagatcgcaggagcgcatcgttacatctgccaaagctgtctattaccggtacatacgacctcaagtccgtgctcggccaattgggtatcactaaggtgtttagcaatggagcagacctatcaggagttactgaggaagcaccactgaaactctcgaaggctgtgcataaagctgtgctcacaatcgacgaaaaggggactgaggccgccggagcgatgttcctagaagccatcccaatgtctattcctccagaggtgaaatttaacaaacccttcgtgttcttgatgatagagcagaataccaagtccccattgtttatgggcaaggtggtcaaccctacccagaagtag

SEQ ID NO: 5023 - RNA, 1257 nt, synthetic construct
  misc_feature 1..1257: note = source = /note="Description of Artificial Sequence: Synthetic coding sequence"
  source 1..1257: mol_type = other RNA
atgccatcttccgtgagttggggcatactcctcctagccggtctctgctgtctcgtgccagtgtccctggccgaggacccccagggcgacgctgcacaaaagaccgatacctcacaccacgaccaggatcatcctactttcaataaaatcaccccgaacctagcggagtttgccttttccctctacagacagttagcacatcagtcaaattcaacgaacatcttcttctcaccggtttctattgccaccgcattcgccatgttaagtctcgggaccaaggctgatacccacgacgaaatactggaaggcctcaattttaatctgactgaaattccggaggcgcagattcacgaaggttttcaggagctccttcgaactctaaatcaacctgattctcagctgcagctcactactgggaatgggttattcctgagtgagggtctgaaactggtggacaagttcctggaggacgtgaagaaactttatcacagcgaagctttcaccgtcaactttggcgacactgaagaggctaagaaacagattaacgattatgttgagaagggtactcagggtaaaattgtggacctggttaaagaattagatcgtgacactgtctttgccctggtaaactacatcttttttaaggggaaatgggagagaccctttgaggtgaaggacactgaagaagaggacttccatgtagatcaggtcactaccgtaaaagtgcccatgatgaagcgcttaggaatgttcaacatacagcattgtaaaaaattgtcttcatgggtactcctgatgaaatatttagggaatgctaccgcaatttttttcctccccgatgaaggcaagttgcagcatcttgagaacgaattgacccacgatattattactaaattcctagagaatgaggatagaaggagcgcgtcattacacctgcccaaactcagcatcaccggaacatatgatctgaagtctgttttgggacagctcggtattactaaggtgttctccaacggtgctgacctgtcgggagtaaccgaagaagccccgctaaagttgagcaaggctgtgcacaaagctgtgctaacaatcgacgagaagggtaccgaggcagctggcgcaatgttcctggaggccattcctatgtcaatcccccctgaggtaaagttcaataaacctttcgtatttctgatgattgaacaaaataccaagtcccctttgtttatggggaaggtcgtgaaccctacacagaaatag

SEQ ID NO: 5024 - RNA, 1257 nt, synthetic construct
  misc_feature 1..1257: note = source = /note="Description of Artificial Sequence: Synthetic coding sequence"
  source 1..1257: mol_type = other RNA
atgccaagtagtgtttcatggggaatactcctgctagccgggttgtgctgtctcgtacccgtgtcactcgccgaggatccgcagggggatgcagcccaaaagactgacaccagtcatcacgatcaagaccacccaaccttcaacaaaattaccccaaacttggccgagttcgcgttttccctgtatcgccagctcgcccaccaaagtaactcaaccaatatcttcttttcccctgtatccatcgctacagcatttgcgatgttatccctaggcaccaaggccgacacacacgatgagattctggagggcctcaatttcaatctgaccgagatccccgaggcccaaatccatgagggatttcaggagttgctccggacactgaaccagcccgactcacagctgcaacttactaccggtaatggactgttcttgagcgagggcctgaagctcgttgataagtttctcgaagatgtgaaaaagttgtaccatagcgaagcgtttaccgtcaactttggcgacactgaagaggcaaaaaaacaaataaatgattacgtggagaagggaacacagggtaaaattgtggacttagtaaaagaacttgaccgggacactgttttcgcccttgttaactatattttcttcaaaggtaagtgggaacggcctttcgaggtgaaagacactgaggaggaagatttccacgtggatcaggtgactaccgtgaaagttcctatgatgaagagacttggcatgtttaacatacagcactgcaaaaagctatccagctgggtactgctcatgaagtacttgggaaacgctaccgccattttctttctacccgacgaaggcaagctccaacatctagaaaacgaactgacccacgatattatcaccaaattcttggagaacgaagacagaaggtcggcgtcactacatttaccaaagctgtctataaccggtacctatgacctaaagagcgtcctagggcaattgggcataactaaggttttttctaatggagccgatctttcaggagtgaccgaggaagcacctctgaaactgtccaaagccgtccacaaggcggtcctgacgattgacgagaaagggaccgaggctgctggtgctatgtttctggaggccatcccaatgtcaattccccctgaggtgaagtttaacaagccatttgtttttctcatgatcgagcagaataccaagtcgccactgtttatggggaaggtggtcaatccaacccaaaaatag

SEQ ID NO: 5025 - RNA, 279 nt, synthetic construct
  misc_feature 1..279: note = source = /note="Description of Artificial Sequence: Synthetic coding sequence"
  source 1..279: mol_type = other RNA
atgccgtcctccgtgtcctggggaatcctgctgctcgccggcctgtgctgtctggtccctgttagcctcgctgaagacccccagggggacgccgctcagaagaccgacacaagccaccatgatcaggatcatccaacattcaataaaattactcccaaccttgctgaattcgccttttcactctatcgccagttagcccatcagagcaattctaccaacatcttttttagcccggtgtcgattgccaccgcctttgctatgttatcccttggcacctag

SEQ ID NO: 5026 - RNA, 471 nt, synthetic construct
  misc_feature 1..471: note = source = /note="Description of Artificial Sequence: Synthetic coding sequence"
  source 1..471: mol_type = other RNA
atgccaagctctgtgtcctggggtatcctccttctggcaggcttgtgttgcttggtaccagtatccctcgcagaggacccacaaggtgacgctgcacagaaaacagatactagccaccatgaccaagaccaccctacgttcaacaaaattacgcccaacctcgctgaatttgctttcagtctataccgacaactagcacaccagtctaatagcacaaacatcttcttcagccccgtgagtattgctaccgcattcgccatgttgtcactaggaacaaaggctgacacacacgatgagatcctggaggggctcaatttcaatctcacagaaatacccgaggctcagattcatgagggatttcaggagctgttacgaactctgaaccaacctgattcccagctgcagttaaccaccgggaatgggctgttcctctccgaaggtttgaagttggtggataagtttctagagtag

SEQ ID NO: 5027 - RNA, 354 nt, synthetic construct
  misc_feature 1..354: note = source = /note="Description of Artificial Sequence: Synthetic coding sequence"
  source 1..354: mol_type = other RNA
atgccaagcagtgtatcctgggggattcttctcctagccggtctctgttgtcttgtccctgtgtctctggccgaggatccccagggcgacgctgcacaaaagacagatacctctcatcatgatcaggaccaccccacattcaacaaaatcacccccaatcttgccgaatttgccttctcactgtatcgccaactcgcccaccagtccaatagcacaaacatattcttttcccccgtgtccattgccactgccttcgctatgctgagtctcggaactaaagccgatacacacgacgagattctggaaggtttaaatttcaatcttaccgaaatccccgaagcccaaattcactag

SEQ ID NO: 5028 - RNA, 69 nt, synthetic construct
  misc_feature 1..69: note = source = /note="Description of Artificial Sequence: Synthetic coding sequence"
  source 1..69: mol_type = other RNA
atgccttcctccgttagttggggaattctacttctggccggcttatgttgcttggtgcccgtgtcctag

SEQ ID NO: 5029 - RNA, 435 nt, synthetic construct
  misc_feature 1..435: note = source = /note="Description of Artificial Sequence: Synthetic coding sequence"
  source 1..435: mol_type = other RNA
atgccctcatctgtgtcctggggaatcctactgctggcgggactgtgctgcctagttccggtgagtttagcagaagacccccagggggatgctgcccagaaaactgacacgtcacatcatgaccaagatcatcctacttttaacaagataacccctaacctagcggagttcgccttttccttatatagacaactcgctcatcaatctaattctacaaacatcttttttagccccgtcagcatagctaccgcctttgccatgctgtcccttgggaccaaggcagatactcatgacgagatcctagaaggcctaaacttcaatttaaccgaaatccctgaggctcagatacatgaagggtttcaagagcttctccgcaccctcaaccagcctgacagtcaactccagctaacaacaggtaacggtctatttctctag

SEQ ID NO: 5030 - RNA, 780 nt, synthetic construct
  misc_feature 1..780: note = source = /note="Description of Artificial Sequence: Synthetic coding sequence"
  source 1..780: mol_type = other RNA
atgtacagtaacgttatcggaaccgtaacaagtggaaagaggaaagtctatctgctaagcctcctgctaatcggattctgggattgcgttacttgccacggcagccccgtcgatatttgcaccgcaaagccacgcgacatacccatgaacccaatgtgtatataccggagtccagaaaagaaagcgacagaggacgaggggtccgaacaaaaaatacctgaagccactaaccgcagagtctgggagctgagtaaggcaaactctcgattcgccacaaccttctatcaacatctggccgacagtaaaaacgataatgataacatattcctgtccccactttccatctcaacagcttttgccatgaccaaactgggagcatgtaatgacacccttcaacaattgatggaagtgttcaagtttgacaccattagtgaaaaaacctccgatcagattcacttcttttttgccaagctgaactgccgcttatatagaaaggccaacaagagttccaaactagtaagcgccaatcgcctgtttggtgataaaagcctgacattcaacgacctatacgtgtccgacgccttccataaggcctttctcgaagtaaacgaggaagggtctgaagctgccgcctccacggccgtagtgattgctggccggagtcttaatcctaaccgcgtcacttttaaagcaaaccggccattcctcgtcttcattcgggaggtgcccctaaatacaattattttcatgggcagagtagctaacccctgtgtcaaatag

SEQ ID NO: 5031 - RNA, 1395 nt, synthetic construct
  misc_feature 1..1395: note = source = /note="Description of Artificial Sequence: Synthetic coding sequence"
  source 1..1395: mol_type = other RNA
atgtatagcaacgttattggtaccgtgacatccggcaaaaggaaagtctacctgctgtctctgttattgatagggttttgggactgcgtaacctgccacggaagcccagtagatatctgtaccgcaaaacctcgcgacatccctatgaaccccatgtgcatctatcggagtcctgagaaaaaagcaacagaggacgagggttccgagcagaagattcccgaagctacaaaccggcgagtatgggagctgtccaaggctaactcaagatttgctacgacattctaccaacacctcgccgactccaagaacgataatgataacatttttctctctcctttgagcatatcaacagcctttgccatgaccaagttgggtgcctgcaacgatactcttcaacagctgatggaggtgtttaaattcgacaccatatccgagaagaccagcgatcagattcatttctttttcgctaaactcaactgtagattgtaccgcaaggccaataaatcctctaagctcgtgtcagcgaatcgattgtttggcgataaaagcctcacctttaacgagacatatcaggacatttctgaactagtctatggtgcgaagctccagcccctagacttcaaggagaacgctgagcagtctagggccgctatcaacaaatgggttagtaataagacagaaggcagaatcaccgatgttataccgtcagaggccatcaacgaattaaccgttttagtgctggtgaataccatctactttaaaggactgtggaagagcaagttttcacccgaaaacacccggaaagaactcttttataaagctgatggagagagctgttcagcttcgatgatgtatcaggagggaaaattccgctatcgtcgagtcgctgagggtactcaagtactggaattgccttttaaaggcgatgatatcacaatggtgctcatactcccaaagcctgagaagtcactggccaaggtcgagaaggagttaaccccagaagtgttgcaagagtggctggatgaactcgaagaaatgatgctggtggtgcacatgccccgtttccgcattgaggacgggttttcacttaaagagcaattacaggacatgggcctagtagacctcttcagccccgagaagtcaaagctgcctggcatagtggctgaaggcagggacgacttgtacgtctcggacgcctttcacaaagcattcctcgaagtgaatgaagaaggttccgaagcggcagccagcaccgctgtggtgatcgctggacggagcctgaatccgaatcgtgtgaccttcaaagctaataggcctttcctcgttttcatcagggaggtccctctgaacaccattatctttatggggagggtcgctaatccctgcgtcaaatag

SEQ ID NO: 5032 - RNA, 1503 nt, synthetic construct
  misc_feature 1..1503: note = source = /note="Description of Artificial Sequence: Synthetic coding sequence"
  source 1..1503: mol_type = other RNA
atggcaagtcgactgacgctgttgacactgctgttgctcctccttgctggcgaccgggcttcctcaaatcccaatgctactagttcatccagtcaggatcccgagtctcttcaagataggggcgagggcaaggtcgccacaacagtgatctccaaaatgctcttcgtggaaccaatcctcgaggtgtcttctctgccaaccacaaattccaccacgaattcagccaccaagattactgccaacactacggacgaacctaccacgcagccaactactgaaccgacaactcaaccaaccattcagcccacacagccaactactcaactgcctacagactctcccacccagcccactacaggctcattttgtccaggccctgtcaccctgtgttctgacttggagtctcattccactgaagccgtccttggggatgcacttgtcgactttagcttgaaactttaccacgccttttcagccatgaaaaaagttgagaccaacatggccttttcacctttctctattgcatccttgctgacccaggtcttactaggtgccggcgagaacactaagaccaatttagaatcaattttgagctaccctaaggactttacgtgtgtgcatcaggcactcaaaggcttcacaacaaagggggtcaccagcgtttcacaaatatttcacagcccagacctcgcaattcgagatacattcgtcaacgcatccaggaccctctactcttcctcccccagagtgctgtccaacaattctgacgcaaatcttgaactcatcaatacctgggttgcaaaaaatacaaacaataagatatctcggctcctggattctcttcctagcgacactcggctggttttgctcaatgctatctatctctccgccaaatggaaaaccaccttcgaccctaagaaaacccgcatggaaccatttcacttcaagaatagcgtgattaaggtgcctatgatgaatagcaagaaataccccgtcgcacacttcatcgaccaaactctgaaagccaaagtgggacagctacaactcagccataatctatcactggtgatcctcgtcccacagaatctcaagcataggctggaagacatggagcaagccctgtctccaagtgtattcaaggctattatggaaaaactggagatgagtaaattccagccaacactgcttaccctgccacgcattaaagtgaccacatcacaggacatgctttctatcatggaaaagctggaattctttgacttttcttatgacctgaacctatgtggcctcacggaagatcccgatctccaggtctcagctatgcaacaccagacagtcctggaattgacagagactggcgtagaggccgccgctgcgagtgcaatcagtgttgcccgcacattattagtttttgaagtgcaacagccttttctcttcgtgctttgggaccagcaacacaaatttccagtttttatgggccgcgtttatgatccaagggcgtag

SEQ ID NO: 5033 - RNA, 1518 nt, synthetic construct
  misc_feature 1..1518: note = source = /note="Description of Artificial Sequence: Synthetic coding sequence"
  source 1..1518: mol_type = other RNA
atggccagcagactgacactcctcactctactgctcctgttacttgccggatttctggaaccccaagaccgcgcatcctcaaaccccaatgccacatcatccagctcccaggaccccgagagcttgcaggacaggggcgaaggcaaagtggcaacaacagtaatctccaaaatgttatttgtcgaacctattctcgaggtgagtagcctccccaccactaacagcacaacgaacagcgcaactaagatcacagcaaacacaaccgatgaacctaccacccagcccaccacagaaccgacaactcaaccgactattcagcccactcagcccaccactcagctgcctacggattccccaacccagcccacaacgggtagcttttgtcccggacccgttaccctgtgttctgatctcgagtctcacagcactgaagccgtcctgggcgatgccctagttgacttctctctcaaactctatcacgcctttagtgccatgaagaaagtggaaacaaacatggcctttagtccattttcgattgcatccttacttacgcaggtgttgctgggtgccggcgagaatacaaaaaccaacctagaatccattctgagttacccaaaggacttcacatgcgtgcatcaagcactgaagggtttcactaccaaaggggtaacctcagtatcccagatcttccactcccccgatctggctatccgcgatacctttgtgaatgcatcacggaccctttatagcagtagcccaagggtcctctccaataacagcgacgctaacctcgagctgatcaacacctgggttgcaaaaaatactaacaacaagatttccagactcctggactcattgccgagtgatacccggcttgttttattgaacgcaatctacttatccgcaaaatggaaaaccacattcgaccccaagaaaacccgtatggaaccattccacttcaagaactccgtgatcaaggttccgatgatgaactcaaagaagtatcccgtcgctcacttcatcgatcagaccttgaaggcgaaggtgggtcagttgcagctgtcccataacctgtcattagtgattcttgtaccccagaatcttaagcatcgactagaagatatggaacaggcgctctcaccgagtgtgtttaaagcaattatggaaaaacttgaaatgagcaaattccaaccgaccttactgacgctgccaagaatcaaagtcacaacaagtcaggatatgctgtccatcatggagaaattggaattcttcgacttctcatacgatttaaatctttgcgggttaacagaggatccagacctgcaagtgtctgccatgcagcatcagaccgtcctggagctgacagaaactggggtggaggccgcagcagcttccgccatttcagtggctagaaccctcttggtttttgaggtgcaacagccatttcttttcgtcctgtgggaccagcagcacaaattccccgtgtttatgggacgcgtatatgatccccgtgcctag

SEQ ID NO: 5034 - RNA, 1347 nt, synthetic construct
  misc_feature 1..1347: note = source = /note="Description of Artificial Sequence: Synthetic coding sequence"
  source 1..1347: mol_type = other RNA
atgttgttcgttgaaccaattctggaagtctctagtttacccacaacaaatagcaccacaaactccgcgacaaaaattaccgccaataccacagacgaaccgactacacagccgacaacagagcccactacgcagcccaccattcagcccacccaacctactacccagctgcctacagattcccctacacagccgacaaccggaagtttttgccccgggcccgtgacactgtgcagcgacttagaatcccattcaactgaggcagttcttggcgatgcactggtggatttctcacttaagctttatcacgctttcagcgctatgaaaaaggtcgaaacaaacatggccttctcgccattttccatagcttctcttttgactcaggtgttactgggagccggggagaatacgaaaacgaacctggagtcaatactaagttatccgaaggattttacctgcgtacaccaggctctgaaaggctttacaaccaaaggggtcacatccgtcagccagatttttcattctcccgacctagcaatcagggatacattcgtgaacgcttcaagaacactttatagcagcagcccacgggtgctgtctaataactccgacgccaatttggagctcattaacacttgggtggccaagaacaccaacaacaaaattagccgtctcctggactccctcccatccgatacaagattagttcttctcaatgccatctacctttctgccaagtggaaaacaacatttgaccctaagaaaactaggatggagcctttccattttaagaattcagttatcaaggtacctatgatgaactctaagaaatatcctgttgcccactttattgatcagactctcaaggcaaaggtgggccagttgcagttgtcgcacaatctatccctcgttatcctggtccctcaaaatctgaagcaccgcctggaagatatggagcaagctctctccccatctgtctttaaagctataatggaaaagcttgaaatgtccaagttccagcctacactgctcacactcccacgcataaaagtcactacctcccaggacatgctgagcatcatggaaaaactggaattttttgacttctcttatgatttaaacttatgcgggttaaccgaggatcctgacctgcaggtgtctgctatgcagcaccaaaccgtcctagagctaacagaaactggcgtggaagccgctgccgcaagcgccatcagcgtggcacgtacactgcttgtctttgaagttcagcagcccttcctctttgttttgtgggatcaacaacataaatttccggtttttatgggccgagtgtacgatccaagggcctag

SEQ ID NO: 5035 - RNA, 483 nt, synthetic construct
  misc_feature 1..483: note = source = /note="Description of Artificial Sequence: Synthetic coding sequence"
  source 1..483: mol_type = other RNA
atggcatcccgcctcaccctgctcacccttctactcctccttctggctggcgaccgggctagtagtaaccccaatgcaacctctagcagttctcaggatccagagtccctccaagacagaggtgaggggaaagttgcaaccactgtgatctctaaaatgttatttgtggagcctattctggaagtaagcagcctacccacaacaaattcaactaccaattccgccacgaagataacagctaacacgacagacgagccaacaactcaacctacgaccgagcccactactcaacccaccattcagcctacccagcctacaactcaactgcctaccgatagccctactcagcccacaactggctctttttgccctggccctgtgacactgtgcagtgatctggagagccacagtaccgaggcagtgttgggtgacgcactggtcgatttctctttaaaactttatcatgccttttcagccatgtag

SEQ ID NO: 5036 - RNA, 402 nt, synthetic construct
  misc_feature 1..402: note = source = /note="Description of Artificial Sequence: Synthetic coding sequence"
  source 1..402: mol_type = other RNA
atggcctctcgactcaccctcctcactctcttactgttgctgttggctggagacagagcttctagcaatccaaacgccacaagttccagctcacaggacccagaaagcttgcaggaccgcggtgaaggcaaggtggccactacggtgatttccaagatgctctttgtcgaacccattctggaggtaagctctctcccaacaacaaacagcacaacgaattccgccacaaagatcacagctaacacgaccgatgagcccacaacgcagccaacaacagaacccaccacgcagcccacaatacaaccgacccagcccacgacacagcttcctactgacagccccactcaaccaggctacgccctaaaccatggagaaataggcattctgcggttttttctttag

SEQ ID NO: 5037 - RNA, 1335 nt, synthetic construct
  misc_feature 1..1335: note = source = /note="Description of Artificial Sequence: Synthetic coding sequence"
  source 1..1335: mol_type = other RNA
atgtgcctctgttctggaaggaaaacaattttggaaatctaccccggtcaatttcaaccctctttgtgtcataagttcattgccctcagcgacaaggagggaaaactcttgcgcaactatacccaaaacatagacacactagagcaagtggccggcatacaaagaatcattcagtgccacggaagcttcgctactgcctcctgcctcatatgtaaatataaagtggattgcgaagcagtaaggggggatatcttcaatcaagtagttccacgatgccccagatgcccagctgacgagcctctggccataatgaaacccgaaatcgtgttttttggtgagaacctgcctgaacagttccatcgtgccatgaagtacgacaaggacgaggttgacctgttaattgtgatcggaagttctctgaaggtgcgcccagttgccctgataccttcatccattcctcacgaggttcctcagatacttattaatagggagcctttgcctcacctacatttcgatgttgaactgctgggggactgcgatgttatcataaacgaactttgtcacagactcgggggcgaatacgctaaactgtgctgcaatcccgtgaagctatccgaaatcacagaaaagcccccgcggacacagaaggaactggcttatcttagtgagctccccccaacgccacttcacgtatcggaagattcatcttctcctgagcgaacatccccccccgactcaagcgtgattgtcaccctgctcgaccaggccgcaaaatccaatgacgatcttgacgtcagcgagagtaagggctgcatggaagaaaaaccccaggaggttcagaccagtcgtaacgttgaaagtatcgccgaacagatggaaaaccctgacctgaaaaatgtgggctctagcaccggcgaaaaaaacgaaagaacatccgtcgccggaaccgtccgaaagtgctggcctaacagggtggctaaagagcaaatctcccgccggctggacggcaaccaatatcttttcctcccgcctaatcgatacattttccatggagccgaagtgtactccgactctgaggacgacgtactgtcctcctcaagctgcggatcgaactccgatagtgggacatgtcaatcgcctagtctggaggagcccatggaagatgagtccgaaatcgaggagttttacaacggcctggaagacgagcctgatgtcccagagagggcgggcggggctggctttggcaccgatggtgacgaccaagaagccattaatgaggcaatttctgtaaagcaggaagtcacagatatgaactacccctctaataaaagttag

SEQ ID NO: 5038 - RNA, 1335 nt, synthetic construct
  misc_feature 1..1335: note = source = /note="Description of Artificial Sequence: Synthetic coding sequence"
  source 1..1335: mol_type = other RNA
atgtgcctgtgttccggacgtaagactatccttgaaatataccccggacagttccagcctagcctgtgccacaaatttatcgcgctgagtgacaaggagggaaagcttctacgcaactacacccaaaatatcgacactctcgaacaggtggccggaattcagcgcatcatccagtgccacggaagctttgccacagccagctgtcttatatgtaagtacaaagttgactgcgaagctgtccgcggagatatctttaatcaagttgtgccacgttgccccaggtgtcccgcggatgagcccttggccattatgaagccagaaattgtgttttttggtgagaacctgcccgagcaatttcaccgcgcaatgaagtacgacaaagacgaggtggacctgctgatcgtgattggaagctcactgaaagttaggcctgtcgcgttgatcccttcatccatcccccacgaggtaccacaaattttgatcaatagagaaccgttaccacacctgcacttcgacgtggaactcctgggcgactgcgacgtcatcattaatgaactctgccatcgactcgggggggagtatgcaaaactgtgctgcaaccctgttaaactgtctgagattacagaaaaaccgccacgaacacagaaagagctcgcatatctcagcgaactccccccaacaccgctgcatgtttcagaggacagctctagcccggaaagaactagcccaccagattcaagcgtgattgtgaccctgctggatcaggctgctaaaagtaatgacgacctcgacgtgtcagaatcgaaaggatgtatggaagaaaagcctcaggaagtgcagacatcgcgcaacgttgaatcaatcgccgagcagatggagaaccctgacctcaagaatgtaggtagctccacaggcgagaagaatgagcgtactagcgtcgcagggacagtcagaaaatgttggcctaaccgagtagccaaggaacagataagtcgcagactggacgggaatcagtacttgttcctccctccaaaccgctatattttccacggtgctgaggtctacagtgacagcgaagacgacgtactctctagctcgtcctgcggctcaaactctgacagtggaacatgccagagcccttctttagaggagcctatggaggacgagtctgagatcgaggaattctacaatggactggaggacgaacccgacgtcccagaaagagctggaggcgctggattcggcactgacggagacgatcaggaggcgatcaatgaggccatttctgtgaaacaagaagttacagacatgaactatccaagcaacaaatcctag

SEQ ID NO: 5039 - RNA, 1359 nt, synthetic construct
  misc_feature 1..1359: note = source = /note="Description of Artificial Sequence: Synthetic coding sequence"
  source 1..1359: mol_type = other RNA
atgtttgatatcgaatacttcagaaaagatcccaggcccttcttcaagtttgcaaaagagatctatcctggccagtttcagccatctttgtgccataaattcattgcactgagcgacaaggaagggaagctgttgcggaattacacacagaacatcgatactctggaacaggtggctgggatccagcggattatccagtgtcatggctcattcgctactgcctcatgtctcatctgtaagtacaaagtcgattgtgaagccgtgcgcggtgacatcttcaaccaggttgtacctcgttgtccacggtgccccgcagacgaaccactcgccatcatgaaaccggaaattgtttttttcggggaaaatctgcctgagcaatttcacagagccatgaagtatgataaagatgaggttgacctgctcattgtaatcgggagttcgctcaaggttaggcctgtggcgctgattcccagctctatcccacatgaggtgcctcagatcctgataaatcgtgagccccttccccacctgcactttgatgtcgagcttttaggagattgcgatgtgataatcaatgagttgtgtcatcgactaggaggtgagtatgccaaattatgttgtaaccccgtgaaactgagcgaaattactgagaaacctcctcgtacccaaaaggaattagcatatctttcggagctgcccccaaccccgctgcacgtgtctgaggacagctcaagcccggagaggacatcaccaccggatagctccgtcattgtgacactgttggaccaggcagccaaatccaacgacgatctagacgtatccgagagcaagggttgtatggaagaaaagcctcaggaagttcagacatcccgcaacgtggaaagcatagctgagcaaatggagaatccagatttgaagaacgttgggtcctcaactggagaaaaaaacgaacgtacctcagtagcaggcacggtccgaaagtgttggcctaaccgggttgccaaagaacagataagcagaaggctcgacgggaaccagtatctatttctcccccctaataggtatattttccacggcgctgaggtttactccgacagcgaagatgatgtcttgagctcatcttcctgcggctcaaattccgatagcggaacatgtcagtctccctccctagaagaacccatggaggatgagtctgagattgaagaattttataacgggctggaggatgaacccgacgtacccgaacgggccgggggagctggtttcgggaccgatggagatgatcaggaagcgattaatgaggccattagcgtcaagcaagaagtcactgacatgaactacccctccaacaagagttag

SEQ ID NO: 5040 - RNA, 987 nt, synthetic construct
  misc_feature 1..987: note = source = /note="Description of Artificial Sequence: Synthetic coding sequence"
  source 1..987: mol_type = other RNA
atgagcgtaaattacgctgctgggttgagcccatacgcagataagggtaaatgcggccttcctgagatttttgatccccctgaggaactcgagcggaaggtgtgggagctggcacgcctagtctggcaaagctccagtgtagtctttcacacaggagcagggattagcacagcatctggaatacccgactttagagggccacacggcgtgtggactatggaggagcgcggcttagcccctaagttcgatacaacctttgaaagcgcccgacccacacaaacacatatggccctggtccagctagagagagtgggattgctgcggtttttggtaagtcagaacgttgatggactccacgtgagatccggatttcctcgagacaaattagccgaattacacggcaacatgttcgttgaagaatgcgcgaagtgcaaaacccagtatgttcgggatactgtagtggggacaatgggcttgaaagctaccggccgcctctgcaccgtggcaaaagcaaggggcttgcgagcttgccggaacgcagacctttcaattacgctcgggaccagtctccagattagaccctccggtaacctaccacttgctactaagagaagggggggtcgcttggttatcgtcaatctccagccgacaaaacacgaccgtcacgctgaccttaggattcacggatacgtagacgaagtaatgacccgtctgatgaaacacctagggcttgagatccctgcttgggatggcccccgcgtcctagaacgggctcttcctccactaccccgtcctccaacccccaagctggagccgaaggaggaaagtcctactaggatcaatggatccattcctgcaggtcccaaacaagagccatgtgcacagcacaatggtagcgagcccgccagtcctaaaagagagcggccaacatctcctgccccacatcgtcccccgaaacgtgtgaaggccaaagccgtaccttcatag

SEQ ID NO: 5041 - RNA, 1068 nt, synthetic construct
  misc_feature 1..1068: note = source = /note="Description of Artificial Sequence: Synthetic coding sequence"
  source 1..1068: mol_type = other RNA
atgtctgttaactacgccgctggcctgtcaccatatgcagacaagggcaagtgcggactgcccgaaattttcgaccctcccgaggaattggaacggaaagtgtgggaactcgcccgactcgtctggcagagcagttcagttgtatttcacaccggagcagggatctctactgcgtccggaatccccgatttccgagggccccacggtgtttggacaatggaggaaagggggctagcacccaagttcgataccacttttgagagcgccagacctacccaaactcatatggctctggtacagctggagcgcgtcgggctgctgagattcctggtgtcacagaacgttgacggactgcacgtgaggtccggttttccgcgcgataaacttgccgaattacacgggaatatgtttgtggaggagtgcgctaaatgcaagacacaatacgtaagggacaccgttgtcggaactatggggctgaaggcaacggggcgcttgtgtaccgtcgctaaagctcggggacttcgtgcctgtagaggtgaactgcgagatacaatcctcgactgggaagacagcctcccagaccgcgacttagcactggctgatgaagcttccagaaacgccgatctgagcattaccctcggaacttccctgcagatccgccccagcgggaacctgccgttagctacgaagcggagaggtggacgcttagtgatcgtgaatttgcagccgacaaagcacgatcgccatgctgatctcaggatacatggctatgtggacgaggtgatgaccagactgatgaaacatttgggtttggagatcccagcttgggatggacctagggtactagagagagcgctcccgcctttaccaagaccacccactcctaaactggagccaaaggaggagtctccaactagaataaacggttccattccagctggccctaagcaggagccctgtgcacaacacaatggatccgagcctgcaagccctaagcgagagagacctacatcgcccgccccccacagacctcccaaaagagtgaaagccaaggccgtgcctagctag

SEQ ID NO: 5042 - RNA, 852 nt, synthetic construct
  misc_feature 1..852: note = source = /note="Description of Artificial Sequence: Synthetic coding sequence"
  source 1..852: mol_type = other RNA
atggaggagagaggactggcacccaagtttgataccactttcgagtccgcaagaccaacacagactcacatggccctggtgcaactggaacgggtgggcctgctccgattcttggtgtcacagaacgtggacggcctccatgtccggtctggatttccgagggacaagttagccgagctgcatggaaatatgttcgtggaggaatgcgctaagtgtaaaacacaatatgttagggacaccgttgttggaactatgggcctgaaggcaaccgggagattgtgcactgtggcaaaagcccgaggcctcagagcttgtaggggggaactgagggataccatccttgactgggaagactcactccccgatcgcgaccttgcccttgccgatgaggcgtctcggaacgccgacctctcgatcaccttgggtacctccctccagattcgtccgagcggcaatttacccttagccactaagaggagaggaggccgactggtgattgtaaatcttcagccaactaagcacgacaggcatgccgatttaagaatacacggatatgtcgatgaagtgatgacgcgcctgatgaaacacttgggacttgagatccctgcatgggatggaccccgcgtactcgagcgggccttacccccacttccgaggccccccacccctaagttagagcctaaagaggaaagccctaccagaattaacggatccatacccgccggaccgaaacaagagccatgcgcccagcacaacggaagtgagcctgctagccccaaacgggagcggccaacaagtccagcccctcatagaccaccgaagcgggttaaagccaaggcagtccctagttag

SEQ ID NO: 5043 - RNA, 2496 nt, synthetic construct
  misc_feature 1..2496: note = source = /note="Description of Artificial Sequence: Synthetic coding sequence"
  source 1..2496: mol_type = other RNA
atggagcggccgtggggagccgcggatggcctgtcaaggtggcctcatgggctcggtttgcttttgttactgcagcttctgccaccaagtactctcagccaggacagattggatgcgccacccccacccgctgcacccctgccaagatggtccggacccattggggtgtcctgggggcttcgtgccgcggccgcagggggagctttcccacgtggggggagatggcgcaggtccgccccaggggaagatgaagaatgtgggcgggtgcgggattttgtagcaaagctcgccaacaatacgcaccagcacgtgtttgacgacctgcgcgggagcgttagtctgagttgggttggtgactccactggcgtgatacttgttctcaccacgtttcacgtcccacttgttatcatgacctttggccaatctaaactgtatcgaagtgaggactacgggaaaaatttcaaagatatcactgacttgatcaacaataccttcatccggactgagtttggcatggctatcggacctgagaatagcgggaaagtagttttgacagccgaagtgagtggcgggtcaagaggaggcaggatattccgctctagtgatttcgcgaaaaattttgtgcagaccgacctaccctttcatccattaacgcagatgatgtacagcccgcaaaattctgattacctgctggcgctgagcacagagaacggtctgtgggtgtcaaaaaatttcggcggtaagtgggaagaaatccataaggcggtgtgtttagctaaatgggggagtgacaacaccatcttctttacaacatacgcaaacggcagctgcaaggcagatttgggggcgctggagctgtggcggaccagcgatctcggcaagagctttaagacaatcggagtgaagatctattcttttggcttgggtggtcggtttctcttcgcttctgtgatggcggacaaggacacaacgcgccggatccatgtgtccacagaccaaggagacacatggtctatggctcagttgccttcggtgggacaggaacagttttactcgatcttggccgccaacgacgatatggtcttcatgcacgtcgacgagcctggagatacgggttttggtaccatcttcaccagcgatgaccgaggcatcgtgtattcaaagagcttggatcgccacctgtacacaaccacggggggagagacagacttcactaatgtaactagtctacgtggggtgtacataacctctgtgcttagtgaggacaactccatacaaacaatgattacctttgatcagggtggacggtggacccacctgcgaaaacctgagaacagtgagtgtgacgccaccgcaaagaacaaaaacgagtgctcactacatattcacgctagctacagcattagtcagaaactaaatgtgccgatggcacccctatctgagcccaacgccgtgggaatcgtcatcgcacacgggtcggtcggcgatgcaatatcagttatggtgccagacgtttacatctcagatgacggcggctattcttggaccaagatgcttgaaggaccacactactacaccatattggacagcgggggaatcatagtggctattgaacacagcagtcgtcccatcaacgtgatcaagttttccactgacgaagggcagtgctggcaaacatacacctttactagagatcctatttattttacgggcctggcatccgaaccaggcgcacgctccatgaatatttcaatttggggatttactgagtcatttctcacatcacaatgggtatcatataccatcgattttaaggatatattggagaggaattgcgaagagaaggattacaccatttggttagcacattccacagacccggaagactatgaagatggctgcattttagggtacaaagaacagtttctaaggttgagaaaatcatcagtctgccagaacggccgggattatgtcgtgaccaagcaacctagcatctgtctttgttcactcgaagattttttgtgtgactttggttattatcgacccgaaaatgatagcaaatgcgtggaacagccagagctcaaaggccacgatctcgagttctgcctgtacgggagggaagaacatcttacaacgaatggctacagaaaaattccaggcgataagtgccagggcggcgtgaacccggtaagagaagtgaaggatctgaagaagaaatgtacttccaactttctgtcccctgagaaacagaacagcaagtccaactccgtccccattatattggctattgtcggcctcatgctggtcacagttgtggcgggtgtgcttatcgtcaagaagtatgtttgcggcgggagatttcttgtgcaccgatactccgtactgcagcagcatgctgaggccaacggcgtggatggcgttgacgccctggatacagcttcccacaccaacaaatctggatatcatgatgattcagatgaggacctacttgagtag

SEQ ID NO: 5044 - RNA, 2085 nt, synthetic construct
  misc_feature 1..2085: note = source = /note="Description of Artificial Sequence: Synthetic coding sequence"
  source 1..2085: mol_type = other RNA
atgacttttggacagagtaaactctaccgatccgaggattacgggaagaactttaaggacattaccgatttgattaacaatactttcattaggacagagtttggcatggcaattggtcccgagaactcaggaaaggtggtgctgactgcagaggtttcgggggggtcaagagggggacgcattttccggtcctcagacttcgcaaaaaacttcgtgcagactgatctgcctttccacccactcacacagatgatgtacagcccgcagaacagcgattacttgctggctctctccaccgaaaatgggttgtgggtctcgaaaaatttcgggggcaagtgggaagaaatccacaaggccgtatgtcttgcgaaatggggctccgacaatacaatatttttcacaacgtacgcgaatggcagttgcactgatctcggtgcccttgaactgtggcgcacatcagatcttggaaaatcgttcaagacgatcggagtgaagatctattcattcgggctgggagggcgcttcctgttcgcctccgtgatggccgataaagacaccactcgccgaattcacgtgtctaccgatcagggcgatacttggtccatggctcaactgccgtccgtggggcaggagcagttctactccatccttgctgcaaatgacgacatggtgttcatgcacgttgacgagccaggcgatactggcttcggaaccatattcactagtgatgaccgtggtattgtttacagcaaatctctcgacagacacttgtacacaacgaccggaggggaaaccgatttcacaaatgtgactagcctgagaggtgtgtacattacatccgtgctgagtgaggataattctatacaaacaatgattactttcgaccaggggggtcgctggactcacctcagaaagccagagaactcagagtgtgacgctaccgctaaaaacaaaaacgagtgctctctgcatattcatgcctcctattccatttcacagaagctgaatgttcccatggcaccactgtccgagcccaatgcagttggaatagttatcgcacacgggagcgtgggcgatgccatatctgtgatggtgccagatgtttacataagtgatgatgggggatatagttggactaaaatgctggaaggcccgcactattacactatccttgactccggggggatcatcgtcgccatcgagcatagcagtaggccaattaacgtgattaaattttctacagatgagggacagtgttggcagacttatacgttcactagagaccctatctatttcacagggcttgcttcagaaccgggcgctcgaagtatgaatatttccatctggggattcacagaatcctttttgacatcacagtgggtctcatacacaatcgatttcaaggacatcttagaacggaactgcgaggaaaaggactacaccatctggctggcccatagcacagaccccgaggactatgaagatggatgtattctcgggtacaaggaacagtttctccgcctgcgcaagagcagtgtgtgtcagaacggtcgggactatgtggttactaagcagccctccatttgtctttgttcactggaggactttctttgtgactttggctactaccgacccgagaacgactccaagtgcgtagagcagcctgagttgaaagggcacgacctcgagttttgtttatatggcagagaggaacacttaaccacaaatgggtaccggaagatccctggtgacaagtgccaggggggagttaatccagtcagagaggttaaagatttaaaaaagaagtgtacgagtaactttttgtccccagaaaagcaaaatagcaaatccaactccgtaccgattatcctcgcgattgtaggcttgatgctggtgactgtggtggccggtgttttgattgtgaaaaaatatgtatgtggaggaagattcttggtccatcgttactcggttctgcagcaacacgccgaggccaacggtgtcgatggagtagacgcactcgatacagcatcccacactaataagtcaggttaccatgacgatagcgacgaggatttgctggaatag

SEQ ID NO: 5045 - RNA, 1536 nt, synthetic construct
  misc_feature 1..1536: note = source = /note="Description of Artificial Sequence: Synthetic coding sequence"
  source 1..1536: mol_type = other RNA
atgggagtgttgaagtttaagcacattttcttcaggtcctttgtgaaaagcagcggagtatcccaaattgtgtttacctttctcctcatcccctgttgtcttacactgaacttcagagccccgccagtcatcccgaacgtgccatttttgtgggcttggaatgcccctagcgaattttgcctggggaaatttgatgagccattagacatgagcctgttttccttcatcgggtctcctcgtattaatgcgaccggacagggggtaacaattttctacgtcgacaggttgggatattacccttacattgattccatcactggcgtcacagtcaacggcgggattcctcaaaagatctccctacaagaccatctcgataaagccaagaaggatataaccttttatatgccggtggataatctcgggatggcagttatagactgggaagagtggcggcctacctgggcacgcaattggaagccgaaggatgtgtataaaaaccgctctattgaattggttcagcagcaaaatgtccagctgagcctgacagaggccactgagaaagccaagcaggaatttgaaaaggccggtaaggactttttagtggagacgattaaactaggtaaactgctccgacccaaccacctatggggttattatctgttccccgattgctataaccatcactacaagaagcccggctacaatggctcatgctttaatgtagagataaaacgtaacgatgatttatcatggctgtggaatgaatcaacggccctgtacccttctatctatttgaacacccagcaaagtccagtcgctgctaccctctacgttcgcaaccgtgtgcgagaagctatacgcgttagtaagatcccagacgctaagtcaccactgccagtttttgcttacacccgaattgtgttcactgatcaagtgctgaagtttttgtcccaagacgagctggtatataccttcggagaaactgtggcgttgggagcttcaggtatcgtaatatggggtaccttgtctataatgaggagtatgaaaagttgcctgttactcgacaattacatggagaccatcctcaacccgtacataattaacgtgactttggctgctaagatgtgctcacaagtgctttgccaggagcagggcgtctgtattaggaagaattggaactctagtgactatctgcaccttaacccagacaatttcgctatccagctggagaagggtggaaaattcacagtcagggggaaaccaacactagaggacctagagcagtttagcgagaaattctattgttcatgctacagcaccctctcatgtaaagagaaggcagacgttaaagacacagacgccgttgatgtctgtatcgcagacggggtgtgtatcgacgcattcctgaagcctccgatggaaaccgaggaaccacagatcttttacaacgcctctcccagcactctgtctgctacgatgtttatctggagactggaggtgtgggatcaaggaatcagccggatagggtttttttag

SEQ ID NO: 5046 - RNA, 1530 nt, synthetic construct
  misc_feature 1..1530: note = source = /note="Description of Artificial Sequence: Synthetic coding sequence"
  source 1..1530: mol_type = other RNA
atgggggtgctaaaatttaagcacatcttcttcagatcctttgtgaagtcctctggagtgtcacagattgtgttcactttcttactcattccttgttgccttacgctcaactttcgcgccccaccagtcatccccaacgtgccatttctctgggcatggaacgccccatctgagttttgcctgggtaaatttgacgaaccccttgacatgtcgttgttttcattcatcggctcaccgaggattaacgctaccggccagggcgtcaccattttttacgtggacaggcttggatactacccttacattgatagcattactggcgttaccgttaacggaggtattccccagaaaatttcgcttcaagaccatctcgataaagccaaaaaagatattaccttctacatgccagttgacaatctgggcatggccgtgatcgattgggaggaatggcggccaacttgggcccggaactggaagccaaaggacgtctataagaataggagcatcgaacttgtgcaacaacagaatgttcagctaagcctgaccgaagcgaccgagaaggccaagcaggaatttgagaaggccgggaaggacttccttgtggagacgattaagctgggtaagctactcaggcctaaccatctttggggttactacctctttcccgattgttataaccaccactataagaagcccggctacaacggttcctgttttaacgttgaaataaaaagaaatgatgacctgagttggctgtggaatgaaagtaccgccctgtatccgagcatatatctgaatacccagcagtctcccgttgcggcaactctatatgtacgaaatagggttcgcgaagccatcagggttagtaaaattcctgacgccaaatccccactcccggtgttcgcgtacaccaggatcgtgttcacagaccaggtactgaaatttctttcgcaagatgaactcgtttacaccttcggcgagacagttgcgctgggagctagtggcatcgtcatctgggggactctttcaatcatgcgctccatgaagtcatgtttgctcctggataactatatggagactattctaaatccttacatcattaatgtcactctcgcagctaagatgtgtagccaggtactttgtcaagagcaaggcgtctgtataaggaagaattggaattcaagcgattaccttcacctaaaccccgataactttgcaattcaactggagaagggtggtaaatttacggtaagagggaagcccaccctggaagatcttgaacagttcagtgagaagttctactgctcctgctactctaccctctcatgtaaagaaaaagccgacgtgaaggataccgacgcagtcgacgtttgcatagccgacggagtctgcattgatgcattcctgaagcccccgatggagaccgaagaacctcagatcttctataatgcatcaccatccaccctgtctgccactatgtttatcgtgagcatcctgtttcttattatcagctcggtcgcctcgctctag

SEQ ID NO: 5047 - RNA, 243 nt, synthetic construct
  misc_feature 1..243: note = source = /note="Description of Artificial Sequence: Synthetic coding sequence"
  source 1..243: mol_type = other RNA
atgggcgtactcaaattcaaacatattttcttccgatcctttgtgaagtcctccggtgtttctcagatcgtttttacatttctcctgataccttgttgtttgacactgaattttagagccccgccagtaatccctaatgttccttttttatgggcatggaacgccccctccgaattttgtcttggcaagttcgacgaaccacttgacatgtcactgttcagcttcattgggtccccacgctag

SEQ ID NO: 5048 - RNA, 1530 nt, synthetic construct
  misc_feature 1..1530: note = source = /note="Description of Artificial Sequence: Synthetic coding sequence"
  source 1..1530: mol_type = other RNA
atgggcgtactgaagttcaaacacatcttttttcgctcattcgtcaagagttccggcgtgtcccaaattgtcttcacctttctcttgatcccctgttgtcttacacttaacttccgggccccgccggttattcccaacgtgccgttcctttgggcttggaatgcaccctctgaattctgcctaggaaaatttgacgagcccctggatatgagtctgtttagttttattgggtctcctaggattaatgctaccggacagggcgttacaatcttctacgttgatagattgggttactatccatatattgactccataaccggtgtcaccgtgaatggagggattccccaaaagatctctctgcaggaccatttagataaagcaaagaaggacattactttttatatgcccgtggacaatcttggcatggctgtaattgattgggaagagtggaggcccacttgggcacgcaattggaaaccaaaggatgtctataagaatcgcagtattgaactagtccaacagcagaacgtccagttatccctgaccgaagctactgaaaaagccaaacaagagtttgaaaaggccggaaaagatttcctcgtggagacgatcaagctaggcaagttgctgaggccaaaccatctctggggttattacctttttcccgattgctacaaccatcattacaaaaaaccaggatataacggctcatgcttcaacgtggaaattaagcgcaacgacgatctcagctggctttggaacgagtccacagcactgtatcccagcatctacttgaatactcagcagtcaccagtggctgctacgctctatgtgcggaaccgggtgagagaagctattcgcgtgagtaagatacccgatgcaaaaagcccactgcccgtatttgcgtacacaaggatcgtatttacagatcaggttctgaagttccttagccaggatgagttggtgtacaccttcggagaaacagtcgcattaggcgcttctggcatcgttatatggggaacactgagcatcatgaggtctatgaaaagctgcctcttgctggataactacatggaaaccattctgaacccatatattatcaatgtgacactcgctgccaaaatgtgcagtcaggttttatgtcaggagcagggggtgtgcattagaaagaattggaactcctctgactatcttcatcttaacccagataacttcgctatccagttagagaagggtggtaagtttaccgtgcgcggcaagcccactctcgaggacttggagcagtttagcgagaaattctactgttcatgttattcaacactgtcatgtaaggagaaagccgacgtgaaggataccgacgctgtagatgtgtgtattgccgacggggtctgtatcgatgctttcctcaaaccaccgatggaaactgaggagccgcagatcttttacaacgcatctccctctacactgtccgccaccatgtttattgtctctatcctgtttctcattatctcctccgtagcatccctttag

SEQ ID NO: 5049 - RNA, 1530 nt, synthetic construct
  misc_feature 1..1530: note = source = /note="Description of Artificial Sequence: Synthetic coding sequence"
  source 1..1530: mol_type = other RNA
atgggggtgctgaagttcaaacatatctttttcaggtccttcgtcaagtcctctggcgtgtcacagatcgtcttcacgttcctgctcattccatgctgcttaactctgaactttcgcgcaccacctgtaattcctaacgtgccgttcctttgggcctggaacgcaccatcggagttctgcctggggaaattcgatgaaccactcgacatgtcacttttcagctttatcggtagtcccagaatcaacgcaacaggacagggggtcaccatattctacgtcgatagactgggctattatccctacatcgatagcatcacgggcgttaccgttaatggcggaatccctcagaagatctctcttcaggatcatctcgataaagccaagaaagacattacattttatatgccagtcgataaccttggtatggcagtgatagactgggaagaatggcgccctacctgggctcggaactggaagccgaaggacgtgtataagaatcgatcaattgaactggtccagcagcaaaatgtccagttaagcctgacggaagccaccgagaaggcaaaacaggagtttgaaaaggccggtaaagattttctggttgagaccatcaagttggggaagcttctgaggccaaatcacctgtggggttactaccttttccctgattgctataaccatcactacaagaaaccaggctacaatggcagctgctttaatgtcgaaattaaacgaaacgatgacttgtcgtggctgtggaacgagagcaccgctttgtatccttctatctacctgaatacccagcagtcccccgtcgccgcaaccttatatgtacggaaccgcgtccgagaggcaattcgggtgagcaagattcccgacgccaagagcccgctgcctgttttcgcctacacccgcatcgtgttcacggatcaggtactcaaattcctatcccaggacgagctcgtgtacacattcggggaaactgtggcactgggggcgtctggaattgtgatttggggaactctgagcataatgcgttcgatgaaatcttgcctccttttagacaattacatggagacaatcctaaatccgtacattatcaatgtcaccctggcagccaaaatgtgttcacaggtattatgtcaagaacaaggtgtctgtatccgcaagaactggaattcctccgattatttgcatctgaatcccgataattttgccatacagctcgaaaaagggggcaaatttacagttcgaggcaaacctaccctggaggatttggaacaattctccgaaaaattttattgttcatgctactcgaccctctcatgcaaagaaaaagcagacgttaaggatacagatgcagtggatgtgtgtatcgctgatggagtctgtattgacgctttcttaaagcccccgatggagacggaagaacctcagatattctataatgctagccccagcaccctctcagccacaatgtttatagtgtccattctgtttcttatcattagcagcgtggcttccctgtag

SEQ ID NO: 5050 - RNA, 1764 nt, synthetic construct
  misc_feature 1..1764: note = source = /note="Description of Artificial Sequence: Synthetic coding sequence"
  source 1..1764: mol_type = other RNA
atgcccagatacggagcatcccttcgccagtcatgccccagatccggacgagagcaggggcaagatggaaccgccggggctcctggcttgctctggatgggacttgtgttagcactcgctttggccctcgctctggctctggctctgtcagactccagagtgttatgggctccagctgaggcacaccccctgtctccccagggacaccccgcccgacttcatcggatcgtccctcgattacgggatgtgtttggatggggcaatttaacttgtccaatatgtaaaggtctgttcacagccatcaacttgggactcaagaaggaaccaaatgtcgcaagggttggctcagtcgcgattaaactatgcaatctgctcaagatcgccccccctgccgtgtgccagagcattgtacacctgtttgaggacgacatggtggaggtatggagacgcagcgtactgtctccatccgaagcttgcggcctgctcttgggtagtacatgcggtcattgggatatcttctcatcatggaacatttccctcccaactgtcccgaagccacctcccaaacccccatctccccccgcacctggcgcaccagtgagccgaattctcttcttaaccgaccttcattgggatcacgactaccttgaaggaacagaccccgactgcgcggaccctctctgctgccgccggggctccggactgccgcctgcgtcacgtccaggtgctggatactggggagaatatagtaagtgtgatctccccctaagaaccctagaaagtctgctctccggcctgggacctgccggaccctttgacatggtgtattggacaggagacattcccgctcacgacgtctggcatcagacacggcaggatcagctacgcgcgctgactactgtcactgctctggtgagaaaatttctgggaccggtcccagtgtaccccgccgtcggcaaccatgagagtacgcctgttaacagcttcccaccacctttcatcgaaggcaatcattctagccggtggttatacgaggctatggcgaaagcttgggagccatggctcccggccgaagctctacgcacactaaggtatctgtcgtcggtggaaacacaggagggtaaacgtaaagtacacataatcggtcacataccacccggtcactgcctcaaaagctggtcctggaactattatcggattgtggccaggtatgagaacaccctagccgctcagtttttcggccatacccatgtggatgaatttgaggtattctatgacgaggaaacactatctcgtcctctagctgtggcattcctcgctccttctgctaccacatatattgggttaaacccaggctaccgcgtataccagatagatggcaattactctgggtcatctcacgtagtccttgatcacgagacctatatcctgaatctgacacaggccaacatcccgggtgccatcccccactggcagttactctaccgagctagagaaacctacgggctcccgaatacactgccaaccgcatggcacaacctagtgtatcgcatgagaggcgacatgcagctcttccaaacattctggttcttatatcataaaggtcatccaccatccgaaccatgcggaaccccatgcagactcgccactctatgcgcccaactctccgctcgtgcagattccccagcactgtgcaggcatttgatgccagacggttccctgcccgaggctcagagcttgtggccaagacccttgttctgctag

SEQ ID NO: 5051 - RNA, 1896 nt, synthetic construct
  misc_feature 1..1896: note = source = /note="Description of Artificial Sequence: Synthetic coding sequence"
  source 1..1896: mol_type = other RNA
atgcctcggtatggcgcttcgttgagacagtcctgcccacgatccggcagggaacaaggccaggacggaacggcaggggctcccgggttactttggatgggactcgtgctggccttagctctcgcactggcattagcactggcactctcagacagtcgtgtgctgtgggcaccagcagaggcgcatcctttatccccacaggggcatcccgctcgcttacacaggattgtaccgagattacgtgacgtcttcggatggggaaatctgacctgccctatttgcaaaggactgttcacggctataaacctggggttgaaaaaagaaccaaacgtagctcgggtgggatctgtcgccatcaagctgtgcaatttgttaaagatagcaccaccagccgtgtgtcaaagtattgtgcacttgtttgaagacgatatggtggaggtgtggcgccgatcggtcctttctcctagcgaagcttgtggcctgcttctggggtctacgtgcggtcattgggacattttctcctcttggaacattagtctaccaaccgtcccaaagcccccccccaagcctccatctcccccagcacctggcgcccccgtgtctagaattctgttcctgacagacttgcactgggatcatgattacctcgagggtactgaccccgactgcgccgaccctctatgctgtcgccggggctctggactgccaccagcaagccgccccggggccggttactggggggaatattctaaatgcgatctgccactcaggaccctggagagtttgctgagcggcctggggcctgctggaccattcgacatggtctattggacaggcgatatacccgcacatgacgtgtggcaccagacaaggcaggatcagctgagagcccttaccacagtaacagcactcgtgaggaaatttttaggacctgtccctgtgtaccctgccgtgggtaatcacgagtccactcccgtgaatagctttccaccaccatttatcgagggcaatcatagcagtcgatggctctatgaagcaatggccaaggcctgggagccatggctccccgctgaggcccttcgcaccctcaggattggcggattttatgctctttccccttacccgggattgcgcctgattagcctcaatatgaacttttgcagccgggagaatttctggctccttataaacagcacagaccccgcaggacaacttcagtggcttgttggagaactgcaggctgccgaggaccggggtgacaaggttcatatcatcggacacatcccaccggggcactgcctaaaaagctggtcctggaactattatagaatcgtggctaggtatgagaatacactggctgctcaattttttggccacactcatgttgacgaattcgaggtgttctatgacgaggaaacactcagcagacccttggctgtcgcatttttggctccatccgccacaacatacattggcctcaaccctgggtacagagtgtaccagatcgatggaaactatagtggctcctctcacgtggtgcttgaccacgagacttatatcctgaatcttacacaagccaatatacctggggccattcctcattggcagttgctttatcgagctcgcgaaacatacgggcttccaaacacactgcccactgcctggcataatctagtataccgcatgagaggagacatgcagctctttcaaactttctggttcttataccataaagggcaccccccctcagagccatgcggaaccccctgccgcctggcaacattatgcgctcagctgtccgcccgtgccgattctcccgccttgtgtcgccatttgatgcctgatgggagccttccggaagcacagtccctgtggccacgtcctctcttctgttag

SEQ ID NO: 5052 - RNA, 1728 nt, synthetic construct
  misc_feature 1..1728: note = source = /note="Description of Artificial Sequence: Synthetic coding sequence"
  source 1..1728: mol_type = other RNA
atgcccaggtacggagctagcctgcggcagtcatgtccaaggagtggccgagagcagggtcaggacggaacagccggagctccaggtttattatggatggggctggtgctcgccctggctttggcccttgcgctagctctggctttgagtgatagccgggttctctgggccccagcggaggcacacccactgtcacctcagggccatcctgctagattgcatcggatcgtaccgaggctgcgggatgtgtttggatgggggaatctaacctgtccgatctgcaagggtctgtttaccgccatcaacctcggtcttaagaaggagcccaacgttgctagggtggggagcgtggccattaaactgtgcaatttacttaagatagcccctcccgccgtgtgccagtccatcgtgcatctgtttgaggacgacatggtagaggtgtggcgaagatcggttcttagtccgtctgaagcctgcgggctcttactcggtagcacctgtggtcattgggacatttttagcagttggaatatcagccttcccacggtgcccaaaccaccccccaaacctccaagtcccccagctcctggagcccctgtatcccgaattctgttcttgaccgatctgcattgggaccacgactacctggaaggtaccgatccagactgcgcagaccccttatgctgccgacgcggttcaggactgccacccgcatctcggccaggagcaggatattggggcgaatattccaagtgtgacctacccctgcgtacactcgagtctttactgtccggactaggtcccgcaggcccatttgatatggtttattggaccggcgacatccctgcccatgacgtgtggcatcagacccgccaggaccagttgcgtgccttgacaacagtcactgcattggtgagaaagtttctcgggcctgtcccagtctatcccgccgtggggaaccatgagtcaacacccgtcaatagtttcccccctccttttatcgagggcaatcatagcagtcggtggctgtatgaagcgatggccaaggcatgggaaccgtggcttcctgccgaggccttacgtactctgcgcaaggtgcatataataggccatatcccccccgggcattgtctcaagtcatggagctggaattattaccgaatagtcgctcgctacgaaaatacacttgctgctcagttcttcggtcatacccacgtcgatgagtttgaagttttctatgacgaggaaaccctgtccaggcctctagccgtggcctttctggcaccctctgcaacgacctatatcggcctgaatccagggtacagggtgtatcagatagatggcaactattccgggagcagtcacgtggtgcttgatcatgaaacatatattctgaatttgacgcaggccaatatcccaggcgccataccccactggcaattactgtaccgagcgcgcgaaacctatgggctccccaatactctgccaaccgcctggcacaacctggtgtaccgtatgcgcggcgacatgcaactctttcaaacattctggttcctttaccataagggccacccgcctagtgagccatgtgggacaccttgccgtcttgccacactctgtgcccaattgagcgcccgcgccgattcacccgccctgtgccgccatttaatgcccgatggatccctccccgaagctcagagcctgtggcctagacctttgttttgctag

SEQ ID NO: 5053 - RNA, 1893 nt, synthetic construct
  misc_feature 1..1893: note = source = /note="Description of Artificial Sequence: Synthetic coding sequence"
  source 1..1893: mol_type = other RNA
atgcctcgttacggagcatcactgaggcagtcctgccccaggtctggccgggagcagggccaggacggaactgcaggtgccccgggcctcctatggatgggtctggttctggcactggccctggctctagccctcgctctggctctctctgacagtcgggtgctgtgggcacctgccgaggcacatcccctctctccacagggacatccagcacggctccatcgcattgttccccgccttcgagacgtttttggctggggtaatctgacatgtcctatctgcaagggcttgttcactgctattaatttaggcttgaaagagcctaatgtggcccgcgtggggagcgtagccatcaagctgtgcaatctgctgaagatcgccccccctgcagtctgccagtccatcgtccatctgttcgaagacgacatggtcgaagtgtggaggcgtagcgtgttgagcccatccgaagcctgcggcctgttgttaggctctacttgcggccattgggacatcttctcctcttggaatatatctttaccaacggtgcccaaacctcccccgaagccaccaagcccaccagccccaggcgctcctgtttccagaatcctgtttctgaccgacctacattgggaccacgactacttggaggggaccgatcccgattgcgccgatccactgtgctgccgccggggtagcggcttaccccctgcttcaaggcccggagcagggtactggggggaatactcgaaatgcgacctacctttgaggacactggaatctctgctctctggcttgggacctgccggaccttttgatatggtttactggactggcgacattcctgcccatgatgtgtggcatcagactaggcaggatcaactgagagccttaacaaccgtaaccgccctggtcaggaaattcctgggacctgtacccgtttatcctgccgttggcaaccatgaaagcacacccgtcaattcatttcctcctccattcattgagggcaaccattcctctcgttggctgtatgaggctatggccaaagcttgggagccgtggttgcccgctgaagcactgcgcaccttgcgtattgggggcttttacgccctgtccccttatcccggcctcagactgatttcccttaacatgaacttctgctcgagggaaaacttttggttgctaattaatagcactgaccccgccggacaattacaatggctcgttggcgaacttcaggccgccgaggacagaggagataaagttcacattatcggccacattccacctggacattgccttaagagctggagctggaactactaccgtattgttgctaggtacgaaaatacgcttgccgctcagtttttcggccatactcatgtggacgaattcgaggtattctatgacgaggagacattatcacggccgctcgctgtagcatttctcgccccatctgccactacttacatcgggttgaacccaggctaccgcgtgtatcagatcgacgggaactactccggaagttcgcacgttgtgctcgaccatgagacctatattctgaacctgacacaggctaacattccaggagcaataccacactggcagctgctataccgtgcgcgcgagacttatggtctacccaatactttgcccactgcatggcataatttggtctataggatgaggggcgatatgcaactctttcagactttctggttcctttatcataaaggccatcctccctcggagccatgtgggacaccgtgcagactggccaccctctgtgcccagctgagcgccagggcggattctccagcactgtgcaggcacttgatgccagatggatctctcccggaagctcaatctctgtggccgagacctctgttctgttag

SEQ ID NO: 5054 - RNA, 1101 nt, synthetic construct
  misc_feature 1..1101: note = source = /note="Description of Artificial Sequence: Synthetic coding sequence"
  source 1..1101: mol_type = other RNA
atgccccgttacggtgcctccctccgccaaagttgccccaggagtggccgagagcagggccaggatggcactgctggtgcgccaggactcctctggatgggactggtactggccctcgccctcgccttggcgttggctctcgccttaagcgatagcagggtgctgtgggccccagctgaagctcacccgcttagtccccaaggccatcctgctaggctgcaccggatagtacctcgccttagagatgtgttcggctggggaaacctcacgtgccctatatgtaagggactctttactgcgatcaatctgggactgaagaaggaaccgaatgtagccagggttggctctgtagcaatcaagttatgcaatctactcaagattgccccccccgctgtgtgtcagtcgatcgtgcatctgtttgaagacgacatggtggaagtgtggcgtcgttcagtgctgtctccctctgaagcctgcggtctgctgctagggtcaacatgtgggcattgggatatcttctcctcctggaacatctctctgcctaccgtgcccaagccgccgcccaagcccccatctccccctgcaccaggagctcctgtaagcagaatcctctttttgacagatcttcattgggatcacgattacctagagggaacagatcctgactgcgcagatcctctctgttgcagacgcggaagtggcttgcctcccgcaagtcgaccaggagccggctattggggcgaatactctaaatgcgacttgcctctcaggaccctcgagtcactgttaagcggtcttggcccagcggggccatttgacatggtgtattggaccggtgatattcccgctcacgacgtttggcatcagactcggcaagaccagctgcgcgcccttactaccgtaaccgctctggttcgcaagtttcttggcccggtgcccgtgtaccccgctgtaggcaatcacgaatccacccccgtgaactcatttccccctccatttatcgaaggcaaccacagtagtagatggctctatgaagcaatggccaaagcctgggagccttggttacccgcagaagctcttcgcaccctgagatgcatttag

SEQ ID NO: 5055 - RNA, 1209 nt, synthetic construct
  misc_feature 1..1209: note = source = /note="Description of Artificial Sequence: Synthetic coding sequence"
  source 1..1209: mol_type = other RNA
atgccccggtacggtgcttccctccgccagtcatgtccaagaagcggccgcgagcaggggcaggatggaacagcaggcgcacctgggctgctctggatggggctcgttctcgccttagccctggcactggctctagctttagccctgtccgattcacgcgtcctgtgggcgcccgccgaagcacaccctctttcaccacaggggcaccccgcacgactacatcgcatagttccgcgtctacgggacgtcttcggttggggcaatttgacgtgcccaatttgcaagggccttttcacagctatcaaccttggattaaagaaagaacccaatgttgctagagttggctctgtggccattaagttgtgtaacctgttaaaaatcgctcccccagccgtctgtcagtcaatcgtgcatctctttgaggacgacatggtagaagtgtggagaagatctgtactgtccccaagtgaggcctgcggcctccttctcgggagcacttgcggacattgggatatattctcaagctggaatatctctctcccaacagttcccaagcctccccccaaacccccttctcctccagcccccggcgctcccgtgagccgtatcctgttcctgaccgaccttcattgggaccacgactatctggaagggacagaccccgattgtgctgacccgctgtgttgccgcaggggctccgggctcccacctgcaagtcggccaggtgcagggtactggggagagtactctaagtgtgatctgcccctcaggaccctggaatccctgctgtctggcctcggcccagccgggccatttgacatggtgtactggactggcgacattcccgctcacgacgtctggcatcaaacccgacaggaccaactgcgcgccttgactactgtaaccgccctcgtccgtaaattcctgggaccagttcctgtctatcccgccgtcggaaatcatgaaagcactcccgtgaatagttttccccccccctttatcgagggcaaccactcctcacggtggttgtacgaagcgatggccaaggcttgggagccatggcttcctgcagaggctctgagaacccttcggtatctgtcatccgtagagacacaggaagggaaacgcaagaattggggagtactgtgcagctttccgattccccggagcccgccacatttgagccaatacgaatttttgttcccttag

SEQ ID NO: 5056 - RNA, 1062 nt, synthetic construct
  misc_feature 1..1062: note = source = /note="Description of Artificial Sequence: Synthetic coding sequence"
  source 1..1062: mol_type = other RNA
atggagctcaccgagctgctgcttgtggtcatgcttctgctgacagccagactgaccctgtcatcccccgctccgccagcctgtgatctgcgcgtactgagcaaactgctcagagatagccatgtactgcattctagattgagccaatgtccagaggtgcatccacttccaacgcccgttcttctccccgctgtcgatttttctctgggagaatggaagacccagatggaagagaccaaggcccaggatattctgggagccgttaccctcttacttgaaggagtgatggctgcaaggggtcagcttggtcctacatgtctctcaagcctgctcggccagctctcaggtcaggtccggttattacttggagcactgcagagcctgctaggcacacagctgccaccacagggccggaccaccgcacacaaagatcctaatgctatattcttatcatttcagcatctgctaaggggaaaggtgcgcttcctaatgctggtggggggtagtaccctctgcgtgcgtcgcgccccccctaccactgcagtgccaagccgcactagccttgtgttgacactgaacgaactaccaaatcgcacaagcggtcttttggagaccaattttacagctagcgctagaacaacaggatccgggcttctcaaatggcagcagggcttccgcgctaaaatccccggcctcctgaatcaaacaagtagatctttggaccagattccgggctatctgaatagaatacacgaacttcttaatggtacccggggactcttcccgggtcctagtcgcagaacccttggtgcacctgatatttcttccggcacttcagatacgggaagtttgccccctaacctgcagcccggatatagcccctcaccaacccatccccctactggtcagtatactctgtttccgttgccacccacccttccaactcccgtcgttcagctgcatccactacttccggatccctccgctcccaccccaaccccaacatctcctttattgaatacatcctacactcactcacagaatctgagtcaggaaggctag

SEQ ID NO: 5057 - RNA, 945 nt, synthetic construct
  misc_feature 1..945: note = source = /note="Description of Artificial Sequence: Synthetic coding sequence"
  source 1..945: mol_type = other RNA
atggaacttactgagctactccttgtagtcatgctgttgcttacagcccggctgacactgagcagccccgcccctcctgcctgtgacctccgtgtattaagcaagctcttgagggatagccacgtgctccacagtcggctttcccaatgtccggaagtgcaccctctgccaaccccagtcttgttgccggccgtagacttcagtctaggcgaatggaagacccagatggaggagacgaaagctcaagatatcctaggggcagtgactctattactcgaaggcgtcatggcagcaagagggcaactcggacccacctgcctttcatctcttctgggccagctaagtgggcaggtgagattgctgttaggagcgctgcaatcattactcggaacccagctcccacctcagggacggacaacggcccacaaggatcccaacgctatatttctttcttttcaacacctgctccgagggaagacaagcggattgttggagactaacttcacagctagtgctagaaccaccggatctggacttttaaaatggcaacaaggattccgcgccaaaattcctggcctgctcaatcagacctcccgtagtttagatcagatccctgggtacctaaaccggatccacgagcttctgaacggcactcgtggactgtttcccgggccgagtcgcaggacactcggggcgcccgacatcagcagcgggaccagcgacacagggtctctcccgcccaacctccaaccgggttatagcccatcaccgacacatccacccaccggtcagtatacactctttcctcttccccctacactccccacgcctgttgtgcaactccaccccctcttacccgatccatctgcacctactcctactccaacctctcctcttctgaatacttcctacacccatagccagaatttgtcgcaggagggatag

SEQ ID NO: 5058 - RNA, 861 nt, synthetic construct
  misc_feature 1..861: note = source = /note="Description of Artificial Sequence: Synthetic coding sequence"
  source 1..861: mol_type = other RNA
atggagttgaccgaactccttttagttgtcatgctcctgcttaccgcaagattaacactgtcttcacccgcaccgcctgcatgcgatctgcgcgtgctatccaaattactgagggattctcacgtgctgcattcaagactgtcgcagtgccccgaagtccatcccctacctactcctgtgttgctgccagcagtagactttagcctgggggaatggaagacccagatggaagagacaaaagcacaggacattctaggagcggtgacgctgctgctagaaggcgttatggccgcccgtggccagttgggccccacctgcttgtccagcctcctggggcaactctcaggacaggtacgcctcctactgggtgctctgcaatcgctgctcgggacccagcttcctccccagggcagaacaacagcccacaaagaccctaacgctatattcttgtcttttcagcacttactccgcggcaaggacttctggatcgtgggcgataagctgcattgtctaagccagaattactggctgtgggcatctgaagttgccgcaggcattcagtcccaggactcttggagtgctgaacccaatctgcaagtgcccggccccaacccacgaatccccgagcaggatacgcgaactctcgagtggaattcatggaccctttcgtggacactgacacaggatccacggtctcctggacatttcctacgtaacattaggcacagactacctgccacccaaccgcctgcatggatcttctcttttcccaacccgtcaagttactggaccgtgtacgcactgccatcatcaacacacctcgcccacccttgtgggcccgccccaccacctgcctcatag

SEQ ID NO: 5059 - RNA, 1050 nt, synthetic construct
  misc_feature 1..1050: note = source = /note="Description of Artificial Sequence: Synthetic coding sequence"
  source 1..1050: mol_type = other RNA
atggagctcacggagctgctgcttgtagtcatgttactgctcaccgcgaggcttacactctcaagtcctgccccacctgcctgtgatcttcgggtacttagtaagctcctgagagattcccacgttctgcattcaaggctctcacagtgcccagaagtacacccattacctacaccagtgttactgcccgccgtggacttttcgctcggggaatggaagacccagatggaagagaccaaggcccaagatatcctgggtgccgtgaccctgctgctcgaaggcgtgatggcagcaagaggacagctgggccctacatgcctgagtagtttgctgggccaactctccgggcaggtgagactgctgctcggcgccctgcagtccctcttaggaacccagggacgtactactgcgcacaaagaccctaacgcgatttttttatcattccagcatctgctccgtggcaaggttagattcctaatgctagtgggcggcagtacactctgtgtgcggagggcccctcctaccaccgccgtgccgtcacgcaccagtctcgtgcttacactcaacgaactccctaacagaacatccggcctgctcgaaacaaattttacggcttctgctaggacaacgggatccggcttattgaagtggcagcagggcttcagggccaaaatacccggactcctcaaccaaacatcacgcagtctggatcagatccccggctacctaaaccggatccatgagctcctgaatggcacaagaggcttatttcccggaccttccaggaggaccctcggtgctcctgacatatcctccggcacctccgataccgggtctctgccccccaatctgcagcccggttactctccctccccaacccacccgccgacaggccagtacacccttttcccactgcctccaaccttaccgacccccgttgtgcaactgcatccattgctgccagacccaagtgcaccaacccctacaccaacatctcctttactgaatacgtcctatacccactctcagaatttatcccaggagggttag

SEQ ID NO: 5060 - RNA, 1239 nt, synthetic construct
  misc_feature 1..1239: note = source = /note="Description of Artificial Sequence: Synthetic coding sequence"
  source 1..1239: mol_type = other RNA
atgaagatgcacctgcagagggccctagttgttttggccctgctcaattttgctactgtgagtcttagcctgagcacttgcaccacgctggactttggccatattaaaaaaaagagggtcgaggcaatccgaggccagatcctctctaaattgaggctaacctccccccctgaaccaacagtgatgacccacgtcccataccaggtgctggctctatacaatagcacgagggaactgctggaggaaatgcatggggagagagaagaaggctgcacccaggagaacaccgagagcgaatattacgctaaggagatacacaaatttgatatgatacagggtctcgctgagcacaatgaactcgccgtgtgccccaagggcattacttccaaagtcttcaggtttaatgttagctcagtggagaagaatagaaccaacctcttcagggccgagtttagggtactgcgcgtgcccaatccgtcctccaagcgcaatgagcagaggatagaactcttccaaattcttcgcccggatgaacatatcgccaagcagcgttatatcgggggtaagaatctcccaacgagaggcacagcagaatggctttcctttgatgtgaccgatactgtccgtgagtggttactaagacgcgagtctaatttgggactggaaatcagtatacattgtccctgccacacattccaacccaatggagatattctcgagaatattcacgaggtgatggagattaaatttaagggcgtcgacaacgaggatgaccacggaagaggcgaccttggccggctaaagaaacagaaagatcaccataatccacatttgattcttatgatgattcccccccatcgacttgataaccctggacaaggaggccaaaggaaaaagagagccttggatacaaactattgtttcagaaatcttgaagagaattgctgcgtgaggcccctttacattgattttaggcaggatttggggtggaagtgggtacatgagcctaaaggatattacgcgaatttctgcagcggcccttgtccctacctgcggagcgccgacacgacccacagcaccgtgctagggctttataataccctgaatcccgaggctagtgcatccccatgttgcgtgcctcaggacctggaacctctgaccatcctttattacgtaggcagaactcctaaggtggagcagcttagcaatatggttgtaaaaagttgtaaatgtagctag

SEQ ID NO: 5061 - RNA, 930 nt, synthetic construct
  misc_feature 1..930: note = source = /note="Description of Artificial Sequence: Synthetic coding sequence"
  source 1..930: mol_type = other RNA
atgaaaatgcacttgcagcgggccttagttgtgcttgctctactgaactttgccacggtctcgctgagcctgtcaacctgcaccaccctggactttgggcacatcaaaaagaaacgcgtcgaggcgatccgagggcagatccttagcaagctccgtctgacatctcctccagaacccacagtcatgactcacgtgccttatcaagtgctagcactctacaactccaccagagaactactcgaggaaatgcacggcgaacgtgaagaagggtgcacccaagaaaatacggaatccgagtactatgcaaaagagatacataaatttgacatgattcagggactggccgagcacaacgagcttgcagtttgcccaaagggcataaccagtaaagtcttcagattcaacgtgagcagcgtggagaaaaaccggaccaatcttttcagggccgagtttagagtccttagagtcccaaacccatcatcaaagcggaacgagcagagaattgaactcttccagattctccggcccgatgaacacattgcaaagcaacgctacataggaggcaaaaacctgcccacaagaggaacagccgagtggctcagctttgacgtgacagatacagtgcgcgaatggcttctacgcagggaatcaaatttgggactggaaatctccatacattgcccttgtcatacatttcaacccaacggcgacatactcgaaaatatacacgaagtcatggagattaagttcaagggagtagataacgaggatgaccatggaagaggagacttgggacggttgaagaagcaaaaggatcaccacaacccccacctgatcttgatgatgattcccccccatagactcgataatcctggtcagggcggacagaggaagaaaagagctctggatactaactactgtttcaggtag

SEQ ID NO: 5062 - RNA, 996 nt, synthetic construct
  misc_feature 1..996: note = source = /note="Description of Artificial Sequence: Synthetic coding sequence"
  source 1..996: mol_type = other RNA
atgaacggcacccgaaactggtgtaccctggtggatgtccatcctgaggatcaagccgcggtctacctcaagggtaggagtggggataaaatgatccacgaaaagaacataaaccagctgaagtctgaggttcagtacattcaagaggcccgtaactgtctccaaaagctccgtgaagacataagctccaagctagaccgaaatctgggagactccttgcaccggcaggaaattcaggtcgtgctggaaaagccaaacgggttcagtcaatctccaactgccttgtacagcagccctcctgaagtggacacctgtattaacgaggacgtggagtcgctgagaaaaacagtgcaggaccttctggccaagctgcaagaagccaaaaggcagcaccaaagcgactgtgttgcctttgaagtgaccctcagccgctaccagagggaagccgaacagagtaatgttgcccttcaacgggaagaggaccgcgttgaacaaaaagaggccgaagtaggcgagctgcaacggaggctgttggggatggagacggagcatcaggcattattagccaaagtgcgggaaggggaagtggcattagaagaattaagatcaaataacgctgactgccaggctgaacgtgagaaggccgcaacactagagaaggaagtagccggtttgagggaaaagatacaccatttagacgacatgctgaagtcgcaacagagaaaagtgagacagatgatcgagcaactgcagaattccaaagccgtgatccagtcaaaggacgcaactattcaagaactgaaggagaaaattgcctacttagaagccgaaaatcttgagatgcacgaccggatggagcatctgattgaaaaacagatcagccatggcaatttttcgacccaagcacgcgccaagacggagaatcccggcagcattcggatctctaagcctccaagccctaaacctatgccagtgatcagagttgtcgagacttag

SEQ ID NO: 5063 - RNA, 1098 nt, synthetic construct
  misc_feature 1..1098: note = source = /note="Description of Artificial Sequence: Synthetic coding sequence"
  source 1..1098: mol_type = other RNA
atgaacggcactagaaactggtgtacactggtggacgtccacccggaggaccaggccgctgcaggcaggaagacatacgctatggtgtctagtcactcagctggccacagtctcgcatccgaattagtcgaaagtcatgacggacacgaagagatcataaaggtgtacttgaaggggcgctctggcgacaaaatgattcacgaaaagaatatcaaccagctcaagtcagaggtccaatacatacaggaagcaaggaactgtctacagaagctaagagaggacatttctagtaagctggaccgcaatctgggagacagcttgcatcgacaggagatccaggtcgtgttggagaagcccaatggattcagtcagagccctaccgccttatacagttccccccccgaggttgacacctgcattaatgaggatgtggagtccctgcgcaaaaccgtccaggatttactggccaaactacaagaggccaaaaggcagcaccagtcagactgcgtcgcctttgaagtgacactgagccgctaccagcgagaagccgagcaatccaacgttgccctgcaaagagaggaggatcgcgtagaacaaaaggaagccgaagtgggcgagttacagcgtagattgttgggcatggaaactgagcaccaagcactgcttgcaaaagtcagggaaggcgaggtggcccttgaggaacttagatctaacaacgctgattgccaagccgagcgtgagaaagccgcgaccctggagaaagaagttgctgggctccgggagaaaatccaccatctggacgatatgctcaagtcacagcagaggaaagtgaggcaaatgatagagcagctccagaattcaaaagctgtgattcagtccaaagacgcgacaattcaggaattgaaggagaagatcgcttacttggaagcagaaaatcttgagatgcatgatcgaatggaacacctgatcgaaaagcagatctctcacggtaactttagtacccaggctagggccaaaactgaaaaccccggcagcataaggatctccaagcccccgtcacccaagccaatgccagtgattagagtggtagaaacctag

SEQ ID NO: 5064 - RNA, 1173 nt, synthetic construct
  misc_feature 1..1173: note = source = /note="Description of Artificial Sequence: Synthetic coding sequence"
  source 1..1173: mol_type = other RNA
atgaacggaactagaaattggtgcaccctagtggacgtgcatccagaggaccaagccgcaggtagcgtggacattctaagactgactcttcagggcgagttaaccggggacgagttggagcatattgcccagaaggccggacgcaaaacatacgctatggtgtcgagtcacagcgcaggccacagtttagctagtgaacttgtcgaaagtcatgacgggcacgaggagataataaaggtgtatttaaaaggccgttccggggataagatgatccacgagaagaacattaatcagctgaagagtgaagtacagtacattcaggaagccagaaattgcctacagaaactccgggaggatatctcttccaagctggacaggaacctgggggacagtctgcacagacaagaaattcaggtcgttctggagaaacctaatggcttcagtcagtcacccacagcgctttactcatccccccctgaggtcgatacctgcatcaatgaagacgtcgagagcttgcgaaagactgttcaggacctcttggccaaacttcaggaagccaaacggcagcatcaatctgactgcgtggcattcgaagtgaccctgtctaggtatcagagagaggcagaacagtccaacgtagccttgcaaagggaggaggaccgggtagaacagaaggaagccgaggtgggcgagctacaaaggcggctactaggtatggaaaccgagcaccaggctctcctagctaaggtcagggagggagaggtcgccctggaggaattgagatcaaataatgccgactgtcaagcagaaagggaaaaagccgctaccctagaaaaggaagtcgccggcctgagggagaagatacaccacctcgacgacatgctgaaatcgcagcaacgaaaagtgcgtcagatgattgaacagttgcaaaactctaaagctgttatccaatccaaggatgcgaccatccaggaactgaaggagaaaattgcatacctcgaggcagaaaatttggaaatgcacgaccgcatggaacatctgattgagaagcaaatctcccacggcaatttcagtacccaggcccgtgctaagactgagaaccccggcagtattaggatttctaaacctcccagtccaaaaccgatgcccgtcatcagagttgtggagacttag

SEQ ID NO: 5065 - RNA, 600 nt, synthetic construct
  misc_feature 1..600: note = source = /note="Description of Artificial Sequence: Synthetic coding sequence"
  source 1..600: mol_type = other RNA
atgaacggaacgaggaactggtgtactcttgtggatgtccaccccgaagatcaggccgctgccgggcggaaaacttacgcgatggtttcatcccattctgctggtcatagcctggcatccgagctcgttgaatctcatgacggccacgaggagattattaaagtgtatttgaagggcagatccggtgataaaatgatacatgaaaaaaatatcaatcagctgaaatcagaagtgcagtatatccaggaagctcgaaattgtctgcagaaactgagagaggatattagtagcaagctggaccgcaatctgggggactcccttcatagacaagaaatccaggtggtgctcgagaaaccaaatgggttttctcagtcgccaacagccttgtactcatctccgccagaggtcgacacatgtattaatgaggacgttgagagccttcgcaaaacggttcaagatctgctggcaaagttacaggaggctaagcggcagcaccagtctgactgtgtcgcttttgaagtcacgttgtcacgctaccaacgcgaggcagagcaaagtaacgtagcgcttcagagagaggaggataggtgtccagaatag

SEQ ID NO: 5066 - RNA, 1230 nt, synthetic construct
  misc_feature 1..1230: note = source = /note="Description of Artificial Sequence: Synthetic coding sequence"
  source 1..1230: mol_type = other RNA
atgagttccccaggtatgacgagcttgcagctggaaaaggaagagtgcatgcagtgcgtaccttgctcccctagaacccgagtggccttattggaactgtatagggccatgtgtcaggggtcggttgacattttaaggttgactttacagggggaactgactggcgacgagttagaacatattgcacagaaggctgggagaaagacatacgcaatggtgtccagtcattccgccggacattctctggcgtctgagctggtagaaagccacgatgggcacgaggaaataattaaggtctatctgaagggaaggagcggcgacaaaatgatacacgagaaaaatatcaatcaattgaagagcgaagtgcaatacatccaggaggctcgaaactgcttgcagaaacttagagaagacatctcctcaaagctagaccgtaacttaggtgattcccttcacagacaagagatccaagttgtgctggaaaaacccaacggctttagccagagccccaccgcactgtatagctctccccccgaggttgacacctgtatcaatgaggacgtggagagtctgagaaagaccgtgcaggacctgctagccaaacttcaagaggcaaaacgtcaacaccaatcagactgcgtggctttcgaggttaccttatcaagataccagcgggaagcagagcagtccaacgtggccttgcaacgggaagaagatcgagtagaacagaaagaagctgaggttggcgagctgcaaagacggctcctgggaatggagaccgagcatcaggctctactagctaaagtaagggagggtgaagtggctctggaggagttgaggtctaacaatgccgattgccaagcggagagggaaaaggctgctactctggaaaaagaagtagcagggttgagggaaaaaatccaccacctcgatgatatgctgaaaagccaacagcgaaaggtgagacagatgattgagcagctgcagaattccaaagccgtgatccagtctaaggacgctactatacaggagttgaaggagaaaatcgcttacttggaagccgagaacctggagatgcatgaccggatggagcacctaatcgaaaaacagatcagtcatggtaacttcagcacacaggcccgggcaaaaaccgaaaatcccggctcaatccgcatttctaagcccccatcgccaaagccaatgcccgtgatcagggtcgttgagacatag

SEQ ID NO: 5067 - RNA, 543 nt, synthetic construct
  misc_feature 1..543: note = source = /note="Description of Artificial Sequence: Synthetic coding sequence"
  source 1..543: mol_type = other RNA
atgaacggaacaaggaattggtgcacactagtggatgtgcatccagaggaccaagctgccgccggccgtaagacttacgcaatggtctcaagtcactcagccggccactcccttgcttccgagctagtggagtctcacgatggccatgaggaaataattaaagtgtaccttaagggccgctccggcgacaaaatgattcatgagaagaacatcaatcagttaaaatctgaagtccagtatattcaagaggcccgaaactgtctgcagaagctgcgtgaagatatttccagtaaactcgacagaaaccttggcgacagcttgcaccgccaagagatccaagtggtacttgagaaaccaaatggattttctcagtcccctaccgcccttaaagccggagatacggacgtccaaagtgactggcgcatgtcttgggggaacgaggtccctagtacgaatacagcccagtttctggcaactaattgtttattcttttatctgctccacctgcaaccgacccttccatggccaccagctgaccgatag

SEQ ID NO: 5068 - RNA, 1182 nt, synthetic construct
  misc_feature 1..1182: note = source = /note="Description of Artificial Sequence: Synthetic coding sequence"
  source 1..1182: mol_type = other RNA
atggaggaaccacagtcagacccaagcgtggaaccccccctgagccaggagacatttagtgacctttggaagttactccccgagaacaacgtgctctcacccctcccaagccaggctatggatgacctgatgctcagccccgatgacatcgaacagtggttcacggaagatcccgggccggatgaggctccccgtatgccggaagccgcaccccctgtagcccctgcccctgccgcccccaccccagctgctcccgcgccagccccttcctggcctttatccagctcggtaccttcccagaagacttaccaaggttcatatgggttccggctcggtttcctgcattccggcaccgccaagtcagttacttgtacctactcccccgctttgaataaaatgttttgccagctagcaaagacttgcccagtccagttgtgggtggattctacccctccccctggtacgcgcgtgcgggcaatggcaatctataagcagagccagcacatgactgaggtcgttcggagatgcccccaccacgaacgatgtagtgactccgacggcctcgcccccccacagcacctcatcagagtcgaggggaacctgagagtggagtatttggatgatagaaacactttccgacactccgtggtcgtgccttacgagcctcccgaagttggcagcgactgcaccacaatccattataactatatgtgcaacagcagctgtatgggcggaatgaatcggcgccccatcctgacaataattaccctggaggattccagcggaaatttgctgggacgcaatagcttcgaagtgcgggtatgtgcttgtcctggcagagacagacgaaccgaggaagaaaatctccgtaaaaaaggcgaaccccaccatgaactaccacccggaagcaccaaaagagccttgccaaacaatacgagttcctccccccaacctaagaaaaagcctttggatggagagtactttacattgcagattcggggcagagagcgtttcgagatgtttagggaactgaatgaggccttggagctcaaggatgcgcaggccgggaaggagcccggcggctctcgcgcgcacagcagtcaccttaaatctaaaaagggtcagtccacgtctaggcacaagaaacttatgttcaaaaccgaaggccctgatagcgattag

SEQ ID NO: 5069 - RNA, 1032 nt, synthetic construct
  misc_feature 1..1032: note = source = /note="Description of Artificial Sequence: Synthetic coding sequence"
  source 1..1032: mol_type = other RNA
atggaagagccgcaatccgatcctagtgtggaacctcccttgtcccaggagacattttcggatctgtggaaattgctgcctgagaacaacgtccttagccctcttccctcccaggccatggatgaccttatgctgagtcccgacgatatagaacaatggttcactgaagatccaggaccagacgaggcaccccgaatgcccgaagctgccccccctgttgcccccgcgccagctgccccaaccccagcagctccagcacctgcaccaagctggcctctgagctcttccgttccttcacagaaaacgtatcagggatcatatggcttccgactcgggttcctccactccggaactgccaagagcgtgacttgtacctattcacccgcactcaataagatgttttgccagctcgctaagacatgtcctgtgcaactatgggtggactccaccccaccaccaggcacaagggtccgggctatggcaatatataagcaatcccagcatatgaccgaggtcgttaggaggtgcccccaccacgaacggtgttcagactccgatggacttgctccacctcagcacctgatcagagtagagggtaatctgagggtagagtatctagatgatcgcaacacctttcgccactccgtcgtcgtgccctatgagccaccagaggttggatccgattgcaccaccattcactataattacatgtgcaactcttcctgtatgggtggaatgaaccggcggcctatcctcactatcatcactctcgaggacagctctggcaaccttcttggacggaattcctttgaggtgagagtgtgcgcgtgcccaggcagagatcgaagaaccgaggaggagaacctacgcaagaaaggggagccacaccacgagcttccaccaggatctactaagagagctctacccaataacacttcatcctccccgcagccgaagaaaaaacctctggacggtgaatacttcacattacagaagacatttcctgctcggcacggcgggtcacacctctag

SEQ ID NO: 5070 - RNA, 1149 nt, synthetic construct
  misc_feature 1..1149: note = source = /note="Description of Artificial Sequence: Synthetic coding sequence"
  source 1..1149: mol_type = other RNA
atggaggagcctcagtccgaccctagtgtggagccccctcttagtcaagaaacattcagtgatctgtggaagctcttgccagagaacaatgttctgtcacctctaccgtcccaagccatggatgacctcatgctgagccctgacgatatagagcaatggtttacagaggatcccggccccgatgaagccccaaggatgccagaggctgcacccccagtcgcaccagcacccgccgcacccacaccagccgcccccgctcccgcaccatcttggccactctctagttccgtccctagccaaaagacttatcaaggaagttacggctttcggctcacctgtacatattctcccgctctgaataaaatgttctgtcagctcgcgaagacatgtccagtgcaattatgggtggacagcacccctccacccggtaccagagttcgggccatggctatctataaacagtcccagcatatgacggaagtggtgagaaggtgtccccaccatgaacgctgctccgattccgatggcttagctccaccacaacatcttattcgagtcgaaggtaacttgcgtgtggagtaccttgacgaccggaacacgtttagacactcggtcgtagtgccttacgagccccccgaagtcggcagcgactgcacaaccatccattataactacatgtgcaactccagttgcatgggcggaatgaatcggaggccaatccttacgatcatcactctggaagactcaagtggaaaccttctcggcagaaacagttttgaggttagagtgtgcgcctgcccaggaagagatcggcggaccgaggaggaaaacctccgcaaaaagggtgaacctcaccatgagttgccacccggctccaccaagagagccctgcccaataacacatcatcaagccctcagccaaagaaaaagccattagacggcgagtattttactctccaaatacgggggagagagaggttcgaaatgtttcgcgagctgaatgaagccctggagctgaaggatgcccaggccgggaaagagcccggcggatcacgtgcgcacagttcacacctgaaaagcaagaagggccagtcaacctcccggcacaaaaaacttatgttcaaaactgaagggccagacagcgattag

SEQ ID NO: 5071 - RNA, 858 nt, synthetic construct
  misc_feature 1..858: note = source = /note="Description of Artificial Sequence: Synthetic coding sequence"
  source 1..858: mol_type = other RNA
atggaggagcctcagtcagacccaagtgtggaacctccactaagccaagaaacattctctgacttgtggaagctcctgcctgagaataatgtcttgtcccccctgccttcacaagccatggatgacctaatgctctccccagatgacattgaacagtggtttaccgaggaccccgggcccgatgaagcccctaggatgcctgaagcagccccccctgttgcacctgcaccggcagctccaacgcccgccgcacctgcccccgccccttcctggccactttcctcctcagttccaagccaaaagacatatcagggttcatacggcttcagactgggctttctgcactccgggaccgctaagagtgtgacctgtacctatagccccgcattgaacaagatgttttgtcagttagctaagacatgcccagtgcagctttgggtagatagtactccacctcctggaacgcgtgtacgggccatggctatatacaagcagtcccaacacatgacagaggttgtcaggcgctgcccccatcacgagcggtgctccgattcggacggtctcgccccgcctcagcatctcatacgggtggaaggtaatctgcgcgtggagtatcttgacgatcggaatacctttcgccatagcgtcgttgtgccttatgaaccacccgaggtaggatctgattgtactacaatccattacaattacatgtgtaattcgtcttgcatgggagggatgaatcggcgtccaattcttactatcatcaccctggaggactctcggccccgtcaggttgatcacttaagaagcggcgtccaagactcattagccaatatcgcgaagtcccacttgtactag

SEQ ID NO: 5072 - RNA, 273 nt, synthetic construct
  misc_feature 1..273: note = source = /note="Description of Artificial Sequence: Synthetic coding sequence"
  source 1..273: mol_type = other RNA
atgttttgccagttagctaagacctgccctgtccagctttgggttgatagtacgcccccacccggtactagagtccgggccatggcaatttacaagcagagccaacacatgacagaagttgtaagaagatgcccccatcacgaaagatgcagcgactctgacgggcttgcccctccgcagcaccttattcgggtagaaggtaacttaagggtggaataccttgatgatcgcaacacttttcgacatagcgtggtgtctggaagaaggggttag

SEQ ID NO: 5073 - RNA, 135 nt, synthetic construct
  misc_feature 1..135: note = source = /note="Description of Artificial Sequence: Synthetic coding sequence"
  source 1..135: mol_type = other RNA
cctttaccaagccagcggaggaatcattggatggaaaacataagtcccttctcccaccttaagtccaagaaaggccaatccacttcacgtcataagaagctcatgtttaagaccgaaggaccagactctgactag

SEQ ID NO: 5074 - RNA, 1026 nt, synthetic construct
  misc_feature 1..1026: note = source = /note="Description of Artificial Sequence: Synthetic coding sequence"
  source 1..1026: mol_type = other RNA
atggaggagcctcagtctgatccctctgttgaaccaccccttagtcaggagacctttagcgatctgtggaaattgttacccgagaataacgtactttcccctctcccttcccaggctatggatgacctcatgctgtcccccgatgacatagagcagtggtttaccgaagatccaggcccagacgaagcacctcggatgcctgaggctgctccccctgtggcacctgctcccgcggctcccactcctgcagcacccgcccccgcaccatcttggcccctgtcaagctcagtccccagccaaaagacctatcaaggatcctatggttttaggttaggattccttcattccggcaccgccaaatctgtcacatgtacatatagcccagcactcaacaagatgttctgccagctggctaaaacttgcccagtccagctgtgggttgactccacccccccacccggaacacgcgtgcgtgccatggccatttacaaacaaagccagcatatgaccgaagtggtccgtaggtgcccccatcatgagcgctgctccgactcagacggcctggccccaccccagcatctcatacgagtggaagggaacctgcgcgtggagtatctggacgacagaaacacttttagacattcagtcgtcgttccttacgaacctcctgaggttggttccgactgcaccactatacattacaattacatgtgtaattcttcctgcatgggcgggatgaacagaaggcctatcctcaccatcatcaccctggaagacagtagtggtaatctgttaggcagaaactcctttgaagtacgggtgtgcgcctgcccaggtcgggatcgccgtaccgaggaggaaaatcttaggaagaagggtgagccacatcacgaattgcctcccggatccacaaagcgcgcccttcccaacaatacatcatctagcccccagcccaaaaaaaagccactggatggggagtatttcacactgcaggaccagacatcctttcagaaagagaattgttag

SEQ ID NO: 5075 - RNA, 1182 nt, synthetic construct
  misc_feature 1..1182: note = source = /note="Description of Artificial Sequence: Synthetic coding sequence"
  source 1..1182: mol_type = other RNA
atggaggagccacagtccgatcctagtgtcgagcctcctctgtctcaagaaactttttctgatctgtggaaactgctgcctgagaataacgtactgagtcctttgccctcacaagcaatggatgatctcatgctaagtccagacgatatcgagcagtggtttacggaagacccaggaccagacgaagcccctcgtatgccggaggctgcaccacctgttgccccagcgccggctgcccctacacctgccgccccagctccagccccatcctggcccctttcctcctcagtacccagtcagaagacttatcaaggttcttatggctttcgcctgggattcctgcactctgggaccgcaaaaagcgtgacctgcacttacagtcccgcacttaataaaatgttttgccaacttgcgaaaacttgtcctgttcaattgtgggttgatagcactcctcctcccggcaccagagtacgcgctatggcaatttacaagcagtctcaacatatgaccgaggtcgttcgccgatgccctcaccacgagagatgttccgattcggatggcctcgctccaccacagcacttgattcgagtcgaaggtaacctcagggttgaatatctggacgataggaatacttttaggcattctgtggttgtcccatacgagcctccggaagttggttcagactgcacgaccatccattacaattacatgtgcaacagctcctgtatgggcgggatgaaccggcgcccgattctcacaattatcacattggaggattccagcggcaatctcctcggacggaatagttttgaggttagagtctgtgcatgccccgggcgtgaccgccgcaccgaggaagagaacctgaggaaaaagggggagcctcaccacgaacttccaccaggctctaccaaacgggctctgccaaataatacaagcagctcacctcagccaaagaagaagcctctggacggcgagtactttacactccaaatacgtgggcgtgagcgcttcgaaatgttcagagagctgaacgaagcccttgagctgaaggatgcgcaggcaggaaaggagcctggcggttctagagcccacagttcacatttaaaatccaaaaagggccagtctacctccagacacaagaaactcatgtttaaaactgagggtccagatagcgattag

SEQ ID NO: 5076 - RNA, 1041 nt, synthetic construct
  misc_feature 1..1041: note = source = /note="Description of Artificial Sequence: Synthetic coding sequence"
  source 1..1041: mol_type = other RNA
atggaagagccacagtccgaccctagtgtggaaccacctctctctcaggaaaccttcagtgatctctggaagttactgcccgagaacaacgtgctttcccctttaccctcccaagctatggatgatctgatgctcagcccagatgacatcgaacagtggttcacggaagatcctggacccgacgaggcccccaggatgcccgaagctgctccacccgtcgccccagctccagctgcccccacaccggccgcaccagccccagcaccaagctggccgctgtctagttcagtaccatcgcagaaaacatatcaggggtcgtacggctttagactgggttttttacattccggcacagcgaagtcagttacatgcacttacagtcctgctctaaataagatgttctgtcaacttgcaaagacttgccctgtgcagctctgggtcgacagtacccccccaccaggaacacgagtgcgtgctatggctatctataagcagtcgcagcatatgactgaggtggtccgccgctgccctcaccacgagcgttgttccgattcagatggccttgctcctccgcagcatttaataagagtggaggggaacttacgagtggaatacttagacgatcgcaataccttccggcactcggttgttgtgccctatgaaccaccggaggtcggaagcgattgtaccacaatacactataactacatgtgcaacagcagctgtatggggggcatgaacaggcgtcccatcctgaccatcatcaccctcgaagatagctccggcaatctcctcggacggaatagctttgaggttcgcgtgtgtgcttgtcccggaagagacagaagaactgaggaggaaaatctccgcaagaaaggcgaaccccatcatgaacttccccctggatcaaccaagagagccctacccaataacaccagtagctcccctcaaccaaaaaaaaaaccccttgatggagaatattttaccttgcagatgctattagaccttagatggtgttacttcctgatcaattcatcgtag

SEQ ID NO: 5077 - RNA, 387 nt, synthetic construct
  misc_feature 1..387: note = source = /note="Description of Artificial Sequence: Synthetic coding sequence"
  source 1..387: mol_type = other RNA
atggaggagcctcaaagcgacccctccgtggagccacccctgtcacaggagaccttttcagatctgtggaaattgctgcccgaaaataatgtgctctcacccctgccgtctcaggcaatggatgacttgatgctgagccccgatgacatcgagcaatggttcaccgaagacccaggacctgacgaagcaccacgaatgcctgaagctgctcctccagtcgcccctgcacccgccgcccccactcccgcagcccccgctcctgccccatcatggccactgagcagtagtgtcccatcccaaaagacctatcagggttcctacggatttcggctgggatttctgcacagcggcaccgctaaatccgttacatgtacatactcaccatag

SEQ ID NO: 5078 - RNA, 498 nt, synthetic construct
  misc_feature 1..498: note = source = /note="Description of Artificial Sequence: Synthetic coding sequence"
  source 1..498: mol_type = other RNA
atggaagagccccaatccgatccatcagtcgagccccccttgtcacaggagacgttcagtgacctgtggaaactgttgccggagaacaatgtgctgagtcccctaccaagtcaagctatggatgatctgatgctgtcgcctgatgacatcgaacagtggtttacagaggatccaggacccgatgaagctccccgaatgcccgaggcagcccctcccgtcgctcctgcacctgctgcccctacacctgctgcccccgctccagctccctcctggcctctgtcgtccagtgtcccctcacaaaaaacctaccaaggcagttacggcttccgcctgggatttttgcattcgggcactgcaaaatctgtaacttgcacctactcccctgctctgaacaaaatgttttgtcaacttgccaaaacgtgtccggtccaactttgggttgattccacaccaccccccggtaccagggtccgagccatggcaatctataagcaatag

SEQ ID NO: 5079 - RNA, 600 nt, synthetic construct
  misc_feature 1..600: note = source = /note="Description of Artificial Sequence: Synthetic coding sequence"
  source 1..600: mol_type = other RNA
atgttttgtcagctggcaaaaacttgccccgtacagttatgggtggattcaactcctccccctggcacacgtgtcagggccatggcaatatataagcagagccagcacatgaccgaggttgtcagacgctgtccacaccacgagcgctgttccgactcagatggacttgcccccccccaacacctgatacgggtagagggtaacttaagggtggagtatcttgacgatagaaacaccttcaggcacagcgttgttgtgccctatgaaccccctgaagtggggtctgactgtaccaccatccactataattatatgtgtaacagttcttgcatgggcggaatgaaccgccgacctatcctaacgatcatcacacttgaagatagctccggcaatctcttaggaagaaactccttcgaagttcgagtttgtgcgtgccctggacgggatagaagaacagaagaggaaaacctcagaaaaaagggcgaaccacatcatgagcttcctcctggttccactaaacgagccctcccgaataacacatcttccagtcctcagccgaaaaagaaacccctggacggagagtactttacactccagtag

SEQ ID NO: 5080 - RNA, 468 nt, synthetic construct
  misc_feature 1..468: note = source = /note="Description of Artificial Sequence: Synthetic coding sequence"
  source 1..468: mol_type = other RNA
atggaagagccccagagtgacccttccgtggaaccccctctatcccaggaaacctttagcgacctgtggaagctcttacccgaaaacaacgtgctctactcaccagcccttaataaaatgttctgtcaattagcgaaaacctgcccagtacagctgtgggtggactcaacaccaccccccgggacgagagtgcgggccatggcgatatataagcaaagtcagcatatgacagaagtggtccgtcgctgcccccaccatgagcgatgtagcgactcagatggactggcccctcctcagcacctgatccgtgtagagggcaacttacgagtggagtaccttgatgatagaaatacctttagacacagcgtagtggttccttacgagccacccgaggtgggctccgattgcacgactattcactacaattatatgtgtaactctagctgtatgggtggtatgaacaggtag

SEQ ID NO: 5081 - RNA, 468 nt, synthetic construct
  misc_feature 1..468: note = source = /note="Description of Artificial Sequence: Synthetic coding sequence"
  source 1..468: mol_type = other RNA
atggaggaaccgcagagtgatccatcagtagaaccgcctctgtctcaggagaccttttccgacctttggaaactgttgcccgagaataatgtgctgtacagtccagccctaaacaaaatgttttgccagctcgctaaaacttgtcctgttcaattatgggtcgattccacccccccaccaggcacccgggtgcgcgcaatggcaatttataaacaaagccaacacatgaccgaggtggtgaggagatgtccccaccacgaacgctgttccgattccgatggactagctccaccccaacatctaattagagttgagggcaatctgagggtcgagtatctggacgaccgtaacacattccgacatagcgttgtggtaccttatgagcctcctgaggttggcagcgattgcaccaccatccattacaactacatgtgcaactcctcatgtatgggtggcatgaacagatag

SEQ ID NO: 5082 - RNA, 1470 nt, synthetic construct
  misc_feature 1..1470: note = source = /note="Description of Artificial Sequence: Synthetic coding sequence"
  source 1..1470: mol_type = other RNA
atggcaggtcaaagggtcctgttactggtcggcttcctgctgcctggtgtccttttaagcgaggcagccaaaatactgacaatttctaccgtcgacttcaaaaaagaagagaaaagctaccaggtgatcagttggctcgctccagaagaccatcagcgagaattcaagaaaagcttcgacttctttctcgaggagacactcggcgggcggggaaagtttgagaatttgctgaatgtgctggagtacttagccctgcagtgttctcacttcctcaatagaaaagatatcatggatagccttaagaacgagaactttgatatggttatcgtggagaccttcgactactgcccctttctcattgccgagaagcttggaaagcctttcgttgctatactttccacttcgttcggttcccttgaattcgggctacccatccccttatcctatgtccccgttttccgaagcctcctcaccgaccacatggacttctggggacgcgtaaagaactttctcatgttcttcagtttttgccgtcgtcaacaacacatgcagtccaccttcgacaatactatcaaagaacacttcactgagggttcacgccccgtgctgagtcatcttctgctgaaagctgagctgtggtttatcaatagtgattttgcattcgattttgctcgcccgctcttgccaaataccgtgtacgtgggtggcctgatggagaaaccaattaaacccgtgcctcaggacttagagaactttatagcaaaattcggagattcaggattcgttctggttaccctgggatctatggtaaacacatgccagaaccccgagatatttaaagaaatgaacaacgcgttcgcccaccttcctcagggcgtgatctggaagtgtcagtgttcccactggccgaaggacgtgcacctggccgcaaatgtgaaaattgtggactggttgcctcagtcagacctgcttgcccatccatcgatccgcctctttgtgacccacgggggccagaatagtatcatggaggctatacagcatggagtgcctatggtcgggatccctctctttggcgaccagccggaaaacatggttagagtagaggccaaaaagtttggtgtgtcaattcagctgaaaaaactgaaagctgagaccttggccctgaaaatgaagcagataatggaggataagagatacaaatccgccgctgtggccgcaagcgttatcttgcgcagtcaccccctctcacccacgcagcgcctcgtgggctggattgaccatgtcctccaaaccgggggcgcaacccatcttaaaccctatgtctttcagcagccttggcacgagcagtacttactcgatgtctttgtgttcctgttggggttgacattgggaacactctggctttgcggtaagcttctcggcatggcggtctggtggctgcggggggcccggaaagtaaaggagacgtag

SEQ ID NO: 5083 - RNA, 1572 nt, synthetic construct
  misc_feature 1..1572: note = source = /note="Description of Artificial Sequence: Synthetic coding sequence"
  source 1..1572: mol_type = other RNA
atggcgggtcaacgcgtccttctgttagtggggtttttgttacctggggtccttttatctgaagctgccaagatcctgactatctccactgtcggtggcagtcactacctcctgatggacagagtgagtcaaatcctgcaggatcatggacacaatgtaacaatgctcaaccacaaacgagggcccttcatgccagacttcaaaaaagaggagaagagttatcaggtgatcagttggttagcccctgaagatcatcaaagagaatttaagaagagttttgactttttcctggaagaaactctgggcggacgcggaaagtttgagaacctgcttaatgttttagaatatttggctctgcagtgctcccattttcttaaccggaaagacattatggattctttgaaaaacgagaactttgacatggtgatagtcgaaacatttgactactgtccattcttaatcgcggagaaactgggtaagccctttgtggctatactcagcacctcatttgggtcactcgaattcgggctgccgatacccctgtcatatgtacctgtgttccgatcactgctcaccgatcatatggatttttgggggcgagtaaagaacttcctcatgtttttttctttttgcaggaggcagcaacacatgcagtctacatttgataacacaattaaggagcactttactgagggctcgcggcctgtgctctcccatttactgctgaaagctgagttatggttcattaattctgacttcgcttttgattttgctcggcccctcctgcctaacactgtgtacgtgggtggattgatggagaaaccaatcaagcctgttccccaggatctcgagaattttatcgctaaatttggagactctgggtttgtgctcgtaaccctgggcagtatggtgaatacttgccagaacccggaaatcttcaaggagatgaataatgccttcgcccacctcccacaaggcgtgatttggaagtgccagtgttctcattggcccaaagacgtccatctagccgccaacgtcaagattgtagactggctgccacagagtgatctcctcgcccacccatccatccgactgtttgtgacgcatggaggtcaaaattcaataatggaggcaatacaacacggtgtcccaatggtgggtatccctttgtttggggaccagcctgaaaatatggtcagggttgaagcaaaaaagtttggggtttccatccaactgaaaaagttaaaggctgagactttagcgctcaaaatgaagcagataatggaagacaaacgctacaagagcgcagcagtggccgcctccgtgattctgcggagtcatccacttagtcccacccagcggctggtcggctggatcgatcacgttctccaaacgggaggcgctacacatttaaagccgtacgtgttccagcaaccatggcatgagcagtaccttctggacgtatttgtttttttgcttggccttacattggggactctgtggctgtgcggtaagctgctcggaatggcagtctggtggttgaggggcgcgcgcaaggttaaagaaacttag

SEQ ID NO: 5084 - RNA, 417 nt, synthetic construct
  misc_feature 1..417: note = source = /note="Description of Artificial Sequence: Synthetic coding sequence"
  source 1..417: mol_type = other RNA
atggctggacaacgggtacttctgctcgttggattcctgctgcccggagtcctgctatccgaagccgcaaagatcttgacaatttcaaccgtgggcggcagccactacctcctgatggacagggtctcacaaatactgcaagatcatggacacaatgtcaccatgttaaaccacaagcggggcccatttatgccagactttaaaaaagaggaaaagtcctatcaagttatcagctggctcgcccccgaggaccatcaacgggaatttaaaaagagtttcgacttctttcttgaagaaacactaggaggacggggcaaattcgaaaacctgctgaacgttctggagtatctggctctccaatgcagtcacttcctgaatagaaaagatatcatggatagccttaagaacgaaaactag

SEQ ID NO: 5085 - RNA, 666 nt, synthetic construct
  misc_feature 1..666: note = source = /note="Description of Artificial Sequence: Synthetic coding sequence"
  source 1..666: mol_type = other RNA
atggtcaacacgtgtcagaacccagagatttttaaggaaatgaataacgccttcgcccacttaccccaaggcgttatctggaagtgccagtgttcacactggccaaaagacgtgcatctggccgctaatgtgaagattgtggactggctgcctcagagcgacttgctcgcacatccctcaattcgcctgttcgttacgcacggcggacagaatagcatcatggaagccattcaacatggagtgccaatggtaggtatacccctcttcggagaccaacccgagaatatggtcagagtggaggcgaaaaagtttggagtgtcaatacaattgaagaagctcaaagcagagacactggctctgaagatgaaacagatcatggaggacaagagatacaaatcagctgctgtagccgcctctgtaattctgaggagccacccactctctcccacacagagactggttggttggatagatcacgtactccagacgggaggcgccacccacttgaaaccttatgtctttcagcaaccttggcatgaacaatatttgctggatgtttttgtgtttctgctgggattaacattgggaaccctgtggctgtgtggaaaactcctcggcatggcagtgtggtggctccgcggagcacgtaaagtaaaagaaacgtag

SEQ ID NO: 5086 - RNA, 954 nt, synthetic construct
  misc_feature 1..954: note = source = /note="Description of Artificial Sequence: Synthetic coding sequence"
  source 1..954: mol_type = other RNA
ctgaccgaccgacagacagacactgcacctagtcccagctatcatctgctccctggacggagaagaaccgtcgacgctgctgcctctagaggacagggccccgaaccagcccccgggggcggcgttgagggggtgggcgctcgaggggtggccctcaaactgttcgtgcaattgctgggctgttcacggtttggaggggccgtagtgagggcaggggaagcagaacctagcggcgccgcccgttcagctagctcaggacgtgaagaaccgcaaccagaagaaggcgaggaggaggaagaaaaagaagaagagcgcggcccccagtggaggctgggagcgcggaaacctggatcctggactggcgaggctgcagtctgcgccgacagtgcccccgctgccagggcacctcaggcactggcccgggcaagcgggagagggggccgggttgcccgtcgcggggccgaagagtccggcccacctcactccccatctcggcggggaagtgcttcacgcgcagggccaggtagagcttcagaaaccatgaatttcctactttcttgggttcattggtctctcgcactcctgctttacttacatcatgctaagtggtcccaggctgctccgatggctgagggaggagggcagaaccaccatgaagtggttaagtttatggatgtgtaccagcggtcctactgccacccaatcgagacactcgttgacatttttcaggaatatccagatgagattgagtatattttcaagccttcatgtgtgcccctcatgcgctgcggaggctgttgcaacgacgaaggcctcgaatgcgtgcctaccgaagagtcaaacatcacaatgcagattatgaggattaaaccacaccagggccaacacatcggggagatgagtttcttgcagcataacaagtgcgagtgcagatgtgacaaaccccgtaggtag

SEQ ID NO: 5087 - RNA, 1239 nt, synthetic construct
  misc_feature 1..1239: note = source = /note="Description of Artificial Sequence: Synthetic coding sequence"
  source 1..1239: mol_type = other RNA
ctaactgatcgtcagaccgacacagcgccctctccgtcataccatctactgccaggccgcagaagaaccgtcgatgccgcagcatccagaggacagggtcctgagcccgctcccgggggaggcgttgagggggtcggagctcggggcgtggcgttgaagctgttcgtgcagctgctcggttgttcccgtttcggtggtgctgtggtgcgcgcaggggaggcagaaccttctggagcagctaggagtgctagttctggccgggaagaaccacagccggaggaaggcgaagaagaagaggagaaggaggaagagcgcggtccccagtggagattgggtgccagaaagccaggaagttggactggagaggcagctgtatgcgccgacagtgccccagccgcaagggctcctcaggcattagctcgggcatcagggcgcggcggaagagtggctagacgcggagctgaggagtcaggcccccctcattctccttctaggcggggaagtgccagccgagcgggccccggcagggcttcagagaccatgaattttctacttagctgggtacattggagcctggcacttctcctctatctccaccacgccaagtggtctcaggccgccccaatggcggaaggcggtggccaaaaccaccacgaagtagtgaagtttatggatgtctaccagcgtagttactgtcaccctatcgagaccttggttgatattttccaggagtaccccgatgagatagaatatatattcaagccttcatgcgttccgctgatgagatgtggtggatgctgtaatgatgaggggctcgaatgtgttccgaccgaggagtccaacatcacaatgcaaatcatgcggataaagccacaccagggccagcatatcggggagatgagcttcctccagcacaataagtgcgagtgtaggcctaagaaagatagggctcggcaagaaaaaaaatcagtcagaggcaagggcaaaggccagaagcggaaacgcaagaaatcccgctataaaagctggagcgtctatgtaggcgctagatgttgtctgatgccctggagtctaccaggtccccacccatgtggtccttgttcggagagaaggaagcacttgttcgtgcaggacccacagacctgtaaatgtagctgtaagaacaccgactctagatgtaaggcccggcaacttgagctgaatgagcggacatgtcgctgcgacaaaccgcggagatag

SEQ ID NO: 5088 - RNA, 984 nt, synthetic construct
  misc_feature 1..984: note = source = /note="Description of Artificial Sequence: Synthetic coding sequence"
  source 1..984: mol_type = other RNA
ctcacagaccgccaaacagatacagcaccctcaccgtcctatcacctgctaccgggtcgtagacgcacagtagatgcagcagccagtagggggcaggggcccgagcccgctcctggtggaggtgtggaaggtgtgggcgctaggggcgttgccctgaagctattcgtgcagcttcttggctgctcacgatttgggggagccgtagtgcgcgcaggcgaggccgagccctccggggccgcccggtcagcttcaagcggacgggaagaaccacagcctgaggagggtgaggaggaggaagaaaaagaggaggagagaggcccccaatggaggctaggcgcccggaaacctggatcgtggaccggtgaagctgctgtatgcgcagattctgctcctgctgcccgggcgccccaagcgcttgctagagctagcggaagaggaggcagggtcgcccggagaggggccgaggaaagcggtccacctcactcaccctctcgtcgtgggtctgcaagccgtgctggaccaggtcgtgcgagtgaaaccatgaatttcctgctgagctgggtgcattggtctctcgctttgttgctgtatctccatcatgccaagtggtctcaagcggctcccatggctgaggggggcggccagaaccaccacgaagttgtgaagtttatggatgtttatcaaagaagttactgccatcccatagagaccctcgtcgacatctttcaggagtatccagatgagatagaatacatttttaagcccagttgcgtgcccttgatgagatgcggcggttgttgtaacgacgaaggattggaatgcgttcctacagaagagagcaatattactatgcaaattatgcggatcaagccacaccaaggccaacatataggggagatgtcattcctccaacacaacaaatgtgaatgtcggccaaaaaaagacagagcgcgtcaagagaaatgtgacaagccccgaaggtag

SEQ ID NO: 5089 - RNA, 1116 nt, synthetic construct
  misc_feature 1..1116: note = source = /note="Description of Artificial Sequence: Synthetic coding sequence"
  source 1..1116: mol_type = other RNA
ctgaccgataggcaaacagataccgccccttccccatcgtatcacttactgccaggtcggcgccggaccgtagacgctgccgcttctcgcgggcagggaccagaacccgcacccgggggcggagtggagggcgtcggggctcgaggagtggcgctaaaacttttcgtacagttgctgggatgtagccggttcgggggcgccgttgtcagagccggggaggcagaacctagtggggccgcccgcagtgcaagcagcggaagggaagagcctcagccagaggaaggagaggaggaggaagagaaggaagaagagagaggaccacagtggcggctgggagcaagaaagccaggctcttggacaggggaagctgcagtttgcgcagactcggcacctgcggcaagggcaccacaagccctcgccagagcctccgggaggggagggagagtggcgcgtaggggggcagaggaaagcgggcccccacactccccttcacggcgcgggtctgccagtcgagcaggccccggcagggcaagcgagacaatgaactttctgttgagttgggtccactggtccctggcgctgctcttgtatctgcaccatgcaaaatggtcccaggccgcacctatggcggaaggcggtggtcagaaccaccacgaggtagttaagttcatggacgtatatcagcgcagctactgtcacccgatcgagacactcgtagacatctttcaggaataccccgacgagatcgaatatatatttaaaccaagttgcgtccctctcatgaggtgtggtggatgctgtaatgatgaaggcttggagtgcgtaccgactgaggagagcaatattaccatgcagattatgagaatcaaaccacaccaaggacagcacataggagagatgagctttctacagcacaacaagtgcgaatgcagacccaaaaaagatcgggctcgccaagagaacccgtgtggaccgtgctcagaacgcagaaagcatcttttcgtgcaggaccctcagacctgtaaatgctcatgtaaaaacacagactcacggtgtaaggctcgtcagctcgagttgaatgagagaacatgtcgctgcgataagcctcgtcgctag

SEQ ID NO: 5090 - RNA, 444 nt, synthetic construct
  misc_feature 1..444: note = source = /note="Description of Artificial Sequence: Synthetic coding sequence"
  source 1..444: mol_type = other RNA
atgaatttcttgttgtcatgggtccattggtcccttgccctcctgctgtacctccaccatgctaaatggtcacaggctgcccctatggccgaagggggaggccagaaccaccatgaggtagtgaagtttatggacgtataccagcggtcgtattgtcacccgattgaaacgctagttgacatttttcaagaataccctgacgaaatagagtatatatttaaacccagctgcgtgcctctaatgcgatgtggagggtgttgcaatgacgaaggcctcgagtgtgtgcctaccgaggagtctaatattaccatgcagatcatgcgcataaaaccccaccaaggccagcacatcggagagatgtcctttcttcagcacaataagtgtgagtgcagaccgaaaaaggatagggccaggcaggaaaaatgtgacaagcctagacgttag

SEQ ID NO: 5091 - RNA, 1170 nt, synthetic construct
  misc_feature 1..1170: note = source = /note="Description of Artificial Sequence: Synthetic coding sequence"
  source 1..1170: mol_type = other RNA
ctaactgacagacaaaccgataccgctccatcaccatcttaccatctcctgcccgggcggagacgaaccgtggatgccgccgcttctagaggacaggggcctgagcctgcaccaggaggcggagtagaaggggtaggggctcgcggcgtggctctgaagttgtttgttcagctcctgggatgcagccggtttggtggtgccgtcgtgcgagcaggggaggccgaacctagtggagcagctcggagcgcgagtagtggaagagaagaaccccaacccgaagagggagaagaggaggaggagaaagaggaagaacgaggtcctcagtggcgactcggcgctagaaagccaggctcgtggacaggagaggccgccgtttgtgccgactctgctccagcagctagggcgccgcaggcactagctagagcatcgggcagaggcggccgggtggcacggcggggcgcagaggaatcaggtcccccccatagcccaagtcggcgtggaagcgcgagcagggcaggccccgggagagcatcggaaaccatgaacttcctactgtcctgggttcactggagccttgccttattgctttatttgcatcatgccaagtggtctcaagcagctccaatggctgaaggaggaggccagaaccaccacgaggtggtcaaattcatggatgtctaccagcgttcatactgtcacccaatagagactttagtggatatatttcaggagtaccccgacgagattgaatatatcttcaaaccatcctgtgtgcctctcatgagatgtggcggctgctgcaacgatgagggactcgaatgcgtgccaactgaggaatccaacattacaatgcagatcatgcgcataaagccccaccagggtcagcatatcggggaaatgagttttcttcagcacaataagtgcgagtgcagacctaagaaggatcgagccaggcaagaaaaaaagtctgtgcgcgggaaaggcaaaggtcagaaacggaagcgcaaaaaatctcggccctgtggcccatgctccgaacgcagaaagcatctcttcgtgcaagacccgcaaacatgtaagtgctcatgtaagaataccgacagccggtgtaaggcccgtcagctcgaactgaatgagcgaacatgccggtgcgacaaaccacgtagatag

SEQ ID NO: 5092 - RNA, 1065 nt, synthetic construct
  misc_feature 1..1065: note = source = /note="Description of Artificial Sequence: Synthetic coding sequence"
  source 1..1065: mol_type = other RNA
ctgacagaccgccaaacagacactgctccatctccatcttatcacctgctgcccggacgtagaaggactgtggatgctgcagcgtcacgtggacaaggtccagagcccgcaccagggggtggggttgaaggggttggagcaagaggcgtggcgctgaaactctttgtacaactgcttggctgctcacggttcgggggagctgttgtccgtgccggcgaagctgaaccgagtggtgccgctagaagcgcatcctccggaagggaagagccccagccagaggagggagaggaggaggaggaaaaggaagaggaacgtggaccccaatggcggcttggcgcaaggaagcctggttcctggacaggggaagccgccgtgtgtgcagacagcgccccagcagctagagcacctcaggcccttgccagagcaagtggtcgaggcggccgagtagcccggcgaggagccgaggagagcggacctcctcattccccttcaagaagagggtccgccagtagagctggcccgggccgagccagcgaaacgatgaattttctcctcagctgggtgcactggtcacttgcgctgcttctctacctgcaccatgcaaagtggtcacaggcagcccctatggccgaagggggaggtcagaaccatcatgaagttgtgaaatttatggacgtctaccagcgctcttattgccaccccatcgaaactcttgtcgacatatttcaggagtacccagatgagattgagtacatcttcaagccaagttgcgtgccactgatgcgctgtggaggatgttgcaacgacgaagggcttgaatgtgtgcctacagaagaaagtaacatcacgatgcagataatgagaatcaagccacaccagggccagcatatcggcgagatgagttttctgcaacacaataagtgtgaatgcaggcctaagaaggatcgagctaggcaggaaaacccttgtggaccttgttccgagcgccggaagcatctgtttgtccaggatccacagacctgtaagtgctcgtgcaaaaatacagacagcagatgcaagatgtag

SEQ ID NO: 5093 - RNA, 1188 nt, synthetic construct
  misc_feature 1..1188: note = source = /note="Description of Artificial Sequence: Synthetic coding sequence"
  source 1..1188: mol_type = other RNA
ctcaccgacagacagaccgacacagcaccgtcaccatcttaccatctgctgcccggtcgcagaaggacagtggacgcagccgcatctagagggcaagggcctgaaccagctcccggagggggtgtggagggcgtgggcgcgcgaggcgtggctctcaagctgttcgttcaattattgggatgtagccgctttggtggcgcagtcgtaagagcgggagaagccgagccttcgggcgccgcaagatccgcctcatcaggtagggaggagccgcaacccgaagagggagaagaagaggaagaaaaagaggaggaaaggggaccgcagtggcgacttggggccaggaagccgggaagctggactggcgaagccgctgtgtgtgcagattccgctcccgctgctagagcgcctcaggcactggccagggctagtggccgcgggggcagggtggctcgaagaggagctgaggagagtggcccacctcactcccccagcaggagaggcagcgcctcgcgagcgggccccgggagagcctcagagaccatgaattttttgctgagctgggttcattggagcttggcccttttgctttacctgcaccacgctaaatggagtcaggccgccccaatggcagaaggcggcggacagaatcaccatgaggtagttaagttcatggatgtctatcagaggagctattgtcatcccatcgagaccctggtcgatatttttcaagaataccccgacgagatcgaatatattttcaaaccttcatgcgttccccttatgaggtgcggagggtgctgtaacgacgagggcctcgagtgcgttccgaccgaagaaagcaatatcaccatgcaaatcatgagaatcaaaccccaccaaggccaacatataggagaaatgagtttccttcaacataacaagtgcgaatgcagacccaagaaagacagggcaagacaggagaaaaagtcagtgcgggggaaggggaaaggtcaaaaacggaaaagaaagaaatctaggtacaagagctggagcgtaccttgtggtccctgcagcgagagacgcaagcacctgttcgtccaagatccacagacttgtaagtgctcatgcaaaaacactgactccaggtgcaaggcgcgccagctggaactcaatgagcggacttgtcgctgcgacaagcccaggaggtag

SEQ ID NO: 5094 - RNA, 414 nt, synthetic construct
  misc_feature 1..414: note = source = /note="Description of Artificial Sequence: Synthetic coding sequence"
  source 1..414: mol_type = other RNA
atgaatttcctacttagttgggttcattggtccctggcgttgctgctgtatctacatcatgctaaatggtctcaggctgcacccatggccgagggtggaggacagaaccatcacgaagtcgtcaagtttatggacgtctaccagaggagttactgccatcccattgagacattagtcgatatcttccaggaatatcctgacgagatcgaatatatctttaaaccatcctgcgtcccacttatgcgctgcggcggctgttgtaacgacgagggtctcgaatgcgtacctaccgaggaatctaacattaccatgcaaattatgcgcatcaagccacatcagggccagcatatcggtgaaatgtcctttttgcaacataacaaatgcgaatgtaggtgcgacaaacctcggcgatag

SEQ ID NO: 5095 - RNA, 1116 nt, synthetic construct
  misc_feature 1..1116: note = source = /note="Description of Artificial Sequence: Synthetic coding sequence"
  source 1..1116: mol_type = other RNA
ctgacagacaggcagactgataccgcaccttccccatcctaccacttgctaccagggcggaggagaactgtggatgctgcagcttccagagggcaagggccagagcccgcccctggagggggagttgagggagtgggtgctagaggggtcgctctgaagctgttcgtgcaattgctgggttgcagccgctttgggggggcagtcgtgcgagctggagaggcggaaccttcaggcgctgctcgctcagcatcatccggacgcgaggagccccaaccggaagagggagaggaagaggaggagaaagaagaagagcgggggccacagtggagactgggtgccagaaagcctggttcttggactggagaagctgctgtatgcgccgactccgcgcctgcggcccgcgcccctcaggcccttgccagggctagcggacgcggaggaagagtggcccggcgcggcgcagaagagtcaggacccccccatagtccatcccgccgcggcagtgcctcaagagccggcccaggccgggcaagtgaaacaatgaacttcctgctctcatgggtccactggtcactcgctcttctcctttatctgcatcatgctaaatggagccaggcggcccctatggccgaaggcggaggccagaaccatcacgaagtagttaaatttatggacgtgtatcagcgttcttattgtcacccaattgagactttggtggacatattccaagagtaccctgatgagatagaatacatttttaaaccctcctgtgtcccattgatgagatgcggaggttgttgtaacgacgaagggctcgagtgtgtgccaactgaggaatccaatattactatgcagatcatgcggataaaaccccaccagggacagcatatcggggaaatgagtttcttgcagcacaataagtgtgagtgtcgacctaaaaaggaccgagcacggcaggagaacccctgcggaccctgtagcgaaagacgcaagcatcttttcgtccaggacccacaaacatgcaaatgtagctgcaagaataccgatagccgatgtaaggcccggcagttagagctgaatgagcgtacatgcaggagcctgacgcgcaaggactag

SEQ ID NO: 5096 - RNA, 630 nt, synthetic construct
  misc_feature 1..630: note = source = /note="Description of Artificial Sequence: Synthetic coding sequence"
  source 1..630: mol_type = other RNA
atgaactttctgctgtcatgggtgcattggtctctcgccctgctgttgtacctacatcatgccaagtggtcccaagcagcgcctatggctgagggcggcggtcaaaaccaccacgaagtggtgaagtttatggacgtataccaacggagctattgtcacccgattgaaaccctggtggatatttttcaggagtaccccgacgagattgagtacatttttaaaccatcctgcgtaccgctgatgaggtgcggcggctgttgcaatgacgaaggactggagtgcgttcctacagaagaaagtaacatcacgatgcagatcatgaggatcaagcctcatcaaggccaacacattggtgaaatgtccttcctgcaacataataagtgtgagtgtcgacccaagaaggatagggctcgacaggagaaaaagtccgtacgaggaaaaggcaagggacagaagcgcaaacgtaaaaagagtagaccctgtggtccctgttcagagaggagaaagcatctgttcgttcaggatcctcagacatgcaaatgcagctgtaaaaacactgatagccgctgtaaggcgcgacaactagagctaaacgaacgcacctgccggtgtgataagccacggagatag

SEQ ID NO: 5097 - RNA, 576 nt, synthetic construct
  misc_feature 1..576: note = source = /note="Description of Artificial Sequence: Synthetic coding sequence"
  source 1..576: mol_type = other RNA
atgaatttcttgttgtcctgggtccattggtcactcgccttgttgctgtacttacaccacgctaagtggtcacaggccgcacctatggctgagggaggaggccagaatcatcacgaggtggtaaaattcatggatgtataccagcgcagttattgtcaccctattgagactctggtggacatcttccaagaatatcccgacgaaatcgaatacattttcaaaccaagttgcgtgccattaatgagatgcggagggtgctgcaacgatgagggcctcgagtgcgtcccgactgaagagagcaacatcaccatgcagataatgcgcatcaagccacaccaaggccagcacatcggagaaatgtcctttcttcagcataataagtgtgagtgccgaccgaagaaggatcgagcccggcaggagaacccctgtgggccatgcagtgaaagaagaaagcatttattcgtacaggacccccagacctgcaaatgctcatgtaaaaacaccgactccagatgcaaagcacggcagctagaactgaatgaaaggacctgccgttcactcaccagaaaagactag

SEQ ID NO: 5098 - RNA, 972 nt, synthetic construct
  misc_feature 1..972: note = source = /note="Description of Artificial Sequence: Synthetic coding sequence"
  source 1..972: mol_type = other RNA
tgaagggggcagggtcccgaacccgcacctggagggggtgtcgaaggcgtcggagctcggggagtcgcgctgaagttgttcgtgcagctcctcggatgttctcggtttggaggggccgtggtcagagcaggagaggccgaaccgagtggtgccgcaagaagcgccagctcaggaagagaggagccccagccagaagaaggagaggaagaggaagaaaaagaggaagagaggggaccacaatggaggttgggtgctcgtaagcctggatcgtggaccggcgaagcagccgtctgtgctgactcagccccagccgcacgcgcgccgcaggcccttgcccgggcgagtggtcggggggggcgcgtcgccaggaggggagcagaggaatctggccctccacattctccctcccgccgaggatcagcttcacgcgctggtccaggaagggcatccgaaaccatgaattttctgctttcctgggttcattggagcctggctctgctgctgtaccttcatcacgcaaaatggtcccaagccgccccgatggccgaaggcgggggacagaaccaccacgaggtcgtgaaattcatggatgtgtaccagaggtcctactgccacccgatcgaaactcttgtggatatattccaagagtaccccgacgagatcgagtacatatttaagccaagctgcgtgcccctgatgagatgtggaggctgttgtaatgacgaaggtctggaatgtgtgccaactgaagaaagcaacattaccatgcagatcatgcgaattaaaccacaccagggccaacacatcggcgaaatgagttttctgcagcacaataagtgtgaatgtcggcccaagaaggaccgcgctagacaagagaaaaaatctgtccgaggaaagggaaaaggtcagaaaaggaaaaggaagaaatccagatataaatcttggtccgtgtgtgacaagcccaggcgttag

SEQ ID NO: 5099 - RNA, 648 nt, synthetic construct
  misc_feature 1..648: note = source = /note="Description of Artificial Sequence: Synthetic coding sequence"
  source 1..648: mol_type = other RNA
atgaattttctgttatcttgggtgcactggtcgctggcactcctgctctacttacatcatgccaagtggagtcaggctgcaccgatggccgagggaggcggccaaaaccatcacgaagtggtgaagtttatggacgtgtatcagaggagctactgccaccctatagaaaccctcgtcgacatattccaggaatatcctgacgaaatcgagtacatcttcaaaccatcctgcgtgcccctgatgagatgcgggggctgttgcaatgacgagggcctcgaatgcgttcctacagaagagagtaatatcaccatgcaaattatgagaatcaaaccacaccaaggtcagcacattggcgagatgtccttcttacaacacaataagtgcgaatgtcgccccaaaaaagatcgagctaggcaggagaagaagagtgtcagaggtaaaggaaagggtcagaaaagaaaaagaaagaagtctcgatataaaagttggtcagtaccctgtggcccatgttcggagaggagaaagcacctgttcgtccaggatccacagacatgtaagtgtagctgcaagaatacagactccagatgcaaagcccggcagttggagctaaacgaacgcacgtgccggtgtgacaagcctcgcaggtag

SEQ ID NO: 5100 - RNA, 525 nt, synthetic construct
  misc_feature 1..525: note = source = /note="Description of Artificial Sequence: Synthetic coding sequence"
  source 1..525: mol_type = other RNA
atgaacttccttctaagttgggtccattggtcccttgccttgctcctctacctgcaccacgctaaatggagccaagccgctcccatggcagagggtggggggcaaaaccatcacgaagtagttaagttcatggacgtctaccaacgatcatattgccatcccatcgagactctggtagacattttccaggagtatccggatgaaattgaatatatcttcaaaccttcgtgcgtgccattgatgagatgcgggggatgttgtaatgatgaagggctggagtgtgtgccaaccgaggagtccaacattacaatgcaaatcatgagaatcaagccccatcagggccagcatattggcgaaatgtccttcctgcagcataacaagtgcgaatgccggcctaaaaaagacagggcccgacaagagaacccctgcggaccgtgctccgaaagacgaaaacatttatttgtgcaggatccacagacatgtaaatgttcatgtaagaatactgactccaggtgcaagatgtag

SEQ ID NO: 5101 - RNA, 699 nt, synthetic construct
  misc_feature 1..699: note = source = /note="Description of Artificial Sequence: Synthetic coding sequence"
  source 1..699: mol_type = other RNA
atgaatttcctcctgtcctgggtgcactggtccctagcacttctcctttacctacaccacgcaaaatggtcgcaagcggccccaatggccgaaggtggaggacaaaaccaccacgaggtggtgaaattcatggatgtgtatcagcggtcttattgccatcctattgagaccttggtggacatttttcaagaataccccgacgaaatagaatatatttttaagccctcatgcgtgcctcttatgagatgtggcggctgttgtaacgatgaaggcctggagtgcgtgcccactgaggagtccaatattacaatgcagataatgagaatcaaaccccaccagggtcaacatattggcgaaatgtcttttctccaacacaataaatgcgaatgcaggcctaagaaagatagggcgcgccaagaaaaaaagtcagtcagaggaaagggaaaagggcagaagagaaagagaaagaaaagccgttacaaatcttggagtgtctacgtgggggcgcggtgctgccttatgccatggagcctccctggacctcatccctgcggtccctgtagcgaaagacgcaagcacctgtttgttcaggacccccaaacatgtaaatgtagctgtaagaacacagatagtcggtgtaaagcccgacagctggaactgaacgaacgcacgtgtcgctgtgacaagcccagaaggtag

SEQ ID NO: 5102 - RNA, 576 nt, synthetic construct
  misc_feature 1..576: note = source = /note="Description of Artificial Sequence: Synthetic coding sequence"
  source 1..576: mol_type = other RNA
atgaacttcctgctcagttgggtgcattggtcactggctctccttctctatctgcatcatgctaaatggtcccaggctgccccgatggcagaaggggggggtcagaaccaccatgaagtggtgaaatttatggacgtctaccagcggtcgtactgccaccctattgaaacactggtggatatttttcaggaatatcccgacgaaatcgaatacatctttaaacccagctgcgttcccctcatgcgatgtggtggctgttgcaacgatgaaggtctcgaatgcgtccccaccgaagagtctaatattacaatgcagattatgcgaatcaaaccacatcagggtcagcacataggagagatgtcttttttacaacataacaaatgcgaatgtaggcccaaaaaagaccgggcccgccaagaaaatccctgcggaccttgctcagagcgccgtaaacatttgttcgtgcaagatccccagacgtgtaaatgttcctgcaaaaatacagattccagatgcaaggctcgacagctcgagcttaacgagcgcacatgtcgctgcgataagccacgcaggtag

SEQ ID NO: 5103 - RNA, 438 nt, synthetic construct
  misc_feature 1..438: note = source = /note="Description of Artificial Sequence: Synthetic coding sequence"
  source 1..438: mol_type = other RNA
atgagtacagagggcggaggccgccgctgtcaggcccaggtgtctcggaggatttcttttagcgcaagtcaccgactttacagtaagtttctgtcagacgaagagaatctgaagctgtttggcaaatgtaataaccccaatgggcacggacacaattacaaagtggtagtaacggttcacggagagattgaccctgctacaggaatggtaatgaacctcgcggatctgaaaaaatacatggaggaggccatcatgcagccactggaccataagaatctcgatatggatgttccttacttcgctgacgtagtctccacaaccgaaaacgtagctgtgtacatctgggataatctgcaaaaggtgctgccagtgggagtgttgtataaagttaaagtttacgaaactgacaacaatatcgtggtttataaaggtgagtag

SEQ ID NO: 5104 - RNA, 4284 nt, synthetic construct
  misc_feature 1..4284: note = source = /note="Description of Artificial Sequence: Synthetic coding sequence"
  source 1..4284: mol_type = other RNA
atgcaccaaagacacccacgagcacgatgccccccattgtgcgtggcagggatccttgcatgcggcttcctcctgggctgctggggcccctctcatttccagcaatcatgtttgcaggcgctagaacctcaggccgtgtcttcctacctctcaccaggagctcctttaaaaggccgccctccttcgcccggattccagcgacaaagacagcgccagagacgtgctgcaggaggcattcttcatctcgaattgctggtagcagtgggccccgacgtgtttcaagcccatcaagaagacaccgagaggtacgtgttgactaaccttaacataggcgcagagctcctgagagacccctccttaggcgcacagttcagggtgcatttggtgaaaatggtgatacttactgaaccagaaggagcaccgaatattactgccaatctcactagctctttgctttctgtctgcggctggagccaaactataaatcccgaagacgatacagacccaggccatgctgacctcgtgctatacattactcgattcgatcttgaactacccgatgggaatcggcaagttcggggggttacccagttgggaggtgcctgttccccaacttggtcctgtcttattacggaggataccggctttgacctgggtgtaacaatcgcccacgaaatcggtcacagtttcggattggagcacgatggagccccaggttccggttgtggacccagcggacatgttatggcaagcgacggggcagcaccgagagcagggctagcctggtcaccatgctccagacggcagctactctctctcttgtctgcgggcagagccagatgcgtttgggacccccctaggccacagccagggtcagcaggacatcctcccgatgcccaacctggtctgtactattccgctaatgagcagtgccgggttgcttttggccctaaagccgtcgcatgcacatttgcacgggagcacctcgatatgtgccaagccctatcctgccacaccgatcccttagatcagtctagttgttctcgtctgctcgtacctctgttggacggtactgaatgcggggtggagaagtggtgcagcaagggtcgatgccggtctctagtcgaactaactccaatagccgctgtccacgggcgctggtcttcatgggggccacgcagtccatgcagccgatcctgcggtggcggcgtggtcacccgcagaagacagtgtaacaatcctcggcctgcctttggcggccgggcctgcgtaggagctgacctacaggctgagatgtgcaatacgcaggcgtgtgaaaaaacccagctggagtttatgtcacagcagtgtgctagaaccgacggccaacctctgagatcaagtcccgggggagctagtttctaccattggggcgcagctgttcctcactcgcaaggcgatgccctctgtagacatatgtgccgggccattggagaatcatttattatgaaaagaggggactcttttttggatgggactcgttgcatgccttccggcccaagagaggatggaacactcagcctatgcgtgtctgggtcttgcaggacatttggctgcgatggacgtatggactctcaacaggtgtgggatagatgtcaagtctgcggaggggataatagtacgtgttcacccagaaaagggtcttttaccgccggtcgggcccgggagtatgttacatttctgaccgtaacgccaaacctcacaagcgtgtacatagccaatcacagaccactgttcacccatcttgccgtgcgcatcgggggaaggtacgtagttgctggcaaaatgtccatcagtcctaatactacttacccttcccttctagaggacggacgcgtcgagtaccgtgtagccctgacggaggatagactgcccagacttgaggagatccggatctggggccccctacaggaggatgccgatatccaggtgtaccgcagatacggagaagagtacggcaacctaaccagacccgatatcacctttacatattttcaaccgaagcccaggcaagcatgggtatgggctgctgtgcgcgggccctgttcagtgtcatgtggcgccggactcagatgggtcaattacagttgcttagatcaagcaagaaaagagctggtggagactgtccagtgccagggctcccagcaacctccagcctggccagaagcgtgcgtcctcgagccttgtcctccctactgggcagtgggtgatttcggaccatgttccgcaagctgcggtggggggctcagagagaggcccgttagatgtgtggaagctcagggcagcctgctaaagaccctgccacctgctagatgccgcgcgggggctcagcaaccagccgtcgctctggagacatgtaacccacagccatgtcctgcgcggtgggaggtctccgaaccatcgtcttgcacatccgctggcggagccgggctggccttggaaaacgaaacctgcgttcctggagctgacgggctggaagcccctgttaccgaaggcccaggatccgttgatgagaagttacctgctcctgaaccctgtgtcggcatgtcctgcccccctggctggggccacttggacgccacatcagctggtgagaaagcaccgtcgccatggggatccattcgcactggagctcaggctgctcacgtgtggactcctgctgcaggaagttgtagcgtctcatgcggccggggtttaatggaactgagatttctttgtatggactccgctcttagggtccctgtacaggaggagctctgcgggctggcctccaaacctggatcacggcgggaggtgtgccaggctgtaccttgcccagccaggtggcagtataaactagctgcgtgcagtgtgagttgcggaaggggcgtggtgagacggatcttgtattgcgccagagcacatggcgaggatgacggcgaagagattctgctggatacccaatgccagggcttacctcggcctgaaccgcaggaagcttgctcactcgaaccctgtccccccagatggaaggttatgtccctgggaccatgtagtgcatcatgtggactgggaaccgctcgtaggtcagttgcctgtgtccagcttgaccagggccaggatgtagaagtcgacgaagcagcctgcgccgcattagtgcgcccagaggcatccgtgccttgtctgatcgccgattgcacctataggtggcatgtcggcacgtggatggaatgctctgtgtcatgtggagacggcattcagagacgccgagatacatgtttaggacctcaggctcaagcaccagtgccagcagatttttgtcaacaccttcctaagcccgttaccgtgcgtggatgctgggcaggtccatgcgtcggccagggtactccgtcattggtgcctcacgaggaggccgccgcaccaggccgcactacagcaacacctgcaggcgcatcactagagtggtcacaggcacggggacttctgtttagcccggctccgcagcctcggaggctccttcccggtcctcaggagaattcggttcaaagctcagcatgtggaaggcagcacctcgagccgaccgggaccatcgatatgagggggccaggtcaggcagactgtgctgtcgccatagggagaccattaggagaagttgtcaccttacgcgtgctggagagttcactgaattgcagtgccggagacatgctcttattgtggggtagactgacttggagaaagatgtgccgaaagttactcgatatgacattttcgtccaagacaaacacactggtcgtgcggcagagatgtggacgaccgggcggaggggtgcttctgaggtacggatctcagctcgctccagagacattttacagggaatgtgatatgcagttgtttggcccctggggggagatcgtttcacccagtctaagccctgccaccagcaacgcggggggatgccgcctctttatcaacgttgctccacacgccagaatagcgatacacgctctagctactaatatgggcgccggcactgaaggggctaatgcatcatatattttaatccgcgacacacattctcttcgcacaacagcttttcacggccagcaggtattgtattgggagagtgagagcagccaagcggaaatggagttttctgagggcttcctgaaggcgcaggcctctctgcgaggacaatactggacactacagagctgggtgccagagatgcaggatccccagagttggaaaggaaaagaaggaacctag

SEQ ID NO: 5105 - RNA, 3309 nt, synthetic construct
  misc_feature 1..3309: note = source = /note="Description of Artificial Sequence: Synthetic coding sequence"
  source 1..3309: mol_type = other RNA
atgttccaactgccagtcaataaccttggatccctccgtaaggcgagaaagaccgtgaagaaaattctgtctgatattggactcgaatactgtaaagaacacatcgaggacttcaagcaatttgaaccaaatgatttttacctaaaaaacacaacctgggaagacgtgggattatgggacccaagcttgactaaaaatcaagattatcggactaagcccttttgttgcagcgcatgccccttctcatccaagttctttagcgcttataaatcacacttcagaaatgtccattcagaggatttcgaaaatcgcatcctccttaactgtccctactgcacattcaacgccgataaaaaaaccctggaaactcatattaaaatcttccacgctccaaatgcctctgctccctctagtagcctgtccacttttaaagataagaataagaatgatggattgaaaccaaagcaggccgactccgtagaacaggctgtgtactactgtaaaaagtgcacctacagagaccccttgtacgaaattgttagaaagcacatctacagagagcactttcagcatgtggccgcaccttatatcgctaaagctggagaaaagtcattaaatggtgccgtgcctttggggagcaacgccagagaagagtcctccattcactgtaagcgatgtctgtttatgcctaagtcctacgaagcccttgttcagcacgttattgaggaccatgaacggattggataccaggtgaccgctatgatcgggcatacaaacgtggtggttccacggtcaaagcctctgatgctaatagctccgaagcctcaggacaagaaatctatgggtctccctccccgcataggaagtctggccagtggaaatgttaggtcccttccttcgcagcaaatggtaaatcgactgtctattccaaaacccaacctcaattctacaggagtaaacatgatgtcttccgtgcacctgcaacagaacaattatggagtaaagagcgtcgggcagggatactcagttggtcaaagtatgcgcctcggcctcgggggaaatgcacctgtcagcattcctcagcaatcccaatcagtgaagcaactcttacccagcgggaacggcaggagctacggtctagggtctgaacagagaagtcaagcaccagcccgctactctctccagtctgccaatgcttcctcactttcaagcggtcaactaaaaagtccctctctgtctcaatctcaggcctcaagagtattaggccagtcttcctctaaacctgctgctgccgcaactggacccccccccggcaacaccagttctacccagaagtggaagatttgtacaatttgtaacgaacttttcccagaaaatgtatactctgtacattttgaaaaggagcacaaagctgagaaggttcctgctgtcgcaaactatatcatgaagattcacaattttacttctaaatgcctttactgtaaccgatatttacccacggacactctactaaatcatatgctaatacacggactgtcctgcccttattgccgctccaccttcaacgacgtcgaaaagatggctgcccacatgcgtatggtccacattgacgaggagatggggccaaaaacagacagcactctttcatttgaccttacgctgcagcagggctcccacacaaatatacacctgttagtcacaacatacaacctgcgggacgcacctgccgaatccgtagcttaccacgctcaaaataatcccccggtcccccccaagccacaacctaaagtgcaggagaaggctgacatcccagtcaagagctcaccacaggcagccgttccatacaaaaaggatgtgggtaagacgctgtgtcctctgtgcttcagcatcctcaagggtccaattagcgatgccctagcccaccacttacgtgagagacaccaggtcatccaaaccgttcaccccgtggagaagaaactcacctacaagtgcattcactgcctaggcgtctacacatctaatatgaccgcttcgaccatcacacttcatctcgtccattgcagaggtgtgggcaaaactcaaaacggacaagacaagacgaatgccccatcccggctcaaccagagtcctagcctcgcacctgtcaaaagaacgtacgagcagatggaatttccccttttaaagaagcgtaaactcgacgatgatagcgacagccctagtttttttgaagaaaagcctgaggaacccgtcgtgctggcattagatcccaaaggtcatgaagatgattcatatgaggcccggaagtcttttcttacaaagtactttaataaacagccgtatcctacacgccgcgaaattgaaaaacttgccgcctcactctggctgtggaagagcgacattgcttcccacttcagcaataagagaaaaaagtgtgttagggattgtgaaaaatacaaaccaggcgtgctgttaggcttcaacatgaaggaactgaataaagtgaaacacgaaatggacttcgacgctgaatggctgttcgaaaaccatgatgaaaaagattctcgagtgaacgcgtccaagaccgccgataagaaactaaacctggggaaggaggacgactcatcttcagacagttttgagaacctagaggaagaatctaacgagagcggctcaccctttgatccagtgtttgaagttgaacctaaaattagcaacgataaccccgaggagcatgtgttgaaggtgatccctgaggacgcgtctgaaagcgaagagaaactggatcagaaagaggacggatctaaatacgagactattcatctgaccgaggaaccaacaaaactgatgcacaacgctagcgatagcgaagttgatcaagatgatgtcgttgagtggaaggacggagcatcccccagtgaatccgggcccggcagccagcaggtttctgactttgaggataatacatgcgagatgaagcctggcacatggagcgatgagagctcccagtcagaggacgctaggagctccaagcccgctgccaaaaaaaaggctacaatgcagggggatcgagaacaactgaagtggaaaaactcaagttacggcaaggtggaaggattctggtcaaaagaccaatctcagtggaaaaatgcttctgaaaatgatgagcggctgtcgaatccccaaatcgagtggcagaattcaacaatagactccgaagatggcgaacagttcgataatatgacagacggtgtcgcggagccaatgcatggatcactggctggagttaaactttcatcccaacaggcgtag

SEQ ID NO: 5106 - RNA, 3309 nt, synthetic construct
  misc_feature 1..3309: note = source = /note="Description of Artificial Sequence: Synthetic coding sequence"
  source 1..3309: mol_type = other RNA
atgttccagttacccgttaataatctgggaagtctgcgtaaagcgcggaaaaccgtcaaaaaaatcctctccgatattggtctggaatactgtaaggaacatatcgaggattttaaacaattcgaacctaacgatttttatttgaagaacaccacatgggaagacgtcggcctgtgggacccctccctcacgaaaaatcaggattaccgaactaaaccattttgttgctcagcatgcccttttagctctaaattcttctccgcctacaagagtcactttcgaaacgtccactccgaagacttcgagaacaggatcctcctgaactgtccatactgtacctttaacgccgataagaagactctggagactcacattaagatcttccatgccccaaatgcgagcgcgccgtcctcaagcctgagcacttttaaagacaaaaacaaaaacgacggactgaagcctaaacaagccgactctgtggaacaggcagtctactattgcaaaaagtgtacctacagagatccactatatgagattgtgcgtaaacatatatacagagaacacttccagcatgttgccgcaccctacattgccaaagccggcgagaagagtctgaatggcgccgtcccgctgggcagcaacgccagagaagaatctagcattcattgcaaaaggtgtttgttcatgccaaaaagctacgaggctttggtccagcatgtcatcgaagaccatgagcgaatagggtatcaagtaaccgccatgatcggacacacaaatgtggtggttccccgttccaaacccctaatgctcattgcccccaaacctcaagataagaagtccatgggccttcccccccgcatcggttcattagccagcggtaatgtaaggtcccttccctcccagcaaatggtcaatcgactgtccatccccaaacccaacctgaatagcacaggggtgaatatgatgtcctcagtgcatctccaacagaataattacggagtaaagtctgtggggcagggatactccgttggtcaatccatgagactcggactgggcggtaacgctccggtctcaattccccagcagtcacaatcagttaagcagcttttgccatctggcaacggaaggtcgtacggactgggaagcgaacaacgaagtcaagcgcccgctcgttatagcctccaatccgcgaacgctagcagtttatctagtggacaactgaaatctcctagtctgagtcaatcgcaggcctcccgtgtcctgggccaatcctcttcaaaacccgctgccgccgccaccggccctcctcccgggaatacttcaagcacacagaaatggaagatctgcactatttgtaacgagctgtttccagagaatgtctactccgtccacttcgaaaaagaacataaggctgaaaaggtccctgccgtagccaactatatcatgaagattcacaatttcacgagcaaatgcctatactgtaatcgctatctacctaccgacaccttacttaaccacatgctgatccatggcctgtcctgtccatattgtcgctctacctttaacgacgtggagaaaatggcagcgcatatgcgtatggttcatatagatgaagagatgggccctaaaacggactcaacgctttcctttgacttaacacttcagcagggatcccacacaaacatccatctgcttgtgacaacttataatctccgcgatgcacctgccgagagtgtcgcttaccacgctcaaaataacccaccagtaccccctaaaccacagccaaaagtgcaggagaaagctgatattcctgtgaaatcaagcccacaagcagctgtgccttacaagaaagatgttggtaaaaccttgtgcccgctatgtttttcaatccttaaaggccccatttcggacgccctggcccaccacctgagagaacgccaccaggttatacagacagtccatcctgtggagaaaaagctgacctacaaatgcattcattgcctcggtgtgtatacttcgaacatgacagccagtaccatcaccttgcatttggtccactgcagaggcgtgggaaagacccagaacggccaagacaagacaaatgccccctctcgcctgaaccaatcacccagtcttgcccccgtgaaacgaacttacgagcagatggaattccccttgcttaagaagaggaagctggatgatgactccgatagcccttcttttttcgaagagaaacctgaggaacccgtggtgcttgctttagacccaaagggccacgaggacgattcgtatgaagcacgcaagtctttcctaactaaatattttaacaagcaaccttatcctactcggcgtgaaatcgagaaattagccgctagtctctggctctggaagtccgatatcgccagtcacttcagcaacaagcggaagaagtgcgttcgggactgcgaaaaatataagcccggtgtactccttggatttaacatgaaagaacttaacaaagtaaaacacgagatggactttgatgctgaatggctgttcgagaatcacgatgaaaaagatagtagagtaaatgctagcaagaccgcagataaaaagttaaatctaggaaaagaggatgattctagttctgactcttttgaaaacctcgaggaggaatccaatgaaagcggtagcccattcgacccagtgtttgaggtagagcccaagatctccaacgataacccagaagaacacgtgttgaaagttataccggaagatgctagcgagagtgaggagaaactggaccagaaagaagacggatctaagtatgagactatccatctcactgaagagccaactaaattaatgcataacgcctctgacagcgaggtggaccaggatgatgttgtcgaatggaaggatggagcatcgccttcagagtcaggtcctggaagtcaacaggtcagcgattttgaggataacacatgcgaaatgaagccaggcacatggagcgacgagtcaagccaaagcgaggacgcacgcagcagcaaaccagcagctaaaaaaaaggcaacaatgcaaggagaccgagagcagctgaagtggaaaaatagcagctatggtaaggtcgagggcttttggagtaaggatcagtcacagtggaagaatgcctccgaaaacgatgagcgattgtccaacccacagatcgaatggcaaaacagcactatagattctgaggacggtgaacagtttgataatatgacagatggagttgctgagccaatgcatggcagcctggccggagtcaaactgagcagccagcaggcctag

SEQ ID NO: 5107 - RNA, 3309 nt, synthetic construct
  misc_feature 1..3309: note = source = /note="Description of Artificial Sequence: Synthetic coding sequence"
  source 1..3309: mol_type = other RNA
atgttccagctccctgtaaacaatttgggaagcctccggaaagccagaaaaaccgtgaaaaaaattttaagtgacataggtctggaatattgtaaagaacacatagaagatttcaaacaatttgaaccaaacgatttttaccttaaaaacacaacatgggaagacgtcggattgtgggatccttctctgaccaaaaatcaagactatcggaccaaacctttctgctgttcagcctgtcctttcagcagcaagttctttagcgcgtataagtcccatttcagaaacgtgcacagcgaggatttcgagaacagaattttactcaactgcccatactgtacattcaacgcggacaagaagacactggaaacgcacatcaaaattttccacgcccccaacgcctcagcgccttcatcatcactttcgacctttaaggacaaaaataaaaatgatggactcaagcctaaacaggccgactctgtcgagcaagccgtttattactgtaagaagtgcacgtaccgcgaccctttatacgagatcgtccgaaaacatatctaccgagaacactttcaacacgtcgcagccccttacattgctaaggcgggggaaaaatcgctgaatggagccgtgcccttaggtagtaacgcaagagaggaatccagcattcattgcaaacggtgtctcttcatgcccaagtcctacgaggctttagttcagcatgtaatcgaagaccatgagcgcataggctaccaggtgaccgccatgatagggcatactaacgtcgttgtgcccagaagcaaacccctcatgctaattgcccctaaaccacaagacaagaaatcaatgggacttccaccaagaatcggctcacttgccagcgggaacgttagaagcctgcctagccagcagatggtgaaccgcctcagcatccccaaaccgaatttgaatagcaccggagtaaatatgatgtcaagcgtccatctgcagcagaacaactatggtgtgaagtccgtgggccaaggatattctgtgggacagagcatgcggttggggcttggcggaaatgcccctgtaagcatccctcagcaaagtcagagcgtaaagcaactccttccatccggcaacggcagatcctatggcttgggcagtgagcaaaggtcccaggcgccagccagatacagtctccagtcagccaatgcttcgagtctttcctcaggacaactaaaatcacccagcctgtcccaatcacaagccagtcgggtcttaggtcagtctagttcaaagcccgccgccgctgctaccggtcccccccccggtaacacttcctccacccagaaatggaagatttgtacaatctgcaacgagctgttccccgagaacgtgtatagtgttcacttcgagaaagaacacaaggccgaaaaggtgcctgcagtagctaactacatcatgaagattcacaacttcaccagcaagtgcctgtactgtaaccgctaccttcctacagataccctactcaatcatatgttgatccacgggctgtcatgtccctactgccgctccacttttaacgatgtcgagaaaatggcagcacatatgcggatggttcatattgatgaggaaatgggcccgaagaccgattccactctcagttttgacttgacgctccaacaaggatcccacaccaatattcacctcttagtaactacgtataacctaagggatgcaccagcagagtcagtggcttaccacgcccagaacaacccccctgtgccacccaagcctcagccaaaagttcaggagaaggctgatattccagttaaaagtagcccgcaggccgcggtcccttacaaaaaggatgtaggtaagactttatgtccactgtgtttctccattctaaaagggcccatcagcgatgctttagctcaccacctacgcgaacgacaccaagttatccagaccgtgcaccccgtggagaaaaaactgacctataagtgcatccactgtctgggagtttatacatccaatatgactgcctcgactattaccttacacctggtgcattgtagaggggttggcaagacccaaaatgggcaagacaagactaacgcacccagcaggttaaatcagtcaccttctttggccccagtgaaaagaacatatgagcagatggagtttcctttgctcaagaagcgaaagctcgatgacgatagtgacagcccctcttttttcgaagaaaaaccagaagaacccgtagtattagctctggatcctaaaggccatgaagacgattcttacgaggcaaggaagagtttcctgacaaaatatttcaataaacagccttatcctaccagacgcgaaatagaaaaactggccgcatctttgtggctttggaaatctgacattgcatcccatttttccaacaagagaaagaaatgtgtcagggactgtgagaaatacaagcctggcgtgctgcttggcttcaacatgaaggaactgaacaaagtcaagcatgagatggattttgacgccgaatggttgtttgaaaaccacgacgagaaggatagtagagttaatgcttctaaaacggccgacaaaaagctgaatctcggcaaggaggatgatagtagtagcgacagtttcgagaacctagaagaggaaagtaacgaatccggctcgcccttcgatcctgtgttcgaggtagagcctaagatttctaatgacaaccctgaagagcacgtgctgaaggtaattcctgaggatgcgtctgagtcagaagaaaaactcgatcaaaaagaagacggttcaaagtatgagacaatccatctgaccgaagagccaactaagttaatgcacaatgcttccgattctgaggtggatcaggatgacgttgtcgaatggaaggatggagcgtcgccaagtgaatccggcccgggctcccaacaagtgagcgactttgaagataatacttgcgaaatgaaacctggtacctggtcggatgagagctcacaaagcgaggacgcacgctcctctaagccagctgctaaaaagaaagccacaatgcagggggatagggaacagcttaaatggaagaacagttcatacgggaaggtcgagggtttctggagcaaagaccagagccagtggaagaatgcatccgaaaacgacgagagactgagtaatccacagattgaatggcagaattcaaccattgactccgaagatggggaacaattcgataatatgacagacggcgtggccgagccgatgcacgggtccttggcgggtgtgaagctgagcagccagcaggcctag

SEQ ID NO: 5108 - RNA, 3309 nt, synthetic construct
  misc_feature 1..3309: note = source = /note="Description of Artificial Sequence: Synthetic coding sequence"
  source 1..3309: mol_type = other RNA
atgttccagcttcccgtgaataacctgggttccctgcgtaaggcgagaaaaactgtaaagaagatcctgagtgacattggcctggaatattgcaaggagcatatcgaggacttcaagcaattcgaaccaaacgacttttacctgaaaaatacgacctgggaggacgttgggctctgggaccccagtctgactaagaatcaagactatcgcactaaacctttctgctgttccgcatgccccttctctagcaaattcttctccgcatacaaatcacattttcgtaacgtccactctgaagacttcgagaaccggatactgctgaactgcccttattgtacttttaatgctgacaagaaaaccctcgagacacacatcaagatttttcacgcaccgaacgcttccgcaccgtcctcctcactttcaacttttaaagacaaaaacaagaacgatggcctaaaaccaaaacaagctgatagtgttgagcaagcagtgtactactgtaagaaatgtacgtaccgcgatcctctctacgaaattgttaggaaacacatctaccgagaacacttccagcacgtcgctgcgccgtacatcgctaaagccggggagaagtcgctgaatggagccgtgcccctcgggtctaacgctagagaggagagctctattcattgtaagcgatgtttatttatgccaaagtcatatgaggcgctcgtccaacatgtaatcgaggaccacgagagaattggctatcaagttactgctatgatcggacacacaaatgtcgttgtacctcgttcaaagccgctgatgttgatagcacctaagccacaggacaagaaaagtatgggcttacccccacgaatcggaagtctcgctagtggaaatgttcgctcactcccatctcagcagatggtcaatcggctttcaattcccaagcctaacttgaacagcacgggcgttaatatgatgagcagtgtccatctccagcagaataattacggggtgaaatctgttggccaaggatattctgtggggcagagtatgcgattagggctcggtggtaacgcacctgtgtcaatcccccagcagagccagtccgtcaaacagctacttccatccggtaatggcaggtcttatggactcgggtctgagcagcggtcacaagcaccagcaaggtactcccttcagtcagccaatgccagttcactctcctccggtcagcttaagagccccagtttatcccaatctcaagccagccgggtgttaggacaatcttcatccaaaccggcagcagctgccaccggcccgccccccggaaacacatcaagcacccagaagtggaagatctgcaccatttgtaatgagctattccctgagaacgtttatagcgtgcatttcgaaaaagagcataaagccgagaaagtcccagccgttgccaattacatcatgaaaattcacaatttcaccagcaaatgcttgtattgcaataggtacctgcccaccgatactcttctcaaccacatgctcattcacggcttaagttgtccatactgcagatccacatttaacgatgtggaaaagatggctgcccatatgcgcatggtacatatcgacgaggagatgggacctaagacggattctaccctatcattcgatctgacactgcaacagggaagtcacaccaatattcatctgctagttactacatacaaccttagagatgctccagccgaatcagtcgcctaccacgctcagaacaatcctcctgtcccccccaagcctcagccaaaagttcaagaaaaggcagacatacctgtcaagtcatccccacaagccgcagtcccctataagaaggatgtcggaaagactttatgtcccctttgcttctccattcttaaaggcccaatctcagacgcactggcccaccatctcagagagcgtcaccaagtcattcagacagtacaccctgtcgaaaaaaagcttacctacaaatgcatccattgtctcggcgtgtacacatctaatatgacagctagcactatcaccctgcacctggtgcattgtcggggcgtgggcaagacccaaaatggtcaggacaaaactaatgccccatccagactcaaccagtctccctctctggcccccgtaaagcgaacctatgaacaaatggagtttcccctcctgaaaaaacgcaaactcgacgatgattctgattctccgtctttttttgaagagaaaccggaagagccggtcgtactggccttagatccaaaagggcatgaagacgattcatatgaagcccgaaagagtttcctgacgaagtatttcaacaagcaaccctatccgacacgcagagagatcgagaagctcgcagcctcgctctggctctggaaaagtgacattgcaagccacttctccaacaaaaggaaaaaatgtgtccgtgactgtgagaagtacaagcctggagtactgcttgggtttaacatgaaggagctgaataaagtaaaacacgaaatggattttgacgctgaatggctcttcgaaaaccacgacgaaaaggacagccgcgtaaacgcctccaaaactgccgataaaaaactaaatttagggaaagaggatgattcatctagtgacagctttgaaaatctagaggaggagagtaacgaatccggcagccccttcgacccggtttttgaggtagagcctaaaataagtaacgataatcccgaagagcatgtgttgaaggtcatcccggaagatgcttcagagagcgaagagaaactggaccagaaggaggacggcagtaagtacgaaactatccatctgacagaagagccgacaaaactcatgcataatgcttcagattcagaggtcgaccaggatgatgtagtggaatggaaagacggcgcttctccaagtgagagtgggccgggatcccaacaggtgagcgatttcgaagataatacgtgcgaaatgaagccaggtacctggtccgacgaaagctcgcagagtgaagacgctagatcttccaaacccgctgcaaagaaaaaagccacgatgcagggcgatcgcgagcaactcaagtggaaaaactccagctacgggaaagtagaaggattctggagcaaagatcagtcacagtggaaaaatgcatcagagaatgatgaacggctctcaaatccccagatcgagtggcaaaatagtaccatcgactccgaagacggtgagcaatttgataatatgaccgacggcgtagccgagcccatgcatggatcactggccggggttaaactctcaagtcagcaggcctag

SEQ ID NO: 5109 - RNA, 522 nt, synthetic construct
  misc_feature 1..522: note = source = /note="Description of Artificial Sequence: Synthetic coding sequence"
  source 1..522: mol_type = other RNA
atgtttcaactgccagtcaacaacctcggatcgctaaggaaagcacgaaagaccgttaagaagatcctgtccgacattggtttagaatactgcaaggaacatatagaggactttaaacagtttgaacctaatgatttttaccttaagaacaccacttgggaggacgtgggactctgggacccttcacttactaaaaatcaggattatcgaaccaagcctttctgttgcagcgcctgccccttctcatcaaaatttttttccgcctacaaatcacattttagaaacgtccacagcgaggacttcgagaaccgaatcttactgaattgcccctactgtacctttaatgccgacaaaaagactctcgagactcatattaagattttccatgccccaaacgcttctgcaccctccagtagcctctccacattcaaagataaaaataaaaacgatggactgaagccaaaacaggccgacagtgtagagcaggctgtgtattactgtaaaaagtgtacttatcgctag

SEQ ID NO: 5110 - RNA, 441 nt, synthetic construct
  misc_feature 1..441: note = source = /note="Description of Artificial Sequence: Synthetic coding sequence"
  source 1..441: mol_type = other RNA
atggtaatcctgaccgaacctgaaggcgcccctaacataacagccaacctcacctcatctctcctgtctgtatgtggctggtcgcaaacaattaaccccgaggacgacacagatccaggacacgccgatctcgtgctgtatatcactcggttcgatttagagctacccgacggaaatcgacaagtgcgcggggtgactcagctcggaggcgcatgttcacctacatggtcctgtttaatcaccgaagataccgggtttgacctgggagtgaccattgcacatgaaattggtcatcggatctgtgcaagaccgtcgcctgcaactcagacacggtggaccaaagccgctgccgctgcctcaagcttcttatcttggatgggccagaatgtggcatggaggtctggcgctcccagagtcgcagcagccccttggtggagctag

SEQ ID NO: 5111 - RNA, 4116 nt, synthetic construct
  misc_feature 1..4116: note = source = /note="Description of Artificial Sequence: Synthetic coding sequence"
  source 1..4116: mol_type = other RNA
atgcaccaaagacacccccgagcacgctgtccgcctctctgtgtcgctggcatcctggcttgcggattcttgttagggtgttgggggccttctcacttccagcagtcttgcttacaggcactggaaccccaggcagtttcaagttacctctcacctggtgcccctctaaagggacgccctccatctccaggttttcagaggcaacgccagaggcagcgcagagccgccggaggcattctgcacctagaactgctggtcgcagtcggacctgacgttttccaggctcaccaggaagataccgagcggtacgtactgactaacctcaatatcggcgccgaattactgcgggatccttccctgggagcccagtttagagtccacctcgtgaagatggttatccttactgaacccgaaggagctccgaacattacagctaacttgacgagcagcctactgtcagtgtgtggctggtcgcagacaattaatcccgaagatgacactgatcccggacacgcagatctggtgctgtatattaccagattcgatctggaactacccgatggtaacaggcaggtgaggggcgtcacgcagctgggtggggcttgtagccccacatggtcctgtctcatcacagaagatacagggttcgacctcggagtgacaatcgcacacgaaataggccacagctttgggctggaacacgatggtgcccctggatccggctgcggcccctcaggccatgtaatggcttccgacggagcagcacccagagcaggcttagcctggagcccctgcagccgccgccagctcctcagtttgttatctgccggccgggcaaggtgtgtgtgggatcctccccgccctcagcccgggtcagccggacatccccctgatgcacagcccggtctgtactactcagcgaatgagcaatgcagagtcgcattcggacccaaggccgtagcctgtaccttcgcgagagaacacttggatatgtgccaagccttatcctgccacaccgacccactggaccagtcatcctgctcacgactactggtgccgctccttgacggtacggaatgcggagtggagaagtggtgctcgaaaggacgctgccgatctttggttgaacttacgccgattgctgccgtccacgggcgctggtcatcttggggaccgcgttcaccctgttctagatcatgcgggggcggagtggtcaccagacggcggcaatgtaacaatccaagacctgcctttggcggccgcgcatgcgtcggcgctgatcttcaagcagagatgtgtaatactcaggcctgcgaaaaaacgcagctggaattcatgtcacaacaatgcgcaaggacagacgggcaacccttacgatcgtctcctggcggggcatccttctatcattggggcgccgcagttccacactcccaaggagatgccctgtgcaggcacatgtgtcgggctatcggcgaatcctttatcatgaaaagaggcgattcttttctggacggcactaggtgtatgccctcaggccctagagaggatggaactcttagtctatgtgtgtccggatcatgcaggacattcggctgcgatgggagaatggacagccagcaagtgtgggatcggtgccaggtgtgcggaggcgataattccacatgtagcccacgcaaaggttcatttacagctggtagagcccgagaatacgtgacctttctgaccgtcaccccgaatttaacctcagtatacatagcaaatcacagacccctgtttactcatctggcagtgcggatcgggggccggtacgtggttgctggtaaaatgtccattagtcctaataccacataccccagcttactagaggatggccgtgtggaatatagagtcgctctgaccgaggacagactgccccggctggaagagattcgaatttggggaccactacaggaggacgcagacattcaagtgtatagacgttacggtgaagagtacggtaacctcactaggcctgatatcacattcacatacttccaaccaaagccccgacaagcttgggtttgggcagcagtgcgaggcccttgttctgtgtcttgtggcgctggcttacgctgggtgaattactcttgtctggaccaggctcgcaaggagctcgtggaaacagtgcagtgccaaggttcccagcaacctccagcatggcctgaagcttgtgtcctggaaccatgtccaccatattgggccgtgggcgatttcggtccctgtagcgcatcttgcggcggaggattgcgagaaagaccagtgaggtgcgttgaggcacagggtagcctgctcaagactcttccccccgctagatgcagagccggcgctcagcaacctgcagtggcactggagacatgtaacccacagccatgccccgccaggtgggaggtctcagaacctagcagctgcaccagcgcaggcggagcagggctcgccctagaaaacgagacttgcgtgcccggagctgacggcttggaagcacctgtgacagagggacccgggtcggtcgacgagaaacttccagcccccgaaccatgcgtcgggatgagctgcccaccaggatgggggcatttagatgccacaagtgccggcgagaaagcccctagtccatggggatcaattcggactggcgcccaagctgcacatgtctggacaccggcagcaggctcatgttcggtgtcatgtggcaggggcttaatggaactgcggtttctttgtatggactctgctctccgggtccctgtgcaggaggaactttgtggcctagccagtaaaccaggaagcaggcgggaagtatgtcaggcagtaccttgtcctgcaagatggcagtacaagctcgccgcctgtagcgtttcctgcggaagaggtgtggttcgaaggatcttatattgtgcacgtgcacacggagaagacgatggggaggagatcttgctggatactcagtgccaaggactccctcgtcctgaaccccaggaggcttgctctctggaaccttgcccgccgcgttggaaggtcatgtccctgggtccatgcagcgcatcatgcggattaggcacagctcggagaagtgtggcttgtgtacagctagatcagggccaagacgtagaggtggatgaagccgcctgtgctgccttggtgaggccagaagcatctgtaccatgtttaattgctgactgtacatatcgatggcatgtaggtacttggatggaatgctcggtgtcgtgtggcgatgggattcaacggcggagagacacctgcctgggaccccaagcgcaggctcccgtgccagcagacttttgtcagcacttgcctaagcctgttaccgtgcgaggttgttgggccgggccctgcgtcgggcagggggcctgcgggaggcagcatctggaacctacaggtactatagatatgcgagggccaggacaggctgactgtgcggtggccattggccgcccactgggcgaagttgtgacattgagagtacttgaaagctccctcaattgtagcgcgggcgacatgctcctgttgtggggcaggttaacttggagaaaaatgtgtaggaaattgctggacatgacattctcttctaagactaacactctggtcgtcagacagcgttgcggaagaccgggcggtggcgtgctcctgcgctacgggagccaactggcccctgaaactttctatcgtgaatgcgacatgcagctatttggcccatggggagaaatcgtgtcaccatcacttagcccagccacctccaacgcaggagggtgtcggctctttatcaacgtcgccccccacgccaggatagcaattcacgcactcgctacaaatatgggcgccgggacagaaggtgcaaacgcttcgtatatactaatcagagacacccactcactcaggactacagcttttcacggacagcaggtattgtactgggaatctgaaagtagtcaagcggagatggaatttagtgaagggttcttgaaggcgcaggccagcttacgaggacagtattggaccctccagtcctgggtgccagagatgcaggacccacaatcatggaagggcaaagaagggacttag

SEQ ID NO: 5112 - RNA, 4023 nt, synthetic construct
  misc_feature 1..4023: note = source = /note="Description of Artificial Sequence: Synthetic coding sequence"
  source 1..4023: mol_type = other RNA
atgcaccagaggcaccctcgggccagatgtccccccctctgcgttgctggaatcctcgcgtgtggtttcttgctcggttgttggggccccagccactttcagcaatcctgtttacaggcactagagcctcaggccgtttcgtcgtatctctctccgggtgcacccctcaaaggcagacctccctcccctgggttccagaggcagcgacagcggcagcggcgcgccgccggcgggattctacatcttgagcttcttgtcgctgtgggaccagatgtgttccaggcccatcaggaggacaccgagagatatgtcctgactaacctgaacatcggagcagaactgttgcgcgatccttctcttggagcccaatttcgggtacacctggtcaaaatggtgatattaacagaaccagagggagccccaaatattacagctaacttaacctcttctttactcagtgtgtgtggctggtctcagaccataaatcctgaggatgacacggaccccggccatgccgatctcgtcctttatatcacacgcttcgacttagagttgccagatgggaaccgccaggtccgcggtgtcactcaactgggaggagcctgctcccctacttggtcttgcctgatcaccgaggatacgggcttcgatctgggggtaactatagctcacgaaatcggtcattccttcggcttagaacatgacggggctccaggatctggatgtggaccttccggacacgttatggcttctgatggggcggcaccaagagcgggcctggcttggtcaccatgttcacgtcgccagttgctcagccttctgtcagccaatgagcaatgcagggttgcttttggtccaaaggcagtcgcatgtaccttcgctcgcgagcacctagatatgtgccaagcactgagctgtcacaccgatcctctcgaccaaagttcttgctcacgcttgctggtcccgctcctagacggcacggagtgtggagtggaaaagtggtgtagcaagggtaggtgtagatctctcgtcgaactgactcccattgcagcggtccacgggagatggtctagctggggtcctagaagtccttgtagtcgcagctgtggaggtggcgtcgtgaccagaagacgtcagtgtaataatccaagacctgcattcggaggccgtgcgtgtgtgggagcagacctccaggctgaaatgtgcaacacccaagcctgtgaaaagacccagctggaattcatgtcccaacaatgtgcaagaactgacggccagcctttgcgctcttcacctggaggcgctagtttttatcactggggagccgccgtaccacatagtcagggcgatgcactctgccgtcatatgtgtcgagctatcggagaatcattcataatgaagaggggagactcattccttgacggcaccaggtgtatgccatccggccctcgcgaagatgggaccctgagtttatgcgtgagcggatcctgccggaccttcggttgtgatgggaggatggatagccagcaggtgtgggacaggtgtcaggtgtgtggaggggacaattccacttgctcaccaagaaaagggagcttcacagccgggagagctagagaatacgtcactttcttaacagtaaccccgaaccttacaagtgtatacattgctaatcacagaccactattcacccaccttgccgttcgcattggaggtcgctatgtcgtcgctggtaagatgtctatatccccgaacacaacgtatcctagtctgcttgaggatgggcgagtcgagtaccgcgtggcacttacggaagatcgactgccccgcttggaagaaataagaatatggggaccccttcaagaggatgctgatattcaggtgtacaggagatatggcgaagaatatgggaatctcacgcgaccagatataacgttcacctattttcagcctaagcctagacaggcctgggtatgggccgccgtcagaggaccctgcagcgtgtcttgtggggccggtttgcggtgggtaaactatagttgccttgatcaagcgcggaaagagcttgttgagactgtccagtgccagggtagccagcagcctcctgcatggccagaggcgtgtgtactggaaccctgtcccccttattgggcagtgggagacttcggaccttgtagcgcatcatgtgggggcggactcagagagcggcccgtgaggtgcgtggaggcgcaggggtctctgctgaaaacattgccacccgctcgttgccgcgccggcgcccagcagccagctgtcgcactcgagacctgtaatccacagccctgccctgcccgttgggaagtgagtgaacccagcagttgcacttccgccggaggagctggcctcgcgctagagaacgaaacttgcgttcctggcgcggatggcttggaagctccagtgacagaaggacctggtagcgtcgacgaaaagctccccgcccctgagccctgcgttggtatgtcttgcccacccggatggggtcatctggacgcaacaagtgccggagagaaggctcccagcccttggggatctattaggacgggagcccaagccgcccatgtttggacaccagcagcaggtagctgctcagttagctgtggaagaggtctgatggagctcagatttttgtgcatggatagtgccctgcgcgttcctgtgcaggaagagttatgtggcctggcaagtaaaccgggttctcgaagagaagtgtgtcaggctgtaccatgcccagctcgatggcagtacaagctagcggcctgctccgtgtcctgcggccgaggggtggttagaagaattctgtactgcgcacgcgcacatggtgaggacgacggggaggagattctgctggacacccaatgtcagggattacctcgtccagaacctcaggaagcctgctcattagagccctgccctccaaggtggaaagttatgagcctgggaccctgttcggccagttgtggcctggggacggcaagacgttcagttgcatgtgtccagttagaccagggtcaggatgtggaggtggatgaggcagcttgtgctgccctggtgcgcccagaggcctccgtcccttgcctgattgcagactgcacttaccgctggcacgtggggacgtggatggaatgctctgtttcctgcggagatggaatacaaagaaggagagatacgtgcctcggaccacaggcgcaagcaccagtcccagcagacttctgccaacatctgcccaaaccagttactgttcggggctgttgggccggcccttgcgtcggccaaggtgcttgtggccgccagcatctggaacctacaggaacaatcgacatgcgcggaccgggacaggcagactgtgcagttgcgatcggtagacctcttggagaggtggtgacgttaagagtgctcgagtcttcactgaattgtagtgcaggcgatatgttgcttctctggggccggctcacttggagaaagatgtgtcggaaactgctggatatgaccttttcatctaagactaacacactggttgttcgacagaggtgtggaagacccggggggggtgttttactccggtacgggtctcaacttgcccctgaaaccttctacagagaatgtgacatgcagttgttcggaccttggggggaaattgttagtccgtctctgagcccagcaacgtccaacgcagggggatgccggttgtttattaacgtagcgccccacgcccgaatcgctattcacgctctggccactaacatgggcgccgggacagaaggtgcgaacgcgagctacatcctgattcgagacactcactccctgagaaccacagctttccacggccagcaagtgttgtattgggaatcagaaagctcccaggccgagatggagtttagcgagggatttcttaaagcccaagcctcgcttcgcggacagtattggacactacaaagctgggtcccagagatgcaggatccccaatcatggaaaggaaaagagggcacatag

SEQ ID NO: 5113 - RNA, 672 nt, synthetic construct
  misc_feature 1..672: note = source = /note="Description of Artificial Sequence: Synthetic coding sequence"
  source 1..672: mol_type = other RNA
atgcgcggacccggacaagccgactgcgcagtagccattgggcggcctctgggggaggttgttactttgcgtgtgttggaatctagcctgaattgctctgcaggcgatatgttactcctgtgggggagactaacttggcgaaaaatgtgtaggaagttgctggacatgacattctcctccaagaccaataccttggtggtaaggcagagatgtggtagacccggagggggggtactcttaaggtacggtagtcagcttgcacccgaaaccttttacagagagtgtgacatgcagctttttggaccatggggcgaaatcgtctcaccaagtctgagccctgctacatcaaatgctggtggatgtcggttattcattaatgtggccccgcatgcacgcattgcaatacacgctctagccacaaatatgggcgccggcactgagggtgccaatgcgtcatacattctgatcagggacactcactcgctgaggacaacagcttttcacggacagcaggtgctctactgggagtctgaatcttctcaagctgaaatggaattttccgaagggttcctgaaagcccaagcatctctccgagggcagtactggacattgcagagctgggtcccagaaatgcaggatccccaatcatggaagggaaaagaaggaacttag

SEQ ID NO: 5114 - RNA, 1035 nt, synthetic construct
  misc_feature 1..1035: note = source = /note="Description of Artificial Sequence: Synthetic coding sequence"
  source 1..1035: mol_type = other RNA
atgcatcagagacaccctagagcgagatgtcctcctttgtgtgtggcaggaattctcgcatgcgggtttttgttgggatgctggggaccgtctcattttcagcaatcttgcttgcaagctctggaacctcaagccgttagcagctacctctctccaggggcgccattaaagggcaggccaccatctcccggcttccaaagacagagacagaggcagcggagagcagcaggcggaattttgcacctagaattgctggtcgctgttggccccgacgtcttccaggcccatcaggaggacaccgagcggtatgtgctcaccaacctaaacatcggtgctgaacttctgcgagatccaagtctgggtgctcaatttagggtccacctggtaaaaatggtgattctaacagagcctgaaggcgcccctaacattaccgccaatttaacaagctcgttactcagcgtgtgtgggtggtcacagacaataaaccccgaagatgatacagatccaggacacgctgacttagttctgtacattacaagatttgatttggaactgcctgacggaaatagacaagtgcgaggcgtgacccagctgggcggtgcatgtagcccaacctggagctgcctgatcaccgaagatacgggctttgatctaggggtcaccatcgcccacgaaatcggccactccttcggcctggaacacgatggtgcaccgggttcaggctgcggaccttcaggtcatgttatggcaagcgacggcgctgctccacgtgccggtctcgcctggtctccatgctccagacgtcaactgctttctctgctccgcccggttccgccctctccattgccattactcgcaactcatttgtgcgctggaagatcactgtcgctcgggccttcacaggaaccagcgcccggaggtggaagaggaccccgtactccagtgccaacccataagcgaccccgatttcagactctgccttcctcatgtccactgcttagacctgctagctcccgttgtacccccagagactag

SEQ ID NO: 5115 - RNA, 831 nt, synthetic construct
  misc_feature 1..831: note = source = /note="Description of Artificial Sequence: Synthetic coding sequence"
  source 1..831: mol_type = other RNA
atgcaccagcgccatcctcgggctagatgccctccgttatgcgtagccggaattctcgcatgcggattcctgcttggatgctggggacctagccactttcagcaatcgtgtttacaggcattggaaccccaggccgtttcctcatatcttagccctggtgcacctttaaaaggccgaccaccaagtccaggattccagagacagaggcagagacagagaagagccgccggtggtatcttgcatctcgaactcctagtagccgttggaccggatgtcttccaggcccaccaggaggacaccgaacggtacgtactgactaatctgaatatcggcgctgaactcttgagagacccgagcctgggggcacaatttagagtccatttggtgaagatggtcatcctcactgaacctgagggcgcaccgaatattactgcaaacctcacatccagcctgctctcagtctgcggctggtcacagactatcaacccagaggatgacaccgatcccggccacgccgatcttgtgctgtacattacaaggtttgacttagaattaccggacggcaatagacaggtccgcggggtcacacaactgggaggcgcctgttcccctacatggtcctgtctgataacagaagacacgggcttcgacttgggggttactattgcccacgagataggacatcgtatatgcgctcgcccctcacctgctacgcagaccagatggacaaaggcagctgccgcagcttcatcctttttgtcctggatgggtcaaaacgttgcctggcgatctggcgccccacgagttgccgccgcaccttggtggtcatag

SEQ ID NO: 5116 - RNA, 4284 nt, synthetic construct
  misc_feature 1..4284: note = source = /note="Description of Artificial Sequence: Synthetic coding sequence"
  source 1..4284: mol_type = other RNA
atgcatcagcgtcaccccagagctagatgccctcctctgtgcgttgccgggattctggcatgcggatttctgctgggatgctggggcccctcccacttccaacaaagctgcctgcaagctcttgaaccccaagccgtctcctcttacctgtcccctggcgcccctctgaaaggaagacctcctagccctgggtttcagcgccaaagacagcggcaacgcagggccgcgggaggaattctccatttggagttgctggtcgcagtgggcccagacgtgtttcaggcacatcaagaagacaccgagagatacgttttaacaaacctgaatattggcgctgaactcctacgtgacccatctctaggcgcacaatttagggtgcatcttgtcaagatggtgattctaacagaacctgagggcgcccctaacattacggcaaacttaacctcttccctgctgagtgtctgtggctggagccagaccatcaatccagaggatgatacagatccaggccatgccgaccttgttctgtacattacaagattcgatctggaattgcctgacggaaataggcaggtgcgcggggtaacccagcttggcggtgcttgttcccccacctggtcttgcttgattactgaagatactggattcgaccttggagtcactatcgcacacgaaattggtcactcattcgggctggagcacgacggagcccctggtagcggatgtgggccaagcggacatgtgatggcctcagacggcgccgccccccgagcaggcctcgcttggagcccttgtagtcgcagacaactcctgagtctgctgtcagccggtcgggctagatgcgtgtgggaccctcccaggcctcagccaggcagcgcaggacaccccccagacgcacagcccggtctgtattattccgctaatgagcagtgccgtgttgcctttgggcctaaagccgtcgcctgcaccttcgctcgcgagcacctcgacatgtgccaggctttgtcatgtcacaccgacccactggatcaaagtagttgctcacggttactggtaccactgcttgacgggactgagtgtggagttgaaaagtggtgtagcaaaggccggtgcagatctcttgtggaattgactcccattgctgccgtccatggccggtggtcctcctggggccctcgctccccctgcagccgctcttgtgggggcggcgtggtgacaagaagacgccagtgcaataacccacggcccgcgtttggcggcagagcttgcgtgggagccgaccttcaggccgaaatgtgcaatacccaagcctgcgagaaaacacagctcgaatttatgtctcagcagtgcgcccgcaccgacggacagcctctcagatcttcaccgggcggagcttcattctatcactggggcgctgcagtacctcactcacagggcgacgccctgtgcagacatatgtgtagagccatcggggaatccttcattatgaagagaggagactcatttctggatggaacccggtgtatgccgtcgggacctagagaagatggcaccttgtctttatgtgtctccggatcttgccgcacttttggctgcgacggtagaatggatagtcaacaggtctgggatagatgccaagtctgcggcggcgacaattcaacatgcagtccacggaaaggttcgttcacagcagggcgagcacgagagtacgtcactttcctcacagttacgccaaatctaacaagcgtttatatcgctaatcatcgaccactgttcacgcatctcgccgtgagaatcggtgggcgttatgtcgtcgccggaaaaatgtcgatctcaccaaatactacctaccccagtctcctggaagacggtcgggtggagtatcgagtggcactgactgaagatagattgccccggctggaggagattagaatatgggggccattgcaagaagacgcagacattcaagtgtacaggaggtatggagaggaatatggtaaccttacccgtcctgacatcacattcacctatttccagcctaaacctcggcaagcatgggtatgggcagctgttagagggccttgttccgtctcgtgcggggccggcctacgatgggttaattactcctgtttagatcaggcacgtaaggagctggtagagaccgtacaatgccagggctcacagcagcccccggcttggcctgaggcttgcgtacttgagccatgtcctccatactgggcagtcggggattttggaccttgtagtgctagttgtggcggtggattgagggagagacctgtaagatgcgtggaagctcagggcagtctcttaaagacgcttcctcccgcccgctgtcgtgctggtgcacagcagcccgctgttgctttggaaacttgcaatccccagccctgtcccgccagatgggaggtctctgaaccctctagttgtactagcgccggcggggctggactcgccttggaaaacgaaacatgcgtccccggcgccgatggcctagaagcaccagttacagaaggacccggatccgtagacgaaaagctgcccgcgcccgaaccttgcgttggcatgtcttgcccccccggttggggtcatctcgacgccacctctgcgggagaaaaagctccttctccatggggtagcataagaaccggtgcgcaagccgcacacgtgtggaccccagcagcaggaagttgctccgtctcatgcggccgcggactcatggagctaaggtttctttgcatggatagcgcccttagagtcccagttcaggaggagctgtgtgggctggccagcaagcccggctctcgaagggaagtttgccaggccgtaccttgccccgcccgctggcagtataaactcgctgcctgtagcgtatcctgcggaagaggagtcgtccggagaatactgtattgtgccagagcccacggagaagatgacggggaagagattttactggacacacaatgccagggcctgccaaggcctgaaccacaggaagcgtgtagcctggagccctgcccccctcggtggaaagtcatgtctctcggtccctgctctgcatcctgcggcctgggtaccgccaggagatcagtggcctgcgtacagttggatcagggacaggatgtggaagtcgacgaagccgcctgtgccgcacttgtgcggcccgaagctagtgtgccttgcttaatagctgattgtacttaccggtggcatgtcggtacgtggatggagtgctctgtttcctgcggcgatggcatccagcgtagaagggacacatgtctcggacctcaggctcaggctcccgtgcccgccgacttctgccagcatctaccaaagcccgtgactgtaagaggatgctgggccggaccctgtgtgggtcagggcaccccttctctggtcccgcatgaagaagctgccgcccccggccgcactactgcaactcccgctggcgcgtctctggagtggtcccaagccaggggtctgctgttctctcccgcaccgcagccacgtcgtttgcttcccgggccccaagagaactcagtgcagagcagcgcatgtggtcgtcagcatctggaacccactggaaccatcgacatgcggggccccggacaggccgactgcgccgtggccatcggacgcccactcggcgaggtagtgacattacgggtactggaatcatccctcaactgttcagccggcgatatgcttctgttgtggggaagacttacttggagaaaaatgtgtagaaagttgctggacatgaccttctcttctaagacaaatacccttgttgtccgccaaagatgtgggagaccaggaggcggcgtcctccttcggtatggttctcagctagcacctgaaacattctaccgggagtgcgatatgcaactatttggaccctggggtgagatcgtgagcccttcattgtctcccgccacttccaatgccggagggtgccggctctttattaacgtcgccccccatgcccgtatcgcaattcacgcgctcgctactaatatgggggccgggaccgagggtgccaatgctagctatatccttattcgagatactcactccctgcgaacgacagccttccatggacagcaggttctatactgggaatcagaaagttcccaagccgagatggaattcagcgaagggtttctgaaagctcaggcttctctccggggacaatattggactcttcaatcatgggtaccagaaatgcaagacccacagagttggaagggcaaagaaggaacttag

SEQ ID NO: 5117 - RNA, 1095 nt, synthetic construct
  misc_feature 1..1095: note = source = /note="Description of Artificial Sequence: Synthetic coding sequence"
  source 1..1095: mol_type = other RNA
atggatatgtgccaggcattatcttgtcatacagatccccttgaccaaagttcttgtagtaggttgctcgtgcctctgctggacgggactgagtgcggtgtagagaagtggtgtagtaaaggacggtgccgttccttagtagaattgaccccgattgccgctgtacacggtagatggagttcttggggaccacggtctccctgttctagatcttgcggtggaggcgtagtcacccgaagacgacagtgtaataaccctcggcccgcatttgggggcagagcatgtgtgggggccgacttacaagccgaaatgtgtaatactcaggcctgcgaaaagacccagctggagttcatgtctcagcagtgcgcaagaacagatggccagcctctgcggtcaagcccaggcggagcctcattctatcactggggcgcagctgtcccacattcgcagggggacgcgctttgtagacacatgtgtagggctatcggcgagtcattcatcatgaaacgaggagatagctttctggacgggactcgatgcatgccaagtggaccaagagaggacggaacactctccctttgcgtatctggttcatgtaggacctttggatgtgatggcagaatggattcccagcaggtgtgggaccgatgccaggtttgcggaggggacaactctacgtgctcacctcgaaaaggcagtttcacagcagggagggcaagggagtatgtgacatttctgacagtaacacctaatctgaccagtgtctacatcgccaaccatcggccactgtttacgcacttggctgtccgtatcggtggaagatatgtggttgccggcaaaatgagtatctctcctaatactacttacccaagtctgcttgaggacggacgagtggagtatagggttgccctaaccgaagatagactcccaagactcgaggagattaggatatggggacctctgcaagaagacgccgatatacaagtggggggagttcgtgcccagttgatgcacatctcttggtggtcaagaccaggcctcggtgaaagggatttgtgcgcacgtgggcgttggcccggcggatcctcagattag

SEQ ID NO: 5118 - RNA, 1344 nt, synthetic construct
  misc_feature 1..1344: note = source = /note="Description of Artificial Sequence: Synthetic coding sequence"
  source 1..1344: mol_type = other RNA
atgtccgcctctaaaattccgctgtttaagatgaaagatttaatcctgatattatgccttttagagatgtcctttgctgtgccttttttcccgcaacagagcggaacacccggaatggcatcactcagcttggaaacaatgcggcagcttggttctctacagagacttaacacattgtcgcaatactctcgttacggattcgggaaaagcttcaattcactctggatgcatggacttcttcccccacatagcagcctgccatggatgcgtccgagagaacacgaaacccagcaatatgaatacagtctgcccgtgcaccccccacctctcccatctcagccaagcttgaagcctcaacagccaggtctgaagccttttctgcagagtgcagccgccacaactaaccaagctacagcactgaaagaagcccttcagccccctattcacttgggacacctgcccttgcaagagggagagctgcctctggtacagcagcaggtcgcaccatccgacaaacccccaaagcccgaactgcccggagtggacttcgcagatccccaaggaccatctctgcccggaatggatttcccggatccacaaggaccctcgttaccaggcctcgactttgctgatcctcaagggagtaccatttttcagattgctcgtctcataagccacggtccgatgccgcagaataaacagtcacccctgtaccccggtatgttatacgtgccatttggcgcgaaccagctaaacgctcccgccaggctcgggattatgagctccgaagaagtcgctgggggcagagaagaccctatggcatacggtgctatgtttcctggctttggaggtatgagacccgggtttgaaggcatgccccacaatcccgcaatgggcggtgattttaccctggagtttgattcacccgtcgccgcgacaaagggacccgaaaacgaagaaggtggtgcacagggttcccctatgcccgaagccaaccccgacaacctcgagaaccctgcatttttgactgaactggaacccgccccgcacgcgggcttgctggccctccccaaggacgacattccaggactcccgcgaagcccttctggaaaaatgaaaggcctccctagcgtcactcctgccgcagccgacccacttatgactcctgagctcgccgacgtttaccgcacttatgatgccgatatgacaacaagcgtagatttccaggaagaagctactatggataccacaatggctcccaactctcttcagacgagcatgcccggtaacaaggcgcaggaaccagaaatgatgcacgacgcatggcacttccaagaaccctag

SEQ ID NO: 5119 - RNA, 1299 nt, synthetic construct
  misc_feature 1..1299: note = source = /note="Description of Artificial Sequence: Synthetic coding sequence"
  source 1..1299: mol_type = other RNA
atgagtgcatcaaagatcccactgtttaagatgaaagatttgattttaatcctatgtctcctggaaatgtcttttgcagtcccattttttcctcagcagagcggcacacccggtatggccagcctttccctcgagacaatgcgccaattaggttctctacagcgacttaacaccttatcccagtattcaagatatggctttggcaaaagttttaactcactatggatgcacgggcttctcccaccccactcatccctgccttggatgcggccaagggaacatgaaacgcagcagccaagcctaaaaccccagcaaccagggcttaagccctttcttcagtcagccgccgctacaaccaatcaggccactgccctcaaagaggccctccagcccccaattcatctcggtcacctgccactgcaggagggagagctgccgcttgttcagcaacaggtcgcaccaagcgataagccacctaaaccggagttgccaggggtggacttcgcagacccacagggccccagccttcccggcatggacttcccagatccccaaggcccctcattgcctggacttgatttcgccgatcctcagggctctacgatcttccaaatcgctagactgatatcacatggaccgatgccacaaaacaagcagtcaccgctataccctggaatgctgtacgttcctttcggggccaaccagctcaacgcccccgcaagactgggaattatgtcttccgaagaagtggccggcggacgagaagaccctatggcctacggtgctatgtttcctggatttggcggtatgagaccaggtttcgagggcatgccccacaatcccgctatggggggagactttactctggagttcgactctccagtggcagccacaaaaggccccgaaaatgaagagggcggcgcccagggatcccccatgcccgaggccaaccctgataacttagagaatccagcctttctgacagaattagaacctgcgccccacgccggtctacttgcgcttcccaaagacgatattcccggcctaccacgttccccctcaggtaaaatgaaaggactcccttctgtgaccccagccgccgctgacccactcatgacgccggagcttgctgatgtataccggacatacgatgccgatatgaccacaagcgtggattttcaggaagaggccacaatggacacgaccatggcccctaactcacttcagacatcaatgccggggaacaaagcacaagaaccagagatgatgcacgatgcttggcactttcaagaaccttag

SEQ ID NO: 5120 - RNA, 1341 nt, synthetic construct
  misc_feature 1..1341: note = source = /note="Description of Artificial Sequence: Synthetic coding sequence"
  source 1..1341: mol_type = other RNA
atgagcgcgtccaaaattccccttttcaagatgaaagacctgatcctgatactttgcttgcttgaaatgagcttcgcagtcccattcttccctcagcaatctggcacacccggaatggccagtctgtctctcgaaactatgcgccagctgggttcccttcagcgactcaatactctgagccagtactcccgctatggctttgggaagtcatttaactccttgtggatgcatggcctacttcccccccactcttccctcccctggatgcgaccaagagaacacgaaacacagcagtacgaatacagcctgccagtgcatcccccccccttgccctctcagccttccttgaagccccagcaaccaggactcaagccatttctccagagcgcagccgccaccacaaatcaggctacagctcttaaagaagccttacagcccccaatccacctgggccatttaccacttcaggagggagaactgccactggtgcagcagcaagtggcgccatctgacaaaccccccaagccggaactccgcgtggacttcgctgatcctcagggccccagtctccctggcatggatttccccgaccctcagggcccatcgctgccgggactcgattttgccgatcctcaaggctccacaatctttcagatcgcacgcttaatttctcacggcccaatgcctcagaacaaacagtctcccctttatcccggtatgttgtacgttcccttcggtgcaaaccagctgaacgcacctgcgcggctaggaattatgtcctcagaggaggtggcaggaggcagggaagatcccatggcttacggtgcaatgtttcctggcttcggtgggatgagaccaggattcgaaggtatgccccataaccccgcaatggggggggactttacattggagttcgactctccagtggcagcaactaagggtcctgaaaatgaagaaggcggcgcacaaggctctcccatgcccgaggcaaacccagacaatctcgagaacccagcctttttgacagaactggaacctgctccccacgccggcctgctggccctccctaaagatgacatacctggactgcccagatccccatccggaaaaatgaaaggactacctagtgtaactcccgcagccgcagacccactgatgacgccagaactggcggatgtgtacagaacgtatgatgcagacatgactacttcagttgatttccaggaggaagccacgatggacacaactatggcgccgaactctctacagacaagtatgcccgggaataaggcacaggaacctgagatgatgcatgatgcctggcacttccaagaaccctag

SEQ ID NO: 5121 - RNA, 528 nt, synthetic construct
  misc_feature 1..528: note = source = /note="Description of Artificial Sequence: Synthetic coding sequence"
  source 1..528: mol_type = other RNA
atggggacatggatcctgtttgcatgcctgcttggggccgctttcgccatgccagtgctgacccccctcaagtggtaccagtctatacgacccccttatccatcatatggctacgaacccatgggcggatggctgcaccatcagataatccccgtactgtctcagcaacaccccccaacacacacacttcagccgcaccaccatattcccgtcgtgccagctcagcaacccgtgatcccccagcaacccatgatgcctgttccaggacagcattctatgacacctattcaacatcaccaacccaatctgccacccccagcccagcaaccatatcagccgcagcccgtgcagccccaaccacatcagccaatgcagccccaaccccccgtccatccaatgcaacccctaccaccccaacctccacttcccccaatgttccccatgcagcctttgccaccaatgctccctgacctgaccctcgaagcctggccctccactgacaaaaccaaacgtgaagaagtggactag

SEQ ID NO: 5122 - RNA, 618 nt, synthetic construct
  misc_feature 1..618: note = source = /note="Description of Artificial Sequence: Synthetic coding sequence"
  source 1..618: mol_type = other RNA
atgggcacgtggattttgtttgcatgcctgttaggagcagctttcgccatgcccctgcccccccatcccggccatcccggttacatcaatttctcttacgaaaactctcacagccaagccatcaatgttgaccgcacagccctcgtcctgacacctttaaagtggtatcagtcaattcggccaccatacccctcttacggatatgagcccatgggcggctggctgcatcaccaaatcattcctgtcctcagtcagcagcatcctcccacacacaccctccagccccaccatcacattccagtagtcccagcacaacagcctgttattccacagcagcccatgatgcctgtgcccggacagcacagtatgactccaatccagcaccaccagccaaacctccctccacctgcccagcaaccatatcaaccccagcctgttcagccgcagccccatcagccaatgcagccccaacctcccgttcaccccatgcaaccactacccccgcagccaccactcccgcctatgtttcctatgcagcctcttccaccaatgctgccggacctgaccctagaagcctggcccagcaccgataaaacgaaacgagaagaagtagattag

SEQ ID NO: 5123 - RNA, 576 nt, synthetic construct
  misc_feature 1..576: note = source = /note="Description of Artificial Sequence: Synthetic coding sequence"
  source 1..576: mol_type = other RNA
atgggaacttggatcctgttcgcatgtctcctcggcgctgctttcgcaatgcctttgccccctcacccaggccatcctggatatataaattttagctacgaagttcttactcctctcaagtggtatcagtctataagacccccctatccatcatatggatatgagcctatgggaggatggttgcaccatcaaatcatcccagtcctatctcagcaacaccctccaacccataccctccagccccaccaccacatccctgtcgtgcccgcccagcagcctgtaataccacagcaacctatgatgcccgtaccaggccaacactccatgaccccaattcaacaccaccagcctaacctgcctccacccgcccaacaaccttatcaaccccagcccgtccagcctcaaccacaccagccgatgcagccccaaccacctgtacatccaatgcagcctctgccgcctcaacccccactcccacctatgttcccaatgcaacctctgccccctatgctgccagatctaaccctcgaagcctggccatcgaccgataaaaccaagagagaggaggtagactag

SEQ ID NO: 5124 - RNA, 804 nt, synthetic construct
  misc_feature 1..804: note = source = /note="Description of Artificial Sequence: Synthetic coding sequence"
  source 1..804: mol_type = other RNA
atgaaggcggctgttctaaccctggccgtgctctttctgacaggctcacaagcacgacacttctggcaacaagatgaaccaccacagagcccttgggatcgggtgaaagatctcgcaaccgtatatgtcgatgttctgaaggactcaggcagagactacgtgagccagttcgaggggtcagcgctcggtaagcaattaaacctgaaacttttagataactgggactcggtgactagtactttttccaaactgagagagcagcttggtccggtgacacaagaattttgggataacctagagaaagaaacagagggtctgaggcaggagatgtcaaaagacctggaggaggtaaaagcaaaagtgcagccttatttagacgatttccagaagaaatggcaggaagagatggagctgtatcgccagaaagttgaacctctccgggccgagttgcaggagggagcgagacaaaaacttcatgaactgcaggaaaagctgagcccactgggagaagaaatgagagaccgtgcgagagcccacgttgacgcattgcgtacgcacttagccccatatagtgacgagttacggcagtgtctggcggccagactagaggctctgaaagaaaatggtggggcgcgtttagctgaatatcatgccaaggccacggagcacctttctaccctgagcgagaaggctaaaccagccctggaagatctaagacagggtctcctccccgtgctggaaagttttaaagtatcatttctgagtgctttagaagagtatactaagaaattgaatacccaatag

SEQ ID NO: 5125 - RNA, 804 nt, synthetic construct
  misc_feature 1..804: note = source = /note="Description of Artificial Sequence: Synthetic coding sequence"
  source 1..804: mol_type = other RNA
atgaaggcggccgtgctgaccctggccgtgctcttccttactggaagtcaggcgagacatttttggcaacaggacgagcctccacaatcaccatgggaccgtgtcaaagatcttgccacagtttatgtcgacgtattaaaagatagcggacgagattacgtaagccagttcgagggctcagcactgggaaagcaattgaatttgaaactgctagacaattgggattccgtcacatcgacttttagtaaacttcgagaacagttaggccccgtcactcaggaattctgggataatttggagaaagagaccgagggtctacggcaggaaatgtccaaggatctagaggaggtgaaggcaaaggtccagccctacctggatgacttccagaaaaagtggcaggaagaaatggagctgtataggcagaaggtcgaaccactgagagcggaactacaggagggggcccggcaaaaattacatgaattgcaggagaaactaagcccactaggcgaggagatgagagattgcgctcgggcccacgttgatgcactgcgaacacacctggcgccctattctgacgaacttaggcagaggctagcagcacgtcttgaagctttgaaggaaaatggtggagccaggctggcggaataccatgccaaggccacagagcatttgtctacccttagtgaaaaagccaagccagcactggaagatcttaggcaaggccttctccctgtcttagagagtttcaaagtatcattcctgtcagcccttgaggagtacaccaagaaactaaacactcagtag

SEQ ID NO: 5126 - RNA, 804 nt, synthetic construct
  misc_feature 1..804: note = source = /note="Description of Artificial Sequence: Synthetic coding sequence"
  source 1..804: mol_type = other RNA
atgaaggcggccgtgctcacactggccgttcttttcctgacaggatctcaggcgaggcatttctggcagcaagatgaaccaccccagagtccttgggacagagtgaaagacttagccaccgtttacgttgacgtactaaaagattctggcagagactacgtgagccagtttgagggatcggcactcggaaagcaattgaacttgaaactgctggataattgggacagcgtgacatctacattctctaaacttagggaacagctgggacctgtgacacaggaattctgggacaatctcgaaaaagagacagagggactgaggcaggagatgtccaaggacctagaagaagtaaaggccaaggtccaaccttatctggatgatttccaaaagaagtggcaggaagaaatggaactgtatcgtcagaaagtcgaaccactccgggctgagttgcaggaaggggcaagacagaaacttcacgagctccaggagaaactatcccctttgggagaagaaatgagagaccgcgcacgtgcccatgtggacgccctgagaacacatctagcgccctatagcgacgaactgcgccagaggctcgcagccagattggaagcactgaaagagaatggcggagcacgtcttgcagaataccacgccaaagccacagagcatctctcaaccttgagtgagaaagccaaacctgcgctagaggacctgcgccagggcttactgcctgttttggaaagctttaaagtatcttttctgtctgcactggaagaatacaccaagaaattgaacacgcagtag

SEQ ID NO: 5127 - RNA, 804 nt, synthetic construct
  misc_feature 1..804: note = source = /note="Description of Artificial Sequence: Synthetic coding sequence"
  source 1..804: mol_type = other RNA
atgaaagccgccgtcttgaccttagctgttttgttcctcacgggatctcaggctaggcatttttggcaacaggacgagcctccccaatctccttgggatagagtaaaagatctcgccacagtctatgtggacgtgctcaaagacagcggacgggattatgtaagtcaatttgagggaagcgcactggggaaacaactaaatctgaaactcctggataattgggatagcgtcactagcacattcagcaaactaagggaacaattgggtcccgtgacccaggaattttgggacaatctcgaaaaagagaccgaaggcctgcgacaggaaatgagtaaagatctggaggaagtgaaagcgaaggtacagccatatttggatgattttcagaagaaatggcaagaagaaatggagctgtatcggcaaaaagtggagcctttgcgagcagaactgcaagagggcgctaggcagaagctgcatgagctgcaagagaagttgagcccacttggggaagagatgcgcgatcgggcccgagcacatgtagacgcattgcggacacatttagccccctactccgacgaactgaggcagagattggccgcacgcctagaagctctcaaggaaaacggaggcgctaggctcgccgaataccatgccaaagccaccgaacatctgtctaccctctctgagaaggcgaaaccagctttggaagatctgcgccagggcttattgcctgttctcgaaagtttcaaagtaagtttcctatcggcattggaagagtatacaaagaagctgaacacccagtag

SEQ ID NO: 5128 - RNA, 804 nt, synthetic construct
  misc_feature 1..804: note = source = /note="Description of Artificial Sequence: Synthetic coding sequence"
  source 1..804: mol_type = other RNA
atgaaagccgccgtgcttacgttagccgtgctgttcctaacaggctctcaagctaggcatttttggcagcaggacgaaccaccgcaaagtccatgggatagggttaaggacctggctactgtgtacgtggatgtgctcaaggatagtgggagggactatgtgagtcaatttgagggatccgctctcggcaagcagctgaatctgaagcttttggataattgggattccgtgacatctactttctctaaactccgggagcagttaggccccgtcacgcaagaattttgggacaatctcgaaaaagagacagagggactgcggcaagaaatgagtaaggacctggaggaagtgaaagccaaggtgcagccatacttggacgattttcagaagaaatggcaagaggagatggagctctatcggcagaaagttgagcctttaagagcggagctgcaggagggagcgagacagaagcttcacgagctacaggagaaactttcacccctgggcgaggaaatgcgggaccgagcccgagcgcatgtcgacgctctgcgtacccatttagccccttacagtgatgagttacgtcagaggcttgcagcaaggttggaagctttgaaagaaaacggtggggcaagactggcagaataccatgcaaaagcaaccgaacacctctcaactctgagcgagaaggccaagcctgcgttggaggatctgcgacagggtctgcttcctgtgctggaatcatttaaagtgagttttctgagtgccctagaagagtatacaaagaaactaaatacacagtag

SEQ ID NO: 5129 - RNA, 804 nt, synthetic construct
  misc_feature 1..804: note = source = /note="Description of Artificial Sequence: Synthetic coding sequence"
  source 1..804: mol_type = other RNA
atgaaagccgcggtgctgaccctcgctgtgctcttcctgacgggttcacaggcacgacacttctggcaacaagatgagccaccacagagcccctgggatagagtaaaagacttggctaccgtttacgtggacgtactaaaagacagcggtcgggactacgtgagtcagtttgaagggagcgctctaggaaaacagctgaatctgaagcttttggacaattgggactcagtaacatctaccttctcaaagctgagagagcagctcggccccgttacccaggaattttgggataatctcgagaaggagacagagggcctccggcaagagatgagtaaggatctggaggaagtgaaagcaaaggttcagccttatctagacgattttcagaaaaagtggcaggaggagatggagctgtatagacagaaagtggaaccgttgagagcagagctgcaagagggcgcccggcagaagttacacgaattgcaagagaagctatccccccttggagaggagatgagggaccgggcacgagcacacgtggacgccttaagaacccatctggcaccctacagtgatgagctgcgacagcgtttggctgcccgactggaggcgctcaaggagaatggaggagcccgtctcgcagaataccatgctaaggccactgaacacctgagcacgttatcagaaaaagccaaacccgctctggaggacttgagacaaggcctcctccctgttctagaatcatttaaagtgagttttctgtcggccctggaggaatatacaaaaaagctcaatacccaatag

SEQ ID NO: 5130 - RNA, 798 nt, synthetic construct
  misc_feature 1..798: note = source = /note="Description of Artificial Sequence: Synthetic coding sequence"
  source 1..798: mol_type = other RNA
atgaaaaaagaagtatgcagcgtggcttttctaaaggcagttttcgctgaatttctcgccacactcatttttgtcttcttcggactcgggtctgcactgaaatggcctagcgccctccccaccatcttgcagatagccctcgccttcggattggccatagggacccttgcccaggccttaggccccgtctcaggcggccatatcaatcccgctatcacgctggcacttcttgtcgggaaccagatatccctcttacgtgcctttttttacgttgccgctcagctggtaggtgccatcgccggcgcagggatcctgtacggcgtagctcctctgaatgctcgagggaaccttgccgtaaacgctcttaacaataacaccactcagggacaggccatggtagtcgaactcattcttactttccaactcgcactgtgcattttcgccagcactgacagccgcagaacctcccccgtcgggtcccccgccctctctatcggattatcagttaccctgggtcaccttgtcggtatctactttaccgggtgttcaatgaatcccgcacggtcattcggcccggccgtcgtgatgaatagattttctccggcacattgggtgttttgggtaggacctatcgtgggtgcggttttggcagccatcctgtacttttacctgctgtttcctaactcattgtctctgtcagaaagggtggctattataaaggggacatacgaacctgacgaagactgggaagaacaacgggaagagaggaaaaaaactatggaactgactaccagatag

SEQ ID NO: 5131 - RNA, 663 nt, synthetic construct
  misc_feature 1..663: note = source = /note="Description of Artificial Sequence: Synthetic coding sequence"
  source 1..663: mol_type = other RNA
atggagttgggtttggggggactatcaactctgagccactgtccatggccgcgacaacaacctgctctttggcctactctcgctgcgttggccttgctttcttccgtcgcagaagcctccctgggctctgctcctcgatcgccagccccaagggaaggcccacctcccgttttggcctcccccgctggtcacctgccgggaggcagaactgcaagatggtgttcgggtcgggccagacggccacctccacaaccatctagacccgcacctcctcctcccgccccaccctctgctttgccacgaggcggcagagccgctcgggccggcggacctggaagccgagctcgtgcagccggagctcggggctgtagactgaggagccaactggtgcccgttagggcactcgggctgggtcatagatctgatgaattggttcgttttagattctgttctggctcttgccgcagagcgagaagccctcatgacttgtccctcgcaagcctacttggcgctggcgctttacggcccccacctgggagcagacccgtaagtcagccttgctgtcgacccacacgttacgaagctgtttcattcatggacgtaaactcaacttggcgtaccgttgacagattgagcgctactgcttgcgggtgtctaggctag

SEQ ID NO: 5132 - RNA, 663 nt, synthetic construct
  misc_feature 1..663: note = source = /note="Description of Artificial Sequence: Synthetic coding sequence"
  source 1..663: mol_type = other RNA
atggaacttggtctgggtggtctgtctacattatcccactgcccttggccacggcagcagcccgcactgtggcccacactcgcggccctcgcgcttctatctagcgtggcagaggcatcccttggttcagctccaaggagcccagccccacgggagggccctcccccagtcctggcttcgccggcgggtcatctccctggcggtcggaccgcaagatggtgctcaggtcgcgcccgaaggccccccccccaacctagcaggcccgcgcctcctcccccagctccgccatccgcgcttccgcggggaggccgtgccgcgcgagctggaggccccggcagtcgggctagagctgcaggcgcaagaggttgcagacttaggagtcagttagttcctgtgagggcccttggcctcggacaccgatctgatgaacttgttagattcagattttgctctggatcttgccgcagagcacgctctccacatgatttgtctctggcttctctcctgggggcaggagccctacgtcccccgccgggttcgcggccagttagccagccctgctgtagacccacccggtatgaagccgtcagtttcatggacgtcaattcaacttggagaactgttgatcggctgagcgcgaccgcctgtggatgcctggggtag

SEQ ID NO: 5133 - RNA, 687 nt, synthetic construct
  misc_feature 1..687: note = source = /note="Description of Artificial Sequence: Synthetic coding sequence"
  source 1..687: mol_type = other RNA
atggaactaggcctaggcggactgtccaccctgtcgcactgcccatggccaaggcagcaggctcctctgggtctgtccgcacagccggcactttggccaacgttggccgccctggctctcttgagttcggtagctgaagccagtttgggcagcgctcctagatcccccgcccctcgtgaaggccctccacctgtactagcctctcccgcaggtcacctgcccggcggcagaacagcccgctggtgctcaggacgcgcacggcgcccacctcctcagcctagtcgccctgccccccctcctccagcacctccgtcggctctcccccggggtgggagagcagcaagagccggcggaccagggagcagagcaagggcagcaggagccaggggatgtagactgcgaagccagctggtgcccgtgcgagcactggggctgggacatcggagcgacgaactggtccgttttagattctgcagtggtagctgtagaagagccagatctcctcatgatctatcactggcctctctcctcggcgccggcgcactgagacctccccctggaagtcgacccgtttcacagccatgttgccgcccgaccagatatgaagccgttagttttatggatgtgaactctacatggcgaactgtcgataggttgagtgcgactgcttgtggatgcctgggctag

SEQ ID NO: 5134 - RNA, 201 nt, synthetic construct; identical to SEQ ID NO: 4804
  misc_feature 1..201: note = source = /note="Description of Artificial Sequence: Synthetic coding sequence"
  source 1..201: mol_type = other RNA

SEQ ID NO: 5135 - RNA, 270 nt, synthetic construct; identical to SEQ ID NO: 4805
  misc_feature 1..270: note = source = /note="Description of Artificial Sequence: Synthetic coding sequence"
  source 1..270: mol_type = other RNA

SEQ ID NO: 5136 - RNA, 201 nt, synthetic construct; identical to SEQ ID NO: 4806
  misc_feature 1..201: note = source = /note="Description of Artificial Sequence: Synthetic coding sequence"
  source 1..201: mol_type = other RNA

SEQ ID NO: 5137 - RNA, 270 nt, synthetic construct; identical to SEQ ID NO: 4807
  misc_feature 1..270: note = source = /note="Description of Artificial Sequence: Synthetic coding sequence"
  source 1..270: mol_type = other RNA

SEQ ID NO: 5138 - RNA, 687 nt, synthetic construct
  misc_feature 1..687: note = source = /note="Description of Artificial Sequence: Synthetic coding sequence"
  source 1..687: mol_type = other RNA
atggaattaggactgggtggactgtccaccctgagtcactgtccatggccgagacagcaggctcccctaggactctctgcccagccagctttatggcctacgctcgcagctctagcccttttaagttcagtcgcagaggcttcccttggctcggccccacgttctcctgcccccagagagggacctccacccgtactggcctccccagccggacaccttccaggtggaagaactgccagatggtgcagcgggagggctagaagacccccgccacaacctagcaggcccgcgccaccacccccagcaccacctagcgccttaccacgaggggggagagccgcccgggccggggggcctggatctagggcgagagcggccggagcccgcgggtgccggttaaggtcgcagctggtaccagtgcgggcattaggtctcggccaccgctctgatgaactcgttcgcttcagattttgttctggcagttgtcgtcgcgctaggagcccccatgacttgtcacttgcctcactgttgggagccggcgccctgcggccgccaccaggttcccgccctgtttctcaaccctgctgtcgaccaaccaggtatgaagccgtatcctttatggacgtcaatagcacttggaggacagtagacaggttgagcgccaccgcttgcggatgccttggttag

SEQ ID NO: 5139 - RNA, 1602 nt, synthetic construct
  misc_feature 1..1602: note = source = /note="Description of Artificial Sequence: Synthetic coding sequence"
  source 1..1602: mol_type = other RNA
atggggccaagaggtgctgccagcctgccccgtggacctggtcctagaaggcttttgcttccagtggtcctgccgctcctgctattgcttctcctagcaccacctgggtctggagccggtgctagtagacctccacacctggttttcctcttagcagacgacttgggctggaacgacgtaggctttcatggtagtcgaatcagaacgccacaccttgacgccttggccgcaggaggggtgctgctcgacaactactacacccaacctctttgcacacctagtaggtcacagctgctcaccggtcgttaccagatcagaacaggcttgcagcaccagattatttggccatgtcagccgtcctgcgttccactggacgagaaattactgccccaactgctgaaggaggccggatacacgactcatatggtgggaaaatggcatttaggcatgtaccgaaaggaatgtctgcccactcgacgcggattcgacacctatttcggatacttgttaggctcagaagattactatagtcatgaacgatgcacccttatagatgcgctcaatgtcacacgttgcgccctggacttcagagacggagaagaagtcgccacaggatataaaaatatgtatagcacaaatatcttcaccaagcgcgccatcgctttaatcacaaatcaccccccagagaaaccccttttcctttacctggcccttcagtcagttcatgagcccttgcaggtccctgaagagtacctgaagccctacgattttattcaggataaaaatagacaccattatgctggaatggtgtccttgatggatgaagcagtgggtaacgttactgcagcgctcaagtccagtggtctctggaataacacagtcttcatctttagcactgataacggaggacagaccctcgccggagggaacaactggcctttaagagggagaaagtggtcactgtgggaaggtggggtgcgcggcgttggctttgtagcttcccccctgctcaaacagaagggtgtgaaaaatagagaacttatccatatcagcgactggctcccaacactcgttaaacttgccaggggtcacactaatggaaccaagcccctggatggcttcgatgtctggaagactatttccgaaggatcgccttccccgagaatcgaactgctgcacaatatagacccgaattttgtggacagcagcccatgcccccgcaactcaatggcacccgcgaaagatgactccagccttcctgaatactcagccttcaatacatcggttcatgctgccattcgacacggcaattggaaattgttgacaggctatcctgggtgtggctactggtttccccctccttcccaatacaatgtgtccgaaatcccttcttcagacccgcctacaaaaactttgtggctttttgatatcgatcgagatcctgaggagagacatgatctgtccagagagtacccgcatatcgttactaagttgctctcaagattgcagttttatcacaagcatagcgtaccagtttattttccagcacaagatcccagatgcgaccccaaagctacaggggtgtgggggccatggatgtag

SEQ ID NO: 5140 - RNA, 1602 nt, synthetic construct
  misc_feature 1..1602: note = source = /note="Description of Artificial Sequence: Synthetic coding sequence"
  source 1..1602: mol_type = other RNA
atgggcccccggggcgccgcctctctcccacggggtcccggaccaaggcgactcctcctgccagtcgttctcccgttgctcttactcctattactggcaccacctggaagcggcgccggcgcatcccgcccaccccatctggtctttttattggcagacgacctgggatggaacgacgtcgggtttcacggctctagaattcggacacctcatttagatgctctagccgcaggcggtgttctactcgataattactatacccagccactatgcacgccatctagatctcagttgttgaccggaagatatcaaatcagaactggactacagcaccaaattatctggccctgccagccatcctgcgtacctttggacgaaaagctgttaccccaactgctcaaagaggccggctataccactcacatggtggggaagtggcatctcggaatgtatcgcaaagaatgtctacccacgagacgcggtttcgacacttattttgggtaccttttaggcagtgaagactattactctcacgaaagatgcacacttatcgatgctctgaatgttacaaggtgtgctctagacttccgggacggtgaggaggttgctaccggctacaaaaatatgtactctaccaatattttcactaaaagagcgatcgcccttatcaccaaccacccacctgagaagcccctcttcctatacctggctctgcaaagcgttcacgaacccttgcaagtaccggaggaatatctgaaaccctacgattttatccaagacaagaacagacaccactacgcagggatggtgagtctgatggatgaagcagtcggcaacgtaacagctgccctcaagagttccggcctatggaacaatacggtgtttattttcagcacagataacggcggacagacgctggcaggtggcaataattggccgctgaggggccgcaaatggagcttgtgggagggaggagtccggggggtgggttttgttgcatctccactgttgaagcagaaaggcgtaaaaaaccgcgaattaattcatatctctgattggctgccaactctcgttaaattggctaggggacatacaaatgggaccaaaccattagatgggtttgatgtttggaaaacaataagcgagggcagcccatctcccagaatcgaactgctgcataatatagatcccaactttgtggattcctcaccctgcccacgtaactccatggctccagcaaaggatgattcctccctccccgaatattccgcctttaacacaagtgtacatgcagccatccgccatgggaattggaagcttctgacgggttatcctgggtgcgggtattggttccctcctccctcacagtataacgtatccgaaatcccaagcagcgatccccccaccaagactttgtggttatttgatattgacagagatcccgaggagaggcacgatttatcccgcgagtatccccacatcgtgacgaaactacttagtagattgcagttttatcataaacacagtgtacccgtctactttcccgcccaggacccaagatgcgacccaaaagcgacgggcgtttggggcccatggatgtag

SEQ ID NO: 5141 - RNA, 1242 nt, synthetic construct
  misc_feature 1..1242: note = source = /note="Description of Artificial Sequence: Synthetic coding sequence"
  source 1..1242: mol_type = other RNA
atgggcccccgtggagcagcttcactcccccgtggacccggaccgagacgccttctactcccagtcgtactgcctctgctccttctgctgctgctggccccaccaggttctggtgccggcgcctcccgcccccctcacctagttttcctgcttgccgacgacctgggttggaatgatgtgggattccatggctccaggattcggacgccccacctcgatgccctcgcagccggtggcgttctgcttgataactattatacacagcccctatgcacgccgtcacgtagccagctgttgaccggtagataccagattcggacaggacttcaacatcagatcatctggccctgccagcctagttgtgtacctctggacgagaaactactgccacagcttctcaaggaagccggatatacaactcacatggtgggcaagtggcatttgggcatgtacagaaaggaatgtcttcctactagacgaggcttcgacacctactttggatacttactgggatctgaagattattacagtcacgagagatgcacgctcattgacgccttaaatgttacccgttgcgctctggattttcgggatggtgaggaggtagcaactggatacaagaacatgtatagtacaaatatattcaccaaaagggcgatagctctgatcaccaatcatccaccggaaaaacccctcttcctgtacttggctctacaatcagttcatgaacctctgcaggtccctgaagaatacttgaaaccatacgatttcatccaagataaaaatcggcaccactacgctggaatggttagtctcatggacgaggccgtgggcaacgtcactgcagctcttaaaagctcaggcctgtggaataacactgtctttatttttagcaccgataatggcggacaaacactcgccggtggcaataactggcctctgagaggcagaaaatggtcgctctgggagggcggtgtgagaggagtggggtttgtagcatcgcccctccttaaacaaaagggcgtgaaaaatcgtgaactgatacatatttccgattggctccctaccctggtaaagctggctcgcgggcacacaaacggaacaaagcctctggacggatttgacgtgtggaagacaatcagtgaaggtagccctagtccgcggattgaactacttcataatattgaccccaactttgtcgactcttctccttactggcccgaatgttccctgctgctttag

SEQ ID NO: 5142 - RNA, 138 nt, synthetic construct; identical to SEQ ID NO: 4812
  misc_feature 1..138: note = source = /note="Description of Artificial Sequence: Synthetic coding sequence"
  source 1..138: mol_type = other RNA

SEQ ID NO: 5143 - RNA, 1788 nt, synthetic construct
  misc_feature 1..1788: note = source = /note="Description of Artificial Sequence: Synthetic coding sequence"
  source 1..1788: mol_type = other RNA
atggcaggcccgtcacctccccttcgcgcgggggtgggcaggcgcttactcggggttgcccaccccgacctgagaccctgtctttgtggggagcttcaagtggaaggaggacccggaccggttccaggcatgctaaggacttgttatgtgaggagcccatggcggcgaggtccatcaagtgcaaggggcgagcagtccggatcaggccacctcgaacaagaagaagtacagagcggcagcttattgtttagactcctgctctttctgtctcgatctcccgcatcacgtaaccagcgcatcttgtatactgttctagaatgccagcctctatttgatagctcagacatgacgattgcagagtgggtgtgtctggcacagactataaagcgacactacgaacagtaccacggcttcgttgtcatccatgggaccgacaccatggcatttgctgcgtctatgctctcatttatgttggaaaacctccaaaaaacggttatcctgactggcgcccaagttccaattcacgcactttggtccgacggccgcgaaaacttactgggcgccctactcatggcaggtcagtacgtcatacctgaagtctgtctcttctttcagaaccagttgttccggggaaatagagcaaccaaggtggacgctagaaggttcgccgctttctgctctcctaatctcttacctctcgcgactgtcggcgccgatattacaatcaatcgcgagttagtccgaaaagtagacggcaaagctggcttagtggtgcacagcagcatggagcaagacgtaggactcctgaggctttaccccggcattcccgctgcattagtgagggctttcctacagccccctcttaaaggagttgtcatggaaactttcgggtccggaaacggacccaccaaaccagaccttttgcaagaacttagagttgctactgagagaggcctggttatcgtaaattgtacgcattgtctgcagggcgcagtgacgacggactatgccgcagggatggccatggcaggagcaggcgttatttccggattcgacatgactagcgaagcggcccttgcaaaactgtcctacgttctcgggcagcctggcctgagcctcgacgtacggaaggaactgttgactaaggatctgcgtggcgaaatgacacccccgtccgtcgaggagagacgcccctccctgcaaggtaatactctgggaggtggtgtgtcctggttactctcactgtcaggttcccaggaagctgatgcactgaggaacgcactcgtgccttctctggcctgcgccgcggcacatgcaggcgacgtggaggctcttcaggctcttgtagagttaggatcagacctaggcctcgtagactttaacggacaaaccccactccatgcagctgcccgaggaggccatacagaggcggtcacaatgctacttcagcgaggtgtcgacgttaatactagggacaccgacggctttagccccctgctgctggctgtcagagggaggcatccgggggttatcgggctgctgagagaagcgggagcatcactttctacacaagagttggaagaggccggaactgagctgtgcaggctggcctatagagccgacttagagggattgcaggtgtggtggcaggcaggagcagatctgggacaaccaggatacgatggccatagcgccttgcacgtcgccgaagctgctgggaacctcgctgtggttgcctttctgcaatcactggaaggcgctgttggggcccaggcgccatgtccctag

SEQ ID NO: 5144 - RNA, 1740 nt, synthetic construct
  misc_feature 1..1740: note = source = /note="Description of Artificial Sequence: Synthetic coding sequence"
  source 1..1740: mol_type = other RNA
atggctagagcggtgggccctgaaagaagactgctggccgtgtacacagggggtaccattggtatgaggtctgaattaggggtcttggtgccaggaaccggactagcagccatactgagaacactccccatgtttcatgacgaggagcacgcacgcgctcgcggactgtcagaagacaccttggtcctcccacccgcttcacggaatcagcgtattctatatactgttcttgagtgtcaacccctgtttgattccagcgatatgacaatagcagaatgggtttgcctggcccagactatcaaacgtcattatgaacagtaccatggcttcgtcgtcatacacgggaccgatacaatggccttcgccgcttcaatgttgagctttatgttagaaaacttgcagaaaaccgtgattctcaccggtgcgcaagtgcctattcatgccctatggtccgacgggagagagaatctccttggcgcacttctcatggccggacaatatgtgatacccgaagtctgtctgttctttcagaaccagttgtttaggggaaatcgggccaccaaagtggatgcacgtaggtttgctgcattctgtagccctaacctcctgccattggccactgttggcgcggatatcaccattaatagggagctcgtccgcaaggtagacggcaaggccgggcttgtggtgcactcatctatggaacaagacgtcggtctgcttcgcctgtatccaggtatccccgcggccctggtgcgtgccttcctccaaccccccctgaagggtgtcgttatggaaacttttggcagcggcaatggcccgacaaagccggatttgttgcaggaactcagagtcgcaactgaaaggggattagtaattgttaattgcacgcattgtctccagggcgccgtgacgaccgactatgccgcaggaatggccatggctggcgcaggggtgattagcggatttgacatgacatctgaggcagctcttgccaagctcagctacgtcctcggccagccaggcctgtccctggatgtacggaaagaacttcttactaaagatctgcgtggcgaaatgaccccgccctcagtcgaggagaggagaccaagcttacagggcaatacgcttggggggggagtaagctggttattgagtcttagcggcagtcaggaggccgatgctctgcgaaatgccttagttccctccttggcttgtgccgctgcccatgccggagatgttgaggccctgcaagccctggtggaattgggatccgatttgggtctcgtggattttaatggacaaacacccctacacgccgccgcacgtggcggacacactgaagctgtgaccatgctcctccagagaggtgtagacgtgaataccagagacaccgatggattcagccctcttttactcgccgtgcgcggacggcacccaggggtcattggcttgctacgggaagcaggtgccagcctctctacacaggaattagaagaggccggtaccgagctgtgtcgtctagcctatagggcagatctcgaaggattgcaggtttggtggcaggcaggcgcagatctgggccagcccggctatgatggacactctgcactgcacgtggctgaagctgctggtaacttagccgttgtggcatttctccagagtctcgagggtgctgtaggtgcccaggccccatgccctgaaccgtcatgctttcaagaagtgttgccgggcgtctag

SEQ ID NO: 5145 - RNA, 423 nt, synthetic construct
  misc_feature 1..423: note = source = /note="Description of Artificial Sequence: Synthetic coding sequence"
  source 1..423: mol_type = other RNA
gctgctgctcggggcggtcacactgaggccgtgacaatgctgcttcagcgcggagttgatgtgaacacaagagataccgatgggttttctccattgttgctggctgtgagggggagacatccgggagttataggacttctcagggaagccggcgcgagtttgtccacccaggagttggaggaggcagggacagaactgtgccggttggcttatagggcagacctggaaggccttcaagtgtggtggcaggccggggccgaccttggacaacctggatatgacggacattctgcactgcacgttgcagaggcagctgggaatctggccgtcgttgcatttttacagtccctggagggagctgttggtgcacaagccccttgcccagaaccaagttgttttcaggaggtgttgcccggtgtttag

SEQ ID NO: 5146 - RNA, 1722 nt, synthetic construct
  misc_feature 1..1722: note = source = /note="Description of Artificial Sequence: Synthetic coding sequence"
  source 1..1722: mol_type = other RNA
atggccagagccgtcggccccgaaagaagacttctggccgtttacaccggcggtacaattggcatgcgttctgagcttggcgttctggttccaggaacaggactcgctgcaattctacgaactctccctatgttccacgatgaggaacacgcaagggcacgtggactctctgaggatacactggtactgccaccagcctctcggaaccaaagaattctatacacagtcttggagtgccagcctctatttgattcatcagatatgaccattgcagagtgggtctgtctcgcccaaaccataaagagacactacgagcaataccatggctttgtagttatccacgggacggacacaatggccttcgcggctagcatgctcagtttcatgcttgaaaacctgcaaaagaccgtgatcctcaccggggcccaagtccccatccacgccctctggtctgatggtagagagaacctgttaggtgcactcctgatggctggacagtacgttatacctgaagtgtgtctcttttttcaaaaccaactctttagaggcaaccgagccaccaaagtagatgcaagacgcttcgctgccttctgtagcccaaatttactgccattggccaccgttggtgccgatataacaataaatcgtgaactagttcggaaagtggatggaaaggcaggattggttgtgcacagcagtatggagcaggatgtcggtctcctgcggttatatccaggcattcccgccgccttggtccgggcctttttacagcccccactgaagggcgtggtcatggagactttcgggagcggtaacggccccacaaaaccagacctcctacaagagctgcgtgttgctaccgagaggggcctggtgattgttaattgtactcactgtctccagggcgcggttacaaccgactatgctgctgggatggcaatggccggggctggagtgatctcaggatttgacatgacctctgaagccgctttggccaagctgagttatgtgctggggcagcccgggctttctctggatgtacgtaaagagctactcacaaaggaccttcggggcgaaatgactcctcctagtgttgaagaacgcaggccgtccctgcaaggtaacacgcttggagggggtgtgtcttggttactatctctgtcggggagccaggaagccgacgcgctcaggaatgccttggtcccatctctcgcctgcgccgccgcccatgcaggagatgtggaggccctgcaagctctcgtcgagctgggatctgatcttggattagtggatttcaatggacaaactccattgcatgctgccgcccgtgggggacatacagaggccgtgaccatgctgttacaaagaggagtggatgtgaacacacgggatactgacggatttagtcctctgctgctcgccgtgcggggacgtcatcccggcgttatcggccttcttcgcgaagcaggggcatccctatctactcaggaactggaagaggctggcacagaactctgtagactggcttaccgggcggatcttgaaggacttcaggtctggtggcaagcaggagcagatctggggcagcctggatatgatggacattctgctctgcatgtggccgaagcagctggaaatctggcagtggtcgcgttcctgcagtctctggaaggagccgtgggagctcaggcaccctgccccgaagtcctccctggcgtctag

SEQ ID NO: 5147 - RNA, 4398 nt, synthetic construct
  misc_feature 1..4398: note = source = /note="Description of Artificial Sequence: Synthetic coding sequence"
  source 1..4398: mol_type = other RNA
atgcctgagcaagagcggcagattacagctagagaaggagcaagtcgtaaaatactgagtaaactcagcttgccaactagagcctgggaacccgccatgaaaaaatcattcgctttcgataacgtcggctacgaagggggactagacggcctcggaccgagctctcaggtcgcgaccagtaccgttcggatcctgggaatgacctgtcaaagttgtgtgaaatccatcgaggaccgtatctctaacttgaaaggtattatctcaatgaaagttagtcttgaacagggttctgcaactgtcaagtacgtaccctccgttgtgtgtcttcaacaggtgtgccatcaaatcggggatatgggtttcgaggcttccatcgctgagggaaaggctgccagctggcccagccgctcacttcccgcacaggaggccgtagttaagctgagggtcgagggcatgacatgtcaatcatgcgtgagtagtatagagggaaaagttcgaaagttgcaaggagtcgtgagagtgaaagtcagtctgagcaaccaggaagccgttataacttaccagccgtacctaatccaaccggaagatctcagggaccatgtaaacgatatgggtttcgaagctgccatcaagtctaaagttgcccctctgagtctgggacctatcgatattgaacgtcttcagagtacaaatccaaaaagacccctgtcatccgccaatcaaaacttcaataacagtgagacactgggacaccagggatctcacgtggttaccctacagctgaggattgacggtatgcattgcaaatcttgtgtattgaatatagaggaaaatattggtcagcttctgggagtacagtcaatccaggtttccttggaaaacaaaaccgctcaagtgaaatatgacccatcatgcacatcccccgttgccctgcaacgcgccatcgaagccttgccacccggaaatttcaaagtaagcctccccgatggggcggaaggctcaggcaccgaccataggtcttccagctctcactcacctggaagccccccccgaaaccaggttcagggcacgtgcagcaccaccttaatcgctatcgccggtatgacttgtgcctcatgtgtacactctatcgaagggatgataagccaactggagggcgtacagcagataagcgtctccctcgctgaagggaccgcaaccgtcctctataatccgtctgttatttctccagaagagttacgtgcagcaattgaggatatgggatttgaggctagtgtagtgtccgagtcttgctctaccaacccacttggcaaccattcggccggtaacagcatggttcagacaacagacggtacaccaacttccgttcaagaggtggccccacacaccggacgtctgccagctaatcacgcccctgatattctggccaagagtccccagtcgacccgcgcagttgccccgcagaagtgcttcctgcagattaaaggaatgacgtgcgctagctgtgtgtctaacatcgaaaggaatttgcagaaggaggctggtgtccttagtgtgctggtcgcgctcatggcaggtaaagcagaaatcaaatacgatccagaggttatccagccattggagatcgcacagttcatacaggacttaggattcgaggcagctgtaatggaagattatgccgggtcagatggaaatatcgagctcaccatcaccggaatgacatgcgcctcctgtgtccataacattgaatcaaaactcacacgaaccaacggcattacgtacgcatccgtcgctctcgccacttccaaagccttagtcaagtttgatccagaaattatcggcccacgtgatattattaaaatcatcgaagaaattggcttccacgcctctctagcccaacgtaatccgaacgcccatcacctggatcacaaaatggagatcaaacaatggaaaaagagtttcttgtgcagtctcgtgttcggaattcccgtgatggcactaatgatatatatgctgattccctccaacgagccgcatcaatctatggtactggaccacaacattattcctgggctttccattctcaacctaatcttttttattctttgtaccttcgtgcagctgctaggaggatggtatttctacgtccaagcctacaagtcacttcgacaccgcagcgcgaatatggacgttctgatcgtgctggctacttcaatcgcatacgtgtatagtctagtgatcctggttgttgctgtggccgagaaagcggagagatcccctgtcacgtttttcgatacacccccaatgttgtttgtcttcatcgcgctaggccgttggctcgaacaccttgcaaagtcaaagacctcggaggccctcgccaagttaatgtccctgcaggcaacggaagcgaccgttgtaaccctgggtgaggataatctgataattagggaggaacaggtccctatggaactcgtgcaaagaggcgatatagtgaaggtcgtcccaggaggcaagttcccggtcgacggtaaggtgttggaaggcaataccatggctgatgaatcactgatcaccggagaggcaatgcctgttaccaagaagcctggtagtaccgtgattgctggtagcataaacgcccatggatccgtgttaattaaagccacacatgtaggtaacgacactaccctagctcagatcgtcaaactcgtcgaagaggcccagatgtcaaaagctcccatacaacaactggccgataggttttcaggctactttgttccgtttatcattatcatgtctactcttacactcgttgtctggatcgtgatcgggtttatagacttcggggtagtacagagatacttccctaatccgaacaagcacatcagtcaaacagaggtgatcataagatttgcgtttcaaacctctataaccgtcttgtgcattgcctgcccctgctcactcggactcgcgacccctaccgccgtgatggttggcacgggcgtcgctgctcagaatggaatattgatcaagggggggaagccacttgagatggctcataaaataaagactgtgatgttcgataaaaccggaacaattacacacggtgtacctcgggtgatgcgggtcctgctcctgggcgatgtagcaacccttcccctgcgcaaggttctagccgtagtaggtacagccgaagcatcaagtgagcatcctctgggcgttgccgtgaccaagtattgcaaagaagagctgggcacagagaccctcggatactgtacagactttcaagccgttccaggttgcgggattgggtgtaaggtgtctaacgtcgaagggatcctcgcccacagtgagcgtccgctgagtgctcctgcttctcatctcaacgaggccggctctttacccgcggagaaagacgccgtcccccagacattctccgtgcttattggaaatagggaatggttacgcaggaatggcctgacaatttcatctgacgtttccgatgccatgactgaccacgagatgaaagggcagacagcaattctggtcgcgatcgatggagtcctgtgcgggatgattgctattgcagatgccgtgaagcaggaagccgctctggctgttcacactttgcagagcatgggcgtagatgtcgtcttgattacaggtgacaatcggaaaacagcaagagctatagcaacacaagtgggcattaataaggtatttgccgaggtcctcccatcccataaagtcgccaaggtacaggagctgcagaacaaaggcaagaaggtggccatggtgggagatggcgtaaatgactcacctgccctagctcaagccgacatgggcgtcgcaatcggcacaggcacagatgttgctattgaagcagccgacgtcgtcctaatcagaaatgatctactggatgtcgtggcttctatccacctttctaaaagaaccgtgcgccgaattcggatcaacctggtactggcactcatttacaatttggtgggcattccaatcgcagccggagtattcatgcccataggaatcgtgcttcagccatggatgggttctgcagcaatggccgcgtcaagtgtttcagtggtgcttagttccttgcaactgaagtgctataagaaaccggatctggaaagatacgaggcacaagcccacggccacatgaaacctctcaccgcttctcaagtctcagtgcacatcggaatggatgacaggtggagagattccccccgcgcgaccccttgggatcaagtatcctatgtaagccaagtgtcgctttcaagcctgacctctgataaaccaagcagacattccgccgctgctgatgacgacggagataagtggtccctactactcaatggacgggacgaggaacaatatatctag

SEQ ID NO: 5148 - RNA, 3777 nt, synthetic construct
  misc_feature 1..3777: note = source = /note="Description of Artificial Sequence: Synthetic coding sequence"
  source 1..3777: mol_type = other RNA
atgcccgagcaggagcgtcagatcaccgcacgagaaggggccagcagaaagattctcagcaagctgtccctgcctacaagagcatgggagccagcaatgaagaaaagtttcgcttttgacaatgtcggatatgaaggaggcctagacggtctgggcccatccagccaggttgcaacatccaccgtccgtattctgggaatgacctgtcagagctgtgttaagtcaatagaggaccggatcagtaatttgaagggtatcattagcatgaaagtcagcttggaacaaggatccgctactgtcaagtacgttccaagtgtggtgtgcctgcagcaagtctgtcaccaaattggggatatgggattcgaggcttccatcgcagaaggcaaagcagcctcctggccatcacgcagcctccccgctcaagaagctgtggtcaagctccgcgttgaaggaatgacctgccaatcttgcgtctctagcatagagggaaaggtgcgaaaactgcagggcgtggtcagggtaaaagtctccttgtccaatcaggaagccgtcataacttaccagccctacctaatacaacccgaggatctgcgagaccacgtgaacgatatgggttttgaagctgcgattaagagtaaagttgcaccactgtcgcttggacctattgatatagaacgcctccagagcaccaaccccaagaggcccctctcttcagcaaatcagaacttcaacaatagtgagaccctgggtcaccaaggaagccacgtcgtaactttgcaattgagaattgatggaatgcactgtaaatcctgtgtgctcaatattgaggaaaatattggccagttgctgggggtccagagcatccaggtctccctggagaataagaccgcacaggttaagtatgacccatcatgcacatctccagtcgcactgcagcgtgccatcgaagcccttccccctggaaactttaaagtctcactgcctgacggagctgaggggtccggtactgatcatcgctccagctctagtcatagccctgggtccccccctcgaaatcaggtgcaaggtacctgttctacgaccctgattgcaatcgccggtatgacatgtgccagctgtgtccactccatagaaggaatgatttcacaactggaaggagttcagcaaatcagcgtctcactggcagagggcacagcgacagtgctctacaatcctagtgtaatcagccccgaagaactgcgtgcagcaatcgaagatatgggtttcgaggcctcagtcgtgagtgagtcatgttcaacaaaccctctaggcaatcacagtgccggtaattccatggtgcagacaaccgatggtacccctacctcagtccaagaagtggcgccacatacagggaggttacccgcaaatcatgcacccgatatattagcgaaatctccccaaagcaccagggccgtcgccccacagaaatgtttccttcagatcaaaggaatgacctgcgcctcatgcgtgtctaacattgagcgaaaccttcagaaagaggcgggagtgttatcggtcctcgtggcactcatggcaggcaaggcagaaattaaatacgatccagaagtaattcagcctctggagatcgcgcagtttattcaggacctggggttcgaagcagccgtgatggaggattatgcagggagtgacggaaatattgagctaacaatcaccggtatgacctgtgcatcctgtgtgcataatatcgaaagcaagttaactagaacaaacggaattacatacgccagcgtggcccttgcaacatcgaaagctttggtgaagttcgacccagagatcatcggcccccgcgatattattaagatcatcgagagcaagacatctgaagccctggcaaaactgatgagcctacaggccaccgaagcaactgtggttaccttaggtgaggataatctgattataagagaagaacaggtaccaatggagctagtacaacggggggatatagttaaagtcgttcccggaggcaaattccctgtcgatggtaaggtgctggaaggaaacactatggccgacgaatcacttattaccggtgaggcaatgcccgtaaccaagaaacctggaagtaccgtaattgccggcagtataaacgcccacggaagtgtcttaatcaaagcaacccatgtggggaatgacaccacactggctcaaatcgtgaagctcgtggaagaagcgcagatgtctaaaaatcccaataagcatatctctcagaccgaagtcataatccgcttcgcttttcagactagtataaccgtcctctgcatcgcatgcccttgctctctcggattagcgacacctaccgcagtgatggtgggcacaggagtagccgcccagaacggaattttaatcaagggaggtaagcccctggagatggctcataagataaaaaccgtaatgtttgacaaaactggtaccattacgcatggagtgcccagagtgatgagagtcctgctgctaggagatgtcgctacactccccctgaggaaggtattagctgtcgtgggaacagcagaggcttcaagcgagcaccccttaggcgtggccgtcaccaaatattgcaaagaggaactggggactgagactttgggctactgcaccgactttcaagcagtcccaggttgtggcataggatgtaaggtctccaatgttgagggcatactcgcccattcagaaagaccgcttagcgctccagcatcccaccttaacgaagccgggtccctgccagcagaaaaagacgccgtgccccagaccttttctgtcctgatcggaaatcgtgaatggctgcgacgcaatggcttaacgatcagcagcgacgtgtcagacgccatgacggatcacgagatgaagggccagaccgctatcctggtggccatcgacggagtgttatgtggtatgattgctatcgctgatgcagtaaaacaggaggccgcactcgccgtacacaccttgcagtctatgggggtggatgtagtgcttattaccggagacaaccgcaagacggcccgagccattgccacacaggtgggaattaataaagtgtttgcagaagtcctgccttcccataaggtcgccaaagtgcaagaattgcaaaacaaagggaagaaagttgcaatggtgggagacggagtaaacgacagccctgcacttgctcaggctgatatgggcgtcgccatcggaactggaactgatgtagctatcgaagccgccgacgttgtgttgattaggaatgacttactcgacgttgttgcatccatccacttatctaagcgaaccgttcggcgcattcgtatcaatctcgtgctggctctcatatacaacttggtcggcatccctatagctgccggagtcttcatgcctataggaatcgtgttacaaccctggatggggtccgccgcaatggctgcttccagtgtgagcgttgtccttagcagcctgcaactcaagtgctacaagaaacccgatctggaaaggtacgaagctcaggcgcacggtcatatgaaacccctaacggctagccaagtgtctgtccacataggtatggacgataggtggagagactccccccgcgctaccccctgggaccaggttagctacgtgtcacaggtctcattatcttctttgacttccgataaaccctctaggcattctgccgcagccgacgacgatggagacaagtggagtctcttactgaatgggcgagatgaagaacagtatatctag

SEQ ID NO: 5149 - RNA, 4065 nt, synthetic construct
  misc_feature 1..4065: note = source = /note="Description of Artificial Sequence: Synthetic coding sequence"
  source 1..4065: mol_type = other RNA
atgccagaacaggaaagacaaattacagcaagggaaggcgcgtcacgcaaaatcctcagcaagcttagtcttccaactcgcgcatgggaacctgctatgaaaaagtcttttgcattcgacaatgtgggttacgagggtgggttagacggactgggcccttcctcccaggtggcaacaagtacagtacgaatcctcggcatgacctgtcagtcttgtgtgaagtctattgaagaccgcatttccaacctgaaggggattattagcatgaaagtgagcctagagcaagggtcggccaccgtcaagtacgtgcccagcgtcgtgtgtctccaacaggtatgtcatcaaataggggacatgggattcgaggcctctatcgcagaggggaaagctgcgtcctggccatccagatctttgcctgctcaggaagcagtcgtgaaacttcgagtggagggcatgacgtgccaatcatgtgtttctagcattgaaggaaaggtgcgcaaattgcagggggtcgtcagagttaaagtaagcctgtctaatcaggaagctgtcattacctatcaaccatacctgattcagccagaggacctcagggatcacgtaaatgacatgggattcgaggcagcaattaaatctaaggtcgcaccactatcactgggccccatcgacatcgaacgactgcagagtacaaatccaaaacgccctttaagttcagcaaaccaaaacttcaacaatagcgagactttaggccaccaggggagtcacgtggttaccctccagttaaggattgatggaatgcactgcatgatttcccagcttgaaggggtgcagcagattagtgtgtctctggcagagggaaccgcaacagttttatacaatccttctgtgattagccctgaagaattgcgggctgccattgaagacatgggatttgaagcttccgtggtctccgaatcttgcagtactaaccctctgggtaatcatagcgccggaaattccatggtccaaacaaccgatgggactcctacaagtgttcaagaagtcgctcctcacactggacgcctgcctgctaaccacgctcccgatattcttgccaaatctccccagtcgacaagggcggtggcaccccagaagtgtttcttacagattaaagggatgacttgcgccagctgcgtgtctaatatagaacggaatctgcagaaagaggctggcgtcctttcagttctggttgccctgatggccggaaaagccgagataaaatatgacccagaggtgattcaaccacttgaaatcgcacagtttattcaggacctgggatttgaggcggccgtgatggaggattatgcaggaagcgacggcaatatcgaattgacaatcacaggaatgacttgcgcctcctgcgtgcacaatatagagagtaagctgacccgcacaaatggaatcacctacgcctctgttgccctcgctacctcgaaagcactagttaaatttgaccccgagatcattggaccacgggatatcattaaaatcattgaagagataggattccatgcatcacttgcccagagaaacccaaacgctcatcacttggatcacaaaatggagatcaagcaatggaagaagtcatttctgtgctccttggtgtttggcattccggtgatggccctgatgatatatatgcttattccatcaaatgaacctcatcaatcaatggtactcgatcataacattatccctggcctcagtatcttgaatctcatctttttcattctttgtacctttgtgcagctccttggagggtggtatttctatgtgcaagcctacaagtcattaaggcatcgctccgcgaatatggacgtgctaattgtgctcgccacttctatcgcttacgtttattcgcttgtcatcttggttgtagcggttgcagagaaagccgaacgatctcccgtcacatttttcgataccccacccatgctcttcgtgttcattgctcttggtagatggctggagcaccttgccaaatcaaaaaccagcgaagctctggccaagttgatgtcactgcaagccaccgaagccaccgtggtgactcttggggaagataatctcattatccgagaagagcaggtgccaatggagctagtccagcgcggcgacattgtgaaagttgtaccaggagggaagtttccagttgacggcaaggtactggaaggaaacactatggctgatgaaagtctgatcaccggcgaggctatgccagtcactaagaagccggggagtacagtaattgctgggtctattaacgcgcacggttccgttctgattaaagcaacgcacgttggtaacgacacaactctggcacaaatagtaaagctcgtggaagaggctcaaatgtctaaggcccccatccaacagctcgcggatagattcagcgggtacttcgtgcccttcattataattatgagtactctaacattggtggtgtggatagtcattggcttcatcgatttcggggtggtgcagcgatattttcctaatccgaacaaacacatctcccagactgaggttatcatccgttttgcctttcagacctctatcacggtcctctgcatagcctgcccatgtagcctaggcctggctacccctactgcggtaatggtcggtactggtgtagcagcccagaatggaatattaattaaaggagggaagccgctggaaatggctcataaaatcaagacggttatgttcgacaagactggtactatcactcatggagttccaagggtaatgcgagtcttacttttaggagatgtcgccacactaccactcaggaaggtcctcgccgttgttggcaccgcagaggcctcgtcggaacaccctcttggcgtcgcagtcacaaaatattgtaaggaggaactcgggacagagacattgggatactgcacggatttccaggctgttcccgggtgtgggattggctgcaaggtgtcaaatgtcgaaggcatactggcccacagcgagcgtcccctgagtgcaccagcttcccacttgaatgaggcagggtcactccccgcagaaaaagatgccgttccccagaccttctcagtgctgatcgggaacagagaatggctgaggagaaatggtctcactatcagcagcgacgtgtctgacgccatgacggatcatgaaatgaaggggcaaacagccatccttgtagcgattgacggagtgttatgtggcatgattgcgatcgctgacgctgtaaaacaagaggcagcactagccgtacacaccctgcaaagcatgggtgtggacgtcgtgctcatcacgggcgacaatcgtaagaccgctagagccattgcaactcaagtcggtatcaacaaggtcttcgccgaagtccttccctcacataaggtagcgaaggtacaagagctgcagaacaaaggcaaaaaagtggcaatggtgggtgatggcgtaaacgattctccagctctcgctcaggctgatatgggggtggctataggaaccgggacagacgtagctatcgaagccgcagatgttgtgctgattagaaatgacctacttgatgttgtagcctcaatacatctgtctaagcgaactgtgcgtaggattaggattaacctggtactcgctctgatttataacctggtaggaatcccgatagcggcgggggtattcatgccgataggtatcgtgttacaaccatggatgggatcagccgccatggctgcttcttctgtatcagtggtattgtcctctctgcagctgaaatgctacaaaaaacctgacctcgaaagatacgaagctcaggcccacggacacatgaaacctctgaccgcctcccaagtcagcgtgcatattgggatggacgatcgctggagggatagtccgcgcgccacaccctgggatcaagtctcttacgtgagccaagtgtccctatcttctctcacatccgataaaccttccagacattcagccgccgccgatgatgacggagacaagtggtcccttttgctaaacggacgggatgaagagcagtacatctag

SEQ ID NO: 5150 - RNA, 3108 nt, synthetic construct
  misc_feature 1..3108: note = source = /note="Description of Artificial Sequence: Synthetic coding sequence"
  source 1..3108: mol_type = other RNA
atgcccgagcaagaacgacagataacggccagagagggagcctcaagaaaaatcctgagcaaactgagcttgccaacaagagcttgggaaccagctatgaaaaaaagcttcgcgtttgataacgttggatacgagggaggactggacgggctcgggcccagttcccaggttgccacaagcactgtgcgaatattagggatgacatgtcagtcatgcgtcaagtccatcgaagatcgaatttccaacctgaagggtatcatttctatgaaagtttcattggagcagggcagtgccacagtaaaatacgtaccatccgtcgtgtgtctgcaacaagtgtgtcatcagattggagatatgggtttcgaagcgtctatagcggaaggaaaggctgcgagctggccatctcgaagcctcccagctcaggaggccgtcgtcaagctccgcgtcgaagggatgacatgtcagtcctgcgtctcttctatagagggtaaggtgcgtaaactgcagggagttgtgagagtaaaggttagcctgagcaatcaagaagcagttatcacgtatcagccatatcttattcagcccgaggacctgagggaccatgtgaatgacatggggttcgaagccgcaattaaatctaaagtcgcccctctatcactggggcctatcgatattgagagattgcagtctactaatcctaaacgcccactcagctccgctaatcagaactttaacaatagtgaaactttaggccatcaagggagtcatgtagttactctccaactgcgcatcgatggcatgcactgcaagtcttgtgtcttgaatatcgaggagaacatcggccagctgctgggagtccagtcaatccaagtaagtctggagaataaaacagcccaggtcaagtacgatccctcatgcacctcccctgtggctctgcaacgcgctattgaggccctccctccaggtaatttcaaagtctccctccccgacggagcagaaggtagcggcaccgaccataggtcctcaagttcacacagcccgggatcgccgcccagaaaccaggtgcaggggacttgcagtacaaccctgatcgctattgccggaatgacgtgcgcctcttgcgtccatagcatcgaagggatgatcagccaactggaaggtgtgcagcaaattagtgtgtccctcgcagaaggtacagcaactgtgctttacaacccctcagttatcagccccgaggaacttcgtgcagccatcgaggacatgggattcgaagcctccgtggtgtctggcgaggctatgcctgtcactaagaagcccggttcaacagttatcgccggaagcattaacgcacatggttccgttctgatcaaggctacccacgtgggcaacgacacgaccttggcacaaatcgtgaagcttgtggaagaagcccagatgtctaaagctcccatacaacagcttgcagatagattttccggctatttcgtccccttcatcatcataatgagtacactgacattagttgtatggatcgtgatcggctttatagatttcggagtcgtgcaacgctacttccccaacccaaataagcacatctctcaaacagaagtcatcatccgctttgccttccagacatctatcactgtcctctgcattgcctgtccctgcagcctcggcttggcaacaccaactgcagtgatggttggaactggagtagctgcccagaatggcatcctcatcaaagggggaaaaccactggaaatggcacataagattaagaccgtcatgtttgataaaactgggaccattacccatggtgtcccaagagtgatgagagtgctcctgctaggggacgtcgctacccttcccctgagaaaagtattggcagtcgtgggaacagctgaagccagctctgaacaccccctaggggtggcagttaccaaatactgcaaggaggaactgggcaccgaaactttaggatattgtacggacttccaagcggtccctggatgcggcatcggttgcaaagtgagtaacgtggagggaattttggcccactctgaaaggcccctctctgcaccagcgtctcacctgaacgaagccggaagtctgccagcagaaaaggacgctgtgccgcagacattctccgtcctgatcggaaaccgcgaatggctgagacgcaatgggctgactatctcaagcgacgtgagtgacgcaatgaccgaccacgaaatgaaaggacaaactgccattctggtggctatcgacggtgtactatgtggaatgattgcaattgctgatgccgtgaaacaggaagccgctctggctgtacacactctgcagagtatgggcgttgatgtggtcttgatcactggggacaatagaaaaaccgccagggccatcgctacacaggttggcataaataaagtgttcgccgaggtcttgccctcccataaagtcgccaaagtccaggaactgcagaataaaggaaagaaagtggctatggtgggggatggagtaaatgactctccagctttggcccaggcagatatgggagttgctattggaaccgggacagacgtggcaattgaggcagctgacgtcgtgcttattcggaatgacctcttggatgtagtggcttcgatccatctatctaaacgcacagtcagaagaattcggattaatttagttctcgcactgatctataaccttgtaggtataccaatcgccgccggagtgttcatgcccattgggatcgtgttgcagccctggatgggatccgcagcgatggccgctagctcggtgtcagtcgtgctctctagcttgcagctgaagtgctataaaaaacctgatctggagcgttacgaggcacaggctcacggtcacatgaaacccctgaccgcttctcaggtgtctgtgcatatcggcatggatgatcgatggagagactccccgagagctaccccctgggatcaagtttcatatgtgtcacaagtttcactcagttctctgacctccgataaacctagcagacacagtgccgccgcggatgatgatggagataaatggagcctcctgctaaatggtagagacgaagaacagtatatatag

SEQ ID NO: 5151 - RNA, 2031 nt, synthetic construct
  misc_feature 1..2031: note = source = /note="Description of Artificial Sequence: Synthetic coding sequence"
  source 1..2031: mol_type = other RNA
atggatgtgctgattgtgctggccacctccatcgcttacgtgtacagtctcgtaatcctcgttgtcgcagttgccgaaaaagctgagcggagcccagtgaccttttttgacacccctccaatgttgttcgtatttatcgctttaggacgatggttggagcacttggccaagtctaagacatcagaggcccttgcaaagttaatgagcctccaggccacagaggctacagttgtcaccttgggagaagataacctcataatcagggaggaacaagtgcccatggagctggttcagagaggagacatcgtgaaggtagtccctggcggtaagttccccgtagatggaaaggtacttgaaggcaacaccatggctgatgagagccttattactggtgaagcaatgccagtcactaagaagccaggctctactgtcattgctggaagtattaacgcacacggtagcgttttgatcaaagcaacccacgtagggaatgacacaacactggctcagatcgttaagctcgtggaagaggcccaaatgagcaaggcaccgattcagcagttagccgatcgctttagtggatattttgttcccttcatcatcattatgtcgacattgacactcgttgtctggatagtaatcgggttcatcgacttcggagtagtccaaagatatttcccaaaccccaataagcatattagccagaccgaagtcatcatccgtttcgcatttcagactagtatcaccgtgctctgcattgcttgcccttgcagtcttggcttggccacacccactgccgtgatggtcggaaccggagtggcagcccagaatgggatcctgatcaagggaggaaaacctttggaaatggcacacaaggaactaggtacagaaacccttggctactgcaccgattttcaggccgtccctggatgtggcataggatgtaaagtatcgaatgttgaagggatcctggcccactctgagcgaccactgtccgcacctgcctctcatctcaacgaagccggaagtctgcccgccgaaaaagacgcagtgccccaaactttcagcgttcttatcggaaatcgggaatggctcagacgaaatggactgacgatctcgagcgatgtcagcgacgcaatgacagatcatgaaatgaaaggccagaccgctattctggtggcaatcgacggtgtactttgcggcatgatcgcgattgcagatgccgtgaaacaggaagccgctctggccgtgcatactctccaatcaatgggcgtggacgtggtcctcatcacaggcgataaccgaaaaaccgcacgagctatagcgacccaagtgggaattaacaaagtatttgctgaggtgttgccatcccataaggtagccaaagtccaagaattacagaacaaaggcaagaaagtcgctatggttggcgacggcgttaatgacagccccgcactggctcaggccgacatgggagtagccatcgggaccggaaccgacgtagccattgaagctgcagacgtggtactcatccgaaacgacttactggacgttgtggcctccatacatctctccaaaaggacggttcgtcgaattcgcataaacctggtacttgccctgatctacaaccttgtagggatcccaattgccgcaggagttttcatgccgattggaatcgtgctacaaccgtggatgggatccgccgccatggctgcctccagcgttagcgtggtcttatcatccttacagttgaaatgctataaaaagcccgatttggaaagatatgaagctcaggctcacggccatatgaaacccctgacagcatcccaagtgagcgtgcatatcggcatggacgacaggtggcgggatagcccaagggccaccccctgggaccaggtgagttatgttagtcaagtttctctctcaagcctgacttctgacaagccttccagacacagcgctgctgctgacgatgacggagacaagtggtctttactcttgaatgggcgggacgaagagcagtatatctag

SEQ ID NO: 5152 - RNA, 4203 nt, synthetic construct
  misc_feature 1..4203: note = source = /note="Description of Artificial Sequence: Synthetic coding sequence"
  source 1..4203: mol_type = other RNA
atgcctgaacaagaacgacagatcaccgccagggaaggagcttcccggaagattctttctaaactgtcactgcctacaagagcatgggaacccgcaatgaaaaagagttttgccttcgacaatgtaggatacgagggcggcctcgacggcttaggcccaagttctcaagtcgcaaccagcacagtccggatccttggaatgacgtgccagtcctgtgtcaaatcaattgaggaccggatcagcaatttgaaagggatcatatctatgaaagtaagcctggagcagggatcagctactgtcaagtacgtcccaagcgtcgtgtgccttcagcaggtgtgccatcagattggtgatatgggattcgaagcctcaatcgccgaaggcaaagcggcgagttggcccagcagatcgcttccagcacaggaggctgtggtcaagctccgggttgaagggatgacctgtcagagctgtgtaagctcaatagaaggaaaagtgcgaaaactacagggggtcgtgagagtaaaggtctcgttaagtaaccaagaagcagtcattacctaccagccctatttaattcaaccagaagacctgagagatcacgtgaacgatatgggcttcgaagcagccattaagagcaaggtagctccacttagccttggcccaatagatatcgaacgacttcaatcaacaaacccaaagcgccccttgagctccgcaaatcaaaattttaacaattccgagaccctgggacaccaaggaagccacgtagtgaccttgcagctaaggatcgacggcatgcattgcaagtcatgtgtcctcaatattgaagaaaacatcggtcaactgctgggtgtccagtctattcaagtctcactggaaaataagaccgcccaggttaaatatgatcccagctgtaccagcccagtagcactgcagcgtgcaatagaagccttacctccagggaattttaaagtcagtttacccgatggggctgaggggagcggcaccgatcatcgttcttctagcagccatagcccaggaagccccccccggaaccaagtacagggaacctgttccacaacgttaattgctattgccggcatgacatgcgcatcttgtgtgcacagtatagaaggaatgatcagccaactggaaggagtacagcaaatcagcgtctcactcgcagaaggcacagctacggtactctacaacccatcagtgatatctccagaggaactaagagctgccatcgaggacatgggctttgaggccagcgtcgtctctgaatcgtgcagcacaaatcccttagggaatcactcagccggcaattctatggtgcaaaccaccgacggtactccaaccagcgtgcaagaagtcgcccctcatacaggaaggttgccagccaatcacgccccagacatcctggctaagtcaccacaatcaacccgcgctgtggcaccccagaagtgtttcttacaaattaagggcatgacatgcgcgagttgcgtatcaaacatcgaacgtaacttacagaaggaagccggagtactgtcagtgttggtggctcttatggctggaaaggccgagattaagtacgatccggaagtgatacagccgctcgagattgctcaattcattcaggaccttggatttgaggcggccgtcatggaagactatgcaggctcagacggaaacatagaattgaccattactggaatgacgtgcgctagctgcgtccacaacatcgaaagcaagcttacacgaactaacgggatcacttatgcctccgtcgcattagctacctccaaggcactcgtaaagtttgaccctgagatcatcgggccccgcgacattataaaaattatagaggaaattggatttcacgctagccttgcacagcgtaaccccaacgctcatcacttggaccacaaaatggaaattaagcagtggaaaaaatccttcctgtgctccctcgtgtttggcatacccgtaatggcactcatgatttacatgctcatcccttccaacgagcctcatcagtcaatggtgttagatcacaatattatacctggattgtctattctcaacctcatattctttattctgtgcacgtttgtccagctgctcggtgggtggtatttctatgtccaggcctacaaatccctcagacaccgctccgcgaacatggacgtgctgatagtgttagccacgagcatcgcatatgtatattcacttgtgatcctggtagtagccgtcgccgaaaaggcagaaagaagtcccgtaaccttcttcgatacaccacctatgttattcgtgttcattgcgttgggccggtggttggagcacctcgcaaagtctaagacgtcagaagctctggctaagctaatgagtcttcaagctacagaagcaactgtcgtcactctgggagaggacaaccttattattcgcgaagagcaagtccccatggagctggttcagagaggtgatatcgtgaaggtcgtccctggcggcaagtttcctgtcgacgggaaagtccttgaggggaacacaatggccgatgaaagtctgataaccggagaagctatgccggtaactaagaaacctggatccaccgtgatcgctggctcaataaacgcacatggcagtgtgttgatcaaagctacccatgtcggtaatgacaccactcttgcccaaattgttaaactggtggaagaagcacaaatgtcaaaggctcccatccaacagttagctgaccgattctctggctattttgtgccctttattattatcatgagcactttaacacttgttgtttggatagtcataggctttatcgattttggcgtggttcagagatatttcccgatcaaaaccgtgatgtttgataagacaggcacgatcacccatggcgtcccccgcgttatgcgtgtgctgctacttggggacgtggctactttgcccctacgaaaagtgctggccgtggttggaaccgccgaagctagtagtgaacaccccttaggtgtagctgttacgaagtactgcaaagaagagttaggcacggagactctgggatactgtaccgactttcaggctgtacctggctgtggaattggatgcaaggtttccaatgttgagggaattttggcacattcagagcgccccttgtccgctcccgcctctcaccttaatgaagccggcagtctaccagccgagaaggacgccgtgccacagacctttagcgtcctcattgggaatcgtgaatggctcaggagaaatggattgactattagtagcgacgtaagcgacgccatgacggatcacgagatgaagggacagacagctatattggtggcaatagatggcgtactgtgcgggatgatagcaatagcagacgctgtgaagcaggaagctgctctagccgttcacactctacagagtatgggtgtagacgtggtattgattacaggtgataataggaagaccgctcgggccattgccactcaagtgggtattaataaagtatttgcagaagtactaccgagtcataaagtggctaaggttcaggagctacaaaacaaaggaaaaaaggtcgccatggttggggatggagttaatgacagcccagcactcgctcaggcggacatgggagtagcaatcggcacgggaactgatgtggccatagaagccgccgacgtggtcctcatccgcaatgacctgctagacgttgtagccagcatccacttgtcaaagagaactgtgcgtaggattcgtatcaacttggtcttagcactgatttataacctggttgggatacccatcgccgccggggtgttcatgccaatcgggatagtactgcaaccatggatgggatctgccgcaatggcagccagcagcgtctccgtggttctgtccagcctgcaacttaaatgttataagaaacccgacctggaaaggtacgaagctcaagcccacggtcatatgaaacctctgaccgcaagtcaggtgtctgtgcacatcgggatggacgacaggtggagagattcgcctagggccaccccctgggatcaagtatcatacgtgtcccaagtttctttatccagcttaacatccgataagccatctcgccactcagccgcagctgatgatgacggagataaatggagcctcttgctaaacggcagagatgaggaacaatacatctag

SEQ ID NO: 5153 - RNA, 4164 nt, synthetic construct
  misc_feature 1..4164: note = source = /note="Description of Artificial Sequence: Synthetic coding sequence"
  source 1..4164: mol_type = other RNA
atgcctgaacaagaacggcaaatcaccgcgcgcgaaggcgcaagccgtaaaattctgtcaaaactgtcactcccaacaagagcctgggaaccggccatgaaaaagtcttttgcgttcgataacgttggatatgagggggggctggacgggctcggcccttcaagccaggttgcaactagcacagtccgcattctgggcatgacatgtcaatcctgcgtaaaatcgatagaggatcgaattagcaatctcaaaggtatcatatctatgaaggtttcactggagcaaggatccgccaccgttaaatatgttccatcggtggtatgtctgcaacaggtttgtcaccagattggggacatggggtttgaagcaagcattgctgaaggcaaggctgcgtcctggccaagccgatccttgccggcccaagaagccgtcgtgaaactccgagtagaggggatgacttgtcagtcctgtgtcagttctattgaaggtaaggtccggaaattgcagggtgtcgttcgcgtcaaagtttccctgagtaaccaagaagctgtgatcacttaccaaccttacctgatacagcccgaggacctgcgggaccatgtcaacgacatgggctttgaggctgccatcaaaagcaaagtagccccactgtcactaggtcccatcgatattgagcgtttgcaatcgactaaccctaagcgacctcttagctcagccaatcaaaatttcaataactcagaaacacttgggcaccagggatcccatgtggttacacttcagttacgcatcgatggcatgcattgtaaaagctgtgtcttaaacatagaggaaaatatcgggcagttgttaggcgtgcagagcattcaagttagccttgaaaacaagacagctcaggtcaaatatgacccttcctgtacttctcctgtggcgttacagagagccatagaagcacttccacccgggaatttcaaggtgagcctgccagacggtgctgaaggatccggcacagatcaccgatcctcgtcatcacactcccctggcagtcccccacggaaccaagtgcaagggacgtgctctacaacactcatcgcgatcgccggcatgacttgtgcttcatgtgtgcacagcatcgaagggatgatttcacaattagagggtgtccaacaaatttccgtatcactagccgaaggaacagccactgtgctttacaatccaagcgtcatatcccctgaggaactcagagctgctatcgaagacatgggttttgaggcgtcggtggtttccgaatcatgtagtactaatcccctggggaatcattcagctggaaactcgatggtgcagaccaccgacggtacccctacatctgtccaggaggttgccccccacaccggacggctccctgccaaccatgcccccgatatcctcgctaaatcccctcaatcaacacgtgctgtagccccacagaaatgtttcttgcagattaagggcatgacctgtgccagctgcgtatctaacattgaacggaatctacagaaagaagcaggagtactcagcgttttggtggcactcatggctggaaaggcagagatcaagtacgacccagaagtgattcaacctctagagatcgcccagtttatacaggatctgggatttgaagcagccgtcatggaagactatgccggcagtgatggcaacatcgagctaacaattactggcatgacttgtgcctcttgtgtgcacaatatcgagtcaaagcttacacgaacaaatggcatcacttacgcgtcggtcgccctcgccacatcaaaggctttagtaaaattcgatcccgaaattatcggccctcgcgatataattaaaatcatcgaggaaatcggcttccacgcttccctggcacaacggaacccaaatgctcatcacctcgaccacaaaatggaaataaagcaatggaagaagtcgttcctgtgttccttggtgttcggtatccccgtaatggcgctaatgatctacatgctaattccctccaacgaaccacaccagtcaatggtcctcgaccataatatcatcccagggctgagcatcttaaatctcatctttttcatcttatgtaccttcgtgcagagcaagacatccgaggccctcgctaagctgatgtcacttcaagctacagaagccaccgtcgttacactcggagaagataatctcattataagggaggagcaggtccctatggaactggtgcagagaggagatattgttaaagtggtccccggagggaaattccccgtcgacgggaaggtccttgaaggcaataccatggccgatgaaagcctcattaccggcgaagccatgcccgtcaccaaaaaacccggttcaacagtgatagcaggttcgatcaatgcccacggatcagtgctgatcaaagcgacccacgtggggaacgacacaacacttgctcaaatcgtcaaactcgttgaggaagcccagatgagtaaggctcccatccagcagctcgccgatcgctttagcggttactttgtcccctttatcatcattatgtctaccctgaccctcgtcgtgtggatcgttatcggatttatcgattttggcgtagtacagagatattttcccaaccccaataaacacatatcgcagacagaagtaattattcgctttgccttccagacctcaattacagtactttgtatcgcctgtccttgttcacttggtctagcaacccccacggccgtgatggtcggaacaggggtggcagcccaaaatggcatcctgatcaaaggagggaaacctttagaaatggcccacaagataaaaacggtgatgtttgacaagaccggtacaatcacccacggcgttccacgcgtaatgagagtgctcctccttggcgatgtagcaaccctccccctccgtaaagttctcgccgtcgtcgggaccgcagaggcaagctctgagcacccactaggggtagcagtcacgaaatattgtaaagaagaattgggtactgaaactttaggctactgtacagacttccaggcagtgcccggttgtggtattgggtgtaaagtgtcaaacgtggagggcattctggcacacagcgaacggcccctgagcgcacctgcctcccatctgaacgaggctggctcactgcccgccgaaaaggacgctgtccctcagaccttttccgtactaattggcaatagagagtggcttcgacgcaacggtcttactatctcgtccgacgtgtcagacgcaatgacagatcatgaaatgaagggccagacagccatcttagtggcgattgatggcgttctatgcgggatgatcgctatcgcagacgctgttaaacaggaagccgctctagccgtacacacactacaaagcatgggagttgatgtggttctaatcactggagataaccgcaaaacagccagagcaatagcgacgcaggtgggcattaacaaggtgttcgcagaggttctccccagccacaaggtcgccaaggtccaagaactgcagaacaaaggaaagaaagtcgcaatggtgggagatggcgtaaacgactccccggcacttgcacaggccgatatgggggtagcaatcggtacaggcactgacgtggccatcgaagccgccgatgtggttctcatacgaaacgacctattagacgttgttgcctcaatacatctctcgaaacgcacagtccgacgaatcaggattaacctagtgctggccctaatttacaacctcgtgggcataccaatcgctgctggagtgttcatgccaatcggtatcgtgctgcaaccttggatgggatccgccgctatggccgccagtagcgtgagcgtagtgttgtcatcattacagctgaagtgctataagaagcccgatctggagagatatgaggcccaggcacatggacatatgaaacccctgacagcatctcaggtctcagtgcacataggtatggacgatcggtggagagacagtccacgcgccaccccttgggaccaggttagttatgttagtcaggtgtccctatcctctctaacctccgacaaaccctcccgacattcagccgccgcagatgacgatggggacaagtggagtctgcttctgaacgggcgcgatgaagagcagtatatatag

SEQ ID NO: 5154 - RNA, 1587 nt, synthetic construct
  misc_feature 1..1587: note = source = /note="Description of Artificial Sequence: Synthetic coding sequence"
  source 1..1587: mol_type = other RNA
atgaagaagtcctttgcgtttgataacgtaggttacgagggtggtttggatggactgggaccttctagccaggtcgccacatctaccgtcaggatcctgggaatgacatgccagtcttgcgtgaagtctattgaggataggataagcaaccttaaaggtataatctccatgaaagtgtctctggaacagggctcagccactgtaaagtacgtgcccagcgttgtgtgtctccaacaggtatgtcatcagatcggtgatatggggtttgaagcgagtatcgctgaaggtaaggcagccagctggccatcccgttctcttcctgctcaggaagccgtggttaaactgcgagtcgaaggcatgacatgtcaaagctgtgtcagctctatagaaggaaaagttagaaagcttcagggcgtagtgcgtgtcaaagtttccctgagcaaccaagaagcagtaatcacctaccaaccatacctgatccagccagaggacctacgcgatcatgttaacgatatgggcttcgaagcagccatcaaatccaaagtggcgcccttaagcctgggacctattgatattgagagactccaatctacgaatcctaaaagacctttatcttccgccaatcaaaatttcaacaatagcgagaccttaggccatcagggcagtcatgtggtaacgctccagctgcgtattgacggaatgcattgtaagtcctgcgtccttaacatcgaggagaatatagggcagcttctaggagtgcagtcaattcaagtgtcacttgaaaataaaactgcacaagtgaaatacgatccctcttgtacaagcccagtagccctgcagcgcgcaatcgaagcgctgccccccggcaactttaaagtctcactccctgacggtgccgagggatccgggacagatcaccgttcttcctcatcacacagcccaggctcccccccaagaaaccaagttcaaggaacctgcagcacaaccctcattgccattgccggtatgacctgcgcatcctgtgtgcactcaattgaaggtatgatttcccaactcgagggtgtgcagcagatttccgtaagtctggccgagggaacagctaccgtcctgtacaaccctagcgtcattagcccagaagagctgcgcgccgccatagaagatatgggctttgaagcaagtgtcgtcagcgaatcctgtagtaccaaccccttggggaaccacagcgccggaaacagcatggtccaaaccaccgatggaaccccaacttccgtgcaagaagtggcccctcacaccggtaggctgcctgctaaccacgcccccgacattctggcaaagtccccgcaaagcactcgagcagtcgctccacagaaatgttttcttcagatcaagggtatgacatgtgcatcatgcgtcagtaatatcgaaagaaacttgcaaaaggaagccgccccacgttgggttgtgctgctaaggtcgggactgcaaatctccgaaacacaggttagccagcatggacgagctcaccggccaggacacaagcattgcctctgtcttttcagcggccatcctgggggatgttgcgggtag

SEQ ID NO: 5155 - RNA, 1296 nt, synthetic construct
  misc_feature 1..1296: note = source = /note="Description of Artificial Sequence: Synthetic coding sequence"
  source 1..1296: mol_type = other RNA
atgcacgtgcgttccctaagggctgccgctcctcatagctttgttgctctttgggcgcccctctttttactgcgctccgccctagccgattttagcctcgacaacgaagtgcattcttcctttatacatagaaggctgcgctctcaggagcgcagggagatgcaacgcgaaatcctttcaatcctcggactccctcacagaccccggcctcatctgcaaggaaaacacaactccgcaccgatgttcatgctcgatctgtacaacgctatggctgtcgaagaaggcggagggccaggcggccaagggttctcctatccctacaaagccgtattctcgacacaaggcccaccccttgccagcctccaggattcccattttttaacagacgctgacatggtgatgagtttcgtgaatttagtcgagcacgacaaggagttttttcaccctcggtatcaccaccgcgagttccgttttgatctgagcaaaatacctgaaggtgaagccgtgactgctgctgaatttcggatatacaaggactacatacgagaaaggtttgataatgagacttttagaatcagcgtatatcaggtcttacaggaacacctggggagggaaagcgacttgttcctgttagactcccgaacactgtgggcctccgaggagggatggctggtgtttgacattactgctacttcgaaccactgggtggtgaaccctcggcataacttgggcctgcagctatccgtagagactttagacggacagagcattaaccctaaactagcgggccttattgggaggcatggtcctcagaataagcaacctttcatggtcgcattcttcaaagccaccgaagtccactttagaagcattcggtccaccggatcaaagcagagaagccaaaacagaagcaagactcccaagaaccaggaagccctgcgcatggctaatgtcgccgaaaatagtagttcagaccagcgccaagcctgtaaaaaacatgagctgtatgtgtcatttagggaccttggctggcaagattggataattgcacctgagggatatgctgcgtactattgtgagggcgaatgcgcatttcctcttaacagctatatgaacgcaaccaaccacgctatcgtccagacactggtccacttcattaatccagagactgtacccaagccctgttgcgctccgacccaactgaacgcaatctcagttttatactttgacgactccagcaatgtgatcctgaagaaatatcgaaatatggttgtgcgggcttgtggatgtcactag

SEQ ID NO: 5156 - RNA, 1098 nt, synthetic construct
  misc_feature 1..1098: note = source = /note="Description of Artificial Sequence: Synthetic coding sequence"
  source 1..1098: mol_type = other RNA
atgcacgtcaggtcccttcgcgccgccgcaccccattcttttgtcgctctttgggcgccccttttccttctcagaagcgctcttgccgatttcagtctagataatgaagtgcacagcagcttcatccatcgccgcctgcgctcacaggaaagaagagaaatgcagagggaaattctctcgatacttggtctgccccatcggccgagaccgcatcttcagggcaagcacaacagtgctccaatgttcatgctagatctgtacaatgccatggcagtggaggaaggtggaggccccgggggtcaaggatttagttatccatataaagccgttttcagtacacaaggccctcccctggctagcctccaggactcccactttctaaccgacgccgatatggtgatgtcattcgtgaacctggtagagcacgataaggaattttttcatccccgctaccatcatcgagaattccgctttgatttgagcaaaatacctgagggggaagcggtcacagccgctgagtttcggatatacaaagactatattcgcgagagatttgacaatgagacgtttagaatatccgtctaccaggtacttcaagaacatctaggcagggagagcgacctgtttttgttggattcacgcacactttgggcgtccgaggagggctggctggtatttgacattacggcaacctcaaatcactgggtagttaacccccgacataatctcggtctgcagctgagtgttgaaactctcgatgagaattcatcgtctgaccagagacaggcctgtaaaaagcatgaactttacgtgtccttcagagatctcggatggcaagactggatcatcgccccagaggggtatgccgcttattactgtgagggagaatgcgcatttcctctcaatagctacatgaatgcgactaaccacgccattgtacagacattggttcacttcataaaccctgaaactgtccccaaaccttgttgtgccccaactcaattaaacgcaatcagtgtgctctattttgatgattcctctaatgtgattcttaagaagtatcggaacatggttgtgagagcttgtggatgtcattag

SEQ ID NO: 5157 - RNA, 513 nt, synthetic construct
  misc_feature 1..513: note = source = /note="Description of Artificial Sequence: Synthetic coding sequence"
  source 1..513: mol_type = other RNA
atgaagacccagcgcgatggccattccctgggacgttggagtcttgtcctgctgttgttggggctggttatgccactcgccattatcgctcaagtactttcttacaaagaagctgtacttcgtgctatagacggaatcaatcagcggtcttctgacgctaatttataccgcctactggaccttgatccccgaccaactatggacggggaccctgacacccccaagcccgtcagttttactgtgaaagaaactgtttgcccgcgtacgacccagcagagtcctgaagattgcgacttcaaaaaggacgggctggtgaagcgatgtatgggaaccgttaccctgaatcaggcaagaggctctttcgacattagctgtgacaaagataacaaaaggtttgccctgttgggcgatttttttagaaagtcaaaagagaaaatcggcaaggaattcaaaagaattgtacagagaatcaaggatttcctgagaaacctggtaccaaggactgaatcgtag

SEQ ID NO: 5158 - RNA, 1692 nt, synthetic construct
  misc_feature 1..1692: note = source = /note="Description of Artificial Sequence: Synthetic coding sequence"
  source 1..1692: mol_type = other RNA
gcttgttgttgtggtgggggatgtacatgttgcggttgtacatgcactaccggatgctgcactacgtgtacctgctgtgcttgcgcatgtacaactggaacaaccacaggcgctggcgcatgctgtacaggaggctgcgccgctggaggtacgggatgcggaggtgcggggtgctgctgtacctgttgcgccggtgcagctgggaccggttgcggtggaacgtgtgctgcaggctgtggcgggtgtgctgggtgtggaggagccggcgcctgtggggggtgtggagcaggctgttgtgcgggcggcgcagcttgctgtacttgctgttgctgctgctgtgggtgtggcacatgctgctgttgcgctgggtgtactacgtgctgctgcgccggatgtggtacaggaggttgcggaggctgcggtggagccgcatgttgctgttgctgtggaggggcgggggcagcagcaggcgccgcgactgcggcggctggggcatgtacaggaggggccaccgcctgcgccggggggacatgttgcgccacaactgcttgcgggacctgcgccaccacatgcacaggatgtgctgggggttgctgtgctgctaccactacagctacaggcgcgggcggggcagccacttgttgtgctgcaggtgctacaggagccgccactacaacagggggagcgggatgtgcagggggtgccggcgccggcggctgttgtggtaccactactggaacgtgcactggatgtgcaggcacaggatgctgttgttgtgccggaggctgcacaggatgcacatgttgctgcgccgggtgtgggtgtactacctgctgttgcgccgcatgcgccggggcggggggggcttgttgtgccacgtgcactggcgccaccggagcaacaacgtgcgccactgctgggggatgtgcctgtgccgccgcgtgtgctacgggagccgctgccacaggagcctgcaccacaacaggggctgctggcacaactacgtgttgtaccacctgcgccgcgactgccgcagccgcagcttgtgccggagcctgcgccgccaccgcgaccgggactaccgcaacatgcgcaggggctacatgcgcggcagcctgtacttgttgcggggcatgttgttgctgcgctgcatgtggggcaggagcaaccacatgttgcaccggtgccgccggagccgcatgcacgggttgcggcgcgggaggagctggtggtactggcggtgggtgctgcacgtgtacaacgtgcgcgggatgcggggctggctgtacggggggagcgtgtaccggctgtacatgctgttgtaccggcggggccggttgtgcttgcggtgccggcactacttgcgccgggggagcagcaggcggatgtacttgtgctggaggcgctgccggggccggtggtgcaggggcagggtgtgcagggtgtgccgctggatgtggtggggccgcaaccgccacctgtacatgtggggctacaggttgtgccaccgccgcaacaggatgcgcaggaacaactggagggacaggcggagggggatgttgcgcaactggggcctgcgggggaggaggatgctgctgcggtggggcagcgtgcacgtgtgcgtgttgtgctggatgtaccactgctggctgcgccggatgtggctgtacatgtggcgggtgtaccggatag

SEQ ID NO: 5159 - RNA, 3198 nt, synthetic construct
  misc_feature 1..3198: note = source = /note="Description of Artificial Sequence: Synthetic coding sequence"
  source 1..3198: mol_type = other RNA
atgaaaatcttgatcctgggtatattcctatttttatgcagtacccccgcatgggctaaagaaaagcactattatattggaatcatcgagacaacgtgggactacgccagcgaccatggagagaaaaaactgatcagcgtggataccgaacactcaaacatttacctgcagaatggtcctgatcgcatcggccgactgtataaaaaagcactctacctccagtacactgacgaaaccttcaggacgacgattgaaaaacccgtgtggcttggcttccttggacccatcattaaagcagaaaccggagacaaagtctacgtccacttgaagaatctcgctagccgcccatacaccttccattcccacggcatcacatattacaaggagcacgagggcgcaatatacccagacaacacaactgatttccagagggcagatgataaagtgtacccaggcgaacaatatacctacatgctcttggccactgaggagcaatcccctggtgagggtgatggaaactgcgttacacggatttaccattcccacattgatgcacccaaggacattgcttccgggcttattggaccactgatcatttgcaagaaggactcactcgataaagaaaaagaaaaacatatagatagggaattcgtggtaatgttttcggtcgtggacgaaaatttctcctggtacttggaggacaatattaagacttactgctcggaacccgagaaagttgacaaagacaacgaagattttcaggagagtaacagaatgtattccgtgaatggctacactttcggcagccttccaggcttaagtatgtgcgccgaagatcgggtaaagtggtatctatttgggatggggaacgaggtcgatgtgcacgcagctttcttccacggccaggccctgaccaataaaaattatagaatcgacactatcaatctcttccctgcaaccctcttcgatgcctacatggtcgcccaaaatccaggggagtggatgcttagctgccaaaatttaaatcatcttaaggccggcctccaggcttttttccaagtgcaagaatgcaacaagagctcgtctaaagataacatcagaggtaagcatgttcgccattactatatcgccgcagaagaaattatttggaactatgcgccttcgggtatcgatatcttcacaaaagagaacttgactgctcctgggagcgactccgccgtgttttttgagcaaggtactacgagaatcggcggctcatacaaaaaattagtttaccgggagtacacagatgcaagttttacgaatcgaaaggaaaggggtccagaggaggaacatctgggtatccttggacctgttatttgggcggaagttggagatacaattagagtaacgttccacaataaaggggcgtaccctctcagcattgagccaatcggagtgcgattcaacaagaataatgaaggcacatactactcacccaattacaacccgcagagtcgttccgttcccccatccgcttcacacgtcgctccaactgaaacttttacttatgagtggactgtacccaaagaagtaggacccaccaacgccgatcctgtgtgcttggccaaaatgtattattcagctgtggagccaaccaaagacatctttacagggttgatcggaccaatgaagatctgtaaaaaagggagccttcacgctaatggccgccagaaggacgtggataaagagttctatctgtttccaactgtatttgatgaaaatgagtctttgttgctggaggacaacatcagaatgtttaccacagcccctgatcaggtggacaaggaggatgaagattttcaggaatcaaataaaatgcattccatgaatggatttatgtatggaaatcaaccaggtttgactatgtgtaaaggagattcagtagtctggtacttgtttagtgctggtaatgaagccgatgtccacggaatatatttcagtgggaatacttatttatggcggggggaaaggcgagacactgctaacttatttccacagacctcactaactctgcacatgtggccagatacagaaggcactttcaatgttgagtgtcttacaaccgatcactatacaggcggaatgaaacaaaagtacaccgtaaatcaatgtcgacgccagtcagaagactctacgttttatttgggggagcgcacctactacatcgcggccgtagaggtggaatgggattacagcccacagcgggagtgggaaaaagaactacatcatctccaagagcagaatgtgtcaaacgccttcctggacaaaggggaattttacatagggagcaaatacaaaaaagtcgtctatcgtcagtacacggattcaacctttcgcgtgcccgtagagagaaaagccgaggaggagcacctggggatcctcggtccacaacttcacgccgacgtgggtgacaaagtaaagataattttcaaaaacatggctacacggccttatagcattcatgctcacggagtccagacagagtcaagcacagttacccctacactccctggtgaaacgctcacatacgtatggaaaatccccgaaagatccggcgccggtactgaagacagtgcctgcatcccttgggcatattattccaccgtcgatcaggtgaaagatctatattcaggtctcatcgggccactcatcgtttgcagacggccttatttgaaggtttttaatcctagaagaaaactcgagtttgcactattgttccttgtgttcgatgaaaatgaaagttggtatttagatgataatatcaaaacatactcggatcaccccgaaaaggtaaataaagatgatgaggagttcatcgagagcaacaaaatgcatgcaattaatggccggatgttcgggaacctccagggattgactatgcatgttggggatgaggtcaactggtacttaatgggcatgggaaacgagatcgatctgcacacagtgcattttcacggacattccttccaatacaaacaccgaggcgtctatagctccgacgtatttgatattttccctggcacataccaaactctagagatgtttcccagaacaccaggtatctggcttcttcattgtcatgtgacagaccatatacacgcgggaatggagactacttatacagtcctgcagaacgaggatacaaaaagcgggtag

SEQ ID NO: 5160 - RNA, 1869 nt, synthetic construct
  misc_feature 1..1869: note = source = /note="Description of Artificial Sequence: Synthetic coding sequence"
  source 1..1869: mol_type = other RNA
atggcacacgtgagagggctgcaattacctggatgcttagcactcgccgcactctgttccctagtgcattcacaacacgtgttcctcgcacctcagcaggctcgctccctgttgcaaagagtgcgtcgtgcaaatacatttcttgaagaagtccgcaaggggaacctagaaagggagtgcgtcgaggagacatgcagttacgaagaagcctttgaagctctcgagagttctactgcaacggatgtgttctgggccaaatacacagcatgtgagaccgctcgtacacctcgtgataaactggcagcttgtctagaagggaattgtgcagagggtctgggaacaaactacagaggtcatgtgaatattaccagaagcggtatcgaatgtcagctttggcgcagccggtatccacacaagcctgaaattaatagtactactcatccgggagctgacttgcaagagaatttttgtcgtaacccagattcttcaactactgggccgtggtgctataccacagatcccaccgtacggcgacaggaatgtagcatccctgtgtgtggccaggatcaggtgactgtggcaatgaccccgaggagtgaagggagttctgtgaatctgtctcctccattggagcaatgtgtgcccgaccgcgggcagcagtatcagggaagactggctgtaaccacccacgggctgccatgcctagcttgggcatctgcacaggcaaaagctctgagcaaacatcaagactttaattctgctgttcagctggtggaaaatttctgcagaaatcccgacggagacgaggaaggggtgtggtgttatgtggctggcaaacccggcgattttgggtactgtgatctcaactactgcgaagaggccgttgaagaagaaactggagatggactggatgaagattctgaccgggctatcgaagggaggactgccacaagcgaatatcagacttttttcaacccccggacttttggcagcggtgaagccgactgtggtcttaggcctctgtttgagaaaaagtcactcgaggataaaacagagcgggagttgttggagagctatatagacggaagaatcgtggaagggtcagacgcagaaatcggcatgtctccttggcaagtcatgttgttcagaaagagccctcaagaactactgtgtggagcaagtctgatttcagataggtgggttctgaccgccgcacactgtctgctgtacccaccttgggataagaacttcactgagaatgacctcctcgtaaggattggcaaacattcccggacaagatatgaacggaatatagagaaaatatccatgctggaaaagatctacatacacccaaggtataactggagagaaaatctggatcgcgacattgctcttatgaaactgaaaaaacctgtagctttctccgactatattcacccagtatgccttcctgaccgcgagactgccgcctccttgttgcaggcgggctataaaggtagggttacagggtggggtaacttaaaggagacatggacagccaatgttggaaaaggtcagccaagtgttcttcaggtggtgaacctgcccattgtggaacggcctgtgtgcaaggactccacaagaatacggatcacagacaatatgttttgcgctggatacaaacccgatgagggtaagcggggagatgcatgcgagggcgatagcggcggacctttcgtaatgaaaagtccctttaataatcggtggtatcaaatggggatcgtctcatggggggagggctgtgatagggacggaaagtatggcttctacacccacgtatttagactgaaaaagtggatccagaaagtaattgatcagttcggcgaatag

SEQ ID NO: 5161 - RNA, 195 nt, synthetic construct; identical to SEQ ID NO: 4831
  misc_feature 1..195: note = source = /note="Description of Artificial Sequence: Synthetic coding sequence"
  source 1..195: mol_type = other RNA

SEQ ID NO: 5162 - RNA, 1752 nt, synthetic construct
  misc_feature 1..1752: note = source = /note="Description of Artificial Sequence: Synthetic coding sequence"
  source 1..1752: mol_type = other RNA
atggcacatgtacggggcctgcagctccctggatgtcttgcattggccgccttgtgtagcctggttcatagtcaacatgtgtttttggcccctcagcaagccagatcactactgcagcgagtgcgccgtgcaaacacatttttggaagaagtacgcaaaggcaacctcgagagggagtgtgtggaagagacttgtagttatgaggaggccttcgaggccctcgagtccagcactgctacagacgtgttttgggccaaatatacagcctgcgagaccgctagaaccccccgcgataagttggccgcctgtctcgaaggcaattgcgccgagggtcttggcacgaactaccgaggccacgtaaacattacaagaagcggcatcgaatgtcaactttggcgctcccgatatccacacaagcctgaaataaactcaaccacacacccaggcgctgatttacaagagaatttctgccgaaatccagactcttcaactaccgggccatggtgctacacaacagatcctactgttcggcggcaagagtgttctatccccgtttgtggccaggaccaggtcacagtcgcgatgacaccccgatccgagggttcttctgtaaatcttagtcctcctttggaacagtgcgttcctgatagaggccagcagtatcagggtaggctcgcagtgacgacacacggattgccctgccttgcatgggctagtgcacaggccaaagccttatccaaacaccaagactttaattcagcagtgcaacttgttgagaatttttgtcgtaacccggacggcgacgaggaaggggtgtggtgctatgttgcaggcaaaccgggagatttcggatattgcgatttgaattattgcgaggaggcagtcgaggaagaaacgggcgacggactggatgaggacagcgatcgagctatcgaaggacggacagccacaagcgagtaccagaccttcttcaacccacgaacctttggctccggcgaggctgattgcgggctgcgaccactgttcgagaagaaatcattagaagacaagacagagagggagctgctcgaatcttatatcgacggtcgcatcgttgagggttctgatgctgaaattggtatgtcaccttggcaagtgatgttatttcgcaaaagcccccaggaacttttgtgtggagcctctctgattagcgataggtgggtcctaacagctgcccattgtctgttgtaccctccatgggataaaaattttactgagaatgatttactagttcgaattggcaagcactcacggactcggtacgaacggaatatcgaaaaaatatctatgctcgagaaaatatatatacatccgtctcttttgcaggctggctacaagggtagagtcacgggctggggaaatctgaaggaaacatggaccgctaatgtgggcaaaggccagccctctgtgctgcaagttgtgaaccttcctatagtcgagaggccagtttgcaaagactccacacgtatccgaatcacagataatatgttttgcgcaggatacaaaccagacgagggaaagagaggcgatgcctgcgaaggagacagtgggggcccattcgtaatgaagtcaccttttaataatcgatggtaccaaatgggcattgtgtcgtggggagaaggatgtgacagagatggcaaatacggcttttacacacatgttttccgattgaagaaatggatccagaaagtgatcgatcagtttggcgagtag

SEQ ID NO: 5163 - RNA, 1272 nt, synthetic construct
  misc_feature 1..1272: note = source = /note="Description of Artificial Sequence: Synthetic coding sequence"
  source 1..1272: mol_type = other RNA
atgcagagagtgaatatgattatggctgagagcccagggctcataactatctgcctgcttggctatctgttgtctgctgaatgcactgtcttcctagatcacgaaaatgccaataagatccttaatagacctaaaagatacaattccggaaagctggaggagtttgttcaagggaacctggagcgcgaatgcatggaggaaaaatgttcattcgaagaagcccgagaagtgtttgaaaacacggaaagaacgaccgaattttggaaacagtacgtggatgtgacctgtaacatcaaaaacggaaggtgcgagcagttctgcaagaattcggctgataataaggtagtatgctcatgcacggaagggtacagactagcagagaaccagaagagctgcgaacccgctgttcctttcccatgtggaagggtgtcagtcagtcaaacaagcaaactgaccagggccgaaactgtgtttcccgatgtggattatgtgaattctacagaagccgagacaatactagacaacatcactcaaagtacccaatcttttaacgacttcactcgggtggtaggcggcgaagatgccaagcccggccagttcccatggcaggtggtgttaaatggtaaggtcgacgcgttttgtggggggagcatcgtaaatgaaaaatggatcgtgacagctgctcattgtgtagaaacgggagtcaaaattactgtggtggccggcgaacataatatcgaagaaacagagcataccgaacagaaaagaaacgtaatccggatcatcccacatcacaactataacgcagctataaacaagtataatcatgacatagcgctactggaactcgacgaacctctggtgctcaactcatatgtgactccaatatgtatcgcagacaaagaatataccaacatttttttgaaattcggatccggatacgtctccggctggggtcgcgtattccacaaaggacggagcgctctggtcctgcagtatctgagggtgccattggttgatagggccacatgcttgcgaagtacaaaattcacaatctacaataatatgttctgcgccggatttcacgaggggggcagggatagttgccagggagatagcggaggtccccatgtaactgaggtggaaggaaccagtttccttacaggcattatctcttggggtgaggagtgtgcaatgaaggggaaatacggaatatacacaaaagtctctagatacgtcaattggattaaagagaaaaccaagctcacttag

SEQ ID NO: 5164 - RNA, 1335 nt, synthetic construct
  misc_feature 1..1335: note = source = /note="Description of Artificial Sequence: Synthetic coding sequence"
  source 1..1335: mol_type = other RNA
atggtgagccaggctcttaggctcctgtgtctgctgctgggcttgcaggggtgtctcgctgccgtctttgtaacacaggaagaggcccacggggtcctgcataggagacgccgtgccaatgcttttctggaagaactgcgacctggctcccttgagcgggaatgcaaagaagaacagtgttccttcgaagaggcccgggagatttttaaagatgccgaaagaacgaagctattttggataagttattccgatggagaccagtgcgcaagtagcccttgccagaatggaggtagttgcaaagatcagctccagtcttatatctgcttttgtctgccagcatttgaaggtcggaactgtgaaactcacaaggatgatcaactgatttgcgtcaacgagaacgggggttgtgaacagtattgctcagaccatacaggcacgaaacgctcctgtcggtgccatgagggctactcccttcttgcagatggagtgtcttgtacacctacagtcgaatacccctgcgggaaaataccaattctggaaaagaggaacgccagcaaaccacaaggaaggatcgtgggtggaaaagtgtgtcctaagggagaatgcccatggcaagtgctcctgttggtcaacggtgcccagctgtgtggaggcacattaattaacacaatttgggtcgtttctgctgctcattgcttcgacaaaattaagaactggcggaacctcattgcggtcctcggagagcacgatctaagcgagcatgacggcgacgaacagagcagaagagtcgctcaggtgatcattccttctacttacgtccccggcacaacaaaccatgatattgcgcttctccggctgcaccagcccgtcgttctgaccgaccacgtcgttcctctgtgtctgcctgagcgaacattcagtgagcggacactggccttcgtgcgattcagtctcgtgtctggatggggacagctgttagatcgaggagcaactgccttagagctcatggtcctgaacgttccccgacttatgactcaagattgccttcagcagtccagaaaggtcggagatagtcccaacattactgaatatatgttctgtgcagggtattctgatggatcaaaagactcttgtaagggcgatagcggaggcccccacgcaactcactaccgcggcacgtggtacttaactgggattgttagctggggccaaggatgtgcgactgttgggcacttcggcgtctatacgagggtctctcaatacatagaatggttacagaagctgatgaggagcgaaccccgccctggggtccttttaagagcaccgtttccctag

SEQ ID NO: 5165 - RNA, 1401 nt, synthetic construct
  misc_feature 1..1401: note = source = /note="Description of Artificial Sequence: Synthetic coding sequence"
  source 1..1401: mol_type = other RNA
atggtcagtcaagccctcaggttgctctgtttattgctgggattgcagggttgcctggctgctggaggggttgccaaagcctcaggaggagaaaccagagacatgccctggaaaccggggccacaccgcgtgttcgtgacccaagaagaggcccacggggtgcttcacaggcgaaggagggcaaatgcctttctcgaggagctccggccgggatcactggaacgggaatgtaaagaagaacagtgttcatttgaggaagccagagagatttttaaggacgccgaacgcaccaagttattttggatttcctattccgacggagaccagtgtgcgtccagcccttgccaaaatggtggatcttgtaaagaccagctgcagagctatatatgcttttgtcttcctgccttcgagggccgtaattgcgagactcataaagacgaccaattaatatgtgtgaatgagaacggagggtgcgaacaatactgctcagaccatacaggaacaaagcgaagttgccggtgtcatgaggggtatagtttgttagcggacggagtgagttgcacccctacagtagaatatccctgtggcaagatccccatcctggaaaagagaaacgcctccaagcctcaaggcagaattgtgggaggaaaggtgtgccccaaaggggagtgtccttggcaagtcctgcttctggttaatggagctcaactatgcggaggaactctcatcaacacgatttgggtagttagcgccgctcactgtttcgataagataaaaaattggcggaatctgattgctgtgcttggcgagcatgacctaagtgaacatgacggagatgaacagagtaggcgagtggcacaagtgataataccaagtacttacgttcctggcaccacaaaccacgatatcgccctgctaaggctgcaccagccagtagtgttgaccgaccacgttgttcccctttgcctcccagaaaggacattctccgaaagaaccttggcgtttgtgagattctcactagtgtccggatggggtcaactgctggacaggggggccaccgcactggaattaatggttttaaacgtgccccgtctcatgacgcaggactgtctgcaacaatcaagaaaagttggcgatagccctaatataaccgagtatatgttttgtgctggttattctgacgggtcaaaagacagctgtaagggagattccgggggtccccatgctacccattatagaggaacgtggtacttgacagggattgtaagttggggacaaggctgtgctactgtgggacattttggagtttacaccagggtatctcaatatatcgagtggctgcagaagctgatgaggagtgaacctcggccgggtgtgctgctgagagctcccttcccatag

SEQ ID NO: 5166 - RNA, 1194 nt, synthetic construct
  misc_feature 1..1194: note = source = /note="Description of Artificial Sequence: Synthetic coding sequence"
  source 1..1194: mol_type = other RNA
atgggcaacgtgaatcggcagggacagcattgccgtgacttcataatggtatctcaggccttacggctcttatgtcttttacttggattgcagggctgccttgccgccgacggagaccagtgcgcttcttccccttgccagaatggcggatcatgcaaggatcaactgcagagttacatttgcttttgcctgcctgctttcgagggacggaactgtgaaactcataaggatgatcagcttatatgcgtgaatgaaaatggcggatgcgaacagtattgctcagatcatacaggaactaaacgatcctgtagatgtcacgaaggctactcactacttgctgatggcgttagctgcacccctactgtagaatatccatgtgggaaaatccccattttagagaagcgaaacgctagtaagcctcaaggtcggatcgtaggcggaaaagtttgtcccaagggcgagtgtccctggcaggtgctgctactggtgaacggcgctcaactgtgtgggggaaccctgatcaatactatctgggtggtatctgcagcccattgtttcgacaagattaaaaactggaggaacctgattgcagtgcttggagagcacgatcttagcgaacatgatggtgacgaacagagcagacgagtggcccaggtcattatccctagtacctatgtgcctggaactaccaatcacgatattgctcttctccggcttcatcagccagtggttctgaccgaccacgtggtgcccctgtgcctcccagaaaggaccttctcagaacgtaccctggctttcgtgcgtttctctctggtatcaggatggggacagctgcttgacaggggagcaaccgctctggagttaatggtccttaacgttccccgccttatgacccaggactgtctacagcagtctagaaaggtaggtgatagccccaatataaccgagtacatgttctgcgcaggatacagcgacggctccaaggatagctgcaagggcgatagtgggggtcctcacgccacgcattacaggggcacatggtacctcactggcatcgtctcatgggggcaaggttgtgcaacagtcgggcacttcggtgtgtacactagagtgagtcaatacatagaatggctgcagaaacttatgcgaagcgaacctcgtccgggggtcctcctcagggcaccatttccctag

SEQ ID NO: 5167 - RNA, 651 nt, synthetic construct
  misc_feature 1..651: note = source = /note="Description of Artificial Sequence: Synthetic coding sequence"
  source 1..651: mol_type = other RNA
atgaggatccaggacccgggcaaagtcttttttggcaacgtggatagctcaggaattaaacacaacatattcaacccacctattattgcacgctatattcgtctccaccctacacactatagcataagatcaacattacgaatggaacttatgggatgcgacctaaattcatgttccatgcccttaggaatggaatccaaagccatatctgatgcccagattaccgccagctcttacttcacaaatatgtttgcaacctggtccccctccaaagcccgtttgcatctgcagggccggagcaacgcttggcgccctcaggtgaataatcctaaagagtggttgcaggtggacttccaaaaaaccatgaaagtcactggcgttacaacccaaggcgttaaatcactgctgaccagtatgtatgtgaaggaattcttgattagttcaagccaggacggccatcagtggaccctttttttccagaacggcaaagtaaaggttttccagggcaaccaggactctttcactccagtggtcaactcacttgatcctcctctcttaaccagatatttacgaatccacccacaaagctgggtccaccagatcgcccttagaatggaagtgttaggttgtgaagcacaagatctttactag

SEQ ID NO: 5168 - RNA, 7056 nt, synthetic construct
  misc_feature 1..7056: note = source = /note="Description of Artificial Sequence: Synthetic coding sequence"
  source 1..7056: mol_type = other RNA
atgcagattgaactctcgacttgcttttttctctgtctgttaagattctgttttagcgccacaaggcggtattatctgggagccgttgaactatcatgggactacatgcagtcagacctgggtgagcttccagtcgacgcccgatttccacctcgagttccaaaaagcttcccctttaacactagcgtagtctataagaaaacattgttcgttgaatttaccgatcatctgtttaatatcgctaagcccagacctccctggatgggactgttaggacccacaatacaagccgaggtctatgacaccgtcgtcattacattaaagaacatggcttcacaccccgtctcacttcacgccgtgggggtcagttattggaaggcgtctgagggagccgaatatgacgatcaaaccagccagagagagaaggaggatgataaagttttcccagggggctcacacacatacgtatggcaagtgcttaaggaaaatggaccaatggcctccgacccactgtgcctgacttactcatatctcagtcatgtcgacctcgtcaaagaccttaactcaggactaatcggagctcttctggtgtgcagagaaggaagcctcgctaaagagaaaacacaaacattacacaaatttattctgttgtttgccgttttcgacgaggggaagtcatggcactcagaaacgaaaaacagtctgatgcaggatagagacgccgcttccgctcgcgcatggccaaagatgcacacggtgaatggctacgttaaccgctctctcccaggtctcattggctgtcatagaaaatccgtctattggcacgtaattggaatgggtactaccccagaggtccatagcatcttcttagaaggtcacactttccttgtgcgtaaccacagacaagcctcactggaaattagccccataacattcctgactgcccaaacacttcttatggaccttggccaattcttactcttttgccatattagctcacaccaacacgatggaatggaggcctatgtgaaagtggattcatgcccagaggaacctcagttaagaatgaagaataatgaagaggccgaggattatgatgacgacttaaccgattcagaaatggatgtcgtgaggttcgacgacgataatagcccaagcttcattcagattaggtcagttgctaagaagcatcccaaaacttgggttcattacatcgctgctgaagaagaagactgggactatgccccactggtcctggcccccgacgacagaagctataagtcccagtacctaaacaacgggcctcaaagaatcggtagaaaatataaaaaggttaggtttatggcatacacagacgagacattcaaaaccagggaagcaatacaacatgagagcggaatattaggcccactgctttacggagaggtcggagacacactcctgataatcttcaagaaccaggcttctagaccctataatatttacccccacggcatcactgatgttcgccctttatactcccggagactccccaagggtgtgaaacatcttaaggacttccctattttgcctggagaaattttcaagtataagtggaccgtgaccgtggaggatgggccaaccaaaagtgacccccggtgcttgactcggtactactctagtttcgtaaacatggaaagagatctagccagcggtcttatagggcctctcctgatctgttataaggaatccgttgaccagaggggcaatcagattatgtccgataagcgcaacgttatacttttctctgtgtttgacgagaacagaagctggtatctaaccgagaatatccagagatttttacctaacccagccggagttcagctggaggatccagagttccaagctagtaacattatgcactctatcaatggatacgtcttcgattcccttcagctgtcagtttgtcttcacgaggttgcctactggtacatcctgtccattggagcccaaaccgatttcctatccgtgttttttagtggctacacgttcaaacataaaatggtttatgaagacactctcacactttttccatttagcggggaaaccgttttcatgtctatggaaaaccccggcctatggattctgggatgtcacaatagcgattttcggaaccgcggcatgacagccctcctcaaagtctcttcatgcgataagaacaccggcgactattacgaggacagctatgaagatatttccgcctatctgctatcaaaaaacaatgccatcgaaccacgatcattcagccagaactcgagacacccgtcaactcggcagaaacagttcaacgctaccacgattccagagaacgatatcgagaagactgatccctggtttgcccaccgaacaccaatgcccaagattcaaaatgtgtcctctagcgatctgctgatgttattgagacagagcccaacccctcatggactgagcctgtctgaccttcaggaagccaagtacgaaactttcagcgacgatccttctccaggagcaattgattccaacaatagtctgagcgaaatgacgcactttcgaccgcaattacaccactccggagatatggttttcactcctgagtccggtctgcagttaagacttaacgaaaaactcggcactactgctgccacagagttgaagaagctggattttaaggtgtcttctaccagtaataaccttatcagtactatcccctcagacaacttggccgccgggacagacaacacctcaagcctagggccaccctcaatgccggtccattacgatagccagttggacaccaccctgttcgggaaaaagtccagtcccctcacagaatccggaggaccacttagcttgtcagaagagaataatgattctaaactgctggagagtgggctgatgaattcccaagaatcaagctggggaaagaacgtctcctccactgaatctggtcgtttattcaagggtaagagagctcacggacctgctctgctgacaaaggacaatgcgttattcaaggtctctatttcactcctcaaaaccaataagacatccaataactctgccacgaacagaaagacacacatcgacggcccttcgttactaattgaaaactcaccttccgtctggcaaaacatcctggagtctgatacagaattcaaaaaggtcacgcctctgatccacgacagaatgttaatggataagaacgcaacagctttgagactcaatcatatgtcaaacaaaacgaccagcagcaaaaacatggagatggtgcagcagaaaaaagagggtccaatcccacctgatgcgcagaaccccgatatgagtttttttaagatgctctttttgcctgagagtgcaagatggatacagaggacccacggcaagaactctttgaattctggacaggggcctagtccgaagcagttagtgtcacttggacctgagaaatctgtagaaggtcagaattttctttctgaaaagaataaagtggtggttggcaaaggagaatttactaaggacgtgggcttgaaagagatggtcttcccttctagccgtaatctttttctaacaaaccttgacaacctgcacgaaaataacacccacaaccaggaaaaaaagatacaggaagaaatagagaaaaaagagactttaatccaggaaaatgtggtgttgcctcaaattcacactgtcacagggaccaagaattttatgaagaacctgtttctgctgtcaacacgtcaaaacgtcgagggaagttacgatggtgcttacgcaccagtgctccaagactttagatctctgaacgactcaactaaccgcaccaaaaagcacactgcccatttttcgaagaagggcgaagaagaaaaccttgaagggctgggcaatcaaaccaagcagatcgttgaaaaatatgcctgcactacaagaatctcgccaaatacttcacaacagaatttcgtcactcaacggtccaagagagccctgaaacagtttaggctgcccctggaagaaacagaacttgagaagcgtatcatcgtggacgacacatcaacacaatggtctaagaatatgaagcacctgacaccctccacgctaactcagattgactataatgaaaaggagaaaggcgccataacccagagtcctctgtccgattgcctaactcggagccactctatcccacaggcaaacagatcacctctccccatagctaaggtatcctcattccccagcattcgacccatctatctgactcgggtcctttttcaagacaactcttctcatttacccgccgcgtcctatcgcaaaaaggactcaggagtccaagagtctagtcattttctacaaggagcaaaaaagaataacctgagcctggccatactcacccttgagatgactggagaccagagagaagtgggtagcctaggcacctccgctacgaattcagtcacatacaaaaaagttgagaataccgtgctaccaaagcctgatcttccaaagacatccggcaaagttgagctacttcccaaagtacacatctaccagaaagacctattccctacagagactagcaacgggagccctggacacctggatctggttgaagggtccttgctccagggaacggagggagctatcaaatggaatgaggcaaataggccagggaaagtgccctttctacgggtggcaaccgaatcctcagcaaaaactccaagtaagctcttagatccccttgcctgggataatcattacggcactcagattcctaaagaagagtggaagagtcaagagaagtcacccgagaagactgcttttaaaaaaaaagatactatcttatccttgaacgcttgtgagtcaaaccatgctattgcagctatcaatgaaggacagaacaaacctgaaatcgaggtcacgtgggctaaacagggaagaactgagagactgtgctctcaaaacccccccgttctgaaacgtcaccagagggagataacccgcactacactccagagcgatcaagaagagattgactacgacgatactattagtgtggaaatgaagaaagaggattttgatatttatgatgaagatgagaatcaatcacccagatcattccaaaagaaaacaaggcactattttatcgcagcagttgagcgtctgtgggattacggcatgtcatcgtctcctcatgtgctgagaaaccgggctcaaagtgggagcgtacctcagtttaaaaaagtggtcttccaagagttcacagacggatcctttacacagccactgtaccgaggcgagctgaacgagcaccttgggttactgggcccctacataagagcagaggtggaagacaacatcatggtcactttccgcaatcaggcctcccgcccgtattcattctattcttcgttaatttcttatgaggaagatcaaaggcaaggagccgagcccaggaagaatttcgtgaaaccgaacgaaactaagacgtacttctggaaggtacagcatcatatggcacccacaaaagacgaattcgactgcaaagcctgggcctacttttcagacgtcgatttggaaaaggatgtgcactctggcctcattggtccccttctagtatgtcatactaatacacttaaccccgctcacggacgacaggttactgttcaggaattcgctttgttttttactatcttcgatgagactaagagttggtactttacagaaaacatggaacggaactgtcgagccccttgcaacattcagatggaagaccctacctttaaagaaaattatcgttttcacgcaattaatggttacattatggacacgttacccggactcgtcatggcccaggaccagcgaataagatggtatctcttgtcaatggggtctaacgagaacatccactccatccacttctcaggccacgtatttaccgttagaaaaaaggaggaatataaaatggctctttataacctataccccggagttttcgagactgtggaaatgctgccctctaaggctggtatttggcgtgtggaatgccttatcggcgaacacctccatgctggcatgagtaccctcttcctagtgtattcgaacaagtgccaaactccactcggaatggcttccggtcacatccgggactttcagatcactgctagcggacagtatggccaatgggcacctaaattggcgcgattacactacagtggctctattaatgcttggtccactaaagagccattcagttggataaaggtcgacctactcgcacctatgattatccatggcataaaaacgcaaggcgccaggcaaaagttctcctctttatatatttcacagtttatcataatgtattccttagacggaaaaaagtggcaaacgtacaggggtaatagcacaggcactcttatggtcttcttcggtaacgtagattccagcggtataaaacataatatctttaatccccctatcattgctcgctacataaggctacacccaacgcactactctatcagatctacactacgaatggaacttatggggtgtgatctaaatagttgctccatgcccctcggaatggaatcaaaggctatcagcgacgctcaaatcacggcctccagctactttacaaatatgtttgccacttggtctccatcaaaagccagactacatcttcaggggagatcaaacgcttggcgccctcaagtgaataatccaaaagaatggctgcaggtggacttccaaaaaactatgaaggtgacaggggtgactactcagggcgtgaaaagcttgcttacctctatgtatgtcaaagaattcttaatatcttcctcccaggacggtcaccaatggacacttttctttcagaacgggaaagtgaaggtgtttcagggtaaccaagatagcttcactccagtagtaaacagcctcgacccacccttgctcactcgctacctcagaatccatccgcagtcttgggtacatcaaattgcattgcgaatggaggtactgggctgtgaagcccaggacttatactag

SEQ ID NO: 5169 - RNA, 999 nt, synthetic construct
  misc_feature 1..999: note = source = /note="Description of Artificial Sequence: Synthetic coding sequence"
  source 1..999: mol_type = other RNA
atgggtagacccctgcacttggtcctgctgtcagcctcacttgctggactgctgttactcggagaatcgctgtttattaggagggaacaggctaataatattctggctcgggtcacaagagccaactcgtttctggaagagatgaagaagggccaccttgagagagaatgtatggaggaaacctgctcatatgaggaagcaagggaagtctttgaagatagcgataagactaacgaattttggaacaaatataaggacggcgaccaatgcgaaacaagcccatgccagaaccaaggaaaatgtaaggacggcctaggtgagtatacatgcacctgcctcgaaggctttgagggtaagaattgcgagttatttacacggaagctttgttcactggataatggagattgcgatcagttttgtcatgaagagcagaatagcgtggtgtgcagctgcgctagagggtacaccctcgccgataatggaaaggcttgtatcccgactggcccttatccctgcggaaagcaaacgctggaaaggcggaaaagatcagtggcacaggctacatcttcttctggagaagcaccagatagcattacttggaaaccatatgacgccgctgacttagacccaacagaaaatcccttcgacctgctcgactttaaccagacccaacctgaacgcggcgataataatcttaccagaattgtggggggtcaggaatgtaaagacggcgagtgtccctggcaagccctcctcattaatgaagagaacgaggggttttgcggaggcacaatactaagcgagttctatatacttaccgcagctcactgcctgtaccaggcaaaacgatttaaaggcaccggaacacgatcccgccgtagagccgtgcgacgctgtaccagatggagatggagttcctccaccacaggatcacagagacgcccaatgacttctacatccccgtgctcgggttcccgaccaccttccccaagcgcatag

SEQ ID NO: 5170 - RNA, 1467 nt, synthetic construct
  misc_feature 1..1467: note = source = /note="Description of Artificial Sequence: Synthetic coding sequence"
  source 1..1467: mol_type = other RNA
atgggccgccctttacatttggttttactgagtgcatcattggccggattgcttttgctgggggaatctctatttattcggagagaacaagccaacaacatactggcccgtgtgactagagcaaatagttttctcgaagaaatgaagaaagggcacctggagagagaatgcatggaagaaacctgttcatatgaagaagcccgggaggtgttcgaagactctgataaaaccaacgaattctggaacaagtacaaagacggggaccagtgcgaaacctccccctgccagaaccagggtaagtgtaaagacggactgggcgaatacacttgcacgtgtttagagggatttgaaggtaagaattgtgaattatttacaaggaaactctgctccctggacaacggagattgcgatcaattctgtcatgaagaacaaaactcagtcgtgtgttcctgtgcccgcggctacaccctcgcagataatggaaaagcctgcatccctactggcccttacccctgtgggaagcaaactcttgagcgaaggaagcgctcagtggctcaggccacctcctctagcggagaggctcctgacagcatcacctggaaaccctacgacgctgctgatcttgacccaactgagaatcccttcgacttactcgattttaatcagacacagccggaacgaggagataataatctaacccgcatcgtgggaggtcaggaatgcaaagacggcgaatgcccctggcaagccttgttgatcaatgaggaaaatgaaggtttctgtgggggaacgatcttgagtgagttctacattcttactgccgctcattgtctgtaccaggccaaacgttttaaagtgcgtgtcggggaccgcaacaccgaacaagaagagggcggagaagccgtccacgaggtagaagtggtgattaagcataataggtttaccaaggaaacctacgatttcgatattgctgtcctgaggctcaagacacctataacctttcgcatgaacgttgctcctgcatgtctgcctgagagagattgggcagaatcgacacttatgacacagaaaacaggaattgttagtgggttcggacgcacgcacgaaaaagggagacagtctacaagactgaagatgctagaagtgccgtatgttgacaggaatagttgtaagctgagctcgtcttttatcataacacagaacatgttctgcgcaggctacgatacgaagcaggaagacgcttgccaaggggattctggaggtccgcatgtgactcgcttcaaagatacgtatttcgtcaccggtatcgtcagctggggcgaaggctgtgcacggaaggggaagtacggaatctataccaaagttactgcatttcttaaatggattgatagatcaatgaaaaccagaggacttcctaaagccaaaagccacgcccccgaagtcattacaagttcacctttaaagtag

SEQ ID NO: 5171 - RNA, 1005 nt, synthetic construct
  misc_feature 1..1005: note = source = /note="Description of Artificial Sequence: Synthetic coding sequence"
  source 1..1005: mol_type = other RNA
atgggcaggcctttgcacttggtgttactgtccgcgtcattggcaggcctactactactcggagagagccttttcataagacgggagcaggctaataacatcttagctagagtgacacgagccaacagcttcctggaggagatgaaaaagggccatttagagagggagtgcatggaagagacatgttcatatgaggaggcgagagaggtatttgaagattcggataaaacaaatgagttctggaacaaatacaaagacggcgatcaatgcgaaacatcaccttgtcagaaccagggcaagtgtaaggacgggctgggcgagtatacctgcacttgcctggaaggattcgaaggcaagaattgtgagctgttcactcgtaaactttgcagcctggacaacggcgactgtgaccaattttgccatgaggaacagaacagcgtcgtgtgttcctgcgccagaggttatacactcgcagacaatggaaaagcctgtattccgaccggtccttacccttgcggaaaacagacactagaaagaagaaaacgctcggtggcacaggcaaccagctcatctggagaagccccagactcaattacttggaaaccgtacgacgctgccgacctggacccaaccgagaatcctttcgacctgcttgattttaatcagacccagcctgaacgtggagataacaacctcacgaggatagttggtggccaggaatgcaaagacggggaatgtccttggcaagctctgttgattaacgaagagaacgaaggcttttgcggcggcacaatactaagtgaattttacatcttaacagctgcgcattgtttataccaagcgaagcgctttaaagttagaggcacaggtactcggagtagacgcagggcagtcaggagatgcacgagatggcgatggtcatctagcaccactggctcacagcgccgacctatgacatctacctccccctgctcgggctcaagaccaccttctccttcagcatag

SEQ ID NO: 5172 - RNA, 1722 nt, synthetic construct
  misc_feature 1..1722: note = source = /note="Description of Artificial Sequence: Synthetic coding sequence"
  source 1..1722: mol_type = other RNA
atgatcttcttgtaccaggtcgttcacttcatcctgtttacttctgtctctggcgagtgcgttactcagcttctgaaagacacatgctttgaaggcggagacattactactgtgtttaccccgtctgctaagtattgtcaggtggtgtgtacttatcatccccgctgtttgctgttcacgttcaccgcagaatcaccttcagaagatcccacacgttggtttacttgtgttctaaaagatagcgtgactgagaccctcccccgtgtcaatagaactgctgctatttctgggtattccttcaagcaatgttctcatcagatttccgtgaacaacatctgtcttctgaaacacacacagactggaacacccactcgcattaccaagcttgacaaagtggtgagcggctttagccttaagtcctgcgctctgtctaacctggcatgtataagagacatcttccccaataccgtcttcgccgactcgaatatcgattccgttatggcgcctgacgcgtttgtctgcggtcgcatatgcactcatcaccccggatgtttatttttcacatttttctcacaggagtggccaaaggagtcccaaagaaatctgtgcttgcttaaaacttcggagtccggactaccatccactaggataaagaagtcgaaggccctcagtgggttctccctgcaatcctgtcggcactccatcccagtcttttgccatagctccttctaccacgatactgactttctgggcgaagaacttgacattgtggccgccaagtcacacgaagcctgccaaaaactttgtaccaacgctgtgcgttgtcagttctttacgtacacgcctgcacaggcatcatgtaacgagggaaaaggaaaatgttatttaaaacttagctcaaacggatccccaactaaaatcctacacggcagaggcggcatcagcggatacactctccgactctgcaaaatggacaacgagtgtaccacaaagatcaaaccgagaattgtcggcggaacggcatctgtgagaggggagtggccatggcaggtgacgctccatactacgtctccaactcagaggcatctatgcggaggatcaatcataggcaaccaatggatccttactgctgcccattgtttttacggagtggaaagtcccaaaatcctgagagtttatagcggtatactgaaccagagcgagatcaaggaggatacaagctttttcggagtgcaggaaataatcatacatgatcagtataagatggccgagtccggctacgacattgccttgctcaaacttgagacgaccgtgaattataccgacagccagcgaccgatctgcctaccctcgaagggagaccgcaacgtcatctacactgattgttgggtgacaggatggggatacagaaaactacgtgacaaaatacagaatactctacagaaggctaagattccgctagttacaaacgaggaatgtcagaaaaggtaccgtggccacaaaattacacacaagatgatatgcgcaggatatcgggaaggcggaaaagacgcttgtaagggagatagcggaggaccactgtcttgtaagcacaacgaagtgtggcaccttgtgggtatcacatcctggggggaaggctgtgcgcaaagagaaagacctggcgtctacacaaacgttgttgaatatgttgactggattcttgagaagactcaggcggtctag

SEQ ID NO: 5173 - RNA, 1878 nt, synthetic construct
  misc_feature 1..1878: note = source = /note="Description of Artificial Sequence: Synthetic coding sequence"
  source 1..1878: mol_type = other RNA
atgatttttttgtatcaggtagttcatttcatcttattcacatccgtaagtggcgagtgtgtaactcagttgctgaaagacacatgcttcgaggggggggatatcacgacagtatttacgccaagtgccaaatattgccaagttgtatgcacataccatccccgttgtttgctgttcaccttcactgcagagagcccctccgaggatcccactcgctggtttacatgcgtgcttaaagattcggtgacagaaacacttccaagggtcaataggacagcggccatttcagggtattcattcaaacagtgcagccatcagatatccgcctgtaacaaagatatttacgtcgatctggacatgaaaggaattaactacaatagtagcgttgccaaatccgcccaggagtgccaagagcgctgcactgatgatgtccactgccacttcttcacttacgccacacgccaatttccctcactggaacacagaaacatctgtctgctgaagcacactcagactggcacccccacacgtataaccaaactcgataaggttgtttccggcttctcacttaaatcttgtgccctctcgaacctggcctgtatccgtgacattttccccaacactgtcttcgctgattcaaacatcgattctgtaatggctccagatgctttcgtgtgtggccgaatctgcactcaccatcccggctgtctattcttcactttcttttcacaagagtggccaaaagagtcacagcgtaatctttgcttattgaaaaccagcgagagtggattaccgtccacacgcatcaaaaagtctaaagcgttatccggtttctctctgcaaagctgtagacactccatcccagtcttctgccactcatctttctatcacgatactgatttcctgggcgaagagctcgatattgtggcagccaaatcacacgaagcctgccagaagctctgtaccaacgcagtgaggtgccaattcttcacttacactccagcccaggcatcttgtaatgagggcaaaggaaagtgctaccttaaactgagctccaacggttcacctactaagattctccacggacgcggaggtatttcaggatacaccctacggttatgtaagatggataatgagtgtacaaccaaaataaagcctagaatcgtgggaggcacagccagcgtgagaggggagtggccttggcaagtgaccctccacaccacttcccctactcagagacacctgtgcggcggttcaatcatcggaaatcagtggattctcacagcagcccactgcttctatggcgtagagtcccctaaaatacttagagtctattctggaattctgaaccagagcgaaatcaaggaggatacctcatttttcggagtacaggagatcatcatccatgaccagtacaaaatggctgagtccggttacgatatagctctgctcaaattggaaaccactgtgaactatactgatagccagagaccaatttgtctgccttcgaaaggggaccgcaatgtaatctataccgactgttgggtgacaggctggggatacagaaaactgcgagacaagatccagaacacattacaaaaggccaaaatcccgctggtgactaatgaggagtgccagaaaagatacagaggacacaaaattactcataagatgatctgtgcaggatatcgggaggggggcaaagatgcctgcaagggagatagtgggggacccctgagctgtaaacataatgaagtgtggcacttagtcggtattacttcctggggtgaagggtgcgcacaaagggagcgccccggggtatatacgaatgttgtagagtacgtggactggatcttagaaaaaactcaagctgtgtag

SEQ ID NO: 5174 - RNA, 633 nt, synthetic construct
  misc_feature 1..633: note = source = /note="Description of Artificial Sequence: Synthetic coding sequence"
  source 1..633: mol_type = other RNA
taatctggattctctctgaaatcttgtgctctgtcaaatcttgcttgcatacgcgatatcttccccaatactgtcttcgccgactctaacatcgattctgtaatggcccccgatgctttcgtctgtggacggatatgtacccatcaccccgggtgtcttttctttacattctttagtcaggagtggcccaaagaatcccagcgtaatctgtgcttgctgaagacatctgaatcaggcttaccctcgacgcggataaagaaatccaaagcacttagtggattctcgctgcagtcttgtcggcacagcatccccgtgttttgccattcttccttctaccatgacactgactttctgggcgaggagctggatatagtggccgcaaaatcccatgaggcatgtcaaaaactttgtaccaatgcagtccgatgccaatttttcacctatacaccagctcaggcctcatgcaatgaaggcaaggggaaatgttacctcaaactgtcaagcaacggaagtcccacgaagatcctccacggccgcggcggcatttctggctatacactacggctctgcaagatggacaatgaactgaggggcgcgccaatgaaaatatctggctggcttaaaacatcgtag

SEQ ID NO: 5175 - RNA, 8835 nt, synthetic construct
  misc_feature 1..8835: note = source = /note="Description of Artificial Sequence: Synthetic coding sequence"
  source 1..8835: mol_type = other RNA
atgacacttaggctcctggtagctgccctttgcgcaggcattctcgcagaagctcctcgggtgcgagcccagcaccgcgaacgcgtgacatgtacccggctatacgccgcggatattgtttttttgctcgatggaagctcctcaatcggaagatccaactttcgagaggtccgctcattcttagagggtttggtcctgcccttctcaggggccgcctcggcccagggagtgcgctttgctactgtacaatactccgatgacccccgtactgaattcggacttgacgcgctgggatccggcggcgatgtaattagagctatacgagagctgtcctataagggcggaaacacccgaacaggtgctgccatcctgcatgtggcagatcatgtcttcctgccccagcttgcccgtcctggagtgcccaaagtatgtatcctaatcacagatgggaagtctcaggaccttgttgataccgcagcccaaaggttaaagggtcagggcgtgaagttattcgctgtaggaattaagaacgccgaccctgaagagctgaagagagtcgctagtcaacctacctcagatttctttttcttcgtgaatgatttttctattctgcggaccttgctgccactcgtgtcacgaagggtctgtacaacagctgggggcgtcccggtgacccgacctcctgatgactcaacctcagcccctcgagaccttgttctgtccgaaccgagcagccaatcactgcgagtgcagtggacagccgcctcaggtcccgttactggttacaaggtccaatataccccactgaccggactgggccagccattaccttcagaacgccaggaagtgaacgtgcccgctggcgaaacctctgtgcgattacgtggactgaggcccttgacggagtatcaggtgacagttattgcgctatacgccaactcaattggggaggcagtatccggcaccgccagaactaccgccctcgaaggtcccgagttgaccatccaaaacactaccgcccactcactacttgtcgcctggcgctcagtccctggagcaacagggtatcgggtgacttggcgcgtgctctccggcggcccaacacagcagcaagagcttggaccggggcagggctcagtgcttctgagagacctggagcctggaacagattacgaggtaacagtgtccacactcttcggtcgctctgtgggccccgctactagtcttatggcacgaaccgatgccagcgtggaacagacgctcagacccgtgatactgggaccaacaagcattctgctaagctggaacctcgtgcctgaagcccgaggctaccgcctggaatggaggagagaaaccgggcttgaaccccctcaaaaagttgtgctgccttccgacgtgactaggtatcaactggacgggcttcagccaggaactgaatacaggctcacactatacacccttctggaaggccatgaagtcgctactccagccaccgtggtgcccactggacctgagctgcccgtttcacccgtgaccgatctccaggccactgagttacctggacaacgggtgcgtgtgtcttggtcccccgttcctggtgctacccagtaccgcattatcgttagatctacacagggcgtcgaaaggaccctcgttttgccgggctctcaaactgccttcgacctggatgatgtgcaggcaggactctcctacaccgtgagggtgtcggcacgagtgggcccaagagaagggagcgctagtgttttgactgtgagacgcgagcctgagacccccctcgccgttccagggctccgggtcgttgtatcggatgccacccgtgttcgagtggcttggggacctgtgccaggcgcatccggctttcgcatcagctggagtacaggcagtggaccagaaagtagtcagactttaccgccagattcaacggccaccgacatcacagggctccagcccggcacaacttatcaagtggcagtgagtgtgttaagaggaagagaagagggccccgctgctgttatagttgcccgtaccgaccctctaggcccggtcagaacagtacatgtaactcaggcctcatcttcctctgttactattacatggacccgagtgcctggcgctaccggttaccgggtgagctggcatagtgcccacggacctgagaagagccagttagtctctggcgaagccacagtagctgagctggacggtctcgaacccgacacagagtacacagtccacgtgagggctcacgttgctggcgtagatggaccacccgcgagtgtagtcgttcgtacagctccggagcctgtgggaagggtgagcagattgcagatacttaacgcttcaagcgatgtcttaagaatcacatgggtgggcgtcactggtgctaccgcatatagattggcttggggcaggtctgaggggggccccatgagacaccagatattgccaggaaataccgactccgccgaaatccgtggactggaaggaggggtcagctactcagtcagggtcaccgcactggttggagatagagaggggactccagtttccatagtcgtcacgacgccccctgaggcgccgcccgcactgggaacacttcacgtagtccagagaggagaacatagcctgaggttgcgttgggaaccagtgccgagggcacagggttttttgttgcactggcaacctgaaggcggccaggaacaatcccgcgtgttagggcctgaattatcctcttaccatctcgacggcttagaaccggccacgcagtatcgagtacggcttagtgtcctgggtcccgctggagagggcccttccgctgaagttaccgcgcggactgagtctccccgcgtgccctccatcgaattgagggtcgtggacacgtctatcgatagtgttacgttagcatggacccccgtgtctagagcctcttcctacatcctgagctggagaccattgcgtggacctggccaggaagtgccgggctcaccacaaactctgccgggcatcagtagctcacagagagtgacgggactcgaaccgggggtgtcctatattttcagtctgacacccgtgctggatggtgtgcgcggtccagaagcgtccgtcacccaaacccctgtgtgtccccgaggcctagctgacgtcgtctttctcccccacgcaactcaggacaatgctcaccgtgccgaagccacacgcagagtgttagaaaggttggttctggctctcggtcccctggggccccaagccgtgcaggtgggacttctgtcatactctcataggccgtcccccctgtttcctctcaacggtagccacgatttaggtatcatattacaaagaattcgagacatgccatatatggacccatccggcaataacctgggcaccgctgtcgttactgcacacaggtatatgctagcccccgatgctcccggccgcagacagcacgttccaggagtaatggtgttactggtggacgaaccccttcgaggcgatatattttcaccaattagagaagcccaagcatccggtctcaacgtagtcatgctaggcatggcaggcgccgatcccgagcaactccggcgtttggcacctggcatggattctgttcagactttttttgcagtcgacgatggaccatctctggatcaggcagtcagcgggttggccactgccctgtgtcaggctagctttactactcaaccacgacccgagccttgtcctgtctactgtccaaaaggccaaaaaggtgagcctggtgagatgggattgaggggccaggtaggcccccccggtgaccccggtcttcctggccgcacaggagccccagggccacagggtcccccgggaagtgccaccgctaaaggagaaagaggatttcctggagctgacggccgccctggttccccaggacgagcaggcaacccaggtacccccggcgcaccagggctgaagggaagcccaggattgccgggcccaagaggagatcccggcgagcgcggcccaagaggccccaagggcgagccaggcgcccctgggcaagtcattggcggggagggccctggcttaccagggaggaagggcgaccctggaccttctggaccccccggccccagaggcccgctcggtgaccctggtccacgcggaccccccggattaccaggaacagctatgaagggggataagggtgacaggggtgagcggggaccaccaggacctggagaaggcggcatagctcccggagaaccaggtctgcctggcctgccggggtccccaggaccacagggccccgttggtcctcctgggaagaagggtgaaaaaggtgactccgaggacggtgccccaggtttgcctggacagccaggaagccccggtgagcagggtcctagaggtccccctggagcgattgggcctaagggtgaccgagggtttcccggccccctgggtgaagctggagagaagggcgaaagaggtcctccgggcccagctggaagccgaggcttgcccggagttgctggtagacccggagctaaaggccccgaggggccccccggaccgactggcaggcaaggggaaaaaggagagcccggaagaccgggggaccctgcagtggtagggccagctgtcgccggacctaaaggcgaaaagggagatgtgggccctgcaggacctcgcggcgccactggtgtgcagggagagagaggtccacctggcctagtcttgcctggcgaccccgggccaaaaggtgatccgggagacagggggcccatcggactcacaggtagagccggaccaccaggcgatagcggcccacccggggaaaaaggcgacccagggcgccccgggcctccagggcccgttggaccacgcgggagggacggcgaagtaggcgaaaaaggagatgagggacccccaggggatccaggcctgccagggaaggcaggtgagcgaggactaagaggcgcgccaggagtgagagggcccgtcggcgagaagggagatcagggagatcctggcgaggacggcagaaacggctcgcccgggagcagcggacctaagggagataggggggagcctggcccaccaggcccccctggtcgtttggtggacacaggccctggagctagggagaagggcgaacccggggacagaggtcaggagggcccacgtggacctaaaggagaccctggacttccaggcgcccccggcgaacgcggcatcgaaggttttcgaggacccccaggaccgcagggagaccccggggtaagaggaccagccggcgagaaaggagaccgaggccctccaggtcttgacggtagaagcggcttggacggcaaacccggcgcagctggtccaagcgggccaaatggcgcagccggtaaggcgggcgacccagggagagatggactgccaggcctccgcggtgagcagggactgcccggaccaagtggacctccagggctgcctggtaaacctggcgaagatggtaaacccggcctgaacgggaaaaatggagaacccggcgatcctggcgaagatggaaggaagggggagaagggcgacagtggcgcctctggaagggaaggcagggatggccccaagggcgaacgcggtgcacctgggatccttggccctcaggggcctcccggtctccctggccccgtcggaccaccaggacagggtttccctggcgtccccggcggtacaggcccaaagggagatagaggagagacaggttctaaaggggaacaaggtctgccaggcgagagaggtctaaggggggaacccggcagtgtccctaacgtggacaggttacttgaaacagctgggatcaaggcatcagccctgcgggaaattgtggagacctgggacgaatcatccggatccttcctacctgtccctgaacgtaggcgcggacccaaaggtgacagcggagaacagggcccacccggaaaggagggccctataggcttcccaggggaaagagggctgaaaggagatcgcggtgatccgggacctcagggaccgcccggccttgcattgggcgagagaggaccaccagggccatcggggctggctggcgaaccagggaagccagggatacccggcctgccagggagggcgggcggcgtaggcgaagcaggtagaccaggggagaggggcgagagaggcgagaagggagagagaggcgaacagggcagagacggtccccctggcctcccaggaacccccggacccccgggcccccccgggcccaaggtgtcggtggatgaacccggccccggcctgtcgggcgaacagggacccccaggtttaaagggcgccaaaggtgaaccgggatcaaacggcgatcaaggacccaagggcgaccgaggtgtgccaggaatcaaaggagacagaggtgaaccggggccaagaggacaagatggaaaccctggcctcccgggggaaagaggcatggccggtcctgaaggcaaaccagggctgcaggggcccagaggcccacctggaccggttggaggtcacggggacccaggcccccccggcgctcccggccttgccggacctgctggccctcagggcccctctggactgaaaggggaacccggtgagactgggccccccggaagaggattaacaggccctaccggagccgtcggactgccagggcctcctggcccaagcggactcgttgggccgcaggggtctcccgggctgcccggacaagtaggagagacgggcaagccgggcgcaccagggagagatggggcatcagggaaagatggggaccggggatctccaggcgtgcccgggtcgccaggcttaccgggacctgtgggcccaaaaggagagccaggacctaccggagcaccgggacaagcagtcgtgggtcttccaggagctaagggtgagaagggcgcgccaggcgggctcgccggagacttggtgggggaacctggggccaagggcgatagggggcttcctggacccagaggcgaaaaaggtgaagccggaagggctggggaacctggcgacccgggcgaagatggccagaaaggggcaccaggtcctaaaggattcaaaggtgatcccggcgtaggcgttcccgggtctcctgggccccccggaccacccggtgtgaaaggagatttgggtttaccaggactgccaggagcacccggcgtagtcgggtttccaggacaaacaggaccccgcggggagatggggcaaccaggaccttccggggaacgaggcctagctggtccccctggaagggaaggcattccgggaccactgggacctcccggccctccaggctctgtggggccaccgggtgcgtcaggcctgaaaggtgacaagggggatccaggtgttgggctgcctggaccacggggggaacgaggcgagcctggcattagaggggaggatggaagaccaggtcaggagggaccaaggggattaacgggtcccccgggaagtcgaggagagcgtggtgagaaaggagatgtggggagcgccgggctcaagggggacaaaggtgattctgccgtgatcctcggtcctccaggacctaggggcgcgaagggtgatatgggcgaaagaggaccacggggattggacggagataaagggcctcgaggcgataatggcgatccaggcgataagggctcaaaaggcgaacctggcgacaaagggtccgctggactccctggactgagagggttactgggaccacaaggccagcctggagcggctggcattccaggtgatccaggtagccccggaaaggatggagtgccgggcattaggggtgaaaagggggatgtgggctttatggggcccagagggttgaagggggaacgcggagtgaaaggggcctgtggactagacggagagaagggggataagggtgaggctggacctccaggacggccgggcttagctggacataagggggaaatgggagaaccaggagtgccaggtcagagcggggctccaggtaaagaaggcctgattggaccaaagggcgacagagggtttgatggccaacctggaccaaaaggcgaccagggcgagaagggagagcgaggaacgccaggaatagggggtttcccaggtccaagtgggaacgacggaagcgcagggccaccaggcccacccggctccgtgggacctaggggtcccgaagggttacagggccagaagggagaaaggggaccccccggagaaagagtcgtgggtgcgcccggagttcccggcgctcctggcgagaggggagaacagggccgacccggacccgccggaccccgtggcgaaaaaggcgaagctgcgctgacagaggatgatatccggggcttcgtaaggcaagagatgtctcagcattgtgcttgtcagggtcagttcattgcatcaggtagtcgtcctcttcctagctacgcagccgataccgctggatctcaacttcatgccgtcccagtgctgagggtttcacatgctgaggaagaagagcgtgtgcctcctgaagatgatgaatattcagaatacagcgagtacagtgtggaggaatatcaggatcccgaggcaccctgggactccgacgacccatgcagcctcccccttgatgaaggttcatgtaccgcatatacactgaggtggtatcatagggctgtgacaggaagtaccgaggcatgccatccttttgtgtatggggggtgcggaggtaatgccaacagatttgggacacgggaagcatgtgaacgaaggtgtccgcctcgcgtcgtccagagccaaggcacaggaactgcacaggactag

SEQ ID NO: 5176 - RNA, 8739 nt, synthetic construct
  misc_feature 1..8739: note = source = /note="Description of Artificial Sequence: Synthetic coding sequence"
  source 1..8739: mol_type = other RNA
atgactctgcgacttttggtcgctgccctttgtgctggcatattagccgaggccccccgcgttcgcgcacaacatcgcgaaagagttacctgcactaggctttacgccgccgacatcgtgtttctgctggatggaagcagcagtatcggaaggtctaacttccgtgaagtgagaagctttcttgaaggtctggtcttgcccttctccggagctgctagcgctcaaggcgtcagattcgctactgtgcagtatagtgacgatcctcggactgaatttggcttggacgcactcggctcagggggagacgttatccgtgcaattcgggagttgtcatacaaagggggcaacactagaaccggcgccgcgatcttgcatgttgccgatcacgtcttcctaccacagttagccagacctggagtgccaaaggtctgcatcctcataaccgatggcaagagtcaggacctcgtcgataccgccgcacagagactcaaaggccaaggagtgaagcttttcgccgtgggcatcaaaaacgctgatccagaggaattgaaaagagtggcatctcagccgacttctgacttttttttcttcgttaacgattttagtattctgcgtacgcttttacccttagtgtccaggagagtctgtacgaccgccggaggcgtacccgttacccgcccgccagacgactcgacatcagccccacgcgacctggtcttgagcgaaccgagctcccaatccctgagggtgcaatggaccgccgcaagcggcccagtgacaggttacaaagtgcagtatacacctctgacagggctcggtcagcctcttcccagcgaaagacaagaagtgaacgttcccgccggcgagacctcagtacgacttagaggactgcgcccattaaccgaataccaggtcaccgtcattgctctttatgctaatagcattggagaggccgtctccggcaccgcgcggacgacagctctggaaggacctgaactcacaatccagaacacgacagctcactctctcttagttgcctggcggtcagttccaggcgccacaggctaccgggtgacatggcgagtactcagtgggggccctactcagcaacaagaattaggccctggccagggtagcgtcctgcttcgagatctagaacccggcaccgattatgaggttaccgtttcaactcttttcggacggagcgtgggtccagccacatctttgatggcccgcacagatgccagcgtagaacagacattacgacccgtaattctcggtccaaccagcattctgttgtcatggaatctcgtgcccgaagcccgcggttatcgcctcgagtggcggcgcgaaactggactggaacctccccaaaaggttgtgttaccgtcggacgtcacccgctaccaattggatggtctgcagccaggaacagaatacagactgaccctgtacacacttttggagggacacgaagtagccactcctgcgaccgtggtgcccactgggcctgaactgcctgtctctcctgtgaccgacctccaagctactgagctaccaggccagagagttcgcgtatcttggagcccagtcccgggcgctactcagtatcgtataatagtcagatcaacacagggagtggagcgcacgctggtgctccctggttcacaaactgcattcgacctagatgacgtgcaggccggtttgagttacaccgtgagggtttccgctagggtcggccctcgagaaggttccgcttctgttctcacggtcagacgtgaacctgagactcctctcgcagtgcccggacttcgcgttgtggtgagtgatgctactagggtgagggtggcatgggggcccgtaccaggggcgtccggctttagaataagctggagtactggctccggcccagaaagctctcagacactgccaccagacagtactgccactgatataacagggttgcagcccggcacaacgtaccaagtggctgtatctgttcttagaggaagagaggaaggtcctgccgccgtcatcgttgcccggacagatcctttaggacccgtgcggacagtgcatgtaactcaggctagctctagcagcgttaccatcacttggacgcgtgtcccaggagctactggttaccgcgtgtcatggcactcggcccacggccctgaaaaatcgcaactggtttccggcgaggcaacagtggcggaacttgacggtctcgaaccagatacagaatacaccgtgcatgtcagagctcatgtggccggcgtcgatggcccccccgcttccgtggtagttcggacagctccagaacctgtcggcagagtctcccgtttgcagattctgaatgcttccagtgatgtcttacgcattacatgggtcggagtgaccggcgctactgcctatagactagcctggggcagaagcgaaggaggacctatgaggcaccaaatactacccggaaatacagatagcgccgaaattagaggccttgaaggcggggtctcttactcggtccgagtgactgcgcttgtcggtgaccgtgaggggacccccgtgagtatagtcgtgactacacccccagaagccccccctgccctcggcaccctgcacgttgtgcaaaggggcgaacattctctaaggctacggtgggagccagtgccacgggctcagggctttttactgcattggcagcccgaaggcggtcaggaacaaagtcgagtgctgggccctgagcttagctcctatcacttagatgggcttgaaccagcaacacagtacagagtcagactgtccgtcttgggacctgcgggggaaggaccctctgctgaggttacggccagaactgagtctccccgagtacctagcattgagctccgcgtagttgacactagcatcgatagtgtgaccctggcctggactcctgtgtctagagcatcttcttatattctgagttggaggcctctcagaggaccgggccaagaagtcccaggcagtccacagaccttgcctgggatatcaagttcccagagggtgactggtctagagcccggcgtgtcatatatcttctctcttaccccagttttagatggcgtgcgtggcccagaagcatccgtgacacagaccccagtctgccctagaggccttgctgacgtcgtgttcctgccccatgcaactcaagacaatgcccaccgtgccgaggctacaagacgggtccttgaaaggttagtgctcgccctgggtccgctgggaccacaagccgtgcaggtgggtctattaagctacagtcacagaccgtcgccgttattccccctcaatggatcacatgacctgggcattattctacaacgtattcgcgacatgccctacatggacccatccggcaataaccttggaaccgccgtagtgacagcacacaggtacatgctggctccagatgcccctggtaggcgtcagcacgtccctggggttatggtgctgttggttgatgaacccctcagaggagacatcttttcgccgattcgtgaagcacaggcatccggtttaaatgtcgttatgctcggcatggcaggagccgacccagaacagcttaggagactggccccaggcatggattctgtgcaaaccttttttgccgtcgacgacggaccttcactcgatcaggcagtgtctgggctggcaaccgctttgtgccaagcatctttcacaacacagcctcggcccgaaccttgtcccgtttactgtccaaaaggccagaaaggcgagccaggagaaatgggactgcgcggacaagtggggccaccgggagatcccgggcttcctggacggacaggtgcgccaggcccgcagggacccccaggatcggcaaccgccaagggggagcgcgggttcccaggtgcagatggtagaccaggttctcctggaagagccggaaaccccggtactcctggtgcacccggcttgaaggggagtccaggcctcccaggaccaagaggggatccaggggagcgaggaccaagaggtcctaaaggtgaacctggggcaccaggacaggtgatcggtggtgaaggacctgggttgcccggtcgcaagggagatcctggaccttctggaccacccggcccccgtggccctttaggggaccccgggcctcgaggtccacctggcctcccaggaaccgccatgaagggggacaagggcgataggggcgagcgcggccctcccgggcccggagaaggcgggattgctcccggcgagccaggactgcccggattaccagggtcacctgggccccagggccccgtcggcccgccagggaaaaaaggcgaaaagggagatagtgaggacggcgccccaggattgcctgggcaacccggctcaccgggcgaacaagggcccagaggacctcccggagcaatcgggccaaaaggagatagggggttcccaggaccgttgggagaggctggagagaagggcgagagaggcccaccgggcccggcaggttcccgtggcctcccgggggtggctggacggcccggcgccaaaggccccgaaggaccccccggccctaccgggcgacaaggcgaaaagggagaacctggacgccctggagatcctgcagtggtcgggccagcagtggccggacccaaaggggagaaaggcgacgtgggacctgcaggtcctagaggagctacaggggtgcagggagaaagaggtccaccaggcctcgttttaccaggagatccaggaccaaaaggggatcccggggataggggaccaattggactgactggtcgagcgggacccccaggcgattcagggcctccaggcgagaaaggcgatccaggcagacctggtccaccaggaccagttggccccagggggcgggatggtgaggtcggtgaaaaaggcgatgagggaccaccaggagatccaggcttgcctggtaaggctggcgagcgcggactgcgtggcgctcctggggttcgaggtcccgtgggtgagaagggggatcagggagaccccggagaagatggacggaacggctctccaggaagcagtggacctaagggcgatagaggcgaacctggccccccgggcccacctggacggctcgtagacactgggccgggcgcaagagagaaaggggaacctggagatagagggcaggagggcccccgaggcccaaaaggagatcctggcctccctggagctcccggagaacgaggtatcgaagggtttaggggcccacccggaccacaaggagacccgggcgtacgcgggccagctggagagaaaggagatagagggccaccagggctagatggccggtccgggctggacggcaaaccaggcgcagcaggtccctcaggcccaaatggcgctgccggaaaagccggcgaccccgggcgtgatggactgcccggcctaaggggagaacagggccttccaggtcccagcggtcccccaggtctgccaggaaagcccggcgaggatggcaaacctggtctgaatggcaagaacggcgaaccaggcgatccaggtgaagacgggaggaaaggtgagaaaggggattccggtgcctcgggtcgcgaaggattccccggtgtacccggtgggactggccccaaaggagacagaggcgagaccggatcaaagggcgagcagggactcccaggagagagaggcctccgcggcgaacctggatctgtgcccaatgtggatcgcttgctggaaactgccggaataaaagcttccgcgcttcgggagattgtggaaacttgggatgaatcaagcggctcatttttacccgtccctgaaaggagaagaggtccaaagggtgatagtggagaacagggccctccaggcaaagaaggcccaatcgggttcccaggagagcgtggactaaagggtgatagaggagatccgggtcctcaggggccgccaggactggcccttggagagcgggggcctcccggacccagtgggctggcgggtgaacccgggaagccggggattccagggctgccggggagggcgggcggggttggggaggcaggcagacccggcgaacgcggggagagaggagaaaaaggggaaagaggcgaacaggggagagatggacccccaggacttcctgggacacccggcccacccggacccccaggtcccaaagtttcggtggacgagccggggcccgggctgagcggcgaacaggggcccccaggtttgaagggggccaaaggagaaccaggaagcaacggcgaccagggacccaaaggtgataggggtgttccaggaattaagggagatcgtggagagcccggacctcggggacaggatggaaacccgggtctgcctggtgagaggggtatggccggaccagagggtaagcccggactgcaagggccccgcggcccacccggcccagtcggcggacacggcgaccctggccccccgggcgcccctggcttagccggtcccgccggacctcaaggccctagtggattaaaaggcgaaccaggagaaaccgggccccccggaagagggctgacagggcctacaggcgctgtagggcttcccggaccaccgggccccagcgggttggttgggcctcagggcagtcccggtttaccagggcaagtaggcgagacaggaaaacccggagcccctgggagagatggtgcttctggcaaagatggcgatcgcggaagtccaggagtgcctggaagccctggtttacccggacctgtgggccctaaaggggaacctggacctaccggagcccccggccaagcagtagtcggtctacccggagccaaaggcgaaaagggagcccccggtggtctcgccggggacctggtgggagaaccaggagctaagggtgataggggactcccgggcccacgcggagagaaaggagaagcaggccgagccggcgaaccgggcgatccaggggaagatggccaaaagggcgcacccgggcccaaaggcttcaaaggtgatcccggtgttggcgtgcccggaagtcctggccctccaggcccacctggtgtgaagggggatctgggtttacctggcctgcccggagctccaggcgtcgtcggatttccgggccagactggacctcgcggcgagatgggacaaccgggacccagtggggaaagagggctggccggccctcctgggcgtgagggaatcccgggccctctgggacctccaggaccgcccggatctgtaggcccccctggcgcttcggggcttaagggcgacaagggcgatccaggtgtaggactgcctggtccgcgcggcgaacggggcgagcccgggattcggggggaagacgggcgaccaggacaggaagggccacgtggactgacagggccgcccgggagtagaggagagcgaggagagaaaggtgacgtcggcagcgctggcttgaaaggagacaaaggcgatagtgccgttattcttggaccccctggaccaaggggtgccaaaggagacatgggcgagcgtggaccaagaggattagatggcgataaagggcccagaggtgacaatggcgaccctggcgataaagggagtaagggggagcctggagataaaggaagtgcaggtctgcctggcttgcgcggtttgctcggcccccagggacagcctggcgcagccggaatcccgggcgatcctggaagccccggcaaagatggagtgccaggtattagaggcgagaaaggcgatgttggattcatgggaccaagaggcctgaagggcgagcgcggggttaaaggcgcctgcggcttggatggagagaagggcgataagggcgaagctggaccacctggcagacctggcctggccgggcacaaaggcgagatgggcgaacctggcgtacctggacagtctggggccccgggaaaggaaggtctcatcggccccaagggtgacagaggttttgacggacagcctggccccaagggagatcaaggagagaaaggggaaaggggcacacctggtatcggcggattccccggcccgtcaggcaatgacggaagtgctggtccacccggcccccctggcagtgtcggacccagaggcccagagggactgcagggacagaaaggagaacgtggaccccctggcgaaagggttgttggggctcccggagtccctggggctcctggggagcgaggcgaacagggcagaccagggcctgctggaccacgcggagagaaaggggaggctgccctgactgaagacgatatcagggggtttgtgagacaagaaatgagtcagcactgtgcttgtcagggtcaatttatcgcatccggaagccgccccctgccaagctacgcagcagataccgccgggtcacaactccacgccgtaccagtgctgcgagtgtctcatgccgaagaggaagaacgagttccccccgaagatgacgaatattccgaatactctgagtatagcgtggaagagtaccaggaccccgaagcaccttgggatagtgacgatccgtgtagcctcccgctagacgagggctcttgcactgcttacacactgcgctggtaccatcgggccgtgacggggtccacagaagcctgccatccgttcgtgtacggcggttgtggtggcaacgctaacagattcggaacaagagaagcatgcgaacggaggtgccccccaagggtcgttcaatctcagggcacaggtacagctcaagactag

SEQ ID NO: 5177 - RNA, 435 nt, synthetic construct
  misc_feature 1..435: note = source = /note="Description of Artificial Sequence: Synthetic coding sequence"
  source 1..435: mol_type = other RNA
atgtggctgcagtcacttctactccttggcaccgtcgcctgctctatatccgcccctgcacggtccccaagcccatcaactcagccatgggagcacgtgaacgcaatccaagaggccagaagactgttgaaccttagcagagataccgccgccgaaatgaatgagaccgtggaggtgatcagcgagatgttcgacttacaagaaccaacctgtctgcagacacgattggagctttacaagcaaggattacgaggctcactgacaaaactaaaaggacccctcaccatgatggccagtcattacaaacaacactgccccccgacgcctgaaacttcttgcgctacacaaattatcacttttgagagttttaaagaaaatctcaaggattttttactggtaattccctttgattgctgggagcccgtacaggaatag

SEQ ID NO: 5178 - RNA, 603 nt, synthetic construct
  misc_feature 1..603: note = source = /note="Description of Artificial Sequence: Synthetic coding sequence"
  source 1..603: mol_type = other RNA
atgtcccccgaaccagccctctcccctgctctgcaactcctcttgtggcattctgctctgtggaccgttcaagaggccactcccctcggtcccgcttcctcacttcctcaaagcttccttctcaagtgtctagaacaggtgcgcaaaattcaaggggatggcgctgcgctgcaggaaaagctgtgtgcaacatacaagctctgtcaccccgaagaactcgtgctgcttgggcattcattgggaatcccttgggcccctctgtctagctgtccctctcaggccctccagcttgctggctgtctctcacaacttcactccggactcttcctctaccaggggctgctccaggccctcgaaggaatctcacccgaactgggaccaacactggatactctgcagcttgatgtcgccgactttgcaaccaccatttggcagcagatggaggaattgggtatggctcccgccctgcaacctacccaaggcgcaatgccagcgttcgcctctgcatttcagcgcagggccggcggcgtcctcgtagcgtctcatctccagtcctttctagaagttagttatcgcgtcctgcggcatctggctcagccgtag

SEQ ID NO: 5179 - RNA, 516 nt, synthetic construct
  misc_feature 1..516: note = source = /note="Description of Artificial Sequence: Synthetic coding sequence"
  source 1..516: mol_type = other RNA
atggccggacccgcaactcaaagccccatgaaactaatggctctgcagctgctgctgtggcattcagctttatggacggtgcaggaagctacacccttgggcccagcctccagtctgcctcagtcctttctactgaagtgtttggaacaggtgcgaaaaatccaaggagatggagcagccctgcaggaaaagctggtgtctgaggccgggtgcttgtcacaacttcactccggactgtttctttatcaaggactactccaagccctcgagggaatcagcccagaacttggaccaaccctggataccctccagctggacgtggcagactttgcaaccacaatctggcagcaaatggaagaactcggcatggcacctgcactccagcccacacagggggcaatgcctgcgttcgcctccgcattccaaagacgcgcaggcggtgtcctagttgccagccatctacagtcattcctcgaagtatcctaccgagtcctaagacatctggcccagccttag

SEQ ID NO: 5180 - RNA, 615 nt, synthetic construct
  misc_feature 1..615: note = source = /note="Description of Artificial Sequence: Synthetic coding sequence"
  source 1..615: mol_type = other RNA
atggcaggacctgctactcaaagcccaatgaaacttatggcccttcagctattattgtggcactccgcgctctggaccgttcaggaggccacccctctcggccctgcaagctccctccctcagagtttcctacttaagtgcttagagcaagtccgcaaaattcagggcgatggagctgccttacaggaaaaactgtgcgccacctacaaattatgtcatccggaggagctggtacttctcgggcattccctgggaattccatgggctccactcagctcttgtccaagtcaagcattgcaactcgccgggtgcctgagccaactgcactccggcttatttctgtatcagggtcttctccaggcactcgaaggtatttcccctgaactcggccccactctagataccctgcagctcgatgtcgctgatttcgctaccacaatttggcagcaaatggaggaactggggatggctcctgccctgcagcctacacagggagctatgcctgcatttgccagtgcattccaaaggagggccgggggcgtgctggtggcatcacatttgcagtccttcctggaagttagctatcgggttctccggcaccttgctcagccatag

SEQ ID NO: 5181 - RNA, 3696 nt, synthetic construct
  misc_feature 1..3696: note = source = /note="Description of Artificial Sequence: Synthetic coding sequence"
  source 1..3696: mol_type = other RNA
atgagactgctcgctaagatcatctgtcttatgttgtgggcaatatgtgtagctgaagattgtaatgaacttccaccaaggcgaaataccgaaattcttactggtagctggagtgaccagacttaccctgagggcacacaggccatatacaagtgcaggcctggctacaggtcccttggcaatgtgataatggtgtgcaggaagggcgaatgggtggccttgaatccactcagaaaatgtcagaaacggccttgtggacaccccggcgatacacccttcgggactttcactttgaccggtgggaatgtgtttgaatatggtgtgaaggccgtgtacacatgcaacgagggatatcagcttttaggagagattaattatcgtgaatgtgacacagatggatggacaaacgacattcctatttgcgaagtcgtgaagtgcctccccgtaacagcacctgaaaatgggaaaattgtctccagtgctatggaaccagatcgcgagtaccattttggacaggcagtgagatttgtatgcaacagcggatacaagatcgaaggggatgaagaaatgcactgctccgatgatggtttttggtccaaggagaaaccgaagtgtgtagagatttcatgcaagtccccagacgtgattaacggttcacccatatcacagaagattatttataaggaaaacgaacgatttcagtacaagtgcaacatgggctacgaatactcagagagaggagatgcagtttgtacagagtcaggatggcgtccactgccctcttgtgaagagaagtcctgcgataatccatacattcctaacggagattacagcccgcttagaattaaacacagaacaggagacgagattacctaccagtgtaggaatgggttttatcccgccacgagaggcaatacggccaagtgtacttctactggatggatccccgcacctagatgcactttaaagccctgtgactaccccgacataaaacacggcggcctttaccacgaaaacatgcgaagaccatatttccctgtagctgtgggtaaatactactcttactattgcgatgagcattttgaaacaccttctgggtcttattgggaccacatccactgtactcaggacggctggtcacccgccgtcccctgtttacgcaaatgctactttccctatctggaaaacgggtataaccagaaccacggaaggaagttcgtgcagggaaaatcgatcgacgtggcctgtcaccccggttatgcattaccaaaagcacagaccaccgttacctgcatggaaaatggttggagccctacacctcgctgtattcgcgtcaagacctgttctaaaagcagtatcgacatagagaacggctttatcagcgaatcccagtatacctatgctctcaaggaaaaggctaaataccagtgtaagttgggatatgtaacagctgacggcgaaacgtctggaagtatcacctgcggtaaggatggatggtcagcccagcccacatgcattaagtcctgcgacattcctgtctttatgaatgcacgtactaaaaatgatttcacctggtttaagctgaacgataccctagattatgagtgtcacgatggctatgaaagcaacacgggctctacgacaggctcaattgtctgtggttataacggatggtctgaccttccaatctgctatgaacgagagtgcgagctcccaaaaatcgatgttcacctggtccctgatagaaaaaaagaccagtataaagttggtgaggtgttgaaattttcctgtaaacccggattcaccatagttgggcctaattccgtacaatgttaccactttggtctctcgccagacctgcctatatgcaaggagcaggtgcaaagctgcggaccaccaccagagctgttgaatggaaatgtcaaagaaaaaacaaaggaagaatacggccacagcgaggtcgtcgagtactactgtaacccacggtttctgatgaagggcccgaacaagatccagtgtgtagacggggaatggaccactttgccagtatgcattgtagaggaatccacctgcggagatattcctgaactcgaacatggttgggcccagctgtcctcaccaccttactattacggcgacagcgttgaatttaattgctctgaatcatttacaatgattggacatcggtcaatcacttgtattcacggcgtctggacccaacttccccaatgcgtggctatcgacaagttgaaaaaatgtaaaagtagtaatcttatcattctggaggaacatctcaagaacaagaaagaattcgatcataatagcaatattcgctaccgatgcagaggcaaggaagggtggattcatacggtgtgcatcaatggtagatgggatcctgaggtaaattgttccatggcccaaatccagctatgcccaccacctcctcaaatccctaacagccataacatgaccacaaccctgaactacagagacggagagaaggtgtccgtcctttgccaggaaaattatctcatccaggagggtgaggagatcacttgtaaagatggaaggtggcagagtatacccctgtgcgtcgagaaaattccttgtagccaacctccacaaatagaacatggcacaattaactcttccagaagctcccaagaatcatatgcacacggcactaaactgtcttatacttgcgaaggcggcttccggattagtgaggaaaacgaaaccacgtgttatatgggtaaatggagttctcctcctcaatgcgaaggactcccgtgcaagtccccgccagagattagccacggagttgtggcccatatgtcagattcctaccagtatggtgaagaagtgacttacaaatgctttgaaggctttggtattgatggccccgcaatcgctaaatgcctgggtgagaagtggtcacaccctccctcttgtatcaaaacggactgtctctccctgccatcctttgagaatgccatccctatgggcgaaaagaaggatgtgtataaagctggtgaacaggtaacgtatacctgtgccacctattataaaatggacggagcttcaaatgtgacctgtataaattctcggtggacaggacgccccacttgcagagacacatcatgtgtgaatccacctacagtgcagaacgcatacatagtttcgcggcagatgtcaaagtatccaagtggcgaacgagtcaggtatcagtgcagatccccatacgaaatgtttggcgacgaggaagtcatgtgcttgaacggcaattggactgaaccaccacaatgtaaagattcgactggcaagtgcggcccccctcctccaatcgataatggagacataacatcttttccccttagtgtgtatgcaccggccagttcagtggagtaccaatgccagaacctataccagttagagggcaataaaagaattacctgccgaaacggccaatggtctgagcctcctaaatgcctgcatccctgtgtgatttcaagagagataatggaaaactacaacatagctcttcgatggacagccaaacaaaagttgtattcccgcacgggcgagtctgtggaatttgtctgcaaaagaggatataggctcagctctcgctcccacacactccgtacaacatgttgggacggaaaactcgaataccccacatgcgcaaagagatag

SEQ ID NO: 5182 - RNA, 1350 nt, synthetic construct
  misc_feature 1..1350: note = source = /note="Description of Artificial Sequence: Synthetic coding sequence"
  source 1..1350: mol_type = other RNA
atgaggcttctcgcaaaaattatctgtctaatgttatgggctatctgcgtagcggaggactgcaatgagctgcccccacgccgaaataccgagatcttgaccggtagttggtctgatcagacttatcctgaaggtacgcaagctatctacaaatgccggccagggtaccgcagcctgggcaacgtcatcatggtttgtagaaagggcgaatgggtggctctgaacccacttaggaagtgtcaaaagcgtccatgcggtcacccaggggatacaccatttggaacctttacccttactggtgggaacgtgttcgagtacggagtaaaggcagtttacacctgtaacgaaggttatcaactactaggggaaattaattatagggaatgcgacacggatggttggaccaatgatattcccatctgcgaggtcgtcaaatgccttcctgttacagcacccgagaacggaaaaattgtgtcctctgccatggagccagatagagagtatcacttcggtcaagcggtaaggttcgtttgcaattcagggtataagattgagggagacgaggaaatgcactgctctgatgacgggttctggtccaaagagaagcctaaatgcgtagagatctcttgcaagagccctgacgtcatcaatggttcacccatcagccagaagataatatataaggaaaacgaaaggttccaatataagtgcaatatgggttacgaatatagtgagagaggcgatgctgtgtgtactgaaagtggttggcgtccactaccatcctgcgaagagaagtcttgcgataacccctatatacctaacggagactattctcctctacggattaaacatagaaccggagatgaaattacttaccagtgtcggaatggattctacccggcaacaaggggtaataccgcaaaatgcacttcaaccggctggatccccgcacctagatgcacactgaagccctgtgattacccagacattaagcatggaggactttatcatgaaaatatgagacggccctatttccccgtggcagtcggcaaatactacagctattactgcgatgaacactttgagacgccaagcggatcttattgggatcatatccactgcacacaagacggatggagtccagccgtcccttgcctgcgtaaatgttatttcccctacctcgagaatggctacaaccagaatcatggcagaaaattcgtccaaggtaaatcaatcgatgtggcctgccatccaggatatgccctccctaaagctcaaactactgttacatgtatggaaaatggatggagccccacacccaggtgcatccgagtgatctttcagctgtag

SEQ ID NO: 5183 - RNA, 1350 nt, synthetic construct
  misc_feature 1..1350: note = source = /note="Description of Artificial Sequence: Synthetic coding sequence"
  source 1..1350: mol_type = other RNA
atgcggctgctagctaaaattatatgcctgatgttgtgggctatctgcgtggcggaagactgcaacgagcttcctcccagacgtaatacagagattttaacgggttcctggagtgatcaaacatatccagaaggaacacaagcaatttataagtgccgtccaggctatagatcattaggtaatgtcattatggtgtgcagaaagggagaatgggtcgccctgaatcctctgcgcaaatgtcagaaacgcccttgcggccatcccggagatacaccttttggcacatttaccctcaccggggggaatgtgttcgaatatggtgtgaaggctgtatatacctgtaacgagggttaccagttgctgggagagattaactaccgtgaatgcgatacagatggatggactaacgacattcccatatgcgaagttgtcaaatgcctgcccgttacagccccagaaaacggaaaaatcgtctcaagcgcaatggagccagacagggaataccactttggccaggcggtcaggttcgtgtgcaattctggatacaaaatcgagggcgatgaggagatgcattgtagcgatgatggattttggtcgaaagagaagccaaagtgtgtggaaatctcatgtaaaagtcctgacgtgattaacggcagtcctatttcccagaagataatctacaaggaaaatgaaagatttcagtacaaatgtaacatgggctacgagtactctgagagaggcgacgccgtgtgtacagagtcaggctggaggccgttaccgtcctgcgaagagaagtcctgtgataacccctatattcccaacggcgactacagccccctaaggattaaacatagaacaggcgacgagatcacctaccagtgccggaatggattctaccctgctactcgaggtaacacagctaagtgcacgtctaccggctggattcctgccccacgttgcaccttaaaaccttgcgattatcctgatattaaacacggtggcttgtaccacgaaaacatgagacgcccatacttcccagtcgctgttgggaaatactactcttactactgcgatgaacactttgaaaccccctccgggtcttattgggaccatatacattgtacgcaggatggatggtcacccgccgtcccatgcttacgaaaatgttacttcccctatctcgaaaatggttataaccagaatcatggccgcaaattcgttcagggtaagagtattgacgtggcatgtcacccaggttacgcactccccaaggcgcagacaaccgtcacttgcatggaaaacggatggtcaccaacgccgagatgcattcgagttagttttacactttag

SEQ ID NO: 5184 - RNA, 591 nt, synthetic construct
  misc_feature 1..591: note = source = /note="Description of Artificial Sequence: Synthetic coding sequence"
  source 1..591: mol_type = other RNA
atgcgcctgccgctgctggtcagcgccggagtcctgctcgtcgcactgttgccatgcccaccttgcagagcattactctcaaggggacccgtccctggggcacgacaagccccccagcacccgcagccactcgatttctttcagcctcctccacagagcgagcagccccaacagccacaggcccgcccagtactacttcggatgggtgaggagtattttctgcgcctagggaacttaaacaagtcacctgcagcccctttgtcaccagcatcctcacttttggctggcggatctggaagtagacctagtccggagcaggccactgccaatttttttagggtccttttgcagcagctcctcttacctcggcgatcattggattccccagcggctctggctgaacgtggcgcaagaaatgcactcggcggacatcaagaggcccccgaaagagaaaggagaagcgaagaaccacccatctccctagatctcacatttcatttgttacgtgaagtcttagaaatggcaagagccgagcaactggctcagcaagctcactctaaccgaaaattaatggagatcattgggaaatag

SEQ ID NO: 5185 - RNA, 4443 nt, synthetic construct
  misc_feature 1..4443: note = source = /note="Description of Artificial Sequence: Synthetic coding sequence"
  source 1..4443: mol_type = other RNA
atgcagcggtcccctttagagaaggctagcgtggtttctaagttatttttctcatggacaagacctattctccggaaagggtatagacagcgactcgaattgagtgacatttaccagataccttctgtagactcagctgataatcttagtgaaaagttagaaagagaatgggaccgcgagttagcctcgaagaaaaatcctaaactgatcaatgccttgaggcggtgcttcttctggcgatttatgttctacggcatctttttgtacctgggcgaagtaacaaaagccgtccaaccgcttctgctcggtcgtatcattgcaagctacgatccggacaataaggaagaacggagcattgctatttacttgggaataggcctgtgtctgctgttcatcgtacggactctcctcctccatccagccattttcggcctgcaccatatcggcatgcaaatgaggattgccatgttttctctgatctacaaaaaaacccttaagctgagctctcgcgttctggacaaaatctccattggacagttagttagcctgctttccaacaatctaaataaattcgacgagggcctcgccttggcccattttgtgtggattgcacccctccaagtcgccctgctgatgggactgatctgggagttactccaggcaagtgcattttgcggacttgggttcctgattgtgctggcattgttccaagccggactaggaaggatgatgatgaagtatcgagatcagcgagctggcaaaatctcagaaaggctcgtgattaccagtgaaatgatcgagaatatccagagcgtgaaggcttattgctgggaagaggccatggaaaagatgattgagaacttacgacaaactgagttgaaactcactcggaaagctgcctatgtcaggtatttcaactctagcgctttcttcttttctgggttttttgttgtctttttgtctgtcctgccatatgctcttattaagggtatcattttgcgaaaaatctttacgacaatttctttttgcatagtcctcagaatggccgtgacccgccaatttccttgggctgtccagacttggtacgattccctcggcgcaataaacaaaatacaggattttctgcagaagcaggagtacaaaactctagagtacaatcttaccactaccgaggttgttatggagaatgtgaccgctttttgggaagaagggttcggcgaactgttcgaaaaggccaaacagaataataataacagaaagacctctaacggagacgattcactctttttttccaatttctctttgttgggaacgcccgtcctgaaagatatcaacttcaaaattgaacgtggtcagctcctggctgtggctggaagtacaggagctggtaaaacatccctgcttatggtgattatgggagagcttgaaccttctgagggcaaaattaaacattccgggcggatcagtttctgctctcaattttcatggatcatgcctggtacaatcaaggaaaacattatctttggcgttagctatgacgagtatcgatacagatccgtgattaaggcctgccaactggaggaagacatatcaaaatttgctgaaaaagacaatatcgtgctaggggaaggagggatcacactcagtggtggtcagcgcgcccgaatctcacttgcgcgggcagtctacaaagatgccgatctgtacttgcttgatagtcccttcgggtacctggacgtccttacagaaaaagagatctttgagtcttgcgtgtgtaaattgatggccaacaaaactaggatactggtaacctctaagatggagcacctgaaaaaagctgacaagatcttgattcttcacgaggggagttcgtatttttatggcacattctctgaattgcaaaatcttcagccggacttttcatcaaaactcatgggttgtgactcattcgatcaattcagcgccgaacgtagaaattctattttgaccgaaaccttgcatcggtttagcctcgaaggagacgcgcctgtgtcctggacggagacaaagaaacagtcgttcaagcagaccggagaatttggcgaaaaaaggaagaattctatcttaaacccaatcaattctattcggaaatttagcatagtgcagaagacgcctttacaaatgaatggtattgaggaggattccgatgaaccattagagcgaagattatctctcgtgcctgatagcgaacagggcgaagcaatcctcccccggataagcgtgatctcaactggacccacgctgcaggccagacgccgacagagcgttctcaacttaatgacacattccgtgaatcaaggacagaatatacatagaaaaaccacagcctctacaagaaaggtttctctggctcctcaggccaacttgacagaattagacatatactcaagaaggctgtctcaggagactggattggaaatatccgaagaaattaatgaggaggatctgaaggagtgtttctttgacgacatggagtcgattcccgctgttaccacctggaatacgtacctgaggtacatcactgtacataagtcattaatattcgtgcttatatggtgcctagtgatattcctagctgaagtcgccgcctctcttgttgtcctatggctacttggcaacactccattacaagacaagggaaattccacacattcacgaaacaacagttacgccgtcatcatcacaagtacaagtagctattacgtgttttatatctatgtcggagtcgccgatactctcctcgccatgggattcttccgcgggttgccattggtccatacccttatcactgtctcaaagattctccaccataaaatgctacatagtgtgcttcaagcgcccatgtcaaccctgaacaccctgaaagctgggggcatcttaaatcgattctccaaggacatcgctattctggacgacctgcttcctcttacgatttttgatttcatccaactcttgctcatagtcataggcgcaatagccgtagtagctgtgttacaaccatatatattcgtagccaccgttcctgtaattgtcgcttttatcatgctgcgggcatactttcttcagacaagccagcagctaaaacaactggagtcagagggtcgatctcctatatttacacacctggttacaagcctcaagggattatggacacttcgggcattcggacgtcagccatattttgaaacccttttccacaaagccctgaacctccacacagctaattggtttctgtatctctctaccttgcgttggtttcagatgagaatcgaaatgatctttgttatattttttatcgccgttacatttatcagtatcctgacaaccggtgagggagaagggagagttgggataattctaacgcttgcgatgaacatcatgagtactctgcagtgggccgtaaattcatctattgacgtcgactctcttatgcggagtgtctcaagagtctttaaattcattgatatgccaacagaaggcaagcctactaaaagcacaaagccctataagaatggacaacttagtaaagtcatgatcatcgaaaatagccacgttaagaaagatgatatttggccctccggcggacaaatgacggtcaaggatcttacggccaaatacaccgagggcgggaacgcgatccttgaaaatatttcatttagtatttcaccagggcaaagggtcgggcttttagggcgaacaggcagcggcaagtctacactattatccgcctttttaagactgctcaataccgaaggtgaaattcagattgacggcgtgagctgggattctataacactacagcagtggcgaaaagcgttcggcgtgattcctcaaaaggtatttatctttagcggaacatttcgcaagaaccttgatccatacgaacaatggagcgatcaggaaatttggaaagtcgccgacgaagtgggtctacgtagcgtgattgagcagttccccggaaagctggactttgtcttagtggatgggggatgtgtattatcccacggacacaagcaactcatgtgcttggcaaggagtgttcttagcaaagccaaaatactgcttctcgacgaaccgagtgcccacctggaccccgtcacctatcagattattcgcagaacattgaaacaagctttcgccgactgcactgtcattctctgtgagcatagaatagaagcaatgctggagtgtcagcagttcctggtcatcgaagaaaacaaggtacggcaatatgatagtatccaaaaacttctcaatgagcgtagtctcttccgtcaggccatctcaccatctgatagggttaagctcttcccccaccgtaactcctctaaatgtaagtctaagccacagatcgcagccttaaaagaagaaacagaggaagaggttcaggataccagactctag

SEQ ID NO: 5186 - RNA, 4317 nt, synthetic construct
  misc_feature 1..4317: note = source = /note="Description of Artificial Sequence: Synthetic coding sequence"
  source 1..4317: mol_type = other RNA
atgcagcgctcaccacttgagaaagccagcgttgtttccaaattatttttttcctggaccagacctatactgcgaaaagggtaccgacaaaggctggagttatctgatatctaccagattccctctgtggactccgcagacaacctttctgaaaaacttgaacgcgagtgggatagggaattggcatcaaaaaaaaacccaaaactgataaatgcactgcgaagatgcttcttctggaggttcatgttctacggcatctttctgtacttgggcgaggtgacaaaagccgtgcagcccctgttgcttggacggatcatcgccagctatgatcccgataacaaagaggaacgctctatagccatatatctgggcatcggcctgtgtctgctctttatcgtcaggactctgctactccacccagccattttcggccttcatcatatcgggatgcagatgcgaatagcaatgttcagcctcatatacaaaaagggactcgccctcgcacatttcgtctggattgcccctctgcaggtcgctctattgatgggcctcatatgggaacttcttcaagctagtgccttttgcgggctaggttttcttattgtgctggcactctttcaggcaggcttgggcagaatgatgatgaagtacagagaccagcgagcgggcaagattagtgaacggctggtgattacaagcgagatgatcgagaatatacagtccgtgaaggcttactgttgggaagaggcgatggagaaaatgatcgaaaatctgcgacagactgaactaaagctgaccagaaaggctgcctacgtccgctactttaactcaagcgctttcttctttagcggcttcttcgtggtgttcctttccgttctcccctatgcgctgatcaaaggcattatcctgcgcaaaatctttacaactatatcgttttgtatcgttttgagaatggctgttacccgacagtttccatgggcagtgcagacatggtatgattcactaggcgccattaataaaatccaagactttctccagaagcaggaatataaaaccttagaatataatttaacaaccacagaggtagtcatggaaaatgtgacagccttctgggaggagggattcggagagctgttcgagaaagctaaacaaaacaataataaccgcaaaaccagcaacggcgacgatagcctcttcttcagtaatttcagcctcctcgggactcccgtactgaaagacatcaacttcaagattgaacgcgggcagttgctggccgtggcggggagcacaggcgcgggaaagacctctttgttgatggttattatgggcgaactggaaccaagcgaagggaagatcaagcattccggacgcataagcttctgctcacagtttagttggattatgcctgggactatcaaggagaacattattttcggcgtgagttacgacgagtacagatatagaagcgtgatcaaagcttgtcaactcgaagaagacatcagcaagtttgccgagaaagataatattgtacttggggagggcggcattaccttaagtgggggacagcgggcgcgcatctctttggcaagagccgtgtacaaggacgcagatctctacctgctcgactcgccctttgggtatctggatgtgctcacggaaaaagagatttttgagtcatgtgtgtgcaaactgatggctaataaaacgagaattctggttacaagcaaaatggagcacttgaagaaagcggacaagattctaatattacacgaaggtagttcatatttttatggcacatttagcgagctgcagaatctgcaaccagacttctcatccaaactgatgggttgcgacagcttcgatcaatttagtgcagaacggcgaaatagtatccttacagagacactgcataggttcagtttagagggagacgctcctgtctcatggacggagactaaaaagcagtcttttaagcagactggggaatttggcgaaaaacggaagaactcaattttgaatcctatcaattctattagaaaattttcgatagtccaaaaaactccacttcagatgaatggcatcgaggaggacagcgatgagccactagaacggagactgagcctcgtgcctgactccgagcagggagaggcaatattacctcggatttccgtgatttctactggccccaccctgcaggctaggagaagacaaagcgtcttgaacttgatgacacactctgtaaaccagggtcagaacatacaccggaagactacagctagcacacgaaaggtttcactggctccacaggcaaatctcaccgagctcgacatatattccagacggctgtctcaagaaaccggactggagatcagtgaagaaataaatgaagaagacctaaaggaatgcttttttgacgatatggaatcaatacccgccgtcactacatggaacacatacctaaggtacattaccgtgcataagagcctcatctttgtattgatttggtgcctcgtaatttttctcgccgaagttgcagcaagtcttgttgtcctgtggctcctcggtaataccccacttcaggataagggaaactccacacactctaggaacaattcttacgcagtcattatcacctccacatcaagttactatgttttttacatctatgtgggcgttgcagacacactgctcgccatgggtttcttccggggcctcccactggtgcacactcttattaccgtttccaaaattcttcatcataagatgctccatagtgtgcttcaggctcctatgtcaaccctgaacaccctcaaggctggagggattctcaatagattctccaaggatatcgcaatattagacgatttgctgcctttaacaatattcgatttcattcaactgcttctcatcgtgatcggagccattgccgtagtcgccgtgcttcaaccctacatattcgttgctaccgttccggtgatagtcgctttcataatgctgagggcctattttctacagacatctcaacaactgaagcagctggagtcagagggaagatccccaattttcacacatttggtgacatccctaaaaggactgtggactctccgtgccttcggccggcagccatactttgaaacactgttccataaagcccttaatcttcacaccgccaactggtttctatatcttagcacactgcgttggttccagatgcgaattgaaatgatcttcgttatttttttcatcgccgtgacattcattagtatcctgacaactggggaaggcgaaggccgagtcgggattattttgacacttgctatgaacattatgtcaacacttcaatgggccgtcaattcctcgatcgatgttgactctttgatgcgctccgtcagtcgagtgttcaagttcatcgacatgccaacagagggcaaaccaacgaaatccactaaaccgtacaaaaatggacaactgagcaaggtcatgattatcgagaacagccatgtgaaaaaggatgatatttggccctccggagggcagatgacagttaaagaccttacagccaagtacacagaaggggggaacgcgattttggagaacatctctttctcaattagtccgggacagcgcgtgggattgcttggaaggactgggagtggcaagagcaccttgctgtcagcatttcttcggttattgaacacagagggggaaatccaaatcgacggagtgagttgggacagcattacgctccagcagtggcgaaaggccttcggggtgataccccagaaagttttcatttttagcgggacatttaggaaaaatctggatccgtacgagcaatggagcgatcaggaaatttggaaagtcgcggatgaggtcgggctacgctctgtgatcgagcagtttccgggcaagctggattttgtgttagtagacggaggttgcgtgttatcgcacggacataagcagctcatgtgcctggcaagatccgtgctctccaaggccaagattctccttctggacgaaccttcagctcacttagatcctgtcacatatcagattattagaagaaccctaaagcaggcattcgccgattgcaccgtgatactttgcgaacaccggattgaagctatgttagagtgccagcagttcctggtgatcgaagagaacaaggtgcgtcaatacgattccatccaaaagttgctgaacgaaagaagtctttttcggcaagctatcagccctagtgacagagtgaaattattcccccatcgtaactcaagtaagtgcaaaagcaagccccagatcgccgccctcaaatag

SEQ ID NO: 5187 - RNA, 4260 nt, synthetic construct
  misc_feature 1..4260: note = source = /note="Description of Artificial Sequence: Synthetic coding sequence"
  source 1..4260: mol_type = other RNA
atgcagcggtcccctttggagaaagccagtgttgtcagcaaactgtttttcagttggacacgacctatactgcggaaaggctaccggcagagactggaacttagtgacatctatcagatccccagtgtagattctgccgataatttaagcgaaaaactggaaagggaatgggatagagaattggcgagcaaaaagaacccaaaactgatcaacgcattaaggcgctgttttttttggaggttcatgttttatggaatcttcttatacctcggcgaagtcacgaaagccgtccaaccccttcttttaggccgaattatagccagttatgaccccgacaataaggaagagagatccatagccatttacttgggaattggtttatgtctgttatttatagtccgcactctgctcctgcaccccgccatcttcggcttacaccacattggaatgcaaatgagaattgctatgtttagcctgatttataagaagacattgaagctatcatctcgagtgctggacaaaatttcaattgggcagctggtgtcattgttgtctaataaccttaacaagtttgacgaaggcctcgcactcgcccatttcgtttggatcgcacctttgcaagtagctcttctgatgggtttgatctgggagctgttacaggcttcagccttttgcggtctcgggttcctgatcgtgcttgctttattccaagcagggctgggacggatgatgatgaaatatagggaccagcgtgccggcaagatatccgagaggctcgttattacctctgaaatgatcgaaaatatacagtctgtaaaagcgtattgttgggaggaagcaatggagaaaatgattgagaatcttaggcaaacagaactgaaactgactcggaaagcagcctacgttcggtactttaactcttccgctttttttttctcaggcttcttcgtggtgttcctatcggtgctgccctacgccctgattaaaggcatcatcttacggaaaatttttaccaccatctctttctgtatcgttctcagaatggcagtgacccgtcagttcccgtgggcagtccagacctggtacgactcgcttggcgctattaataaaatacaggatttcctccaaaaacaagaatacaagactctcgagtataacctgacaacaaccgaagtcgtaatggaaaacgtgaccgcattctgggaggagactagcctccttatggttattatgggagagctcgaaccatccgaaggcaagattaagcattctggacggataagtttttgcagccagttctcctggatcatgcctgggaccataaaagagaatataattttcggagtctcctacgatgaatacaggtaccgaagtgtgatcaaggcttgccaattggaggaagatatttcaaaatttgctgaaaaagacaacatagtacttggggagggtggaatcacactgagtggcggacagcgagcccgaatcagtctagcaagggccgtttacaaggacgctgacctctatctcctggattctccctttggctatttagatgtgctaactgagaaagaaattttcgaatcctgcgtgtgtaagctgatggcgaataagacccgaatcttagttacttctaaaatggaacaccttaagaaagccgacaaaatcctgattttgcacgaaggcagcagctatttttacggcactttctctgagcttcagaatttgcaacctgacttctcttcaaaactaatgggatgtgattcgtttgatcagttcagcgcagaacggagaaattcaatactaacggaaaccctccacagatttagcctcgaaggcgatgcgcccgtctcatggaccgagactaagaagcagagtttcaagcagacaggtgagttcggtgaaaaaagaaaaaattccatactgaaccctataaactctattcgcaagtttagcatcgtacagaagaccccacttcaaatgaacggaatagaagaggactccgatgagcccttagaaagacgcttgagcttggtgccagattctgaacagggggaagccattctaccaaggataagcgtaatcagcaccggccccactcttcaggcccgccgccgacaatcagttcttaatcttatgactcacagtgtaaatcaaggccaaaacatccatagaaagaccaccgcctccacacgaaaggtcagcctcgccccacaagcaaatctcactgaattggatatctactctcgcagactgtcacaggagaccggattagagatctccgaggagataaatgaagaagatctgaaggagtgcttctttgacgatatggagtctattcccgccgtcacaacctggaacacctatcttcgctacataacagtacacaagtctttgatattcgtgctaatttggtgcttagtaattttcctggcagaggtcgcagctagtctcgtcgttctctggttactcgggaatacacccttgcaggacaaaggcaactctacacacagcagaaacaactcctatgcagtcatcatcacaagcacttcatcctactacgtcttttacatctacgtcggcgtggctgatacccttctggcgatgggcttcttccgtggtctgcccttagtgcacaccctaatcactgtgtcaaagatactgcatcacaaaatgctgcactctgtcctccaagccccaatgtccaccctaaacactctgaaagcaggcggcatactcaaccggtttagtaaagacatcgccatcctcgatgatctgcttccattaacaatatttgattttattcagctgctcctaattgtcattggtgcgatcgcagtagtcgccgtactacagccgtatatatttgttgccactgtaccagtcatcgttgctttcatcatgctccgcgcctactttttacagacctcacagcaactgaaacagttggagagtgaaggccggtcacctatcttcacgcaccttgttacaagtttaaaaggcctttggactctccgagcctttggtcgacagccatatttcgagacacttttccacaaggccctcaatttacacacagccaactggtttctttatctgtcaacactccgctggttccagatgaggattgagatgattttcgttatcttctttattgccgttaccttcatctctatactgaccactggggagggagagggacgcgtcggaatcatccttacccttgccatgaacataatgtcaactttgcagtgggctgtcaattctagcattgatgtcgatagccttatgcggtctgtaagtcgggtgtttaagttcatcgacatgcctacagagggcaagcctactaaatctacaaaaccttacaaaaatggacagttgtctaaggtgatgattatagaaaacagtcatgtgaagaaggacgatatttggccaagcgggggacaaatgacagtgaaggacttaaccgcaaagtatactgaagggggcaacgcaattctcgaaaatatctcgttcagtatctcgccaggacagcgagtcggactgctaggacggacagggtccggtaaatcaacacttctgagcgcttttttgagactgctgaacacagagggcgagatccagattgacggagtgagttgggactctataacattacagcagtggagaaaagcctttggagtgattccacaaaaggttttcatcttctccggtacatttcgcaagaacctagatccatacgaacagtggagtgatcaggagatctggaaggtagccgacgaagtgggccttagatcagtgattgagcagtttcctgggaagttggactttgttctggtggacgggggatgtgtgctttctcacggccacaagcaattaatgtgtttagcacggtcagttctgtctaaagccaaaatcctgttgttagatgagccttccgctcatttggatccagttacgtatcagatcatccgaagaactctaaaacaggctttcgcagactgcacagttatattatgtgagcatcgcatcgaggccatgttggagtgccagcagtttttagtcatcgaagagaataaggtgcggcagtatgatagtattcagaaacttcttaatgagcgcagcctgttcagacaagcaataagtccctccgaccgcgtcaagctgttccctcatcgcaattctagtaaatgtaagtccaaacctcagatcgccgcactgaaagaagaaactgaagaagaggtccaagataccagattatag

SEQ ID NO: 5188 - RNA, 573 nt, synthetic construct
  misc_feature 1..573: note = source = /note="Description of Artificial Sequence: Synthetic coding sequence"
  source 1..573: mol_type = other RNA
tgaaaaggactgtggactctgagagccttcggacggcaaccttattttgagactctgttccataaagccctgaatctgcatacagctaattggttcttatacctatccaccctgcgctggtttcaaatgcgcatcgagatgatctttgtaatcttcttcatagctgtgacattcatctccatactgaccaccggcgaaggcgaagggagagtgggtatcattctgacactagccatgaacattatgtcaacactgcagtgggccgtgaattcttcgattgatgtcgattccctgatgcgcagtgtgtcacgcgtattcaaattcatagacatgcccacggagggcaaaccaactaagtctaccaaaccctacaaaaatggtcagctgtcaaaggttatgattattgagaacagccatgtgaagaaagatgatatttggcctagcggtggtcagatgacagttaaggatctaaccgccaagtatacagagggcggaaatgctattttagaaaatatttcattctctatttctccaggacaacgggtgagattcgagcactgtctgctttgttag

SEQ ID NO: 5189 - RNA, 1104 nt, synthetic construct
  misc_feature 1..1104: note = source = /note="Description of Artificial Sequence: Synthetic coding sequence"
  source 1..1104: mol_type = other RNA
atgataagaaattggctcacaatcttcattttgtttcctctcaagctagttgaaaaatgcgagagctctgtgtctcttacggtgcctcctgttgtaaagttggagaacggatcatcgaccaatgttagccttacactcagacctccactgaacgctacgctggtgattacatttgaaattacctttagatctaagaatattacaatcctcgagctccccgacgaggttgtcgtgccaccaggcgtgactaattcatcctttcaggttacgtcccaaaatgtcggtcagttgactgtgtacttgcatggtaatcattctaatcaaactgggcctagaataagatttctcgtcattagatccagcgccatatctatcattaaccaggtaataggctggatttattttgttgcttggagcataagtttctacccgcaagtaattatgaactggcgccgaaagtctgttattggcctctcctttgatttcgtagcactgaacctgactggattcgtggcatatagtgtgtttaacataggactgttgtgggtgccttatatcaaggagcagtttctcctaaaataccccaatggcgttaaccccgttaattccaacgatgtcttttttagcctgcacgcagtagtcctgacactcattatcatagttcaatgttgcttatatgagaggggaggtcaaagagtaagctggcccgcaattggatttctagtcctggcttggctgtttgcgttcgtgaccatgattgttgccgctgttggtgtgacaacctggcttcagtttttgttctgttttagctatattaaactggccgtaactttagtgaagtattttccacaggcttacatgaatttctactacaagtcaaccgagggatggagcataggtaacgtattattggacttcactggcggctctttttctttgctccaaatgttcctccagagctacaacaacgatcagtggacgctcattttcggcgacccaacaaaattcgggctaggcgtattctcaattgtcttcgacgttgtgttcttcattcagcacttctgtctctacaggaaaaggcctgggtatgatcaacttaattag

SEQ ID NO: 5190 - RNA, 204 nt, synthetic construct; identical to SEQ ID NO: 4860
  misc_feature 1..204: note = source = /note="Description of Artificial Sequence: Synthetic coding sequence"
  source 1..204: mol_type = other RNA

SEQ ID NO: 5191 - RNA, 204 nt, synthetic construct; identical to SEQ ID NO: 4861
  misc_feature 1..204: note = source = /note="Description of Artificial Sequence: Synthetic coding sequence"
  source 1..204: mol_type = other RNA

SEQ ID NO: 5192 - RNA, 195 nt, synthetic construct; identical to SEQ ID NO: 4862
  misc_feature 1..195: note = source = /note="Description of Artificial Sequence: Synthetic coding sequence"
  source 1..195: mol_type = other RNA

SEQ ID NO: 5193 - RNA, 195 nt, synthetic construct; identical to SEQ ID NO: 4863
  misc_feature 1..195: note = source = /note="Description of Artificial Sequence: Synthetic coding sequence"
  source 1..195: mol_type = other RNA

SEQ ID NO: 5194 - RNA, 849 nt, synthetic construct
  misc_feature 1..849: note = source = /note="Description of Artificial Sequence: Synthetic coding sequence"
  source 1..849: mol_type = other RNA
atgaggggaatgaaactgctgggggcactccttgctctcgcagctctgctccagggagcggtcagtctgaaaattgctgcttttaatatccagacttttggggaaacgaaaatgagcaacgccaccctcgtatcttatatcgttcagatcctttccagatacgacattgctctggtccaagaggttagggattcgcatttaacagctgtaggcaaactcctggacaatttaaatcaagacgctcccgatacatatcactacgtcgtctcggaaccactcgggagaaactcttataaagaacgctacttatttgtgtacaggcccgatcaagtctcagccgtggactcttattattatgatgacggctgcgagccatgcggaaatgatacctttaacagagagccggccattgtcagatttttctcgcgattcacagaagtgcgtgagtttgctatcgtccctctccatgcggccccaggtgatgcagtggccgaaatcgacgcactttacgatgtgtatttggacgttcaggagaagtggggactcgaggacgttatgttgatgggtgacttcaacgcagggtgcagttacgtaagaccatctcagtggtccagcatacgcctttggacaagtcccactttccaatggttaatcccagattccgccgatactactgccacacctacgcactgcgcatacgatcgtatcgttgtagccggcatgctgttgcgtggagccgtcgtccccgactcagcactcccgtttaacttccaggctgcatacggtttatccgaccaactcgcccaggctatttccgaccattacccagtcgaggtgatgctcaaatag

SEQ ID NO: 5195 - RNA, 849 nt, synthetic construct
  misc_feature 1..849: note = source = /note="Description of Artificial Sequence: Synthetic coding sequence"
  source 1..849: mol_type = other RNA
atgcggggcatgaagctgctaggagccctattggctcttgccgccctgcttcagggggcagtctcactgaaaatagctgcttttaacatccagacttttggagaaacgaagatgtcaaacgccaccctagtgtcttatattgttcagatcttatccaggtatgatatagcactcgtgcaggaggtcagagatagtcacctaaccgccgtgggcaaactcctcgataatctcaatcaggatgctccagacacttaccactacgtcgtcagtgagccacttggtagaaacagttataaagagcgctacctttttgtgtatcggccagatcaggtttctgcagttgacagttactattacgacgacgggtgcgaaccttgcggaaatgacacttttaacagggaacccgccatagttcgcttcttttccagattcactgaagtgagagagttcgctatagttcccctccatgccgctcctggggatgctgttgcagaaatcgatgccttgtatgatgtgtatctcgatgttcaggaaaaatggggtctggaagacgttatgctcatgggagacttcaatgctggatgtagttatgttcgcccctctcaatggagttccattagactgtggacatcaccaacttttcaatggctgattcccgactctgccgacacaaccgccaccccaactcactgtgcctacgaccgcattgttgtggccggaatgctattacggggggccgtggttcctgactcagcgttaccatttaacttccaagccgcatacgggctctctgaccaacttgctcaagcaatttccgaccactatcctgtggaggtaatgctcaagtag

SEQ ID NO: 5196 - RNA, 564 nt, synthetic construct
  misc_feature 1..564: note = source = /note="Description of Artificial Sequence: Synthetic coding sequence"
  source 1..564: mol_type = other RNA
atgcaccagacacctattaccacttggtctgtgagtcattgggatggcaccgcaatcagaagcgctacatgttcttgcactggcttgactaggtgcttgcgttggaccgcaacgaccacaatgatggccgcatcaccagcaggaaccactccatcaacagagtcccagccactctctggcagttcacccggaagtcaggatgttatgctgatgggagatttcaacgccggttgctcttacgttcgcccctcgcagtggtccagtattcgtctgtggaccagtcctacttttcaatggctgattccagattctgcggatacaacagctacaccaactcactgcgcatacgatcgtattgtggttgccggaatgctcctccgcggcgcagttgtgccagactccgctctgccatttaacttccaggctgcctacggtctgtcggatcagctgttctccgtacacacatgttccggcgctggtcttggagaaagacacggcctgcccgcttccgcagccctcccatctaatacctgtcgcgctggcacgcatagagtgtccacctag

SEQ ID NO: 5197 - RNA, 6243 nt, synthetic construct
  misc_feature 1..6243: note = source = /note="Description of Artificial Sequence: Synthetic coding sequence"
  source 1..6243: mol_type = other RNA
atgctgcgtgtgtttatcctgtatgccgaaaacgtgcacacaccagacacggacatctctgacgcatactgttcagcagttttcgctggggtgaagaagcgcaccaaggttatcaaaaacagcgtgaatccagtgtggaacgaaggatttgaatgggatctaaagggaatccccctagaccaaggaagtgaactgcatgttgtcgtcaaggaccatgagaccatgggtagaaatcggttcctgggagaagccaaggtccctctccgcgaagttctcgctaccccctctctgagtgctagctttaacgcccccctgctagacaccaagaagcaaccaactggcgcatcacttgttttgcaggtgagctacacaccccttccaggggctgtcccactcttcccacccccgacccctctagaaccctctcccaccctcccagatcttgatgtcgtggccgacacgggcggggaagaagataccgaagaccaaggccttactggagatgaggctgaacccttcttagaccaaagcggtgggcccggagcccctacaacgcctcgcaaactgccaagcagacccccacctcactacccaggtattaagcgcaagcgatccgcaccaacctcccgcaagttgctttccgataagccccaagattttcagatcagagtgcaggtaatcgagggccgccagctaccaggcgttaacatcaaacccgtcgttaaggtgaccgcagccgggcagacaaaacgcacacgaatccataagggcaactcacccctgtttaacgagaccctgttctttaacctttttgactctcctggagaactttttgacgagccaatcttcatcactgtagtggacagcaggtccctgagaactgacgctctgctaggggaatttcgtatggatgttggaacaatttatagagagcccagacacgcatacctccgcaagtggctgttgctcagcgaccccgacgacttttccgctggcgcaagggggtacctgaagactagcctttgtgtacttggacctggtgacgaggcacccctcgagcgtaaagatccttccgaagacaaagaggacatagagtcgaatctgctgagacccacaggagttgctctcaggggggctcacttctgtctgaaagtgtttagagctgaagatttaccgcagatggacgacgccgtcatggacaacgttaaacagatttttggcttcgagtcaaataagaagaatttggtcgatccgttcgtggaggtctcgtttgccggaaagatgctatgctcaaagatactggaaaaaacagctaaccctcagtggaatcaaaatatcactttaccggctatgttcccttcaatgtgtgaaaaaatgcgaatacggataatcgattgggatagacttacccacaatgatatcgtcgctacaacctatttatcaatgtccaagatatctgcgcccggaggggagatcgaggaggagcctgccggcgccgttaaaccaagtaaagccagcgatttggatgattaccttgggtttctgcctaccttcgggccatgttatatcaacttgtatggttcccctagagaattcacaggtttccctgatccatatactgagctgaacacaggcaaaggcgaaggtgtcgcttacagaggccggctgctgctctccctggaaactaagttagtagagcatagtgagcaaaaagtcgaagacttgccagccgatgatatcctgcgagtggagaaatacctaagacggagaaaatattccctgtttgccgccttctatagcgctacgatgttacaggacgtagacgacgcaattcaattcgaagtgagtattggcaactatggaaataagtttgatatgacctgcctaccactcgcctcaacgacacagtactccagggccgttttcgacggatgtcattattattatctcccctggggaaacgttaaaccagtcgttgtgctttctagttattgggaagatatctcccacagaatcgaaactcaaaatcagctgctggggatcgccgatcgccttgaagccggcctcgaacaggtccatctggcactcaaagcccagtgtagcaccgaggacgtggattcgctggtggcccagctgactgatgaactgatagccggttgcagccaacctctgggcgacattcatgaaaccccatctgccacacacttggaccagtatttataccaattaaggacacaccacctctcccagattaccgaagctgccctggccctgaaattaggccatagcgagctcccagctgccttagaacaggccgaagactggctcttgagactccgggccctcgccgaggagccacagaacagcctgccagacattgtgatatggatgctacaaggagataagcgggtggcttaccaacgagttccagctcaccaagtgttgtttagtaggcgaggcgccaattactgtggaaagaactgtggaaagctccaaacaatcttcttgaaatatcccatggagaaagtgcctggtgctaggatgccggttcaaataagggtgaaactttggtttgggttgtcagtcgacgaaaaggaattcaaccaatttgccgaaggtaagctttcagtgtttgcagagacctacgagaatgagaccaaacttgctctagttggaaattggggtactacaggcctgacataccccaaatttagcgatgtgacaggaaaaatcaaactacctaaagacagctttcgccccagcgctggttggacatgggccggcgattggtttgtgtgcccagagaagaccctgctccatgatatggacgcagggcacctcagctttgtcgaagaagtgttcgagaatcagaccagattacccggaggacaatggatctacatgtcagataactatacggatgtcaatggcgaaaaggttttaccaaaagatgacattgagtgcccactgggatggaagtgggaggacgaggaatggtctactgatctcaatagagctgtggacgagcaaggttgggagtacagcattacaatcccccccgaacggaagccgaagcattgggtaccagcagagaagatgtactatacccaccggaggcggcggtgggtcaggcttagacgcagggatctgagccagatggaagcactaaaaaggcaccgtcaagccgaggcagagggagaaggatgggagtatgcgagcctgttcggctggaagtttcacctggagtataggaaaacagatgcgttcagacgacggagatggcggagacggatggaaccccttgaaaagaccggacccgcagcagtttttgctctcgagggtgccctgggaggcgtcatggacgacaagagcgaggatagcatgagcgtaagcaccctgagtttcggagttaaccggcccaccatctcttgcatttttgactacggcaataggtaccacctgagatgttatatgtaccaggctcgagacttagcagccatggataaagattccttctccgacccatatgccatcgtctcctttctccaccaatcgcagaagaccgtggtcgtgaagaataccctcaacccaacctgggatcagacgttgatcttttacgaaattgagatattcggggaaccagccactgtagcggaacaacctccttctatcgttgtggaattatacgatcatgacacttatggcgccgatgaatttatgggacgctgtatttgccagccctctttagaaagaatgcctagactagcatggtttcctcttaccaggggtagccaaccctccggcgaacttctggcctcttttgagctgattcagcgggagaagccggccatacatcacatcccaggctttgaagttcaggagaccagcagaattctggacgaaagtgaagacacagacctaccttaccccccacctcaaagagaggccaatatctacatggtgccacaaaacattaagcctgctctgcagcggaccgctattgagatactagcgtggggcctccgtaatatgaagagctatcaacttgcaaatatctcctcccccagcttagtcgtcgaatgcggaggccaaactgtgcagtcctgcgtgatccggaacctcaggaaaaaccctaacttcgatatttgcacattgttcatggaagttatgctgcctcgagaagaactgtattgtccccctattacagttaaagtgatcgacaacagacagttcggtaggaggccagtggtaggccagtgtaccatacgcagccttgaatcattcctctgtgacccttactccgccgagtctcccagccctcagggcggccccgacgacgtgagcctgctaagtcctggtgaagatgtattgatcgatatcgatgacaaagaaccactcatccctatccaggaggaagaattcatcgattggtggtccaaattcttcgcctcaatcggagagcgcgaaaaatgtgggagctaccttgaaaaagattttgatactctcaaagtgtatgatacacagctagagaacgtggaggctttcgagggactttcagatttttgtaacacgttcaagctgtatcgcggaaagactcaggaagagactgaagaccccagcgtcattggcgagttcaaagggctgtttaaaatttaccctttgcccgaggacccagctatacctatgccccctagacagttccaccaattagccgcacagggcccgcaagagtgcctagtaagaatatacatcgtgagagccttcggactacagccaaaagaccccaacggaaagtgtgacccctacattaagatctccataggaaagaaatctgtatccgaccaagacaactatattccctgcactctggagcccgtcttcggcaaaatgttcgaactcacctgtaccctccctttggaaaaagatctgaagatcactctctatgactatgatttgctctcaaaggatgagaaaatcggagagacggtggttgatcttgaaaatcgcttgctctcaaagtttggagcacgctgcggactaccccagacatactgcgtcagcggcccaaatcaatggcgggaccaattgcgaccctcacagctccttcacctgttttgccagcaacacagagtcaaggctccagtgtatcgtaccgacagggttatgtttcaggataaggaatattcaattgaagaaattgaagctggccgcattccaaacccccatctcggtccggtcgaagaacgattagcactccatgtcctccaacaacaaggcctggtgcccgaacatgtagaatctcgacccctctacagtccacttcaacctgatatagaacagggcaaacttcagatgtgggttgacctgtttccgaaggccctcggccggcctggacctccttttaacataaccccaagacgagcccgccggttctttctacgttgtatcatttggaacacaagggacgtgatattggacgacctgtccttaactggagagaagatgagtgatatttacgtgaaaggatggatgatcggattcgaggaacataaacagaaaactgacgtgcattatcgcagtttagggggtgaaggcaactttaactggcgctttatatttccttttgactatctgcccgctgagcaagtatgtacaatagccaaaaaggatgccttctggaggctggacaaaaccgaatctaaaattcccgcgcgggtggtgtttcaaatatgggataatgacaaattctcattcgatgattttctaggatctttgcagctcgatctgaaccgaatgcctaaacctgcgaaaacggcaaaaaaatgtagtttggaccagcttgatgacgcctttcacccagagtggtttgttagtctgttcgagcagaagactgtgaaagggtggtggccttgtgttgccgaagaaggtgagaaaaagatcctcgctggcaaactggaaatgacattagaaatcgtggccgagtccgaacacgaagagagaccagctggtcagggcagagatgagccaaacatgaacccaaaacttgaagatccaagaagaccggatacgtcgtttctctggtttaccagcccctacaagaccatgaagtttattttgtggcgtcgctttagatgggccataattcttttcatcattcttttcatcctgttacttttccttgcaatctttatctacgcattccccaattacgcagccatgaagctcgtgaaaccattctcctag

SEQ ID NO: 5198 - RNA, 6246 nt, synthetic construct
  misc_feature 1..6246: note = source = /note="Description of Artificial Sequence: Synthetic coding sequence"
  source 1..6246: mol_type = other RNA
atgctgtgctgcttattagtgagagcttctaacttgccaagcgcaaagaaagaccgccgatcagaccccgttgctagcctgactttcaggggagtcaagaaaaggacaaaagtgattaaaaactccgtcaaccccgtgtggaatgaaggatttgaatgggatctcaaaggcatccctcttgatcaaggctctgaactgcacgtagtggtgaaagaccatgaaaccatgggacgcaaccgtttcttaggagaggctaaggtgccccttcgcgaggtgctggcaacaccttccctgagtgccagctttaacgccccccttttagatactaaaaagcaacccaccggtgctagcctggtcctacaggtatcttacactcccctccctggagctgtaccccttttccccccccccaccccgcttgaaccttcacccaccctccccgaccttgatgttgtcgcagataccgggggtgaagaggatacagaagaccaagggcttactggcgacgaggccgagccattcctggatcaatctggaggacccggcgctcctaccactcctaggaaactgccgtcccgcccccccccccactatcccgggatcaaaaggaagcgatccgcacccacttcaagaaaactactctctgataaacctcaagacttccaaatccgggttcaagtgatcgagggacgccagctcccaggcgtcaatattaaaccagttgttaaagtcactgccgcgggtcaaaccaagcgtacacgcattcataaggggaattcccctttgtttaatgaaacactcttttttaaccttttcgactccccaggcgaactcttcgacgagcccattttcattacagttgtagatagtcgttccctgcgaacggatgcactgctaggtgagttccgtatggatgtcgggacaatctaccgtgagccccggcatgcttaccttcgtaaatggcttctccttagcgacccagacgatttcagtgcgggagcaagagggtatttgaagacaagcctgtgtgtgctcggacctggcgacgaagctccccttgaaagaaaagaccctagcgaggacaaagaggatatagagtcgaatcttctgagacctaccggcgtggcgcttcgcggtgcacatttttgccttaaggtattccgcgcagaagatcttcctcagatggatgacgcagtgatggataatgtgaaacagatatttggctttgagtctaacaaaaagaacctcgtcgacccctttgtggaggtgtcgttcgccggaaaaatgctatgctccaagatcctcgagaagactgccaacccacaatggaaccagaacatcacactcccagcaatgttcccatctatgtgcgaaaaaatgagaatcagaatcatcgattgggatcgtctcactcataacgacatcgtcgcaaccacgtacctttccatgtcaaaaatctccgcgcctggaggagagattgaagaggagcccgccggcgcagtgaagcctagcaaagcatccgaccttgacgactacctgggattcctgcccacatttggcccctgctacattaacctttacggaagcccgagggagttcaccggctttccagatccatatacagagctgaatactggcaaaggtgaaggcgtagcctatcgcgggagactgttactgagtttggagacaaaacttgtggaacatagtgaacagaaggtggaggatctgcctgctgatgacatcttacgggtcgagaagtacttacgacggagaaaatatagtttgttcgctgccttttattcagctacaatgctgcaagatgtggatgatgccatccagtttgaagtctccattggaaactacggaaacaaattcgacatgacttgccttcctctggcttccacaacacagtattcaagggctgtgtttgacggatgtcattattactacttaccttggggcaacgttaaacccgtggtagtgctgtcttcttactgggaggatatctcacaccggattgaaacacagaaccagctgctgggaatagccgaccgcctcgaagcaggacttgaacaagtgcacctagccctgaaagcacagtgcagtaccgaagacgttgactctctcgttgcacagctaacagatgaactgatcgcaggttgctcccagcctctcggcgatatccacgagacgccttccgccacgcatctggaccaatatttatatcagctgaggacccaccacctgtcgcaaattaccgaagctgccctagctctgaaattgggacattctgaattgcccgccgccctggaacaggctgaagactggcttctgcgcctccgagctcttgctgaagaaccccaaaactctcttccggacattgttatttggatgctgcagggcgataagagagtagcttaccagcgggtgccagcacaccaggtgctcttttccagacggggtgccaactattgcggaaagaactgtggaaaattgcagaccatctttctaaaataccctatggaaaaggtcccaggagctcgtatgccagtgcaaataagggtaaaactttggttcgggttgagtgtggatgagaaggagttcaatcaatttgctgagggcaaactgtctgtattcgccgaaacttacgaaaacgagaccaaattagctttggtagggaactggggaaccactggcctgacctaccctaagttttcagatgtgaccggcaaaatcaagttaccaaaagatagttttcgcccgtcggctggatggacctgggcaggagattggtttgtgtgcccggaaaaaaccctgctacacgatatggacgcaggacacctttcttttgttgaggaggtttttgaaaaccagacacgactgccaggaggacagtggatctacatgtctgacaactacaccgacgtcaacggcgagaaggtattgcctaaagatgatatagagtgtcccctagggtggaagtgggaggacgaggagtggtcgactgatctaaacagagcagttgacgagcagggatgggagtattctataactattccaccagagagaaagccaaagcattgggttcccgctgagaagatgtactacacacacagacgcaggcggtgggtcagactgcgacggagggacttgagccagatggaggcccttaagcggcatagacaagctgaagccgaaggagaggggtgggaatacgctagtttgtttgggtggaaatttcacctggagtaccgcaagacggacgcattcagacgtcggcgatggaggaggcggatggaacctcttgagaagacaggtccagccgcagtatttgccctcgagggagctctcgggggagtgatggatgataagagtgaggattccatgtcagtttcgaccttgtcgttcggcgtaaatagacccacaatctcctgtatcttcgactacgggaacagataccacttgcgttgttacatgtaccaagcccgtgacctcgccgcgatggataaagactctttctctgacccctacgccatcgtcagcttccttcatcagtcccagaaaacagtcgttgtgaaaaataccctgaacccgacttgggaccaaacgctaattttctacgagattgagatcttcggggagcccgctacagttgccgagcagccaccaagcatcgtggtggagctctatgaccacgatacctacggcgctgacgaatttatgggtcgttgcatttgccaaccctctctcgagcgtatgcctcggcttgcttggtttcccctaacacggggttcacagccttccggagagctactggccagctttgaacttattcaacgtgagaaacccgctattcaccacatcccaggctttgaagtgcaggagactagccgaatccttgatgagagcgaggacacagatctgccctatcccccaccacagcgagaagccaacatttatatggtccctcagaacataaagcccgcccttcaacggacggcaattgaaattctcgcatggggcttgaggaacatgaagtcatatcagctggccaatattagtagcccctcactggtcgtagagtgtggcgggcaaactgtccagagctgtgtgataagaaacctgcgaaaaaaccccaattttgatatttgtactctgttcatggaagtgatgctgccaagagaagagctttattgcccacctatcacagtgaaagtaatcgacaatagacagttcggacggagacccgtggtaggccagtgcacaatccgtagtctcgagtcctttctctgtgatccatactcggcagaaagcccaagcccgcagggcggcccagacgatgtgtcactattatctccaggcgaggacgtgcttattgacatcgacgacaaagaaccccttatcccaatccaggaagaagagtttattgattggtggtcaaagttcttcgcaagcattggtgaaagagaaaaatgtgggagttatctggagaaagacttcgatactttaaaggtgtatgatacccagctggagaatgtcgaagcattcgagggtttatcagatttttgtaacacatttaagctctacagaggcaaaacacaggaagagacagaagatcctagcgtgattggtgagttcaaaggcctatttaagatttatccattgcccgaagatccggccatccctatgcctccccggcaattccatcagctcgctgctcagggccctcaggaatgcctggttcggatatatatcgttcgcgcatttggcctgcagccaaaggatcctaacggcaagtgcgatccgtatattaagatttctatcgggaaaaaaagtgtcagtgatcaggataactacattccatgtactctggagcccgtcttcggcaagatgttcgaacttacatgcactctgcccctggaaaaggatctgaaaattaccttgtacgactacgatctactgagcaaagacgaaaagatcggcgagaccgttgtggatttggaaaaccgtttgctttcaaagttcggggcccgatgcggcctgccacaaacgtattgcgtgtccggacctaaccaatggagagatcagttaaggccttcccaactgctacatcttttctgccagcagcatcgcgtcaaggcaccagtgtatagaactgatcgggtaatgtttcaggacaaagaatattctatcgaggagatcgaggccgggcgcattcccaatcctcatctggggcctgtagaagagcggctggcactgcacgtattacaacagcaagggcttgtgccagaacacgtagaatccagacccctctactcacctctacaacccgatatagaacaggggaagttacagatgtgggtggatctattccctaaggctctgggccgtccaggacctcccttcaacattacccccagacgcgcccgtcgatttttcctgagatgcattatctggaacactagggacgtaatcctcgacgacctgagtctcaccggtgaaaaaatgtccgatatttacgtgaaaggatggatgataggctttgaagagcacaagcagaagacagatgtgcactacagaagtctcggcggcgaaggaaacttcaactggcgctttattttcccttttgattaccttccagcagaacaggtgtgcacaattgcgaaaaaagacgccttttggcgattggacaaaactgagtcaaagataccggcccgggtcgttttccagatctgggacaatgataagtttagcttcgacgactttttgggctccctccagttggacttgaatagaatgccaaaacccgcgaagactgccaagaagtgttccctcgaccaattggacgacgcgtttcatccagagtggttcgtcagcttatttgaacagaagacagtcaaaggttggtggccgtgcgtcgcagaggaaggtgaaaagaaaatccttgctggcaaattagaaatgactctcgagattgttgccgagtccgagcatgaggaacggccggccggtcaaggacgcgacgaacccaatatgaaccctaagctagaggaccctaggagacccgataccagttttctttggtttacctcaccctataagacaatgaaatttatactgtggcggagatttcgatgggctatcatcctttttatcatcctgttcatactgcttctgtttctggccatctttatctacgctttccccaattatgcagcaatgaagcttgtgaaacccttctcttag

SEQ ID NO: 5199 - RNA, 6309 nt, synthetic construct
  misc_feature 1..6309: note = source = /note="Description of Artificial Sequence: Synthetic coding sequence"
  source 1..6309: mol_type = other RNA
atgctttgttgcctcctggtgagagcctcgaatctgcctagcgccaagaaagatcgtagaagtgacccagtggcctccctgacttttcggggcgtgaaaaagcgaaccaaagttatcaagaacagcgtcaacccagtgtggaacgaaggctttgagtgggacctcaagggcatccccctggatcagggctctgagctacatgtggttgttaaagaccatgagacgatgggcagaaacaggtttctaggagaagccaaggtccctctccgcgaagtcttagctactccttccctgagtgcctcttttaacgcccccctgctagatacaaaaaaacaacctacaggcgcatcactcgtcttgcaggtgagttacacaccactaccaggcgctgttcccctcttcccaccacccacacctctcgagccctccccaactctgcctgacctagatgttgtcgcggacaccggaggggaagaggataccgaagatcaaggtttgacaggagacgaagctgagcctttccttgaccaaagcggcggacctggggcacctacaacacccagaaagctgccttcccggcctccccctcattatccaggcatcaaacgaaagcgtagcgcacccacctcacgcaaacttttatctgacaagccccaggatttccagatacgggtgcaagtgattgagggaagacagctcccaggggtaaatatcaaaccagtagttaaagtgacagctgcaggccagaccaagcgcaccagaatccacaagggcaacagccccctgttcaatgaaacattgtttttcaacctcttcgatagtcctggcgaacttttcgatgaaccaatctttattacagtggtggatagcaggagtttgaggactgacgcgttgcttggtgagttccgaatggatgtggggactatttacagggaaccccggcatgcatatctgaggaaatggctgttactatctgatcctgatgatttctccgctggagcccgcggatatctgaaaacatctctttgcgtactcggaccaggtgacgaagctcccctcgaacggaaggatcccagcgaggacaaagaagacatcgagtccaaccttttacgccctactggagtggcacttcgcggcgcacatttctgtctgaaggtgtttcgagcagaagacttaccacaaatggacgatgccgtcatggacaatgtgaaacaaatttttggttttgagagcaacaaaaagaacctagttgatcccttcgttgaggtttctttcgccggcaagatgctttgttccaaaattctggagaagacagcaaatcctcagtggaatcagaatatcacccttcctgctatgttcccgtccatgtgtgaaaaaatgagaattcggatcattgactgggaccgactgacccacaatgatattgtcgccaccacctatctgtccatgagtaaaatatctgcgccaggaggagaaattgaggaagagcctgctggtgccgtgaaaccgagtaaggcctccgaccttgatgactaccttgggttccttcccacattcggaccctgttacataaacctctatggttctcctcgcgaattcactggattcccggacccttacaccgaacttaatacaggcaagggggagggcgtagcatatcggggtcgcctgctgctgtctctcgaaactaagctcgtggaacactctgaacaaaaagtcgaagacctccccgctgacgacatcctgagagtagagaaatatcttcgcagacgcaaatacagcttattcgcagccttctactcagcgacaatgctgcaggacgtggatgacgcgattcagttcgaagtgtccatcgggaattatggtaacaaatttgatatgacatgcctcccattggcatccaccacccaatattcaagagcagtctttgacggctgtcactactactacctgccgtggggcaacgttaaacccgtagtggtgctatccagctactgggaggacatttctcataggatcgaaacacagaaccagctattggggatcgccgacagactagaggccggactagaacaggtgcacctcgcccttaaagcccagtgctcgacagaagacgtggattctctagtggctcagctgaccgatgaactcattgctgggtgttcccaacctctcggcgacattcacgagaccccgtctgccacacacctcgaccagtatctctatcaactacgaacccaccatctctcacaaatcaccgaagctgcgttagcactgaaactgggtcattcagaactacctgctgccttggagcaagccgaggattggttattgagactcagggccctggcagaagagccccagaactccctgcccgatatcgttatttggatgttacaaggtgataaaagggtagcttatcaaagagtccctgcacaccaagttctctttagtagaaggggagcaaactattgcggaaaaaattgtggcaagctgcagaccattttcttgaaatatcccatggagaaagtacctggagcccggatgcccgttcagatcagagttaagctgtggttcggtctttccgtggacgaaaaagagtttaaccagttcgccgagggcaagttaagcgtgtttgctgagacttacgaaaacgagaccaagctggccttggttggaaactggggcacaactggactaacttaccccaaattcagcgatgtaaccgggaaaattaaactgcctaaagattctttcaggcccagcgctggttggacatgggcgggggattggttcgtctgcccagaaaagaccttgctacacgacatggatgccggccacctaagctttgtcgaggaggtgtttgaaaaccagaccagattacccggaggacagtggatttacatgagcgacaactatacagatgtgaacggagaaaaggtgttgccgaaagatgatattgagtgtccgcttgggtggaagtgggaagatgaagagtggtctaccgatcttaacagggctgtggacgaacaaggatgggagtattccataacgattccaccagagcgcaaacccaaacattgggtccccgctgaaaaaatgtattacacacaccgcagaagacgctgggtaaggctgagacgcagagacctaagtcagatggaggcacttaagagacataggcaggccgaggctgaaggcgaaggatgggagtacgcatctctgtttggatggaagtttcacctagaataccggaagactgatgcattcagacgtaggcggtggcgtcggaggatggagcctttagagaaaactggccccgccgcagtctttgcccttgaaggagccctagggggtgtcatggacgataaaagcgaggattcgatgtccgtatctacactgtccttcggagttaacagaccaaccataagttgcatcttcgattatgggaatagataccatcttagatgttatatgtatcaggcacgcgatctcgcagccatggacaaggactcattcagcgacccctacgcaatcgtgagctttttgcatcagtctcagaagaccgtcgtggtcaaaaacacactaaatcctacttgggatcaaacactgattttttacgagattgagattttcggcgagcctgctacagtggccgagcaacccccctcaatagtagttgaactttatgaccacgatacatatggtgctgacgagttcatggggaggtgcatctgccaaccatccctggagcgaatgccccgacttgcctggtttcctctgacacgaggctctcagccctccggagagttgctagctagctttgaactgatacagagagagaaacccgccattcaccatatccctggtttcgaagtccaagaaacgtctcgcatactcgacgagagcgaagacacagacctcccatacccgcctccccagagagaggccaacatctatatggtgccccaaaacataaaaccggccctccaacgcactgcaattgaaatactggcatggggtctgcgaaatatgaaatcgtaccagttggccaacatctcctctcctagtctggtcgttgaatgcgggggccaaacggtccagagctgcgtcatcagaaacctccgtaaaaaccctaattttgacatctgcacacttttcatggaggtgatgctgcctagagaagaactgtactgccctcctattacagtaaaggtaatcgacaaccgacagtttggacgacgcccagtggtcggacagtgcacaattcgctccctagaaagcttcttatgtgacccttacagcgccgagtcaccgtcaccacagggcggccctgatgacgtgtccctcttatcacccggcgaggatgtactaattgacatagatgacaaggagccacttatcccaatccagttagccgacgggttgtcgagtttagcacccactaatacagcttcacctcccagttcaccccacgaagaagagtttatcgattggtggagtaagttttttgcctcgatcggagaaagagaaaaatgcggctcttacctggagaaggatttcgataccctgaaggtatacgacacccagcttgagaacgtggaggccttcgaagggctgtctgatttctgcaatacatttaaactttaccgtgggaagacgcaagaagagaccgaggatccttctgttatcggcgaattcaaaggactgtttaaaatctatccactgccagaggaccctgctatcccgatgccacctcgtcagttccaccagttagctgctcaaggccctcaagaatgcttggtgcggatctacatcgtgcgagctttcggccttcagccaaaagaccctaatggcaaatgcgatccatacattaaaatcagcatcggtaaaaagtcagtttcagatcaggataattacataccatgcacactggagccggtctttgggaaaatgttcgaactcacctgtacacttccactggagaaggatctgaaaattacactctacgactacgatcttctgtcaaaagatgagaaaattggcgaaactgtcgtcgatcttgagaatagactgctgtcgaagtttggcgcaaggtgcggattgccacagacttattgcgtttccggacccaaccagtggcgggatcagctgagaccgagccagcttcttcacctattttgccagcagcatcgagtgaaggccccagtttatagaaccgatcgcgttatgttccaggataaggaatactctatcgaggaaatcgaagccggccggatcccaaaccctcatctggggcctgtagaagagagactcgctctgcatgtcctacagcagcagggactcgttccagaacacgtagaaagccgtcccctctacagtccacttcagccggatatcgagcagggcaagcttcagatgtgggtggatttattccccaaagccttggggcggcccggaccccctttcaacattacccctagacgggccagaaggttctttctcagatgtattatttggaacaccagagatgtgatactcgatgacctctctttaactggtgaaaaaatgagcgacatatatgttaagggatggatgattggattcgaggaacataaacaaaagacagacgttcactacaggtctctcggcggcgagggcaactttaattggagatttatatttcccttcgactaccttccagctgagcaggtttgtaccattgctaagaaagatgccttttggagactcgataaaactgaaagcaagattcctgcccgcgtagtctttcaaatatgggataatgataagttctcttttgacgacttcttaggatctctccagttggatctcaacagaatgccgaaaccagccaaaacagccaagaaatgttctctcgatcaactggatgacgcttttcacccagaatggttcgtgagtctgttcgagcagaagaccgtaaaaggttggtggccatgtgtggccgaggagggggaaaagaagatactcgccggcaaattagaaatgacattggaaatcgttgctgagagcgagcatgaggaacgccctgccggccagggccgcgatgagcctaatatgaaccccaaattggaggatcctagaagacccgacaccagctttctgtggttcaccagtccttacaaaactatgaagtttattttgtggagacgatttcgttgggccattatcctatttatcattcttttcatcctcttactgtttctggccatattcatctacgctttcccgaattatgcagctatgaaactcgtgaaacctttctcctag

SEQ ID NO: 5200 - RNA, 6357 nt, synthetic construct
  misc_feature 1..6357: note = source = /note="Description of Artificial Sequence: Synthetic coding sequence"
  source 1..6357: mol_type = other RNA
atgctgagagtcttcatcctctatgctgaaaatgtgcatacccccgatacagacatttccgacgcttattgtagtgccgtgtttgccggtgttaagaagagaacaaaggtgatcaagaattctgttaacccggtctggaacgaaggatttgaatgggatctgaagggcatcccccttgatcaaggctcagaacttcacgtggttgtgaaggaccacgaaaccatggggaggaataggttcctgggagaagctaaagtaccacttcgtgaagtcctcgccaccccatcactgtctgcctcattcaacgccccacttctggatacaaagaaacaacctaccggggcatcactcgtgctacaggtgagctacactccactgcccggtgctgtcccactctttccaccaccaacccccctcgagccctcccctaccctgccggacctggatgttgtcgccggaggcggccagtctagagccgaaacctggtccctgctctcagactctaccatggataccaggtacagcggaaagaagtggcctgctccaactgatacaggaggcgaggaagatactgaagaccaaggactgaccggagacgaagccgaacctttcctggaccagtcaggcggacccggcgcacccacaacacctagaaaactgccctcccgacctcctccccattatcccggcatcaagcgtaagagaagcgctccgacatctcgcaagttactatcagataagcctcaagacttccagatccgcgttcaagtcatcgaggggcggcaattgcctggcgtgaacatcaagcctgttgttaaagtcaccgccgccggccagaccaaaagaacacgaatacataagggaaactcgccgctattcaatgaaactcttttttttaacctcttcgattcccccggtgagctattcgacgagcctattttcataacagtggtggacagccgctctttgaggactgacgcccttttaggcgaatttcgcatggacgtcggaaccatctatcgcgagccgcgccacgcatatttgagaaaatggctgctgctctcagaccctgatgacttctcagccggggcacgcgggtatctcaagacatcactctgcgtgttaggacctggagatgaagcccccctagagagaaaggatccgtcagaagacaaagaagatatagaaagcaacctactgcgacccacaggcgttgcactccgcggggctcatttctgcctgaaagtgttcagagccgaggacttgcctcagatggatgacgcagtgatggacaacgtgaaacagattttcggattcgagtcgaacaaaaaaaacctcgttgacccattcgtagaagtatcattcgctggtaaaatgttgtgttcgaagatcttagagaagacagctaatcctcaatggaatcagaatataaccctacctgctatgtttccatcaatgtgcgagaaaatgagaatacgaatcattgactgggacagattgacacacaatgacattgtagctaccacgtacttatctatgagcaagatctccgctcctggcggcgaaatcgaagttgatgattaccttgggtttctgcccacattcggcccatgttacataaatttgtacggctctccaagggagtttacaggatttccagacccttacaccgagctgaacacgggaaaaggtgaaggcgttgcctatcggggaagactactcttgagtttggagacaaaactggtggaacactctgaacaaaaggtcgaagatctcccggccgacgacatactgagagtggaaaagtatcttaggcgccgaaaatacagcttgtttgccgctttttacagtgccaccatgcttcaagatgtggatgacgctatacagttcgaagtatccatcggtaactacggaaacaagtttgacatgacatgcttgccactcgctagcactacccagtactctagagccgtctttgatggatgccactactattatttaccttggggcaatgttaaaccagtggttgtgttatcatcgtattgggaggatatcagtcaccgaatcgaaacccagaatcagctattaggaatcgccgaccgactcgaagcggggctggagcaagtgcatctggcactaaaggcccagtgcagcacggaagatgtggacagtctagtggcccagcttactgatgagctcatcgcaggctgttctcaaccacttggcgacattcacgagactccttcagcgacccacctagaccaatacttataccaactgaggactcaccacttatcccagatcactgaggcagcattagcgcttaaactagggcacagcgaactccctgcagctcttgaacaggctgaagactggctgcttaggttacgggctctcgccgaagaaccccaaaatagcctgcctgatattgtaatctggatgctgcagggggacaagagagtggcatatcagcgagtgccagcccatcaggtcctgttttcacgacgcggcgctaattattgtggcaaaaactgtggtaagctacagaccatcttcctaaaatatcccatggaaaaagtccctggtgccaggatgcctgtgcagatccgtgtaaaactgtggtttggactgtcagttgacgaaaaggaatttaatcagttcgcagaaggcaaactatccgtgttcgccgaaacctatgaaaatgaaacaaaattggccttggttggaaattggggcacgacaggactgacatacccaaaattcagtgacgtaactggcaaaattaagcttccaaaagattcattccgaccatcagcgggttggacttgggccggcgattggttcgtgtgtcctgaaaaaacgctgctccacgatatggacgccgggcatctctcatttgttgaagaggttttcgaaaatcagacccgtcttccaggggggcaatggatctatatgagtgataactataccgatgtgaacggtgagaaggtgctgcctaaagatgatatagagtgccctcttggatggaaatgggaagatgaggaatggtcaaccgacctgaaccgggccgtcgacgaacagggctgggagtatagcatcacgattcccccagaaagaaaaccaaaacattgggtcccagcagagaagatgtactacactcacaggagacgtcgctgggtgagacttaggagaagagacctgtcacagatggaagccctgaagagacaccgacaggctgaagccgagggcgagggttgggaatacgcaagcctgtttggctggaagtttcatctggaatacaggaagacagacgccttcagacgtcgaagatggcgaaggaggatggaacccctggaaaaaaccggcccagccgccgtgtttgccctggaaggtgctttaggaggcgttatggatgataaaagcgaagattctatgtccgttagtaccctctcctttggagttaaccgtccaacgatttcatgtatctttgattacggcaaccgctaccacttacggtgttatatgtaccaggcaagggatctggctgccatggataaggactcattctctgacccctatgcaatagtgtcattcctgcatcaaagccaaaagactgtggtcgttaagaatacccttaatcctacttgggatcaaacactgatcttttatgaaatagaaatctttggtgagcccgcaacagtcgcggaacaacccccaagcattgtggtcgaattatacgatcacgacacatacggcgcagacgaattcatgggaagatgtatttgccagccctctctcgaacgcatgccaagactggcctggttcccccttaccaggggcagtcaaccttccggggagcttctggcttcctttgagctcatccagcgagaaaagcctgcaattcaccatatcccaggatttgaggtgcaagagaccagccgcattctggatgaatccgaggacaccgacctcccttaccccccccctcagagagaagcgaacatttatatggtaccacagaacatcaaacctgccctgcaacgaacagctattgaaatcctggcctggggactgaggaatatgaagtcctaccaactcgcaaacattagctcaccgtcattagttgttgaatgcgggggccaaacagtccagtcttgtgtgataagaaacctgcgaaagaaccctaacttcgacatttgtactctcttcatggaagtcatgttaccaagagaggagctatactgccctccaatcaccgtgaaagtgatcgataatcggcagttcggcagaagacctgtcgtcggtcagtgcacaattcgcagtcttgagagttttttatgcgacccctactccgccgagtctccctcaccccaagggggccctgatgacgtgagcctgctttccccaggcgaggacgttcttatcgacattgatgacaaggaaccattaatccctatacaactggccgacggcctgagctcccttgcgcccacaaacacggccagcccccctagctcaccccatgaagaggaatttattgattggtggtctaaattctttgcctctatcggtgaaagagagaagtgcgggtcttacctggaaaaagactttgacacattgaaagtgtatgacacgcagctggagaatgtggaagcttttgaaggtttaagtgacttctgtaatacctttaagctgtacagaggtaagacccaagaagagacagaggaccctagcgtcatcggcgagtttaaaggactctttaagatctacccactgcccgaggatcctgccattcctatgccccctcggcagttccatcagttagcagcacagggcccccaggagtgcttagtccgaatctacatcgtccgagcatttggcttgcagccaaaggatcctaatgggaaatgcgacccctacattaaaataagtattggaaaaaaatcagttagcgatcaggataactacattccttgcaccctggagcccgtctttggcaaaatgtttgaactaacttgtacattaccgctcgagaaagatctgaaaatcaccctgtacgactacgacctacttagcaaagatgaaaaaattggggagaccgtcgtcgatcttgaaaaccgcttgctgagtaagtttggcgctcgctgcggcctcccacaaacctactgtgtgtccggccctaaccaatggcgggatcagttgcgtccctcccaactgctgcaccttttttgccagcagcatagagttaaagcccccgtgtaccgtaccgacagagtgatgtttcaagataaagagtattctatcgaagagattgaggcaggtagaattccgaatccgcacctcggcccagtcgaagagcgattagccctgcacgtgttacagcaacaaggcctggtacccgaacacgtcgaatccagacctttgtacagtcccctccaacctgatatcgaacagggtaagctgcaaatgtgggttgatctcttccccaaggcattgggccgccccggaccaccgttcaatatcacaccacgtcgagcgcggcgcttctttctccgatgtatcatttggaatacacgagatgtgatcctggatgacctcagtctgaccggcgaaaagatgtcagatatctatgttaaaggatggatgatcggcttcgaggagcataagcagaaaaccgacgttcattacaggagccttggaggcgagggaaactttaattggcgatttattttcccattcgactatcttcccgcggaacaggtctgcacaattgccaaaaaagacgcattctggaggctcgacaaaaccgaaagcaagatccccgcccgcgtcgtgtttcagatttgggataacgacaagttcagcttcgatgattttctaggatcccttcaattagaccttaatcgcatgccgaaaccagctaaaacggccaaaaagtgcagtctggaccagctggacgacgccttccaccctgaatggttcgtatctctcttcgagcagaaaacagttaaaggatggtggccgtgtgtagccgaagagggagaaaagaaaatactggcaggaaagctggagatgacacttgaaattgtggctgaaagcgaacatgaagaaagacctgccggccaaggtcgtgatgaaccgaacatgaatccaaaacttgaggacccaagacgaccagatacaagttttctatggtttacatcgccttataaaacaatgaaattcatcctctggcgccggttccgatgggctataatccttttcattattctctttatactcttgttgttcctagccatctttatctatgcatttcccaattacgccgccatgaaacttgttaagcctttcagttag

SEQ ID NO: 5201 - RNA, 6339 nt, synthetic construct
  misc_feature 1..6339: note = source = /note="Description of Artificial Sequence: Synthetic coding sequence"
  source 1..6339: mol_type = other RNA
atgctctgttgcctcttagtccgtgctagcaatctgccaagtgcgaagaaagacaggcgttcagacccagtggcaagcctcacgttccggggggtcaaaaaaagaacaaaggtcataaaaaattcagtcaaccctgtctggaatgaagggtttgagtgggatctgaagggaataccgttagaccagggaagtgagctccacgtggttgttaaggaccatgagacgatgggtagaaaccgatttctaggcgaggccaaggtaccactgcgggaagtgctggcaactccatcactaagcgcttctttcaatgcccccttgctcgataccaaaaagcagcctaccggggcaagtcttgtcctccaagtgtcctacaccccactgccaggtgcggtacccctcttcccccccccgacaccactcgaaccttcgcctaccctccctgaccttgacgtcgtcgctggcggcggtcagagtcgcgccgagacttggtccctgctttcagattcaactatggatacacgctattcaggcaaaaaatggcctgcccctaccgacaccggcggagaagaggacaccgaagaccaaggtttaacgggcgatgaagctgagccattccttgaccagtccggtgggcccggtgcacccaccactcctagaaaacttcccagccggccccctccccactacccaggcatcaaacgaaaaagatccgctcccacgtccagaaagctcttgtccgataaaccccaggacttccaaattagagttcaggtcattgaaggtcggcagcttcccggcgtgaatattaagcccgtggtcaaagtcaccgccgctgggcaaactaagcgaacccgaatccacaagggcaattctccattgttcaatgaaactcttttttttaacctgttcgattctcccggcgagctcttcgatgagcccatattcattactgttgtcgactctcgaagtttgagaactgatgcgttattgggagagttccgtatggacgtgggcaccatttatagagaaccccgccatgcctacctcagaaagtggttgctattatcagatcctgacgatttctctgccggggcccgtggctacttaaagacttccctctgtgttctcgggccaggagatgaagccccacttgaacgcaaggatccttccgaagacaaagaagatatcgaaagtaatttgctaaggccaacgggtgtcgccctcagaggagcccatttttgtcttaaggtatttcgggccgaggaccttccccaaatggacgacgccgtgatggataatgtgaaacagatctttgggttcgagagcaacaagaaaaacctggtggacccattcgttgaggtttcttttgccggaaagatgctctgtagcaagatactggagaaaacagccaatccccaatggaaccagaacattaccctgccagcaatgtttccgtctatgtgtgagaaaatgaggataaggataatcgactgggacagactgacacacaatgatatcgtggctaccacctacctgtctatgagcaagatcagcgcccctggaggggaaatcgaagaagagccagctggagccgttaagccttcaaaggcctctgaccttgatgattacctcggatttctacctacatttggaccatgctacatcaacctctacggatccccgcgcgagtttacaggctttccggatccttacacagagttaaatacgggtaagggcgagggagttgcctaccgggggcgtctcttactttctctggaaacaaaactagttgagcatagcgagcaaaaagtggaggatcttcccgccgacgatatcctccgggtcgaaaaataccttcgcagacgaaaatacagccttttcgctgccttttattccgctacaatgctgcaagatgtagacgacgctatccagtttgaagtatctataggcaattacggcaataaatttgacatgacatgcctgcctctcgcgtccacaacgcagtatagccgcgcggtcttcgacggctgtcattattactatcttccatggggtaacgttaagcctgtcgtggtgctctccagctattgggaggacatttcacaccggattgagacccagaaccagctgctcggaatcgcggacagattagaggctggcctcgagcaggtgcacctcgcgcttaaggctcagtgtagcaccgaagacgtggactccctggtcgcacaactcacagatgagctgatcgccggatgtagccagcccttaggagatatacatgaaacgccgtcagctacacacctcgaccagtacctatatcagctaagaacacaccatttgtctcagatcaccgaagccgctctcgcactaaagctcggtcacagcgaactcccagccgccctggaacaggccgaggactggttgttgcgactcagggctctcgctgaagaaccacagaactcactacccgacatcgtgatctggatgcttcaaggagacaagcgtgtagcttaccagcgcgtgcctgctcatcaagtgctgttcagccggcgcggtgctaactattgtggcaaaaactgtgggaaactccagaccatatttctcaagtacccaatggagaaggtgcctggtgcccgtatgcccgtgcagatcagagttaaattatggttcggtttgagcgtagatgaaaaggaatttaatcaatttgccgagggaaaattaagcgtgttcgcagaaacttacgaaaacgagacaaagttagccctcgtgggcaattgggggacgaccggactgacataccccaaattcagcgacgtcaccgggaaaattaagctccctaaggacagcttcagaccaagcgccggttggacctgggccggagattggttcgtatgtccagaaaagacactactgcatgacatggatgccggccacttatcattcgtggaggaggtcttcgaaaaccagaccaggctgccaggcgggcaatggatatacatgagtgacaactacaccgacgtcaatggagaaaaggtcctgccaaaggatgatatcgaatgtcctctgggttggaagtgggaggatgaggaatggagtactgacctcaatagagccgtagacgaacaaggttgggaatacagcattaccatcccccctgaacggaagccaaaacactgggtaccagcagaaaagatgtattatactcatcgcagacgaagatgggtccggttaaggagaagagacctgtcccagatggaagcactaaagagacatcgccaagctgaggccgaaggtgaaggatgggagtatgctagtctgtttggttggaaatttcatcttgaatacaggaaaaccgatgcattcagacgccggcgatggagaagaagaatggagccgctggagaagacagggccagctgctgtgtttgcattggagggcgcgctgggaggtgtgatggacgataagagtgaggatagtatgtccgtgtctaccctgtcatttggagtcaacaggcctacaatttcatgtatttttgattatggtaatcggtaccacctcagatgctatatgtatcaggctagggacctggccgctatggataaagattctttttccgacccttacgccatagtgtctttcctccatcagagccagaaaacagtagttgttaaaaatacactcaatcccacctgggaccaaaccctgattttctatgagatcgaaatattcggcgagcctgctaccgttgctgaacaaccaccaagcatagtagtcgagttgtatgatcacgacacatacggtgccgatgaattcatgggacggtgcatttgccagcctagtctggaaaggatgccaaggctagcgtggttccccctcacaagaggaagccaaccttcaggagagcttttggcttctttcgagctgatccaaagagagaaaccagccatccaccacatccccggattcgaagtccaggaaaccagtaggattctcgacgagagtgaagacacagatttaccgtatccaccaccacagagggaagcgaatatctacatggtgccgcagaatattaagcccgcgttgcagagaactgccatagaaatcttagcttggggactgaggaatatgaagtcgtaccagttagccaatatatctagtccctccctcgtggtcgagtgtgggggccaaactgtccagtcctgtgtgatccgaaacctacgtaagaacccaaactttgatatctgcactttgttcatggaggtgatgctgccacgagaagaactgtattgcccccctataaccgtaaaagtgatcgataacaggcagttcggacgtcgcccagtggtgggtcagtgtacgatcaggtcacttgagagcttcctgtgcgacccctattcagccgagagcccatctccacaaggtggccccgacgacgtgtctcttctgtcccccggagaggacgtccttattgacatagatgacaaggagcctttaatccccatccaagaagaagaatttatagactggtggagcaagttcttcgccagtatcggagaacgggaaaaatgtgggtcataccttgaaaaagactttgacacactgaaagtgtacgacactcagttggaaaacgtggaagcttttgaaggcctctcagatttctgcaacacctttaagttataccggggaaagacacaggaagaaacagaagatcccagcgtaattggcgaatttaaaggcctgttcaaaatataccccctccccgaggaccccgccatccccatgccaccgagacagtttcatcaactggcggcgcaagggccccaagaatgtctggttaggatttatattgtcagagcgttcggtttgcagcctaaagaccctaacggtaaatgcgatccgtacatcaagatttctattggaaagaagagtgtaagtgaccaggacaattatattccctgtaccctggagccggtgtttggcaaaatgttcgaactgacatgtacactgcctcttgagaaagaccttaaaattaccctttatgattatgatttgctcagtaaggacgagaagattggcgaaaccgtcgtggatttagaaaaccgccttctgtctaaatttggcgctcgctgtggactgcctcagacttactgtgtgtccgggccaaatcagtggcgggaccagcttagaccctcccagctcctccacctcttttgtcagcagcacagggtcaaggccccagtgtacagaaccgaccgcgtgatgttccaggataaagaatacagtatcgaagaaatcgaagccgggcgtatacccaatccacacctcgggcctgttgaggaacggctggcgctgcacgtcttgcaacaacagggactagttcccgaacatgtcgaaagccgtcctctgtattcacctctacagccggacattgagcagggaaaactgcagatgtgggtcgaccttttccccaaggctctcggacgccccgggcctcctttcaacatcacacccaggagggcaaggcgcttcttcttacgctgcatcatttggaatacacgagatgtgatcctggacgatctatcgctgacgggtgaaaaaatgagtgatatatacgtaaaaggatggatgataggatttgaggaacataagcagaaaaccgacgtgcattaccgttctcttggcggggaaggaaacttcaactggagattcatattccccttcgattatcttccagcagaacaggtttgtactatcgccaaaaaggatgcattctggagactcgataaaacagaaagcaagatccccgccagagtcgtgttccagatctgggataacgataagttctcttttgatgacttcttaggttcgttgcaactcgatctcaatagaatgccaaaaccggcaaaaactgccaagaagtgtagtttggaccagttagatgatgctttccatcccgaatggtttgtcagtcttttcgagcagaaaactgtaaagggttggtggccatgtgtggccgaagagggggagaaaaaaattttagccggcaagctggaaatgacactggaaatcgtggccgagtccgagcacgaagaaagacccgctgggcaaggccgagacgagcccaatatgaatcctaaactggaagaccctcggcggcctgacacctccttcttgtggtttacatctccatataagaccatgaagttcattctgtggcgacgttttcgatgggcaatcatacttttcatcatactgttcattcttctcctgtttctcgcaatcttcatttacgcttttcccaattacgcagccatgaagttagttaaaccattctcatag

SEQ ID NO: 5202 - RNA, 6267 nt, synthetic construct
  misc_feature 1..6267: note = source = /note="Description of Artificial Sequence: Synthetic coding sequence"
  source 1..6267: mol_type = other RNA
atgctgtgttgcctgctagtccgcgcttctaacctcccgtctgctaagaaagaccgacgctctgatcctgttgcctcgctgacgtttcgaggggtcaaaaagcgtactaaggtcattaaaaacagtgtgaacccggtatggaacgaaggtttcgagtgggatctcaagggcatccccctagaccagggctccgagttacacgttgtggtaaaggatcacgagactatgggccgcaaccgtttcctcggcgaagcaaaagtgcccctgcgcgaagttttagccaccccttcattgtccgccagcttcaatgcgcctctgctggataccaagaaacagcctactggagcaagcctcgtgctgcaggtcagctacacaccattgccaggcgctgtacctctgttccctccccccacgccacttgaaccttcccctaccctaccagaccttgacgttgtggcagatactggaggcgaagaagataccgaagatcagggtctgactggagacgaagccgaaccgtttttagatcaatctggaggccccggcgctcctaccacaccccgtaaactcccctccagacctcctccacactacccagggattaaaagaaagcggtctgccccaacctctagaaaactcctatctgacaagccacaggatttccagattcgggtccaagtgattgaggggcggcagctgcctggggtaaacataaagcctgtggtcaaagtgacggctgctggacaaactaagcgaacaagaatacacaagggcaactctccactgttcaatgaaacactgttttttaatctgtttgactcccccggggaattatttgatgaaccgatctttattaccgttgtggattcaagatctttacggaccgatgctttactgggcgagtttcggatggacgtcgggaccatttatagagaaccgagacatgcttatctcagaaaatggcttctcctttccgaccctgatgacttttcggccggtgctcggggctacctgaaaacttcactgtgtgtgctaggacctggagatgaggccccactggaaaggaaagacccaagcgaggataaagaggacatagaatcgaatttgctgaggcctactggagttgcgctgaggggcgcccacttctgcttgaaggtgttccgggccgaggacctaccccagatggacgatgcagttatggacaacgtaaaacagattttcgggtttgaatccaacaagaagaacctggtcgatccattcgtagaggttagctttgctggtaaaatgttatgtagcaagatactggagaaaactgctaatccacaatggaaccaaaacatcactttgcccgctatgtttcctagcatgtgtgagaaaatgcgaattagaataattgattgggatcgcctaacccataatgatatcgtggccacaacgtacctaagcatgtctaaaataagcgcaccaggtggggagatcgaggtcgatgattacttaggcttcctccctacctttggtccttgctatataaatctatacggatccccaagagaatttacgggatttcccgacccctacactgagttaaacacaggtaaaggagagggcgttgcctacagaggacggctgctgttgagtcttgaaacaaagcttgtcgagcactccgagcagaaggtggaggacctaccagcagacgatattcttagagtagaaaaatacctccgacgccggaaatattcactgtttgctgctttctattccgctacaatgctgcaagacgttgacgatgcgattcagtttgaggtctctataggcaattatggcaataagtttgatatgacctgtctaccgctggctagcaccacacaatacagtagggcagtttttgatgggtgtcattactattaccttccgtggggaaacgtgaagccggtggttgtcttgagcagctattgggaggacatttctcataggattgaaacgcagaatcagctgctggggatcgcggatcggttggaagccgggctggaacaggtccatctggccttgaaagctcagtgtagtacagaggatgtcgatagtttggtcgcccagttgacagatgaattgatcgccgggtgttcacaacccctcggggacatacatgagacaccatcagccacccatctcgaccagtacctttaccagctacggacgcaccacctcagtcaaataacagaggctgcacttgcgctgaaattaggccactccgaacttcctgctgcactggagcaagccgaagactggctcctgagattgagagccctcgccgaagagcctcaaaacagcctgccagacattgtaatttggatgctgcaaggtgacaagagagttgcataccagcgggtccccgcacatcaggtgttattctcgaggagaggcgccaattattgcggaaaaaactgtggcaaactccagacaatatttttaaaatacccaatggaaaaagttccaggggctagaatgcctgtgcagattcgagtgaagttgtggtttggactctcagtggacgagaaagagttcaatcagttcgccgagggaaaactgtccgtattcgctgaaacttacgagaacgaaaccaaacttgcactcgtcggcaactggggaactacaggcctcacgtatccaaaattcagtgacgtcacaggaaaaattaaactgcctaaggattcctttcgaccaagtgccgggtggacctgggctggggattggtttgtgtgccctgagaagacacttttgcacgacatggacgccggacatttaagcttcgtagaggaggtctttgaaaaccaaactcgcttaccaggcggccagtggatttacatgtctgacaattacaccgatgtaaatggcgaaaaggttcttcctaaagacgacattgagtgtccacttggctggaaatgggaggatgaagagtggtctacagatctcaatcgcgcagtagacgaacagggctgggagtattcaattacgatcccccccgaacgcaagcctaagcattgggtcccagcggaaaagatgtactatacacaccgaaggcgtagatgggtacgactgcgacgcagagatctctctcaaatggaagccctgaaaaggcataggcaagccgaagccgaaggagaaggttgggaatacgcttcgctgttcggttggaagtttcaccttgaatacaggaagacagacgcgtttcggcgcagacgatggcggaggagaatggaaccactggaaaagactgggccagcagccgtcttcgcacttgagggtgcgctcggcggcgtgatggatgataaaagtgaagatagtatgtctgtgtctaccttatcatttggagtaaaccgccccacaatttcatgcattttcgactacggcaatcgataccatctgcggtgctacatgtatcaggcgagagacttagcagcaatggataaagattcatttagcgatccctacgcaatcgtcagtttcctccaccagtcacagaagaccgttgttgtgaagaacactctcaaccccacttgggaccaaacattgattttttacgaaatcgagattttcggagagccggctacagtagccgaacagccaccatctatcgtagtggaattatatgatcacgacacttatggcgcagatgaattcatggggcgctgtatctgccaacccagcctggagagaatgcctcgccttgcgtggtttcctctgacacgagggtcgcaacctagtggcgagcttttagcgagctttgaactgatccagagagaaaagccggccattcaccatatacccggtttcgaggtgcaggagacaagtagaatcttggacgaatcagaggataccgacctaccctatccccctccccagagggaggcaaatatttatatggttcctcaaaacattaaacccgcacttcagagaacagcaatcgaaatccttgcttggggcctgagaaacatgaaatcctaccaactcgcaaatatctcctctccctcactggtggttgaatgcggcggccagacagtacagagttgtgtcatacggaacctgaggaagaatcctaacttcgacatttgtacactgtttatggaggtcatgctgccaagagaggagctctactgcccaccgattacagtgaaggttatcgataatcggcagtttggacgacggcccgtggtcggccaatgtacaatcagaagccttgaatccttcctttgtgacccatattcagccgagagcccttcccctcaaggtggtcccgatgatgtttcgcttctttctccaggagaggacgtgctgatcgacatcgatgacaaagagcccctgatccccatccagctcgccgacggactcagctctctcgctccaacaaatacagccagcccacccagcagtccacacgaggaagagtttatagattggtggtccaaatttttcgccagcattggtgagcgggagaagtgtggcagttatcttgaaaaagacttcgacacgctaaaagtatatgacacgcagttggagaatgtggaagcctttgaagggctgtctgatttctgtaacacttttaagctgtacagaggaaaaacacaagaagaaactgaagacccttctgtgattggcgaatttaagggtttgttcaaaatttatcccctccctgaagatcctgccatcccgatgccccctcgtcaattccatcagctggcagcgcaagggcctcaggaatgtctggtgagaatttatatcgtaagagcatttggtctacagccaaaagatccaaatggcaagtgcgatccgtatattaagatatcaatagggaagaagagcgtgtcagatcaggacaattacatcccctgtaccctggagcccgtattcggaaaaatgttcgaattgacctgtacactaccccttgagaaggatttgaaaattaccttatatgactacgacctgctttctaaggatgagaagatcggcgaaactgttgtagaccttgagaatagactgctgtcaaaattcggtgctcgttgtggactaccccaaacatactgcgtttcgggtccaaatcagtggcgcgaccagctgagaccgtcacaacttttgcacctattttgtcaacagcacagagttaaggcaccggtctatcgcaccgatcgagtaatgtttcaggataaggaatactccattgaagagattgaagctggccggatcccaaacccacacctggggccggtggaagaacgcctggctctgcatgtgttacagcaacagggactcgtgcctgagcacgtggagtctagacccctttactctcctttacaaccagacattgaacagggaaagctgcagatgtgggtagacttgtttcctaaggcactaggaagacccggacccccattcaacattacccccagacgggccaggaggtttttcctgagatgtatcatttggaatactcgggacgtcattttagacgacttaagtctcaccggcgagaagatgagcgacatttacgttaagggatggatgattggttttgaggagcataagcagaaaacggacgttcactatcggagtctcggcggcgaaggtaactttaattggcgctttatctttcctttcgactacctgcccgcggaacaggtgtgtactatagctaaaaaggacgcgttttggcggcttgataagactgaaagcaaaataccagctcgagtagtttttcaaatatgggataacgataaattttcattcgacgactttttgggcagcctgcagctagacttgaatcgaatgcctaagccagcgaaaacggcgaaaaaatgttccctcgaccaacttgatgatgcttttcaccccgagtggttcgtgtccctgtttgagcaaaaaactgtaaaaggttggtggccctgcgtggcagaggaaggcgagaaaaaaatcctcgccgggaaactggagatgacattggaaatcgtggccgaatccgaacacgaggagagacctgcagggcaaggtcgcgatgagccaaacatgaatccaaagttggaggaccctagacgcccagacacatcttttctgtggttcacatctccctataagactatgaaattcatcctgtggcgtaggttcaggtgggccataatcctgtttataatattgttcatactactattgttcttggctatttttatctatgctttccccaattacgcagctatgaaactggtgaaaccattcagttag

SEQ ID NO: 5203 - RNA, 6294 nt, synthetic construct
  misc_feature 1..6294: note = source = /note="Description of Artificial Sequence: Synthetic coding sequence"
  source 1..6294: mol_type = other RNA
atgcttcgggttttcatactttatgccgaaaatgtacatacacccgacactgacatttcggacgcgtactgcagcgccgtgtttgccggagttaagaaaaggaccaaagttataaagaatagtgtgaaccctgtatggaatgagggcttcgaatgggacctcaagggcatcccactggaccagggctcagagctgcacgttgttgttaaggatcacgagactatgggccggaacagatttcttggcgaggccaaagtgccactcagagaggttttagccacaccaagtctatcagcaagctttaatgcccccctgctcgatactaaaaagcaacctacgggagcttccctcgtgttacaggtgagttatacccccctacctggcgctgttcctctctttccaccacctacccccctcgaacccagccctacgctgccagatttggatgtagtagccggaggcgggcaaagtagggcagaaacctggagcctgctaagcgattcgacgatggacacgagatactcaggcaagaaatggcccgcccccaccgatactggaggcgaagaagacacagaggaccagggcctgactggcgatgaagctgaacccttccttgatcagtccggtggcccgggggctcctactacaccacgcaaattacctagcagaccacctccccactatcccggcattaagcgaaaacggtcggcccccacctcccgaaagctgttgagcgataaaccacaggactttcaaattcgagtccaagtaatcgagggccgccagctacccggtgtaaacataaagccagtcgtcaaagtgaccgccgcgggccagacaaagcgcacccgaattcataagggcaattctcccttatttaatgaaactctgttttttaatttgtttgattcccctggtgagcttttcgacgagcccattttcatcactgtcgtggattctagatccctgcgcactgatgctctcctcggcgagtttaggatggacgttgggacgatctatagagaacctcgccatgcatacctaaggaaatggctactcctctcagacccagacgactttagcgcgggcgcacggggttatctgaaaacttcactgtgtgtgttaggacccggtgatgaggcccccctagaacgcaaagatccatccgaggacaaagaagacattgaatctaatctgctcagacctactggagtggctctgcggggcgcccacttctgtctgaaagtgttccgcgcggaagatctaccccagatggacgacgcggtaatggataacgtgaagcagattttcgggttcgagtcaaacaagaagaatttagtggatcctttcgtagaggtgagctttgctgggaagatgctgtgcagcaagatcctggaaaaaacagctaatccacagtggaaccagaatattacactgcctgctatgtttccatcaatgtgtgaaaaaatgagaattagaattatcgattgggacagactaacgcacaacgatatcgtcgcaaccacttatctctcaatgtctaagattagcgcgccaggaggagagatcgaagtggatgactatcttggcttcctacccacattcggaccatgctacatcaatctatacggatctcccagggaattcacaggttttcctgatccatacacagaactcaacaccggtaaaggcgaaggcgtcgcttacagaggtcgtcttctcctgagcttggagaccaaactcgtagagcacagtgaacaaaaagtggaggacctgcctgccgatgacattttacgagttgagaagtacctccggcgccgaaagtactccttgtttgccgccttttactcagccactatgctacaagatgtcgatgatgcaattcaatttgaagtgagcatcggaaattatggtaataagtttgatatgacatgcctccctctagccagtaccacgcagtattcacgcgcagtgtttgatgggtgtcactattactatcttccctggggaaatgtcaagccagtggtagttctgtcatcatattgggaagatatctcccacagaattgagacccaaaaccagctccttggcatcgctgataggctcgaagctggcctcgaacaggtccatctcgctctgaaggcccagtgttcgactgaggatgttgattctttggtggctcaacttaccgatgagctgattgctgggtgttcgcagccactcggcgatatccacgagaccccatcagctactcatctcgatcagtacctctatcagctcaggactcaccatctttcccaaataactgaggctgccctggcacttaagctcggacactcagaattacctgcagcccttgaacaagccgaggattggttgcttagattgcgggctctcgctgaagaacctcaaaactctcttccggacatcgtcatttggatgctgcaaggggataagcgagtggcctatcagcgtgtaccagcccatcaagtactcttttcaagacgaggagccaactactgtgggaagaattgcggcaaactccagactatcttcctcaagtatcctatggaaaaggtccctggtgcgaggatgcccgtccagatccgcgtgaaactttggttcgggctcagcgttgacgaaaaggagtttaatcaattcgccgagggaaagctatctgtcttcgcagaaacgtatgagaatgagactaagctcgcactggtcgggaactggggcacgaccggcttaacatacccaaagttcagtgacgttactggcaagataaagctgccaaaggattcatttaggcccagcgctggttggacatgggccggggattggtttgtgtgcccagaaaaaacactgcttcatgacatggacgctggacatttatcatttgtcgaggaggtgttcgaaaatcaaacaagattacctggcggccagtggatctacatgtccgataattatacagatgtcaatggagaaaaagttctgcccaaagacgacatcgaatgtccactgggctggaaatgggaggacgaagaatggagcaccgatctaaacagagcagtcgacgagcaaggatgggaatattcgataactattcctccggaacgtaagccgaagcactgggtgccagccgagaaaatgtattacacccatcgcagaagacgttgggtgcgcctgagacgccgcgatcttagtcagatggaggcattaaaaagacaccggcaggcagaagctgagggtgaaggatgggaatatgccagcttatttggatggaagttccacttggaatatcgaaagaccgacgccttcaggagacgccggtggagacggcggatggagcccctggagaaaacaggtccagctgcggtattcgctcttgagggtgcattaggcggagttatggatgacaagagtgaagatagtatgtcagtgagtactttaagcttcggcgttaaccgccctacaatctcctgcatattcgactacggtaatcggtatcaccttcgctgctatatgtaccaggctcgggaccttgctgccatggacaaagatagcttttccgatccttatgccatcgtctcgttcctacaccagagtcaaaagactgtcgttgtgaagaatacattgaacccaacttgggaccagaccctgatattctatgagattgagatcttcggtgagcccgccaccgtagcagaacaacctcctagcatagtcgtggaattgtatgatcacgatacctatggagcagacgagtttatgggaaggtgcatatgccagccatccttggaacgtatgccacgattagcctggtttcctctgactcgcgggtcccaaccttccggggagcttttggcctcctttgaattaattcagcgcgagaagcccgccatccatcatatacccggcttcgaagtacaagaaaccagtagaatcctcgacgagtccgaggacactgacttgccttacccacccccccagcgggaggccaacatttacatggttcctcaaaacattaagccagccttacaaagaaccgcgatcgagattctcgcctggggtctcagaaatatgaagtcctaccaacttgccaacatttcttccccatcgctcgtagtagaatgcgggggccagaccgtccaatcgtgtgtgattcgaaatctgagaaagaatcctaacttcgatatatgcacattgttcatggaagttatgctcccccgggaagagctatattgcccacctattaccgtaaaggtaatagataatcgtcagtttggaagaaggcctgtggtaggtcagtgtacaatccggagcctcgagtcttttctttgtgatccatacagcgcagagtcaccatcacctcagggagggcccgacgacgtttccctcttgtccccaggcgaagacgtgctgattgatatcgatgataaggagcctctcatcccaatccaagaggaggaattcatagactggtggtcaaaatttttcgcttccattggagaacgcgagaaatgcggatcctacctcgaaaaggacttcgataccctaaaagtatacgacacccaacttgaaaatgtggaggctttcgaaggcctctcagacttctgcaatacatttaaattgtatcgcggaaaaacccaggaggagacagaagacccaagcgtgattggggaattcaagggcctttttaagatttatccacttcccgaggaccctgccatccctatgcccccacgtcagttccaccaactcgctgcccaaggtccccaggaatgtctagtacgcatatatatcgttagagccttcggtctgcagcctaaagatccaaacggcaaatgtgacccctacataaagataagcatcggtaaaaaatcagtgtctgaccaagataattatatcccctgtaccttagagcccgtctttggcaagatgtttgagctgacatgcacactaccactcgaaaaggatttgaagatcaccttgtacgattacgacctgttgtcaaaggatgagaagattggcgagacagtggtggatcttgagaaccggttactttccaagttcggtgcacgttgtggtctgccccaaacttattgcgtctctggacctaatcagtggagagaccagctccggccctctcagttgctgcacctattttgtcagcagcatcgcgttaaagcgccagtgtatagaaccgaccgagtgatgttccaggacaaggagtattctattgaagaaatcgaggccggcagaatccctaatccacacctgggccctgtggaagagcggcttgccttacacgttctccagcagcaaggtctcgttccagaacacgttgagtctcggcccctttacagcccattgcagcccgatattgagcagggaaagctccagatgtgggttgatctctttcccaaagcgctaggcaggcccggtcccccttttaatattactcctagacgcgcacgcagatttttcctaagatgtataatctggaatacacgggatgttatcctcgacgacctgagtcttacaggtgaaaagatgtctgacatatacgtgaaaggatggatgattggatttgaagaacataagcagaagaccgacgtgcattatagaagtttgggtggcgaaggcaattttaactggcgcttcatctttcctttcgactatctgcccgccgaacaggtgtgtactatcgcaaagaaagatgcattctggcgccttgacaagactgaatccaaaattcccgcaagagtggttttccaaatttgggataatgacaagttttcctttgatgatttcctgggaagtctccagctagacctgaacaggatgcctaaacccgccaaaactgccaaaaaatgttctttagaccagctggacgatgcctttcaccctgaatggttcgtttcattatttgagcaaaagaccgtgaagggttggtggccatgtgtagccgaagaaggcgagaagaagattttagccgggaaactggaaatgacattggaaatagtggcagagagcgaacacgaagaacggccagcagggcagggtcgggacgagcccaatatgaaccctaaattggaagaccctaggagacctgatacgtcctttttgtggtttacaagtccatacaagacaatgaaatttattctctggcgtcggttccgatgggcaataattctgtttatcatactttttatcctcctcttattcctcgccatctttatttacgcctttccaaactacgcagccatgaagttagttaaacccttctcttag

SEQ ID NO: 5204 - RNA, 6360 nt, synthetic construct
  misc_feature 1..6360: note = source = /note="Description of Artificial Sequence: Synthetic coding sequence"
  source 1..6360: mol_type = other RNA
atgttatgctgcttactagtacgcgcttctaacctccctagtgccaagaaggataggcggtcggatcccgtggcttcgctgacatttagaggtgttaaaaaacggactaaggtgataaagaattcggtgaaccctgtgtggaacgaaggctttgaatgggacctaaagggaatccccctggatcagggaagcgaactgcatgttgtggtgaaagatcacgagacaatgggcaggaatcgattcctgggcgaagcgaaagttccgctgcgagaagttttagccacaccttcattgtccgcgagcttcaacgccccgctccttgacacaaagaaacagcccacaggtgcctcgctcgtgcttcaagtgtcttacacaccattaccgggggcagtgcccctgtttccacctccaacacccttagaaccttctccaacattgcccgatctcgacgtcgtcgctggaggcggacagagccgagcagaaacgtggtccctactctcagattcgaccatggacaccagatacagcggaaagaaatggcctgccccaacagacactggcggcgaagaagataccgaagatcagggtcttaccggcgatgaggccgaaccatttttggatcagtcaggcggaccaggcgctcccacaactcctcgtaaattgccgtccaggccccccccccactatcccggaattaagcgaaaaagatccgcaccaacaagccgaaaactgttatccgacaagcctcaggattttcagatacgggttcaggtcatcgaaggtcggcagctaccgggcgtgaatatcaaaccggtcgtcaaggtgactgccgctgggcagaccaagcgcacaagaattcacaaaggaaactctccattatttaatgagacgctgttttttaatctctttgatagtccaggagaactgttcgacgagcccatctttattacagttgtcgattcgagaagcctacgcaccgacgccctattaggcgagtttagaatggatgtgggaactatctatagagagcctaggcacgcttatctcagaaagtggctactgctatcagaccctgatgacttcagcgccggagcccgtgggtacctaaaaactagtctctgtgtgctaggtcctggcgacgaggcccctttggaacgcaaggatccaagcgaggataaggaagacatcgaaagtaatctgctgagaccaaccggagtggcgttgagaggtgcccatttttgtctgaaagtgttcagagcagaggatctgccccagatggatgatgccgtgatggataacgttaaacaaattttcggctttgagtctaataaaaaaaatctggtcgatcctttcgtcgaagtttcgttcgccggaaagatgttatgttccaaaattctcgaaaagaccgctaaccctcaatggaaccaaaatattacattaccagccatgtttcccagtatgtgcgaaaagatgcggatccgcataattgattgggaccgcctcactcacaatgatatcgttgcgactacttatttgagcatgagcaagattagcgctcccgggggtgaaatcgaggtcgacgactatctgggctttctgccaacctttggtccatgctatatcaatctatacggctctccccgcgaatttaccgggtttcctgacccttacactgaacttaacacaggcaaaggagagggcgtcgcttaccgtgggcgcctgctactgtcccttgagacaaaactcgtggagcactcagagcaaaaagtcgaggatctccctgccgatgacatccttcgcgtggaaaaataccttaggagacgcaaatactcattattcgccgctttctactcagcaactatgttgcaggatgtggacgatgcaattcagtttgaagtcagcattgggaactacgggaataagttcgatatgacctgccttccactggcatccacaactcagtattcaagggccgtgttcgacggatgtcattactactatctgccttggggaaacgtgaaacctgtcgtcgtgctttcttcatattgggaggatattagtcatcgcatagagactcagaatcagcttctgggaatcgccgaccgactggaggccggactggagcaggtgcatcttgcccttaaagcccagtgctctaccgaagacgtagattctctcgtggctcagttaacggacgagcttatcgccggatgctctcagcccttgggcgacattcatgaaacaccatccgctacgcatttagatcagtacctctaccagttacgcacacaccatctgtcccagatcaccgaggcagcattagccctcaagttaggtcactccgaattgccggctgcgctcgagcaggctgaagactggttacttaggttgcgagctctagccgaagagcctcagaacagtttgcccgatatcgttatctggatgctgcaaggagataaaagggtagcgtaccaacgagtaccagcgcaccaagtcctgttctctcggaggggcgcgaactactgcgggaagaattgtggaaagctgcagaccatcttcttaaagtatcccatggagaaagtgccaggcgccaggatgcccgttcaaatcagagtgaagctgtggtttggtttaagcgtcgatgagaaagagtttaatcagttcgccgaaggaaagttatccgtgtttgctgaaacctatgaaaatgagacaaagcttgcacttgtcgggaattggggaactacaggattgacttaccccaagtttagcgacgttactggcaaaatcaaactacccaaagactcctttaggccatccgctggatggacgtgggccggcgactggtttgtgtgcccagaaaagacactcctgcatgacatggatgcaggccacttgagtttcgtcgaagaggtatttgagaatcagacaagactgcctggaggccaatggatttatatgagtgacaactacaccgatgtcaatggcgagaaggttctacccaaagatgatatcgagtgtccccttggctggaaatgggaggatgaggagtggtcgactgacctcaaccgggccgttgatgagcaagggtgggagtacagtatcacgattccccccgagaggaaaccaaagcactgggtccccgctgagaaaatgtactacacacacaggaggagacggtgggtcaggctacggagaagagacctttcccaaatggaagccctaaagagacacagacaggcagaggctgaaggcgaaggttgggagtatgcatctctgttcggatggaaatttcacctcgagtaccgcaagacagacgcctttcggagacgtcgttggagacgaagaatggaacccctggagaagacgggccctgcagcagtgttcgccttagaaggcgccctgggtggcgtcatggatgacaagtctgaggattctatgtccgtatccactctgtcattcggtgttaaccggcccactatatcttgtattttcgattatggcaatagataccatcttagatgttacatgtaccaggcccgggacttggctgccatggataaagattcattctctgacccatacgctatcgtgagtttcctgcaccaaagccagaagacagtcgttgtgaaaaatactctaaatcctacctgggaccaaacactgatcttttacgaaattgagatttttggagagcctgcaactgtggccgaacaaccaccgagtatcgttgtagaactgtatgaccacgacacttacggggcagacgagttcatgggccgctgcatttgtcaaccctccctggagcgtatgcctcgactggcctggtttccgctgacacggggttctcagccctctggagagttacttgcttcgtttgagctgattcaacgcgaaaaacccgcaatccatcatatccctggatttgaagtgcaggaaaccagccgcatactagacgaaagtgaagatacagatctcccatatcctcctccccagcgcgaagccaatatatacatggttcctcagaacatcaaacctgcattgcagcggaccgcaattgagattctagcttgggggctgcgaaatatgaagtcctatcagcttgctaatatcagtagcccttccctcgtcgtcgagtgcggaggacagaccgtgcaatcttgtgtgatcagaaacctgagaaagaaccccaattttgacatatgtacactattcatggaagtaatgctgcctagagaagagctctattgccctccaattaccgtgaaggttatcgacaaccgtcagtttggacgtaggccagttgtcggtcagtgcactattaggtctctcgaaagtttcctgtgtgacccgtactctgccgagagtccctccccacaaggcggccctgatgatgtttccttgcttagccccggagaagacgtcctgatcgatattgacgacaaagagcctctgatccccattcagctggctgatggcctgtctagcttagccccgacgaacacagcctcaccacccagctccccccacgaggaggaattcatcgactggtggtccaaattctttgcatcaatcggagagagagagaagtgtggatcgtacctggagaaggactttgatacattgaaggtttatgatacacaactggagaatgtagaagcatttgagggtctaagcgatttctgtaacacctttaagctgtacaggggaaagactcaggaagagaccgaggacccatctgtgataggcgagtttaaaggcttgttcaaaatctatcccttgcctgaagatcccgccatcccgatgcctccccggcagttccaccaactggccgctcaaggacctcaggaatgtctggtgcgaatctacatcgtaagagccttcggtctgcaacctaaagacccaaatggaaagtgtgatccgtatataaaaataagtatcggtaagaaatccgtgagtgatcaggacaactacataccctgtacattggagcctgttttcggaaaaatgtttgaactgacttgcacattaccattagagaaagacctgaaaatcacgctttacgactatgacctgctatctaaagacgagaaaatcggcgaaaccgtcgtggacttggaaaatagactccttagcaaattcggtgcccgctgcggattacctcagacgtattgtgtttcaggcccaaatcaatggagagatcagcttcgcccttctcaactgctccaccttttttgtcagcagcaccgcgtgaaggctccagtctacaggaccgatagagtgatgtttcaggacaaggaatattctatagaagagatcgaggccggtagaatacccaatccacacttgggtccagtcgaagagagactagctctgcacgtgctccagcagcagggacttgtgcctgagcacgtcgaatccaggcctctgtactcacctttacagcctgacattgaacagggaaaattacagatgtgggtcgatctgttccccaaagccttgggccgacctggacctcctttcaatatcaccccaagacgagctaggcgattttttctgcggtgcataatctggaacacacgcgatgtgatactggacgatctgagcctcactggcgaaaagatgagtgatatatatgtaaaaggatggatgatcggtttcgaggaacacaagcaaaagactgatgtccattaccgctccctgggcggcgagggcaatttcaactggcgcttcatcttcccttttgactacctacccgcagaacaggtgtgtactattgcaaaaaaggacgccttctggagattagacaagacagaaagtaaaatccccgctagagtggtattccagatctgggacaacgataaattctccttcgacgactttttgggatccctgcaactcgaccttaatcggatgcctaaacccgccaagactgctaagaagtgtagcctggaccagctggacgacgcatttcatcccgagtggttcgtgtccttatttgagcagaaaacagtgaagggttggtggccttgtgtcgcggaggagggcgagaagaaaatcctggcaggaaaattggagatgacacttgaaatagttgcagaatccgaacatgaggagcgaccggccggacagggcagagatgagcctaacatgaaccctaaactcgaggaccccagacgaccagatacctcattcctttggttcacatccccatacaaaaccatgaaattcatcctttggcgacgttttcgatgggcgattatcctcttcatcattctgttcattttactgctattcttggcaatctttatatatgcttttccaaactacgccgcaatgaaattagttaaacctttctcctag

SEQ ID NO: 5205 - RNA, 6297 nt, synthetic construct
  misc_feature 1..6297: note = source = /note="Description of Artificial Sequence: Synthetic coding sequence"
  source 1..6297: mol_type = other RNA
atgctttgctgtttactagtgagagcatcaaacctgccctccgccaagaaggatagaagaagtgacccagtggcatcactgacgtttcggggcgtgaaaaagagaactaaagtaatcaaaaactctgttaaccccgtttggaatgaaggctttgaatgggacctgaaaggaatacctttagaccagggaagtgaactgcacgttgtagtcaaagatcatgagactatgggtcgtaatagattcctcggggaagcaaaagtgcctctgcgcgaagttctggcaaccccctctctgagcgcctcttttaatgcccctctgcttgatactaagaagcagcccactggtgcatctctcgtgctgcaagtttcttataccccattgccaggagccgttccattatttccccctcccacaccattagagccctctccgacactgcccgacctggacgtggtggctgggggtggccagtcacgcgccgagacttggagcctgcttagtgactcaaccatggacacaagatatagcggaaaaaaatggccggccccaactgatacagggggagaagaagacacagaagaccaaggtttgaccggagacgaagctgagccttttctagaccagtctggcggtcccggagcgccaaccacccctcggaagctcccctctcgaccacctcctcattaccccgggataaaacgcaaacgatcagcccccacctccaggaagcttctctcagacaaaccacaggacttccagattcgcgtccaggtcatcgaagggcgccaactcccaggcgtcaatatcaaacccgttgtgaaagtaactgccgccggccaaacaaagcgaactaggattcataaaggaaattccccactgttcaatgagactctgttcttcaatctcttcgattcccccggcgagttattcgatgagcctattttcattacagtcgtggactctcggtccctcagaacagacgctctcctgggtgaatttaggatggatgtgggtactatttaccgtgaacctcggcacgcctacctgcgaaagtggctccttttatcagatccagacgatttttcggcaggggccagaggatacctgaagacctccttgtgtgttttgggtcccggcgatgaggcgcccttggaaagaaaagacccctcggaagataaggaagatattgagtctaatctccttagacccaccggtgtcgctctgcgtggagcccacttctgtctgaaggtgtttcgggccgaagatttgccacagatggacgatgctgtcatggacaatgtaaaacagatctttgggtttgaatccaacaagaaaaatctcgtagaccccttcgtcgaggttagcttcgcgggtaaaatgctgtgttctaaaatactagagaaaactgcgaatccccaatggaaccagaatatcactctccctgccatgtttccaagtatgtgcgaaaaaatgagaattcggatcatcgattgggacagactcacacataatgatattgttgccaccacatacctttctatgtctaaaatctcagcaccagggggagagattgaggtagatgattatctggggtttttgcccaccttcggcccctgctacatcaacctgtatggctctccaagggaatttacaggatttccggatccgtacacagaactgaacactgggaaaggtgagggcgtagcatacaggggacggctcctcctctcactggaaacaaaattagtagagcacagcgaacaaaaagtagaagatctacccgctgacgatatattacgggttgagaaatatttgagacgccggaaatactcactgtttgctgccttttattccgccacaatgctccaggatgtggacgacgccattcagttcgaggtgtcaataggaaattacgggaacaagtttgatatgacctgtttgccattggctagtactacacaatactccagggccgtttttgacggatgtcactattattacctaccttggggaaacgtgaaacccgtagtggtattatcctcctactgggaagatatcagccacagaattgaaacacagaatcagttgttgggcatagcagaccgccttgaggctggattagagcaagttcacctagccttgaaggcccagtgcagcactgaagacgtggactcactggttgctcaactgaccgacgaactcattgctggctgctctcagccccttggcgacattcacgagacccccagcgcgacccacctagatcaatatctttatcaacttcggacgcaccacctcagtcagatcacagaagccgccttagcgcttaaactaggacattctgaactccccgccgccttagagcaggcagaagattggctgcttcgcttgcgtgcattagcagaagaaccgcagaatagcctgcccgatatcgtgatatggatgctccagggggacaagcgcgtagcctatcaaagagttcctgcacatcaagttttattctcaaggaggggggccaactattgtggaaagaactgtggcaaacttcagactatattcttgaaataccctatggaaaaggtgcccggtgctcggatgcccgtgcaaatcagggttaaactgtggtttggcctgtcagtcgacgagaaggaattcaaccagttcgctgaaggaaaattgtccgtgttcgcagagacctacgaaaacgagactaaactagctctggtgggcaactggggtactaccggcctgacgtatcctaaattctctgatgttacaggcaaaatcaaacttcccaaagacagctttaggccatctgccggatggacatgggccggtgattggtttgtgtgtcctgaaaaaacattacttcacgacatggacgctggacatctctcattcgttgaagaggtttttgagaaccagacaaggctgccaggaggccagtggatttacatgtccgataactacaccgatgttaacggagaaaaggtgctgccaaaagacgacattgagtgtccgctcggatggaaatgggaagatgaggagtggagtactgatttgaatcgcgcagttgacgagcagggttgggagtacagcatcacaatcccacccgagagaaagcctaaacactgggtgcccgcggagaaaatgtattatacgcaccgcaggcggcggtgggtcagattaaggcgtagggacctcagtcagatggaagcactaaaacggcaccgccaagccgaagccgagggggaaggttgggagtatgccagcttgtttggatggaagtttcatctggagtatagaaagacggacgcttttagacgtcgcaggtggcgaagacgtatggaacccctagaaaaaacaggcccagctgccgtgttcgccctcgagggtgctcttggtggagtgatggatgataaaagtgaggacagcatgtcggtgtccaccctgagctttggggtgaatagacctacaattagttgcatctttgactacgggaatcgctaccatctgagatgctacatgtaccaggcccgagatctggcagctatggataaggattccttttcagacccctatgctatcgtctcttttttgcatcaatcacagaaaaccgtcgttgtcaaaaacacccttaatcctacctgggaccagacgttgatcttttatgaaatcgagatttttggagagcccgcaacagtggctgagcaacccccttcaattgttgtggagttgtacgaccacgatacctacggagccgatgaattcatgggtcgctgtatttgtcagccatctctggaacgtatgcctcggttggcctggtttccattaaccaggggaagccaaccctcaggtgagctgctggcatcattcgagctgatacagagggagaagcccgccattcaccatatcccaggcttcgaagtgcaagaaacctccaggatcctggacgaatcagaggacaccgacttaccttaccctcccccccagcgtgaggccaacatctacatggttccccagaatatcaagcctgcgctgcaaagaacagccattgagatactcgcctggggacttaggaacatgaaatcatatcaattagccaatatttcgtctcccagtctggtagtggaatgtggaggtcagacagttcagagctgcgtcatccggaacctgcgtaaaaaccctaactttgacatctgtaccttgttcatggaagtgatgcttccccgagaagagttatactgccccccaatcacagtgaaggtgatcgacaaccgacaatttggcaggagaccagtagttggtcagtgtacaatccgatctctcgaatcctttctctgcgatccgtactccgccgagtccccaagtccacagggcggccccgacgatgtcagcctgctgtcacctggagaggacgtgctgatcgatattgatgacaaagagcccctgattccaattcaggaggaggagtttatagactggtggtcgaagtttttcgcctctatcggagaacgtgaaaaatgcggctcgtatctggagaaagactttgacaccctcaaggtgtacgatacacagttagagaatgtcgaagcctttgagggacttagcgacttttgtaataccttcaagctctaccgaggtaagacacaggaggaaaccgaagaccctagcgtgattggtgaattcaaggggctgttcaagatctaccccctgcctgaagatcctgccatccctatgccacccagacaattccaccagctggctgcccaaggaccacaagaatgtttggtgcgcatttacatcgtgagagcttttggcctgcaacccaaagaccccaacggaaagtgcgatccatacattaaaatctccatcggtaagaaaagtgtaagcgaccaggacaactacataccttgtacattggaacctgtctttggaaagatgtttgagctgacgtgcaccctccccctggagaaggaccttaaaatcacactctatgactacgatctgcttagtaaggatgagaaaattggcgagacggttgttgatctggaaaataggctactgagtaagttcggcgcccgctgcggactgccccagacatactgcgtctccggacctaaccaatggagggatcagcttcggccttcccagttactacatcttttctgtcagcagcatcgcgtaaaggcccctgtgtaccgaacagaccgtgttatgtttcaggacaaggagtactccatcgaggagattgaggctggccgtattcccaatccccacctcggcccagtggaagaacgcctggcactacacgtcctgcagcagcaaggattggtccctgaacacgtcgaaagtaggccactgtactcccctctgcagcctgacattgaacaaggcaagctgcagatgtgggtggacctctttcccaaggcactcggccgaccaggccctcctttcaatatcacaccacggcgagcaagacgctttttcttgagatgtattatatggaacaccagagacgtgattttggacgacttatccttaaccggagagaaaatgagtgacatctatgttaaggggtggatgatcggcttcgaagaacacaagcagaaaacggacgtgcattataggtccttgggcggagaaggaaactttaactggagatttatcttcccatttgactacctgccagccgaacaggtgtgtacaatagcgaaaaaggatgcgttttggcggctggacaagaccgaatctaaaattcccgccagagtagtttttcagatttgggataatgacaaattcagcttcgatgatttcctcggctcactgcagcttgaccttaatcgcatgccaaaaccggcaaaaactgcaaaaaagtgttcgctagatcagctcgatgacgcttttcacccagagtggtttgtatcattgttcgagcagaagaccgtgaagggatggtggccatgtgtcgctgaagagggagagaaaaagatactcgccggcaaactagaaatgacactggagattgtagctgaatcggaacatgaggaacgacctgctgggcagggccgagacgagccaaacatgaaccccaaactggaggatccgcggcgcccagatacatcctttctgtggtttacctcaccatataagacaatgaagtttattctctggcggaggtttagatgggccatcatccttttcataattcttttcatcctgctgttattcttggcgatcttcatatacgcattcccgaattacgcagcaatgaaactggtaaaacctttttcttag

SEQ ID NO: 5206 - RNA, 6336 nt, synthetic construct
  misc_feature 1..6336: note = source = /note="Description of Artificial Sequence: Synthetic coding sequence"
  source 1..6336: mol_type = other RNA
atgctgagagtgttcattttatatgccgaaaatgttcacacaccagacactgacatatctgatgcatactgctccgctgttttcgctggagtgaaaaaaagaaccaaggtaattaaaaactctgtaaatccagtgtggaacgaaggtttcgaatgggatctaaaaggcatcccccttgatcaaggttcggaattgcatgtggttgtgaaggatcatgagaccatgggccgtaatagattcttgggggaagctaaggtcccattacgcgaggtcctcgccaccccaagcttgtcggcctcctttaacgctccactgctggatactaaaaaacagccgactggggctagcctcgtgttgcaagtttcctacactcctctgccaggtgctgtccctctgtttcccccccccaccccactcgagccctcccctacgctccctgacttggatgtagtcgcaggagggggacagtcaagggctgagacttggagcctcctgtcagatagcaccatggacacacgctactcaggaaagaaatggccagcccccaccgacacaggaggagaagaagacaccgaagatcaggggttaaccggagatgaggcggagccatttctagaccagtccggaggacccggcgcccccactacaccacggaagctgccatctcgcccacctccccactaccccggcattaaaaggaaaagatccgccccaacctcccgtaagcttctctcagacaaaccccaggatttccagatcagggtgcaagtgattgagggtaggcaactcccaggagttaatataaagccagtggttaaagttaccgccgcaggacagactaagcgaacaagaatccacaagggcaactcacccttatttaacgagacactcttcttcaacctgttcgattcacctggcgaactctttgatgaacccatatttattaccgtagttgattctcgttcacttcgaaccgacgccttacttggagaatttcgcatggatgtgggcaccatctatcgcgagcctagacatgcttacctccggaaatggctcttgctgtcagaccctgacgacttctctgctggtgcaagagggtacctgaagacctcactgtgtgtcttaggcccaggggacgaagctcctcttgagcgtaaagatccttccgaagacaaagaggacatagaaagtaacctgctccggcctaccggggttgccctcaggggcgcacatttttgcttgaaagtttttcgcgccgaagacctcccacagatggatgacgctgtcatggacaatgtaaaacagatcttcgggttcgagtcaaataagaaaaatctggtggacccatttgtcgaggtgtcctttgccggcaaaatgctctgctccaaaatactagagaaaactgctaaccctcagtggaaccagaacataactttaccagccatgttcccatctatgtgtgaaaaaatgaggatcaggatcatcgattgggatcgtctaacccacaatgacattgtagcgacaacatacctcagcatgtctaaaatcagtgcccccggcggcgagatcgaggaagagcccgcaggtgcagtaaaaccatcgaaggcatcagatcttgatgattacctgggatttctcccaacgttcggtccctgctacatcaacctttatggctcgccaagagaattcactggctttccagacccctacaccgagctcaataccggtaagggagaaggagtggcatacagaggacgcctgctattatctcttgagaccaagctcgtggagcacagcgagcagaaagtagaagatttacctgcggatgacattttaagggtggaaaaatacctgcggaggaggaaatatagtctgtttgcagcgttttacagcgctactatgctacaggatgtcgacgatgcgatccagtttgaagttagtattgggaattatggtaataaatttgacatgacttgtctgcctctggcttctaccactcagtactcaagagctgtttttgatggctgtcattattattacctgccttgggggaacgtgaaacccgtggtggtgttgagttcctactgggaggatatctctcatcggattgaaacacagaatcagctcctgggcatcgccgaccgtctggaggcagggttggagcaggttcacctggccctaaaagcgcaatgttctacagaagatgttgattccctggtagcacagctgacagacgaactcatcgctggctgctcacaaccactgggggacattcatgaaacacctagtgctacacaccttgatcagtatctctaccagttgcggacccatcacctctctcagattactgaggccgctctagctctgaaacttggccattcagaacttcccgccgcactagagcaggctgaagactggttgttaagactgagagcactcgccgaggaaccacagaatagcctccccgatattgtgatatggatgctacagggtgacaaaagagtggcctatcaaagagtgccagcccatcaagtactgttcagccggcgaggggccaactactgcggtaagaactgtggcaagctgcaaacaatttttttgaaatatccaatggaaaaggttcctggtgcacgtatgccggtgcagatccgcgttaagctttggtttggcttgagcgtcgacgagaaggaattcaaccagtttgccgaggggaaactgtcagtatttgcagaaacatatgaaaatgagactaaattagcgctggtagggaactggggaacaaccggactcacttatcctaagttcagtgacgtcaccggaaaaattaagctgcctaaagacagtttcagacctagcgcaggatggacgtgggctggagattggttcgtctgtccggagaagactctgctgcacgatatggacgcaggacatctctcttttgtggaagaagtgtttgagaatcagactagactgcccggcggtcagtggatctatatgagcgacaactatacggacgtcaatggagaaaaagtgctgccaaaggacgacattgagtgtcccttagggtggaaatgggaagacgaagagtggtctacagacttaaaccgggctgtggacgaacagggatgggaatactcgatcacaatcccacctgaaagaaagcccaagcattgggtgcccgctgagaaaatgtattacacacataggcggaggagatgggtaaggttgagaagaagagacctatcccagatggaggcccttaaaaggcacaggcaggctgaggctgagggtgaggggtgggagtatgcatcacttttcggttggaagtttcacctcgaatatagaaaaacagacgcttttcggaggcggcgatggcggcgcagaatggaaccgctggaaaagacagggccagctgcagtatttgcactggaaggggcccttggaggcgttatggacgataagagcgaggatagcatgagcgtttcgaccctttcatttggcgttaacagacctactataagttgtatcttcgattacggaaatagataccacctccggtgttatatgtatcaggctagggacctggccgctatggacaaggactccttctccgatccctacgcaatcgtgtcttttctgcaccagtctcagaaaaccgtcgttgttaaaaatactctgaatccaacttgggaccagaccctgatcttttacgagattgagatctttggcgaaccagctactgttgccgaacagcccccatcaatcgttgtggaactgtacgaccacgatacatatggtgctgatgaattcatgggcagatgcatctgtcaaccttctctcgaacgaatgcccagattggcttggtttcccctgactcgaggcagccagcccagcggcgaactcctggcatccttcgagctgatacaacgcgaaaagcctgctatccatcatatacctgggttcgaagtgcaggagacctctcggatccttgacgagtccgaagatacggatctcccctaccctccccctcaaagggaggctaacatatacatggtgcctcagaacataaagcctgccctgcaacgcacagcaattgaaattctggcctggggtcttcgcaacatgaaatcttatcagctggctaatatttcttcccctagcttagtcgtcgagtgtggcggacaaaccgttcaaagctgtgtgatccgtaacctgaggaaaaatcctaactttgatatctgcacgctctttatggaagtcatgctccccagagaggagctctactgccccccaattaccgtgaaagtaattgacaatcgccaattcggacgccgtcccgtggtcggccaatgcacaatacggtctctggagtcttttctatgtgatccctactccgccgagtcccctagccctcagggcggcccagacgacgtgtcccttctctcccccggtgaagatgtgctaatcgacatagatgataaagaaccccttatccccattcaggaagaagagtttatcgactggtggtcgaagttttttgcaagtatcggagagagagagaagtgcgggtcataccttgaaaaggattttgatacacttaaggtctatgacacccaactggagaatgtcgaagcatttgaggggctgtctgacttctgcaacacatttaaactgtaccgcggaaaaacccaagaggaaacagaagaccctagtgtgataggagaatttaagggcctgtttaagatatacccactgcccgaagaccccgccatccccatgcctccccggcagttccaccagctggcagcgcaagggccccaggaatgcctagttagaatctacatagtgcgcgccttcggcctgcagcccaaagatccaaatggcaaatgtgatccttatattaagatctctataggcaaaaagtccgtctcagaccaagataattatattccctgtaccctggaacccgtcttcggaaaaatgttcgaactaacttgtacgcttccacttgagaaagacctaaagattacattgtatgactacgatctgctctcaaaagacgagaagattggagaaactgtggttgatctggaaaaccgccttctgtcaaaatttggggctcgatgtggattgccccagacctactgtgtgtcagggccgaatcagtggcgtgatcaactgcgcccgtcacagcttctgcacctgttttgtcaacaacatcgcgttaaagcacccgtgtatcggacggacagagtgatgttccaagacaaggagtacagcatcgaagagatcgaagccggtagaattccaaacccacacctggggcctgttgaagaacggctagcccttcatgtgttacaacagcagggtcttgtgcctgagcacgtggaatcacgcccactgtattcaccgctgcagcctgacatcgagcagggcaaacttcagatgtgggttgacctttttccgaaagctctgggccggccgggtcccccttttaatattacacccagaagagctaggcggtttttcttacgctgcatcatttggaacacccgtgacgtcattctggatgatttaagcctgactggagagaaaatgagcgatatctacgtgaaaggttggatgattgggtttgaagagcacaaacagaagacagatgttcactatcgctcactgggaggcgaagggaacttcaactggaggttcattttcccatttgactacctacccgccgagcaggtttgtaccatcgctaaaaaggacgccttttggagacttgataaaacagagtcaaagataccggctcgagtggtcttccagatttgggataacgacaagtttagttttgatgattttctgggatctctgcagcttgatttaaataggatgcccaaacccgccaaaactgcaaagaagtgtagtctggaccaacttgacgatgcctttcaccccgagtggttcgtctctctctttgaacagaagacagtgaaagggtggtggccgtgtgtcgcagaggaaggtgaaaagaaaatcctggctggtaagctggaaatgacgttagaaattgtggcagaaagcgagcatgaggaacgccccgctgggcaaggacgtgacgaacccaacatgaaccctaagttagaagacccgagaagaccagacacctccttcctgtggttcacaagcccttacaaaaccatgaagtttatcctctggcggagattccggtgggccatcatcctgtttatcattctatttatcttgttgttgtttctcgccatattcatctatgccttccccaattatgccgcaatgaaactcgtcaaacccttttcttag

SEQ ID NO: 5207 - RNA, 6306 nt, synthetic construct
  misc_feature 1..6306: note = source = /note="Description of Artificial Sequence: Synthetic coding sequence"
  source 1..6306: mol_type = other RNA
atgttaagagtcttcatactgtatgccgaaaacgttcatacccccgacactgatatatcagatgcgtactgttcagcagttttcgcaggcgtgaagaagaggaccaaagtgataaaaaatagcgtgaacccagtatggaacgagggcttcgagtgggacctcaaggggatacccctggaccagggctcagaacttcatgtagtggttaaagatcacgaaaccatgggccggaatagatttttgggcgaggcgaaagtccccttgcgagaagttttggctacacccagcctgagtgcgagtttcaacgcgccattactagacaccaaaaaacagcccacgggcgcctctcttgtccttcaggtgtcttacactccactgcccggcgccgtcccactttttcccccccctacacctttagaaccatcgcctactctgcctgatctggacgtggtggccgataccggcggcgaggaggacacagaagaccagggcttaaccggcgacgaggcagagccgttcctagaccaaagtggcggacctggagccccgactacccccagaaaattgccaagcagaccaccaccccactaccccggcatcaaaaggaaacggtcagctcccacctctcgaaagctgctgtctgacaagccccaggatttccaaattagggttcaggtgatcgagggacgccagctacctggagttaacatcaagcccgtagtgaaggtcaccgccgctggacagaccaagagaacacggattcataaaggaaattcgcctctttttaacgaaacactcttcttcaacctgtttgactcacccggagagttattcgatgaacctattttcatcaccgtggtcgatagtagatccctgcgcacagatgcactgcttggcgaattcagaatggacgtgggaacaatctatcgggaaccccggcatgcctatcttagaaaatggttgctgttgtccgaccctgatgacttttccgccggtgcccgcggctatctgaagacaagtctgtgcgtgctgggccccggcgacgaggcgcccctggaacggaaagatcctagcgaggataaagaggatattgagtcgaatctcttgagacctactggcgtggccttgagaggggcacatttctgtttgaaagtgttccgtgcggaagatctgccccaaatggatgatgcggtgatggataatgttaaacagattttcggctttgaatctaacaaaaaaaacctggttgaccctttcgtagaggttagcttcgctggaaaaatgctctgcagcaagatcctagaaaagacggccaatccacaatggaaccaaaacatcacacttccagctatgtttccatctatgtgtgagaaaatgcgaatacgaatcatcgattgggatagactaacgcacaacgacatagtagcgactacttatctgtccatgagtaaaatatctgcacccggaggtgaaatcgaagaagagccagctggtgctgttaagccctctaaagcttcagacctggatgattaccttggatttctgccaaccttcggaccctgttacattaacctgtatggatctcctcgagaatttactgggtttcccgacccatacactgagctcaacaccggtaagggggagggagtagcctacagaggtagactgctgttgagcctggaaactaaactggtcgaacattctgaacaaaaagttgaagatttgccggcagacgacatccttcgggttgaaaaatacctgcggagacggaagtatagtttatttgctgcattttatagtgccacaatgctgcaggatgtggacgatgcaatacagttcgaggtaagcatcggaaactacgggaacaagtttgacatgacctgtctgccactcgcttcgaccacacagtactctagagccgtgttcgacggatgtcactactattacttgccatgggggaacgtcaaaccagttgttgtactgagctcatactgggaagatatatcccacagaattgagacccaaaaccagctgcttggcattgccgacaggctcgaagctggcctagagcaagttcacctcgctcttaaagcacaatgttcaacagaagacgtggattcactcgttgcccagctgacagatgagttgattgcaggatgctcacagcctctgggagatattcacgaaactccctccgctacacatctcgatcagtatctctatcaactccgaacacatcatctctcacagatcacggaagccgctcttgcgctgaaattggggcactctgagctccccgccgcactcgaacaggccgaagactggctgctgcggctgcgcgcattggccgaggaaccccagaactctctcccagatatcgtcatctggatgctccaaggtgataagagggtcgcctatcagagagttcccgctcaccaggtcctgtttagcaggcgaggagctaactattgtgggaaaaactgtggtaaactgcagacaattttcttgaaataccctatggaaaaagtgccaggagctcgcatgcctgtgcaaatccgagtgaagctgtggttcgggctgagcgttgatgagaaggagtttaaccagttcgccgagggaaaactcagcgttttcgccgagacatacgagaatgaaactaaactagcgctggtcggaaattggggaactaccggtttaacgtatcccaagttctcagatgtaacaggcaaaatcaaactccccaaagatagctttagaccctccgcaggatggacttgggccggcgactggtttgtgtgccctgaaaagacccttcttcacgatatggatgcaggtcatctgtccttcgtggaagaagtatttgagaaccaaacgagactgcctggaggccagtggatctacatgtctgataattacacagatgttaatggtgaaaaagttttaccaaaggacgatattgaatgcccactcggctggaagtgggaagatgaggagtggtcaacagatctaaaccgggccgtggatgaacaagggtgggagtacagtatcaccatcccccccgaaagaaaacctaaacattgggtgcctgcagagaaaatgtactatacgcacagacgcaggagatgggtgagactgaggaggcgggacctctcccagatggaggctctgaaaaggcaccgtcaagctgaagccgagggcgagggctgggagtacgcgagcctattcggctggaaattccacctagagtatcgtaagactgatgccttcaggagacgcagatggaggaggagaatggaacctctcgagaaaaccggacccgcagccgttttcgccctggagggcgctcttggaggagtcatggacgataaatctgaggactctatgagtgtttcaacattgagttttggcgtgaaccgtccgaccatctcttgtatattcgactacggtaacagatatcatctccgctgctatatgtatcaggcacgggacttggccgcaatggataaagacagtttttcagacccctacgccatcgtttcctttcttcaccaatctcaaaagactgtagttgtcaaaaatactctgaatcctacttgggaccagacactgatattctacgaaattgaaatcttcggcgaacccgccaccgtagccgaacagcccccctctattgtcgttgaactgtacgatcatgacacctacggcgctgatgaattcatgggaagatgtatatgccagccgtcactggaacgaatgccccgcctcgcctggttcccactgacccgaggttctcagccttccggggaactccttgctagcttcgagctgatccaaagagaaaaaccagcaatccatcacattccaggcttcgaagtgcaggagacgtccagaatcttagacgaatctgaggatactgacctgccctacccaccacctcagagagaggctaacatctacatggtgccccagaacattaaacccgctctgcaacgcacggcaattgaaatcctggcttgggggctgcgaaatatgaaaagctatcagttggccaacatctcctccccttcattagtcgtcgagtgtggcgggcagacagtgcagtcctgcgtcatcagaaatttgcgaaagaaccccaatttcgatatctgtactttatttatggaggtcatgctgccccgtgaagagctctattgccccccaattacagtgaaggtgatcgataacagacagttcggtaggagacccgtggtaggtcaatgcaccattaggtccctcgaatcatttctctgtgatccctattcagcggaatccccttctccacagggtggccccgatgatgtaagtctgttgtctcctggcgaagacgtgctgattgacatagacgataaagaacccctcattccaatccagctggcagacggactcagctcactggcacccacgaacacagcatctccaccctcttcacctcacgaagaagagttcattgactggtggtctaagtttttcgcatcaatcggcgagcgtgaaaaatgtggctcttacctggaaaaagattttgatacgttaaaagtttacgatactcagctcgagaacgttgaggcgtttgaaggcctttcagacttctgcaatacattcaaactgtatagaggcaagacgcaggaggaaactgaggatccatcagtaatcggtgaattcaaaggcttgttcaaaatatatcccttgccagaggatcccgccatcccaatgccccccagacaatttcaccagttggccgctcagggcccacaggagtgcctggttaggatttacatcgtccgggctttcggacttcagcctaaagaccccaatggaaagtgcgatccatacatcaaaataagcattggaaaaaagagtgttagtgatcaggacaattacattccctgtaccttggaacctgtcttcggtaagatgttcgaactgacctgtacgttgccactcgagaaagacttgaaaatcaccctatacgattatgatttgctcagtaaagatgaaaagatcggcgagactgtagtagacttggagaaccgactgctctcaaaatttggtgcccgttgtggtctcccacaaacgtactgtgtgtccggcccaaaccagtggcgcgaccaattgaggccaagtcagctcttacaccttttttgccagcagcatagggtgaaagctccagtatataggaccgatagggtgatgtttcaggataaagagtatagcattgaagaaatagaagcgggaaggattcctaatcctcaccttgggccagtggaagagcgattggcactgcacgtcttgcagcaacagggtttggtgcctgaacacgtcgagtcaagacctttatactcccctctacagcctgatattgaacaggggaaactgcagatgtgggttgacttattcccaaaagctctgggtaggcctggacctcccttcaatatcacaccaagacgagcccgaagattctttctgcgatgcatcatctggaacacacgcgatgtgatcttagatgacctgtcactgaccggggaaaaaatgagcgatatttatgtgaaaggctggatgattggttttgaggaacacaaacagaaaactgacgtgcactaccgatctctcggcggagaaggaaactttaactggagatttatcttccctttcgactatctccccgccgagcaagtttgcaccatcgccaagaaggatgcattttggagactcgataaaaccgaaagcaagatacctgctagagtcgtgtttcagatctgggataatgataagttcagtttcgacgacttcctgggaagcctccagcttgatctgaatagaatgcccaaacccgctaaaaccgcgaaaaaatgcagcctggaccaactcgacgacgcttttcaccctgagtggtttgtcagtctgttcgaacaaaagacagttaaagggtggtggccgtgtgtggcagaagagggtgagaagaagatcctggccgggaaattggaaatgacactagaaatcgttgctgaatccgagcatgaagaaagaccagccggccagggtcgcgacgaaccgaacatgaatccaaaattggaagatccacgaagaccagatacttcattcctctggttcacttcaccgtacaaaaccatgaaattcatcttgtggagacgcttccggtgggccatcatcctttttattatcctgtttattcttctcctgttccttgcaatcttcatttatgcctttccaaactatgcagccatgaagctggtcaaaccgtttagctag

SEQ ID NO: 5208 - RNA, 447 nt, synthetic construct
  misc_feature 1..447: note = source = /note="Description of Artificial Sequence: Synthetic coding sequence"
  source 1..447: mol_type = other RNA
atgggttacccagaagtggagcggagagagctgttacctgctgctgcccctcgcgaaagaggatctcagggttgtggatgcgggggagcacctgccagagctggcgagggaaattcttgtttgttgtttctgggcttcttcggtctgtctttggcgttgcaccttcttaccctgtgttgctacctggagttgagatctgagctaaggcgagaaagaggagccgaatctaggctaggtggcagtggcactcctggtacctcaggcaccctgtcgagcctcggcggtctcgatccagactctcccatcacctctcacctgggccagccatctcctaagcagcagccactagaaccgggggaagcagcactacactcagattcgcaagacggtcaccaggacttcgattatattatatcattctcgtatggtttacaaggcttctgttag

SEQ ID NO: 5209 - RNA, 1176 nt, synthetic construct
  misc_feature 1..1176: note = source = /note="Description of Artificial Sequence: Synthetic coding sequence"
  source 1..1176: mol_type = other RNA
atgggctatccggaagtggagcgacgagaactgctgcctgccgccgctccgagagaaagagggtcccagggttgtggctgtgggggtgcacctgcccgtgcaggcgagggcaactcctgtctcttatttctgggcttttttggcctctctctggcattacacttattgacgctctgttgctacctggaactgaggagcgaacttagaagggaacgaggcgcagaaagcaggttaggcggatcagggacacccggaacttccggaactctgagctctctcggtggactcgaccctgacagtcccatcacttcacacctagggcagccatccccaaaacagcaaccactggagcctggagaggccgcgcttcattcggattcccaggatggacatcagatggcattgctgaactttttcttccccgatgagaaaccatactcagaggaggaatccagacgcgtgcgccgcaacaaacggtctaaaagcaacgaaggcgcggacggaccagtgaaaaataagaaaaaaggaaagaaagctggaccaccaggacccaacggaccccccggaccccccggtcctcccggcccccagggccctcccggcattcccggaattccaggaatccccggaacaactgtcatggggcctccggggccccccggccctcctggacctcaggggccacctggccttcaaggcccatccggtgccgccgacaaagccggaactagagagaatcaacctgctgtggtgcatttacaagggcagggatcagcgatacaagttaagaacgatcttagtggaggggttctgaatgactggtctcgaatcactatgaatccaaaggttttcaagttgcatccccgaagcggcgaattggaggtgttagtagatggtacatatttcatatattcacaggtcgaagtctattatattaatttcaccgactttgcaagctacgaagtcgtggttgacgaaaagccattcttgcaatgtactaggtctattgagacaggcaaaaccaattacaatacttgttataccgccggggtctgcctcctcaaagccaggcagaagatagctgtcaagatggtgcatgcagatatctctattaatatgtctaaacacacaaccttttttggggccatcagactgggagaagcacctgcctcatag

SEQ ID NO: 5210 - RNA, 1170 nt, synthetic construct
  misc_feature 1..1170: note = source = /note="Description of Artificial Sequence: Synthetic coding sequence"
  source 1..1170: mol_type = other RNA
atgggttatcccgaggtggaacgaagagaacttctgccagcggcagctccacgggaaagaggctcccaagggtgtggatgcggaggggcccccgccagggcaggggagggaaacagctgtctgctcttcctaggcttctttggactgtccctcgcgctccacttgttgaccctgtgttgctatctggaattacgcagcgagctaagaagggaacgtggcgctgagagcaggctgggcggctctggtactcccggaactagtgggacactatcttccctgggtggacttgaccccgactcccctataacatcacatctcggccagccgagtcctaagcagcagcctcttgagcccggtgaagctgcccttcatagcgactcacaggacgggcatcagatggccttgctaaattttttctttccagacgaaaaaccctactctgaggaggagtctcggcgcgtgcgtagaaacaaaagatcaaaatctaatgagggagccgacggtcccgtcaaaaataagaaaaaaggtaaaaaggctggtcctccaggtcccaatggtcctcctggccctccaggccctcctggaccccaaggccctccaggtattcccggaatccccggcatcccaggaactacggtaatggggccccctggccctcccggacctcccggaccccagggtcctccaggattgcagggtccgtccggagctgctgacaaagccggaaccagagaaaaccagcccgccgtggtacatcttcagggccagggaagtgcaattcaggttaagaatgacttaagtgggggtgtgcttaatgactggtcacgcattacaatgaaccctaaggtgtttaaactgcacccgcggagcggagagttagaagttctggttgatggcacttattttatttacagtcaggtttattacatcaacttcacagacttcgcttcatatgaggtagtggtggacgagaaaccctttctgcagtgtaccagatcaattgagaccggcaagacaaattataacacctgctacactgctggcgtctgtttacttaaggctagacagaaaattgctgttaagatggtgcatgctgacatctcaattaatatgtctaagcacacaactttcttcggagctatccgcctaggcgaggcacccgcatcatag

SEQ ID NO: 5211 - RNA, 408 nt, synthetic construct
  misc_feature 1..408: note = source = /note="Description of Artificial Sequence: Synthetic coding sequence"
  source 1..408: mol_type = other RNA
atgggttaccctgaggtggaaagaagagagctattaccagctgctgcccccagagaaagaggatcacagggatgtggttgtggcggcgccccggcaagggccggagaaggcaactcctgtctcctgttcttaggcttcttcgggctctcccttgctttacatttgctgaccttgtgctgctatttggagttgagaagcgaactcagacgagaaagaggggcagaatcgcgactgggcgggtccggcactcccggcaccagcggtactctgtctagccttggcggcttagaccccgactcccccatcaccagccatctcggtcagccctctcccaagcagcaaccgcttgagcctggcgaagcagcactccattcagattcgcaggatggccaccaaggacaccagtag

SEQ ID NO: 5212 - RNA, 1161 nt, synthetic construct
  misc_feature 1..1161: note = source = /note="Description of Artificial Sequence: Synthetic coding sequence"
  source 1..1161: mol_type = other RNA
atgggttaccctgaagtggagaggagggaactgctgcctgccgccgcccctcgggagagagggagccagggatgcggatgtggcggcgcacctgcgcgggctggtgaggggaattcgtgccttctcttcctgggctttttcggcctatctttggcactacatcttctgactttgtgctgttacctcgagctccgctccgaactaagaagagagagaggggccgagtcacgcctaggcggctcaggtaccccaggtacgtccggcacattatccagcttgggaggactcgatcccgattccccgatcaccagtcacctgggccagccttcccctaagcaacaacctctcgagccaggggaagctgccctacacagtgatagtcaggacgggcatcaaatggctctattgaattttttctttcccgatgaaaagccctattccgaggaagagtcccggcgcgtgaggagaaacaagaggagcaaatcaaacgaaggtgctgacgggcctgtcaagaacaagaaaaaagggaagaaagccggaccacccgggcctaacggaccacccggaccgcctggaccaccgggacctcagggaccaccaggaattccaggaattcccggcatcccaggcactaccgtgatgggaccgcctggaccacccggtcctcccgggcctcagggccctcccggtttgcagggcccatcaggagcagcagacaaagcaggtaccagagagaaccagcccgcagtggtacacctgcagggacaaggatcagccatacaagttaagaatgggggggtgctgaacgattggagtcggattacaatgaaccccaaggtgtttaagctgcacccgcgctcaggggaactggaagtgctggtggacggaacgtactttatctattctcaagtctattatataaatttcactgattttgctagctatgaagtggttgtcgatgaaaaacctttcctgcagtgcactaggagtatcgaaacaggaaaaacaaactataatacatgttacacagccggcgtttgtctccttaaagcgcggcaaaagatagcggttaaaatggttcacgccgacatcagcataaacatgtccaaacacactacctttttcggagctattagactaggggaggcccccgcatcatag

SEQ ID NO: 5213 - RNA, 447 nt, synthetic construct
  misc_feature 1..447: note = source = /note="Description of Artificial Sequence: Synthetic coding sequence"
  source 1..447: mol_type = other RNA
atgggatatcctgaagttgagagacgggaacttcttccagcagcagcaccgagagagagaggatcccaaggctgcggctgtgggggagcaccggcacgggccggagaggggaatagctgcctactgtttttagggttcttcgggttgagtctggcccttcacctgttaacactgtgctgctacctggaactgagatcggaattaagacgggaaaggggagccgagagcagactcggtggatcagggacccctggaaccagcggcaccttatcgtcgttaggcggcctggatccagattctccaatcaccagtcatcttggacagccttcacccaaacagcaaccactggaaccaggcgaggccgcattacattcagatagccaggatgggcaccaggattttgactacattatttcattttcatacgggttgcaagggttttgctag

SEQ ID NO: 5214 - RNA, 3429 nt, synthetic construct
  misc_feature 1..3429: note = source = /note="Description of Artificial Sequence: Synthetic coding sequence"
  source 1..3429: mol_type = other RNA
atgttagttctcagatgcaggctgggcacatcttttcccaagctggataatttggtaccaaagggcaaaatgaagattcttttagtgtttttgggcctattgggaaacagtgttgcaatgcctatgcacatgccccgcatgcccggttttagttccaagagcgaggaaatgatgaggtataatcaatttaactttatgaatggtccgcatatggcccaccttggacccttcttcggtaacggccttccccagcagttcccacagtaccaaatgccgatgtggcctcagccccctcccaatacctggcacccaagaaagtcatccgcccccaaacgccacaataaaactgaccaaacacaggagacccagaagcccaatcagacccagagcaagaaaccaccccagaagagaccactgaaacaaccgtctcataaccagccccagcccgaagaggaagcccagccaccacaggcattccccccttttggaaatgggctgttcccatatcagcagccgccttggcaaatacctcagagactgccaccacctggttacggccggcctccaatatccaacgaagaaggcggaaacccctatttcggctactttggttatcacggctttggaggccgtcctccatattattcagaagagatgtttgaacaggattttgagaaacctaaagaggaagacccacctaaggcagagtcaccagggacggagccaactgctaactccacggtcacagaaaccaactcaactcagccaaaccctaaaggatcgcaagggggaaacgacacatctcccaccggcaattccacaccagggctcaacactgggaacaatccacccgctcagaacggaatcggccccttgccggcagtaaacgcttcaggtcaaggagggccaggctcccaaatcccctggagaccatcccagccaaacatccgcgagaaccatccatatcccaacataagaaatttcccttcaggtcgccaatggtacttcaccgggaccgttatggggcaccgccagaatcgtcctttctaccgaaatcaacaagtccagcgcggaccaagatggaacttctttgcctgggaacggaaacaggtagctcgtccaggcaaccccgtttaccataaagcctacccccccacgtcaagagggaattatcctaactacgccggtaaccccgccaacctcagacgaaagcctcagggacccaataagcatcctgttggaactacagtagccccgctcggaccaaagccaggacccgtcgtaagaaatgagaaaatccagaatcctaaggagaaaccattaggaccaaaggaacaaatcattgtacctactaagaatccgactagcccatggaggaacagccaacagtatgaagtgaacaaaagtaactacaaactgcctcatagcgagggctatatgcccgtaccaaatttcaactccgtcgatcagcacgaaaattcttactacccgaggggcgactctagaaaggtgcccaattcagacgggcagactcaaagtcagaatctaccgaagggaatcgtactagggtcaaggagaatgccatatgaaagtgagaccaaccaaagcgaactgaaacactcatcttatcaaccagctgtgtatcctgaagagatccccagccccgcaaaagaacactttccagcaggccgtaatacctgggaccatcaagagatttcccctccctttaaagaagatccgggtcggcaggaggaacatctgccacatccatcacacggctctcgaggctctgtattttacccagaatacaacccatacgaccctagagaaaacagcccctacttgcgcggcaatacctgggatgaacgggatgatagcccaaacaccatgggccagaaggagagcccactgtatcccatcaacaccccggatcagaaagaaattgtaccttacaatgaggaggaccccgtcgacccgacaggagacgaagtgtttcccggacaaaatagatggggtgaggagttgtcatttaagggcggacctaccgtgagacactatgaaggagagcagtacacttccaatcagccgaaggaatacctgccatatagtctggataacccctccaaacccagagaagacttctattactccgaattttatccttggtcccccgacgaaaattttcccagctacaacaccgcatccactatgcctcctcccatcgaatcaaggggctactatgttaacaatgctgccggcccggaagaatctacgttgttccctagcagaaacagctgggaccacaggatccaggcgcagggccagcgtgaacgtcgtccttatttcaatcgcaacatttgggatcaggctacccacctgcagaaagctcccgctagaccccctgaccagaaggggaaccagccatattacagcaatactcccgcaggactgcagaagaatccaatttggcatgaaggagaaaatctgaactatggtatgcagatcacgcgcatgaactcacctgagagagaacactcatccttccccaatttcatccccccctcttatccatcaggacaaaaggaagcgcacctgttccatttgagtcaaaggggatcttgttgcgccggctcaagtacaggccctaaagacaacccacttgcactccaagactatacgccaagttatggattggctcccggcgagaatcaagacacgtctcccctttacacggatggatcccatactaagcaaactcgcgacatcatctctcctacatctattttaccgggtcaacgcaacagttccgagaaaagagagtctcaaaatccttttcgtgacgacgtttccacactgcggcgtaatacgccttgctctatcaaaaatcagctcggtcaaaaagaaattatgcctttccccgaagcttcatcactgcagtccaaaaacacgccatgcttaaagaacgatttgggaggggacggtaacaatattttagaacaagtctttgaagacaaccagcttaacgaacgaacagtggacctgactccagagcagctagtcattggcacaccggatgagggatctaatcccgaaggaatccagtcacaagtgcaggagaacgagagcgagcgacaacagcagaggcctagcaacatcctccacctcccttgttttggatcaaaactcgccaaacatcacagtagcaccacgggcaccccctcaagcgatgggagacaatcccctttcgacggcgactctatcacaccaacagaaaatccaaacacattagtcgaactggccacagaagagcagttcaaatcaatcaatgtggaccccttggatgctgacgagcatagcccattcgaattcttacagcgggggacaaacgtccaggatcaggtgcaggattgcctcctcctacaagcgtag

SEQ ID NO: 5215 - RNA, 582 nt, synthetic construct
  misc_feature 1..582: note = source = /note="Description of Artificial Sequence: Synthetic coding sequence"
  source 1..582: mol_type = other RNA
atgggtgtccacgagtgtccagcttggctttggcttctgttaagccttctcagtctccctctcgggttgcccgtccttggcgccccaccgcggcttatttgtgactctagagtgctggaacgctatcttcttgaagcaaaagaagccgagaatattactacaggctgtgctgaacactgctctttaaacgaaaatattaccgtccctgacacaaaagttaacttttacgcttggaaacgaatggaggttggccaacaggccgttgaggtatggcaggggctcgccctgttgtctgaagccgttcttagaggacaagctttactggtgaacagcagccaaccatgggagccacttcagttacacgtcgataaagccgttagcggtctgcgtagtctgaccactctcctacgcgccctgggagctcagaaagaggcaatctccccccctgacgcagcgtccgctgcccctctgcggaccattacagccgacactttccggaagctgttccgcgtgtactcaaattttcttagaggcaaattgaaattgtatacaggcgaggcatgtcgtaccggcgatagatag

SEQ ID NO: 5216 - RNA, 192 nt, synthetic construct; identical to SEQ ID NO: 4886
  misc_feature 1..192: note = source = /note="Description of Artificial Sequence: Synthetic coding sequence"
  source 1..192: mol_type = other RNA

SEQ ID NO: 5217 - RNA, 390 nt, synthetic construct
  misc_feature 1..390: note = source = /note="Description of Artificial Sequence: Synthetic coding sequence"
  source 1..390: mol_type = other RNA
atgaaaactcttcagttcttctttctcttctgttgttggaaggccatctgctgtaactcatgcgaactgaccaatattacaatagcgatcgaaaaagaggagtgtaggttttgcatctctatcaacactacctggtgtgctggctactgttacactcgagatcttgtttacaaagatcccgcgcgacccaaaatccaaaagacctgcacttttaaagagcttgtatatgaaaccgtgcgcgtacccggatgcgctcaccatgcggactccctctacacctaccctgtagctacacaatgtcattgtggcaagtgtgattccgacagtacagactgtacagtcagaggtttgggtcccagctattgtagttttggcgagatgaaggaatag

SEQ ID NO: 5218 - RNA, 390 nt, synthetic construct
  misc_feature 1..390: note = source = /note="Description of Artificial Sequence: Synthetic coding sequence"
  source 1..390: mol_type = other RNA
atgaaaacactgcagtttttttttctgttttgctgttggaaggccatctgctgcaattcatgcgagttgaccaatattactattgccattgagaaagaagagtgtcgtttctgtatcagtattaataccacttggtgtgcaggctactgctacactagggacttagtctataaagaccctgctcgacctaaaatccagaaaacctgcacttttaaagagctggtttatgagacagtgcgagttccaggatgcgctcaccatgctgattcactgtacacctaccctgtcgctacacaatgccactgtggtaaatgtgactcagatagtacagattgcacagtaagaggcctgggaccttcatactgctcattcggtgaaatgaaagaatag

SEQ ID NO: 5219 - RNA, 390 nt, synthetic construct
  misc_feature 1..390: note = source = /note="Description of Artificial Sequence: Synthetic coding sequence"
  source 1..390: mol_type = other RNA
atgaagacactgcaattctttttccttttctgctgctggaaagccatttgttgtaacagctgtgagctgacgaacatcaccatcgccattgaaaaagaggaatgccgattttgtatctcaatcaataccacctggtgtgccggctactgttataccagagacctcgtctataaagatccagcccgtccgaagatccagaaaacttgtacctttaaagaactggtatacgagaccgtacgagtcccgggttgcgcacatcacgcagattctctctacacctatcctgttgctacccaatgtcactgtggcaaatgtgattcagactcaactgattgtaccgttcgaggtctgggacccagttactgttcatttggtgagatgaaggagtag

SEQ ID NO: 5220 - RNA, 1569 nt, synthetic construct
  misc_feature 1..1569: note = source = /note="Description of Artificial Sequence: Synthetic coding sequence"
  source 1..1569: mol_type = other RNA
atggccgccgtggtcgccgctacaagatggtggcagttgcttcttgttctctctgcagccggaatgggggccagtggtgctccccagccacctaatattctgttgctcctaatggatgacatgggatggggggacttgggggtctatggggaaccctctcgcgaaactccaaatcttgacaggatggctgccgaaggcctgctattccctaacttttatagtgccaatcccctgtgctcaccatcaagagctgccctgcttacaggacgcttgccaatcagaaacggcttttataccactaacgctcacgcacggaacgcatatacaccacaggaaatcgttgggggtatccccgattcagaacagctgctccccgagctcctgaagaaagccggttatgtgagcaagatagtcgggaaatggcaccttggacaccgaccacaatttcatcccctcaaacatggattcgatgagtggttcggttcccccaattgccactttggaccttacgataataaagctcgccccaatatacctgtttatcgcgactgggagatggtcggacgctactatgaggagttcccaattaacttaaaaacaggcgaggccaatctcacccaaatctacctgcaggaagcccttgactttataaaacggcaagctcgccaccatccgttcttcctctactgggcggtggacgcgacccatgcacctgtatacgctagcaaaccattcctcgggacctcacagcgcgggcgctatggagatgccgttcgtgagattgatgattcaattggaaagattctcgagctcctacaagacctgcatgttgccgacaacacatttgtgttcttcacttccgataacggagcagcacttatttccgctccagaacagggaggttcgaacggccccttcctgtgcggaaaacaaacgacatttgaaggcgggatgagagagccagcactagcctggtggcctggacatgtaacagcaggacaagtttcccatcaactagggtcgattatggatctgtttaccacaagtttagcactcgccggacttaccccaccctcggacagggccattgatggactcaacctgctacctacgctattgcaagggcgtctcatggatcgccccatattctattaccggggagataccttaatggcagccacattgggacaacacaaggcacatttttggacttggactaattcgtgggaaaacttcagacaggggatcgacttttgccccggccagaacgtgagcggtgtcacaacacataacctggaggatcacactaagctgcccctaatctttcacctgggtcgcgatcccggcgagcgattccctttaagttttgcttctgccgaataccaagaagctctgtcgagaataacttcagtcgtgcaacagcaccaggaagccttagtaccggcacagccgcaactaaacgtgtgtaactgggccgtaatgaattgggctccacctggctgcgaaaaactaggaaaatgcctgacccctccagaaagtatcccgaagaagtgtttgtggtcacattag

SEQ ID NO: 5221 - RNA, 261 nt, synthetic construct; identical to SEQ ID NO: 4891
  misc_feature 1..261: note = source = /note="Description of Artificial Sequence: Synthetic coding sequence"
  source 1..261: mol_type = other RNA

SEQ ID NO: 5222 - RNA, 1344 nt, synthetic construct
  misc_feature 1..1344: note = source = /note="Description of Artificial Sequence: Synthetic coding sequence"
  source 1..1344: mol_type = other RNA
atggcagccgtggtggcggcgacccggtggtggcagctgttgctggttttgtcggccgcaggaatgggcgcgtccggtgcaccaggccaaagggcatatactccccaagaaattgtcgggggcattccggatagtgaacaactgctcccagaacttttaaagaaagcaggttacgtcagcaaaatcgtggggaaatggcacttgggccaccggccacagttccatcctctcaaacacggattcgatgaatggtttgggtctcctaattgtcactttggtccatacgacaataaggcccgcccaaacatcccagtgtaccgtgactgggagatggtgggacgttactatgaagaatttccaatcaatctaaagacaggcgaagctaatcttacccagatttatctgcaggaggccttagattttatcaaacggcaggccaggcaccatccctttttcctgtactgggccgtcgatgctacgcatgctcctgtctacgcatccaaacctttcctgggaactagtcagagaggaagatatggcgatgcagtacgagagattgatgactccataggcaagattctggaactgctgcaggatttgcacgtggcagataacacttttgtgtttttcacgagcgataatggcgccgccctcatctccgccccagaacaaggtggttcgaatggaccattcctttgcgggaaacaaacaacctttgaaggcgggatgcgtgagccagcgcttgcttggtggccagggcacgtaaccgccggccaggtctcccaccagctgggctccattatggatctgttcacgacttctctagcccttgccggcctgacacctccatccgacagagctatcgacggactgaatctgcttcctacattgcttcaaggaagacttatggaccggccaatcttctactatcgaggagacacactgatggcagctaccctcggccagcataaagcacatttctggacttggaccaactcctgggagaactttaggcaggggattgatttctgtcctggacagaatgtgtctggcgtgactacacataacttggaagatcataccaaacttcctctaatatttcacctgggtagagatccgggagagcgctttcccttgagtttcgcttccgcagaatatcaagaagcactcagcagaatcacaagcgtcgtgcagcagcatcaagaagctcttgtgcccgctcagccgcaactcaacgtgtgtaactgggccgtgatgaattgggcccccccaggttgtgaaaaactgggcaagtgtctgaccccccctgagtctatccccaagaagtgcttgtggtcccattag

SEQ ID NO: 5223 - RNA, 636 nt, synthetic construct
  misc_feature 1..636: note = source = /note="Description of Artificial Sequence: Synthetic coding sequence"
  source 1..636: mol_type = other RNA
atgaagttatgggatgtagtcgcagtttgcttggtcttactccacacggctagcgcattccctttacccgccggcaaaagacctcccgaggctccagctgaggatcgatctttaggaagacggagagctccctttgcactcagctcagactcaaacatgccggaggactatcctgatcagttcgatgatgttatggactttattcaagccacaatcaagcggcttaagcgatccccagacaaacagatggcggtcctgcctcgcagagagagaaacagacaagcagcggcagctaacccggagaacagccgcgggaaaggccgacggggacagagaggcaagaatagggggtgcgtgcttactgcaatccacttaaatgtgacagaccttggtcttggatatgagactaaagaggaactcatctttcgatattgctcaggaagctgtgatgcagctgaaaccacttacgataaaattttgaagaacctttccagaaatagacggctggtatctgacaaggtgggtcaagcctgttgtaggcctattgcttttgatgacgacttgagctttcttgacgataatctggtttaccacattttgcgcaagcattctgcaaaacgatgtggctgtatctag

SEQ ID NO: 5224 - RNA, 558 nt, synthetic construct
  misc_feature 1..558: note = source = /note="Description of Artificial Sequence: Synthetic coding sequence"
  source 1..558: mol_type = other RNA
atgaagctgtgggacgtagtagcagtgtgtctcgtcctgctgcacactgctagcgcgttccctctcccagccgctaacatgccagaggactacccggatcagttcgacgatgttatggatttcatccaggctactataaaaagattgaagcggagccccgataaacagatggctgtgctccccagaagagagagaaacagacaggcagctgccgccaatccagaaaacagccggggcaaggggcgaagaggacaacggggtaaaaataggggctgtgtcttgactgcaatccacctgaacgtcaccgatttagggttagggtacgaaactaaggaggaattgatctttaggtattgctcgggaagttgtgatgccgccgaaacaacttatgataaaatcctgaagaacttgtctcgtaaccgccggcttgtgagcgataaggtgggacaggcctgttgcagacccattgcctttgatgatgatttgtcctttctggatgataatttggtttaccatattttacggaaacattctgcaaaaagatgcggctgtatatag

SEQ ID NO: 5225 - RNA, 687 nt, synthetic construct
  misc_feature 1..687: note = source = /note="Description of Artificial Sequence: Synthetic coding sequence"
  source 1..687: mol_type = other RNA
atgcaaagcctcccaaactcaaacggagcagccgccgggagagattttaagatgaaactttgggatgtggttgctgtctgcctcgtgctactgcacactgcatcagcattcccccttcctgccggtaaacggcctccagaagctcctgcggaggatcgaagcttgggacgccgccgagccccctttgctctgtcttccgattctaatatgccagaggattatcctgatcagttcgatgacgtaatggacttcatccaagcaacgattaagagactcaaacgctcccctgacaaacagatggctgtattaccgaggagggagagaaatcgccaagccgccgcggcaaaccccgaaaactccagaggcaaggggaggcgtggacaaagaggaaagaaccggggatgtgtgctgacagctattcacctcaatgtgactgatttaggactgggatacgagacaaaggaagagctgattttccgctactgctccggctcgtgcgatgctgcagaaactacctacgacaagatcctgaagaacctctcacggaatcgcagactggtgtctgacaaggtcggtcaagcatgctgccgccccatcgcttttgatgacgatctctccttcctagatgacaaccttgtttaccatattctccgaaagcactccgcaaagcgctgtgggtgtatttag

SEQ ID NO: 5226 - RNA, 186 nt, synthetic construct; identical to SEQ ID NO: 4896
  misc_feature 1..186: note = source = /note="Description of Artificial Sequence: Synthetic coding sequence"
  source 1..186: mol_type = other RNA

SEQ ID NO: 5227 - RNA, 186 nt, synthetic construct; identical to SEQ ID NO: 4897
  misc_feature 1..186: note = source = /note="Description of Artificial Sequence: Synthetic coding sequence"
  source 1..186: mol_type = other RNA

SEQ ID NO: 5228 - RNA, 558 nt, synthetic construct
  misc_feature 1..558: note = source = /note="Description of Artificial Sequence: Synthetic coding sequence"
  source 1..558: mol_type = other RNA
atgaaattgtgggacgtcgtggccgtatgcctcgtactactgcatacagcttcagctttccccctcccagccgccaacatgccagaggattatcctgatcaattcgacgatgtcatggacttcatccaagcgactattaagcggcttaaaagatctcctgataaacagatggcagtcctgccacgaagagaacgtaaccgtcaggctgccgcagctaatcctgaaaattcacggggcaagggccggagaggtcaacgcggcaagaatcgtgggtgcgtgctaactgcaattcatctaaacgtcaccgatttaggtctgggctatgaaaccaaggaggagctgatttttaggtactgtagcggttcgtgtgatgcagctgaaaccacctacgataaaatcctgaaaaatctgtcacgcaaccggcgtctggtctctgataaagtcggacaagcttgttgtcgcccgattgcattcgatgacgatctgagctttcttgacgacaatctagtttaccacatactgagaaaacactccgccaagcgctgcgggtgcatttag

SEQ ID NO: 5229 - RNA, 609 nt, synthetic construct
  misc_feature 1..609: note = source = /note="Description of Artificial Sequence: Synthetic coding sequence"
  source 1..609: mol_type = other RNA
atgcaaagcttacccaactctaatggtgcagccgctggccgagatttcaagatgaaactttgggatgtggtggcagtctgcttagtcttacttcataccgctagcgcctttcccctgcccgcagctaatatgcccgaggactaccccgatcagtttgatgacgttatggattttattcaggcaactattaaacgtttaaagcgtagccccgataagcagatggcagtgctgccaaggagggagcgaaaccggcaggccgcggccgctaaccccgagaattcacgcgggaagggacgtaggggtcagagagggaagaatagagggtgtgtgctgaccgctatccatttaaatgtgactgacctgggattggggtacgaaactaaagaggagttaatctttcgctattgctcgggctcctgcgacgccgctgaaaccacttatgataaaatactgaaaaacttgtcccgcaacagaagactggtgtcagacaaagtaggtcaagcctgctgtagaccaattgcatttgacgatgatctgtcttttttggatgacaacctggtgtaccatatattaagaaaacactccgcgaagcggtgtgggtgcatttag

SEQ ID NO: 5230 - RNA, 543 nt, synthetic construct
  misc_feature 1..543: note = source = /note="Description of Artificial Sequence: Synthetic coding sequence"
  source 1..543: mol_type = other RNA
atgaagagtatctacttcgttgctggactcttcgttatgcttgttcaaggatcttggcagaggtcattgcaggacacagaagaaaagagtcgatctttctccgcgtctcaggctgaccctctctccgatcctgaccagatgaatgaagataaaagacatagccagggaacattcacctcagactactctaaatatctggactcaagacgcgcccaggatttcgtgcaatggctgatgaatactaagaggaatcgaaataacattgcaaagcgacatgacgagttcgaacgccacgcagagggcacctttacctctgatgtgagtagttatcttgaagggcaagcagcgaaagaattcatagcttggctagttaagggacgcggaagaagagacttccccgaagaggttgcaatcgttgaagaattaggcagacgccacgcggatgggtcttttagtgatgagatgaatacaatcctggacaatttggcagcgagagattttatcaactggcttatacagacaaagatcactgacaggaagtag

SEQ ID NO: 5231 - RNA, 543 nt, synthetic construct
  misc_feature 1..543: note = source = /note="Description of Artificial Sequence: Synthetic coding sequence"
  source 1..543: mol_type = other RNA
atgaaatccatatattttgttgccggtctctttgtaatgctcgtacaaggttcatggcaacgctcacttcaggacacagaagagaaatctaggtcatttagcgcttcccaggccgaccctttatcggacccggatcaaatgaacgaagataaaagacactcgcaagggaccttcacatcagactactccaagtatctcgattccaggcgggctcaagatttcgtgcaatggttgatgaacacgaagcgcaaccgcaataacatcgcaaagaggcatgatgagtttgaaagacatgctgaaggaactttcacaagcgatgtaagtagctacttggagggtcaagctgctaaggagtttatagcatggttagtgaagggccgcggacggagagactttcccgaagaggttgctatcgtggaagagctgggtaggaggcatgctgacggatctttttcagatgaaatgaacacaatccttgataaccttgccgccagagattttattaattggcttattcagaccaagattaccgaccggaagtag

SEQ ID NO: 5232 - RNA, 2859 nt, synthetic construct
  misc_feature 1..2859: note = source = /note="Description of Artificial Sequence: Synthetic coding sequence"
  source 1..2859: mol_type = other RNA
atgggtgtccgccatcctccatgcagccaccgcttactcgcagtctgcgcactcgtttccctagccacagccgccctcttgggccatatattactgcatgattttcttctggtcccccgggaactgtcaggatccagtcctgttttagaagaaactcatccagcacaccagcagggcgcttcccgccccggcccccgtgatgcacaggctcaccccggcagacctcgcgcagtccccactcagtgtgatgtccccccaaatagcagatttgactgcgcccccgataaagccatcacgcaggagcagtgcgaagcaagaggatgttgttatattcctgcaaaacagggactgcaaggcgcgcagatgggccagccttggtgctttttcccccctagttaccccagttataaactggagaacctgtcatccagcgagatgggctacaccgccacattgaccagaacgacacccacattcttccctaaagatattcttacactacgcctagacgtcatgatggagacggaaaatcgcctacattttacaatcaaggatcccgccaacagacgctatgaggtgcccctggaaacgccacacgtgcacagccgagcccccagtcctctatacagtgtagagttttccgaagaacctttcggtgtaatcgtccgacgccagcttgatggacgcgtcctgctgaatactacggtcgctcctctattctttgccgatcagttcctacagctttccacatctttacccagccagtatatcacaggcctagcagagcacctctcccccctcatgctgagtacctcatggacgagaatcaccctgtggaatagagacctggcccctacccccggagctaatctttatggcagtcacccattctacctagcactggaggatggcgggtcggcgcacggagtgttcctcctgaattctaatgcaatggatgtagttctgcaaccctctcccgctctgtcatggcggtctacaggcggcatcctagatgtttacatattccttggccccgagccaaagtcggttgtgcagcaatacctggatgtggtaggctaccctttcatgccgccttattggggcctgggttttcatctctgcaggtgggggtacagctcaacagctattactaggcaggtggttgaaaacatgaccagggctcacttcccacttgatgttcagtggaacgacttagactatatggattcgcggcgtgattttacatttaacaaagacggcttcagggacttccccgccatggttcaagaactgcaccagggaggcagaagatatatgatgatcgtagaccctgctatttcttcaagtggtcctgccggttcctacaggccttacgacgaaggcctgagacgtggagtgttcatcacaaatgaaacaggacaaccactcatcgggaaggtttggccaggatccaccgcatttcctgactttacaaatccaacggcattagcatggtgggaggatatggtagctgagtttcacgaccaggttcctttcgacggcatgtggattgatatgaatgagcccagtaattttatacgcggtagcgaggacggctgccccaataacgagctggagaatccgccatatgtacccggggtagtaggcggtacattgcaagcagctacaatttgcgcctccagccaccagttcctgagcacgcattacaacctgcacaacctttatggtttaacagaagctatagcatcccacagagccctcgtcaaagcgcgcggcacaagaccatttgtgatctcaaggtcaacctttgccgggcacgggcggtacgctggacactggacaggagatgtgtggtccagttgggaacagttagcaagtagtgtacctgagatcctccaatttaacctgctgggggtcccattggttggtgctgacgtgtgcggctttctagggaatactagtgaagagctttgtgttagatggacccagctcggcgcattttaccccttcatgaggaatcataattctttgctatccttgccacaggaaccatacagctttagtgagcccgctcagcaggcaatgaggaaggcactgacattgaggtatgctctcctccctcatttgtacactctgttccaccaagcccacgttgctggagaaaccgttgcaagacccctgttcctggaattccccaaggactcttccacttggaccgtggaccatcagctgttgtggggagaagcccttttgattacccccgtgctccaggccggcaaggctgaagtgacagggtattttcctctaggaacttggtatgacctccagaccgtccctgttgaagctctgggatccctccctcctccacccgccgccccaagggaaccagctatccacagtgaagggcagtgggtgactttgcctgctccactcgacacgattaatgtgcacttgagggcaggctatattattccgttacaaggcccagggctcaccaccactgagtctcgtcagcaacccatggcactcgccgttgccttaactaaaggcggtgaagctcggggagaactgttttgggacgatggagaatcattagaagttttagaacgcggagcttacactcaagttatttttctggcccggaacaacacgatcgttaatgaactggtgcgggtgacgagcgaaggcgctggattacagctgcagaaggtgacagtcttaggggtcgctacagctccacagcaggttctttcaaacggcgtcccagtatccaatttcacttattccccagacaccaaggttctcgatatttgcgtatccttgctaatgggggaacagtttctcgtgagctggtgttag

SEQ ID NO: 5233 - RNA, 2859 nt, synthetic construct
  misc_feature 1..2859: note = source = /note="Description of Artificial Sequence: Synthetic coding sequence"
  source 1..2859: mol_type = other RNA
atgggagtacgtcatcccccatgcagccaccggttgttggctgtttgtgcactcgtttccctggcaaccgctgctttgttaggccacattcttttacacgacttcctactcgtcccccgcgaattgagcggatcatctccagtccttgaggagacccaccccgcgcaccagcaaggggccagccggcccggcccaagagatgcacaggcccatcccgggaggcctcgcgctgtgccgacccagtgtgacgtgccccctaactcacgattcgattgcgccccagacaaagccattactcaggaacagtgtgaagcacgtggctgttgctatattcccgctaaacagggtctgcagggagctcagatgggtcaaccctggtgcttctttcccccgtcataccctagctacaagctagaaaacctctcttccagcgagatgggttataccgcaactctcacccgcacaacccccacttttttccctaaagatatattgaccctgcggctggatgtgatgatggagactgaaaatcgactccacttcaccataaaggatcctgctaacagaagatacgaagtgcctctagaaacgcctcacgtccacagtcgggctccatcccccttgtattctgtggaattttcagaagaaccatttggagtgatcgtccgtaggcagttggacggcagagtgctgctcaacaccaccgtggcccccttatttttcgctgatcaattcttgcagctgtctacaagccttccctcacagtacattactggtctggctgaacacttatcacccctcatgttgtcaacttcctggaccagaatcactttatggaatcgcgatctggctccgacaccaggcgccaatttgtacggcagtcaccctttttacctcgccctcgaggatggagggagtgcccatggagttttcttacttaacagcaacgcaatggatgtggttctgcaaccttccccggccctctcttggcgctcaaccggaggaattctcgacgtgtatattttcttgggaccagaacccaaatcagttgtgcagcaatatttggacgtggtaggctatccttttatgcccccctattggggtctcggcttccatctgtgtcggtggggatacagttctacagcaatcaccagacaggttgtagagaacatgacacgcgctcacttccctctggacgtccaatggaacgacttagactatatggattcacgacgggacttcacattcaataaagacgggtttcgcgatttccctgcgatggttcaagagctgcatcagggcgggcgccggtacatgatgatcgtcgatcctgcaatcagttcgtccggacctgccggttcctatcgaccatatgacgaaggattacgcagaggggttttcataactaatgagaccggccagcccttaataggaaaggtatggcctggttctaccgcattccctgattttactaatccgactgctctggcctggtgggaggatatggttgctgaattccatgaccaggtgccttttgatggaatgtggattgacatgaatgaaccgagcaattttattagaggttccgaggatggctgtccaaacaacgagctagaaaacccaccatatgtccctggagtagttggagggacactgcaggctgctaccatctgtgcatcctcgcaccagttcctgagtactcattataacctgcacaatctctatgggctgactgaagctatcgcttcccatagggctttagtgaaggcccggggtacccgaccttttgttatatcaagatctacctttgctggacatggaaggtacgctggccattggaccggcgacgtctggtcatcatgggagcagttagctagttcagtgcctgaaatactccagttcaacctgctcggcgttcccctggtgggtgcagatgtgtgtggctttttaggaaataccagcgaggagttatgcgtgaggtggactcagctgggcgctttctatcctttcatgcgtaatcataatagtttgttaagtttgccccaggagccttacagtttcagcgagccagcccaacaggccatgcgaaaagcactgacactgcgttacgccttgttgccacacctgtatacccttttccatcaggcgcacgtcgcaggagaaactgtagctcgacctttgttcctcgaattccccaaagactcttcaacgtggacggtcgatcaccaactcctctggggcgaggcactacttattactcctgtgctgcaggccggaaaagcggaagtgactggctactttccactcggcacttggtacgatctccaaacagttcccgtcgaagctttaggttctctgcccccaccccctgccgctccccgtgaacctgctatccatagtgagggacagtgggtcactctgccagccccattagacacaatcaatgtccacctgcgagccggctatataatcccattgcagggaccgggcctaaccacgacggaaagcaggcaacagcccatggcactggctgtagcgcttactaaagggggagaggcacgtggcgaattattctgggatgatggtgaaagtctggaagttctggagagaggggcttacacccaggtcatctttttggcgcgaaataacacaatcgtgaacgaactggttagagttacaagcgagggcgccggcctacaactacagaaagtgaccgtcttgggtgtcgccaccgccccccaacaggttctttcgaatggcgtcccagtttcaaacttcacctactctccagatacgaaagtcctcgatatatgcgtgtcattactgatgggcgagcaatttcttgtgtcgtggtgttag

SEQ ID NO: 5234 - RNA, 1611 nt, synthetic construct
  misc_feature 1..1611: note = source = /note="Description of Artificial Sequence: Synthetic coding sequence"
  source 1..1611: mol_type = other RNA
atggagttttcatcgccctctcgagaggaatgcccaaaaccgttgtcacgcgtttccattatggcgggttcactcactggactgctgttactgcaggccgtgagttgggcttccggcgctagaccttgcattccaaagagttttggctatagttcggtggtttgcgtgtgtaatgctacgtattgtgattctttcgatccccccacttttccagccctgggtaccttctcacgttatgagtctaccagaagcggcagacgcatggaactttctatggggccaattcaggcaaatcataccggtacaggcctgctgcttacccttcagccagagcagaagttccagaaagttaagggtttcggtggggcaatgacagatgccgcagctctgaatatattggccctctcccctccagctcagaatctcttactcaagtcatacttttcagaagaaggcattggctacaacattatcagagttccaatggcatcctgcgatttttccatccgaacttacacttacgccgatacacccgacgactttcagctccacaacttcagcctcccagaagaagatactaaacttaagattcctttgatccaccgcgctctgcagttggcacaaagacctgtgtcacttctggcctctccttggacctccccgacatggcttaagaccaatggcgctgtgaacggtaagggatctctgaagggtcagccaggagacatctatcaccaaacctgggccagatattttgtgaagttcctggatgcctatgccgaacataaactgcagttttgggccgtaaccgccgaaaatgaaccaagtgcaggactcctgagcggatatccttttcaatgtctaggcttcactccagaacaccagagagactttatagccagggacttagggccaaccctggcaaatagcactcatcataatgtaagattactcatgctcgacgatcagagactcctactgccgcattgggctaaagtggtgttaactgaccccgaagcagccaagtacgttcatggaattgcagtgcattggtatctggatttcctcgcgccagccaaggccaccttaggcgaaacacatcgactctttccaaacactatgctctttgcttccgaggcatgtgtgggcagcaaattttgggaacagagtgttaggttaggctcttgggacaggggcatgcagtatagtcactcgattatcacaaacctgctgtaccacgttgtcggctggacagattggaacttggccttgaatcctgaagggggtcccaattgggttcgtaactttgtcgattctcctatcattgtcgatatcaccaaagacacgttctataaacaacctatgttctaccatctgggccatttctcaaagtttatcccggaaggttcccagagagttgggctcgtcgcttctcaaaagaatgatctcgacgctgtggcattaatgcatccggacggctcagctgttgttgtcgtgctgaatcgctccagtaaggacgtccctctcacaattaaggacccagccgtcggattccttgaaactatttcacccgggtactcaattcacacatatctatggagaagacagtag

SEQ ID NO: 5235 - RNA, 1611 nt, synthetic construct
  misc_feature 1..1611: note = source = /note="Description of Artificial Sequence: Synthetic coding sequence"
  source 1..1611: mol_type = other RNA
atggagtttagttcccccagtagggaagaatgtcccaagcccctgtcacgagtcagtattatggctggatctctgaccggcctgctgctgttacaagccgtctcttgggcatccggcgcccgtccatgtatacctaagtcctttggctattcttcagtcgtgtgcgtgtgcaatgctacctattgtgattcattcgatcctccaacctttccggctctggggacttttagtaggtacgagtctacccgtagcggtaggcgcatggagctttctatgggaccaattcaggcaaatcatactggcaccggcttactcttgacacttcagccagagcaaaagtttcagaaagtgaagggttttggaggcgctatgaccgatgctgctgccttgaatatcctcgccttgtccccacccgcccaaaatctgttactcaaatcttatttttccgaagaaggtatcggctacaacattatcagagttccgatggcctcatgtgacttttctatccggacttacacatatgcagatacccccgatgacttccagcttcataacttctcactcccagaggaggatacaaaacttaagattcccttgatacatcgcgccttacagctagctcagagacctgtttcactgttggcaagcccctggacatccccaacctggttaaagacaaatggcgccgtgaatggaaaaggtagccttaagggtcaacctggcgacatctatcatcaaacatgggcgaggtactttgtgaagtttctcgatgcgtacgctgagcacaaattacagttctgggccgtgaccgcagagaatgaacccagcgccgggcttctgagtgggtatcccttccagtgcctgggtttcacccccgaacaccagagagacttcattgcgagggatttggggccaacccttgccaactcaacacatcacaacgttcgcctgttgatgctggacgaccagcgcctcctcctcccccattgggccaaggtcgtcctgactgaccccgaagcagccaaatacgtacatggtattgctgtgcactggtaccttgactttctcgctcctgccaaagcaacccttggagagacccacagactgttccctaataccatgctctttgcaagtgaggcatgtgtaggctcgaaattttgggaacaaagcgtccgcctaggctcctgggatcgcggtatgcagtattcacactcaatcataactaatttgctgtaccatgtggttggctggactgattggaaccttgccctaaatcctgaggggggcccgaactgggtgcgtaactttgtggattcaccaattattgtagatattactaaggatactttttataaacagcctatgttttatcacctggggcatttcagtaaatttatacctgaagggtctcagagagtaggtctagtggccagtcaaaagaatgacttagatgctgtagctctgatgcaccccgatgggagcgccgtcgtggttgttctcaatagatcctccaaagatgtgccgctaaccataaaagatcccgccgttggcttcctagagacaatttcccctggatattccatacacacatatctgtggcgcagacagtag

SEQ ID NO: 5236 - RNA, 1566 nt, synthetic construct
  misc_feature 1..1566: note = source = /note="Description of Artificial Sequence: Synthetic coding sequence"
  source 1..1566: mol_type = other RNA
atggaattctcaagcccttctcgcgaggagtgtcccaaacccctgtctcgagtgtctattatggctggctcactgacaggtctcctgttacttcaggcagtgtcttgggcttcaggagcccggccatgcatccctaagagcttcgggtattcctctgtggtctgtgtgtgcaacgcgacctactgcgactctttcgatccacctacatttcccgccttgggtactttctcacgctacgaaagcacacggtcaggacgccgaatggaactgtctatgggccccattcaagctaaccacaccggaaccgggctgcttttaacccttcaacctgatgccgcagctctgaacattttggctttgagtccccctgctcagaacctgctgctcaaatcatattttagcgaagaggggataggctacaacataatccgagtccccatggcctcctgcgacttttcaataaggacttacacgtacgccgacacacctgatgatttccaactccacaatttctcactgcccgaagaagacactaagttgaagataccactgatacaccgggccctgcagctcgcacaaagaccggtgagtctgctcgcctctccctggacatctcccacatggctcaaaaccaatggcgcggtcaatggaaagggaagtcttaaaggccaacctggggatatctatcaccagacatgggcacgttatttcgtgaaatttctagacgcttatgctgaacacaagctgcaattttgggccgtgacagctgaaaatgagccatccgccggtctactttcgggttatccgtttcagtgcttagggttcactcccgagcatcagcgcgacttcattgctagagatctaggacccacacttgcgaactctacacaccacaatgtgaggctattgatgctagatgatcagcggttactactaccacactgggctaaagtggtgctcacggatcctgaagccgcaaagtatgtccacgggattgctgttcattggtacttggattttctggcaccagcaaaagccactctcggcgaaacccatcggctctttcccaacaccatgctgttcgctagcgaggcctgtgttggtagcaagttctgggagcaatccgtgagattaggatcttgggacagaggcatgcagtattcacactctataattaccaaccttctctaccacgtggtgggatggaccgactggaatttagccttaaatcctgaagggggccccaattgggtaagaaatttcgtggactccccaattatcgtcgacattacaaaggacacattctataaacagccaatgttctatcacctggggcacttctctaagtttatcccagaaggaagccagcgagtggggctggtcgcctcccagaaaaacgacttggatgccgttgctctaatgcacccagatggaagcgcagtcgtggtggtgttgaatcggagctcaaaggacgtccccctgaccattaaagaccctgccgttggctttcttgagacaatatcacctggctattctattcatacatatctctggcgcagacagtag

SEQ ID NO: 5237 - RNA, 1464 nt, synthetic construct
  misc_feature 1..1464: note = source = /note="Description of Artificial Sequence: Synthetic coding sequence"
  source 1..1464: mol_type = other RNA
atggaattctcctcccctagcagagaagaatgccctaagccactttcacgtgttagtattatggcaggctcactcaccggactgttgcttctgcaggctgtctcatgggcgtctggcgcccgcccttgtattccaaaaagtttcggctattctagcgtcgtatgcgtgtgtaacgccacctattgtgactctttcgatcccccaacctttcccgctctgggtactttttctaggtatgagagcacacggtcagggcggcggatggaactcagcatggggcctatacaggccaaccatacaggaacggggattggttataatatcattcgcgtgccaatggccagctgcgacttcagtattcgaacatacacttacgccgacacccctgatgattttcagcttcacaatttcagtttaccagaagaggatacaaagctaaaaatacccctgatccacagagcgcttcagttagcccaacgacctgtctccctcctcgcatctccctggacatcccctacatggctgaagactaatggtgccgttaacgggaagggatccctcaaaggccagccgggcgacatctatcaccagacatgggcacgctacttcgtaaaatttctggatgcttatgcagaacacaaactgcagttctgggccgtaacagctgaaaatgaaccgtccgcggggctattaagcggataccctttccagtgtctgggcttcacccctgaacaccagcgggacttcatagcaagggatttgggaccgacactcgctaacagcactcaccacaatgtccgcttgctcatgctcgacgaccaaagattgttactcccacactgggcaaaggtggtgttaactgaccccgaagctgcaaagtacgttcacgggattgccgtgcactggtaccttgacttccttgcgcccgccaaagccacactgggagaaactcacagacttttccccaacactatgttattcgcctctgaagcctgtgtgggctcaaaattttgggaacagtcagtccgactgggatcatgggatcgcgggatgcagtattcccatagcatcatcacgaaccttctgtatcacgtggttggctggacagactggaatttggcactgaatccagaaggtggaccaaactgggtgcggaacttcgtggattcgccgatcattgtggatattacaaaggacacattctacaagcaacctatgttctaccatttaggacacttttccaaattcataccagagggaagtcagcgggtgggcctagtggcatcacagaagaatgatttggacgccgtagccctgatgcaccccgacggttccgccgtagtagttgttctgaacagatccagcaaggacgttccactaaccatcaaggatccagcagtgggatttctggaaaccatcagtcccggatactctatccatacttatctctggagacggcaatag

SEQ ID NO: 5238 - RNA, 1350 nt, synthetic construct
  misc_feature 1..1350: note = source = /note="Description of Artificial Sequence: Synthetic coding sequence"
  source 1..1350: mol_type = other RNA
atggagctatcaatgggaccaattcaggccaatcatactgggacagggcttctgctgaccttgcagcctgaacaaaaatttcaaaaagttaagggatttggaggcgccatgacggatgccgccgcactgaatattctggcactatctccccccgcacaaaacctgttgctgaaatcatacttttcggaggagggtatcggatataatatcattcgggtgcccatggcatcatgcgacttttctatcagaacctatacctacgctgatacacctgacgattttcaacttcacaattttagcctgcccgaagaagatacaaagttaaaaatcccactaattcacagagccctccagctagctcagaggccagttagcctattggccagcccatggacctcacccacctggctgaagactaacggggccgtcaatggaaaaggctctttgaaagggcagcccggagatatttatcatcagacttgggctagatacttcgtaaaatttctggatgcgtacgccgagcacaagctccaattttgggctgttaccgccgagaatgagccctccgccggtctcctgtcaggttatccattccaatgcctgggctttacacctgaacaccagcgtgactttatcgcacgtgatctaggccctactttggccaatagcacccaccacaatgtacgactactgatgctagatgatcagcggctcctgttaccccactgggctaaggtggttctgactgaccctgaggccgccaagtacgtgcacggcattgcggtccattggtaccttgacttcctagcacccgccaaggctaccctcggagaaacccataggctcttccctaacaccatgctgtttgcttcagaagcgtgcgttggttccaagttctgggaacagagcgttagacttggcagctgggacaggggtatgcaatattcacatagcatcatcactaatctgctataccatgtagtgggatggacggactggaacttggctctgaaccccgaagggggtcccaattgggtgaggaattttgttgattcaccaatcattgttgacattactaaggatactttctacaagcaacctatgttctatcacctaggacatttttccaaattcattccagagggttcccaacgtgtgggactagtagcttcacagaagaacgatctcgatgcggtcgcactgatgcatcccgacggctcagctgtggtcgtcgtactgaatcgctcttctaaagacgtaccactgaccattaaagaccccgcagtgggcttccttgaaacaatctctcctggctactccattcacacctacctatggcgacgacagtag

SEQ ID NO: 5239 - RNA, 1482 nt, synthetic construct
  misc_feature 1..1482: note = source = /note="Description of Artificial Sequence: Synthetic coding sequence"
  source 1..1482: mol_type = other RNA
atgacacttcgagggtggtcctttcaagttcttcccgagagtaacgcaacttactgtgattcctttgatcccccgaccttcccagcccttggtacattcagtagatacgaatccactagatctgggcgcagaatggaactcagtatgggaccaatccaggcgaaccatacgggaactggacttctgctaacgctgcagcccgaacaaaaattccagaaagttaaagggtttggaggcgctatgactgatgctgctgccctcaatatcctggccctcagcccacccgcgcagaaccttctgctcaaatcatactttagcgaagaggggattggctataacattatcagagttcctatggcttcttgcgatttctccattcgcacgtacacttacgccgacacccccgatgatttccaactacacaactttagccttcctgaagaagacacgaagctgaaaatccccctaattcacagagcgctgcagctcgcccagcgtcccgtttctctactggcttctccctggacttcccctacatggctcaagactaacggtgccgttaacggaaaggggtctcttaagggccaaccaggagatatctaccaccagacttgggccagatatttcgtgaagttcctcgacgcatatgccgagcataaattacagttttgggcggtcacagctgagaacgagcccagcgctggactgctttccggatacccctttcaatgcttgggcttcacacccgaacatcagcgagattttatagcaagggatctagggcctacactcgctaattctacacatcataacgttcgactcctcatgcttgacgaccagcggctgctcctccctcattgggctaaagttgttttgactgatccggaggctgccaaatacgttcatggaattgcggttcattggtaccttgacttcctggcgccagcgaaggccaccctgggggaaacacaccgcctctttccaaacaccatgctttttgctagtgaggcctgtgtaggatctaaattctgggaacagtctgtgagactcggttcatgggacagggggatgcaatatagccattccattatcactaacttactgtaccatgtggtcggatggaccgactggaacctagctctgaatcctgaaggtggaccaaactgggtgagaaattttgttgactccccaataattgttgacatcactaaggacaccttctacaagcaacccatgttttaccatctcggacatttctcaaaatttatccctgaaggctcccagagagtaggcctagtggctagccaaaaaaatgacctggatgcagtggctctcatgcatccggacggtagtgctgtcgtggttgtccttaaccgtagtagcaaagacgttcctctgactatcaaagaccccgctgtgggcttcctggaaacaatctctcctgggtattctattcacacatatctgtggcgaaggcaatag

SEQ ID NO: 5240 - RNA, 1272 nt, synthetic construct
  misc_feature 1..1272: note = source = /note="Description of Artificial Sequence: Synthetic coding sequence"
  source 1..1272: mol_type = other RNA
atggaattttcttcccctagccgggaggaatgccccaaacctctgtcccgagtgtctataatggccggttcactcactggactgctactcctgcaggctgtgtcatgggcctccggaatcggctacaatattattagagttccaatggcttcctgtgacttctccattagaacatatacatacgctgacacccctgatgacttccagctccacaattttagcctgcctgaagaagatacgaagctcaaaatccctcttatccacagagccctccaactagcccaacgcccagtatctcttctggctagtccctggacctcaccaacatggttgaagaccaacggcgcagtcaatggcaaggggagtttgaaaggacaacccggagatatctaccatcaaacatgggccagatacttcgtgaaattccttgacgcttacgccgaacacaagttacagttttgggctgtcacggcagagaatgaaccatcagcgggcctgcttagcggctatcccttccagtgcctgggcttcaccccagaacatcagcgcgacttcattgcaagagatttgggccctacgttagctaattccactcaccacaacgttcgtttgctgatgttagatgaccagcgactcctgctgccgcattgggcaaaggtggttctcacagatcccgaggccgcaaaatatgtgcacgggattgctgttcactggtatctggactttttagcaccggctaaagccactcttggcgagacacatcgcctgttccccaacaccatgctatttgcctccgaggcctgcgtagggagtaagttctgggaacaaagcgttcgtctgggctcatgggacagaggcatgcagtactcacattctataattacaaacctgctgtatcacgtcgtgggatggaccgactggaacctagctttaaaccctgaaggcggtccgaactgggttcgaaatttcgtggatagccctattatagtcgacattacaaaggatacattttacaagcagcccatgttttatcaccttggccattttagtaagtttattcccgaaggttctcagcgcgtgggcctggtagcctcccagaagaatgacctggacgctgtagccctgatgcacccagatggcagcgcagtggtggtggtactgaaccggagttcaaaggatgtccccctcacaatcaaggaccccgctgtgggattcctcgagaccatttcacccggctattctatccatacatatctgtggcgaagacagtag

SEQ ID NO: 5241 - RNA, 351 nt, synthetic construct
  misc_feature 1..351: note = source = /note="Description of Artificial Sequence: Synthetic coding sequence"
  source 1..351: mol_type = other RNA
atggactattatcgaaagtacgccgcaattttcttggtaaccctgagcgtattcttgcatgtgcttcattccgctccagacgtacaggactgtccagaatgtactctccaggagaacccctttttctctcaaccaggcgctcccattctccagtgcatgggctgttgtttctcgcgagcgtatccgaccccgctgaggtcaaagaaaacaatgctggtacagaagaacgttacctctgaatcaacatgttgtgttgctaaatcatataacagggtgacagtaatgggcggatttaaggtcgagaaccacactgcctgccattgttccacatgttattaccataagtcttag

SEQ ID NO: 5242 - RNA, 654 nt, synthetic construct
  misc_feature 1..654: note = source = /note="Description of Artificial Sequence: Synthetic coding sequence"
  source 1..654: mol_type = other RNA
atggccacagggtcccgtacctcactacttctcgccttcggcctattgtgtctgccttggctccaggaaggtagtgcattcccgacaatcccactctcaagattgttcgataacgcaatgttaagagcacatcgcctacaccagctggccttcgatacttaccaggaatttgaagaagcgtacatacccaaggagcaaaaatattccttcctgcagaaccctcagacatctctttgcttcagcgagtccatccccaccccttctaaccgagaagaaactcagcaaaagtccaacttggaattgttgaggatttcattactgctgatacagtcatggcttgaacctgtgcaattcctccgatcagtgtttgctaattctctcgtgtatggggctagcgactcaaacgtgtacgatcttctgaaagacctagaagagggcatccagactttgatgggccgtttggaggatggcagcccaaggaccgggcagatctttaaacagacgtattccaaattcgacaccaactcccacaatgacgacgccctcctgaaaaactacggccttctgtactgttttcgtaaagacatggacaaagtggaaacgtttttacgaatagtgcaatgtaggagtgtggaaggaagctgcgggttttag

SEQ ID NO: 5243 - RNA, 369 nt, synthetic construct
  misc_feature 1..369: note = source = /note="Description of Artificial Sequence: Synthetic coding sequence"
  source 1..369: mol_type = other RNA
atggccaccggttcccgtacatccttactcctcgcatttgggcttttgtgtttaccttggcttcaggagggctctgcatttcccaccattccactgtccagactttttgataatgccatgctgcgggcccacaggctccaccagctcgcctttgacacctaccaggaatttaggctcgaggacggctcgccacgcacgggtcagatcttcaagcaaacatacagcaaattcgatactaactctcacaacgacgatgcactgcttaagaattacggccttctgtactgttttcgaaaggatatggataaggttgagacttttctaagaatagtgcaatgcagaagtgtggagggatcgtgtggattctag

SEQ ID NO: 5244 - RNA, 534 nt, synthetic construct
  misc_feature 1..534: note = source = /note="Description of Artificial Sequence: Synthetic coding sequence"
  source 1..534: mol_type = other RNA
atggccactgggtcccggaccagcctcctgcttgctttcggtctgttgtgcctcccttggttgcaggaggggtcggcttttcctactataccgctctctcgtttatttgacaatgctatgcttagagctcatagattacatcagcttgcatttgacacttatcaggaattcaaccttgagctcctccgaatctccctcctccttatccagtcatggctcgaaccggtacaatttttgcgcagcgtcttcgccaattctctcgtttatggggcgtctgattcaaatgtttatgatctcctgaaggacctcgaagaaggaatccagaccttgatgggtcggctcgaggatggcagccctagaacaggccaaatcttcaagcaaacatactccaaatttgatacaaactctcataatgacgatgctctacttaaaaattacggattgctctactgctttcggaaagacatggataaagtcgagacgtttcttagaatcgtgcagtgtagatctgtggagggctcctgtggcttttag

SEQ ID NO: 5245 - RNA, 609 nt, synthetic construct
  misc_feature 1..609: note = source = /note="Description of Artificial Sequence: Synthetic coding sequence"
  source 1..609: mol_type = other RNA
atggctaccgggtccagaacctccttattgctcgccttcggactactgtgcctgccttggctgcaggaaggttctgctttcccaactataccactgtccagattgttcgataatgccatgctcagagcccatcgcctgcaccagcttgcttttgatacgtaccaagaattcaacccacaaacaagtctgtgcttttccgaatctataccaacacccagcaacagagaggagacgcagcaaaagtccaacctcgagcttctcaggatctccctgctgctcattcagtcttggctggagccagttcagtttcttcgctcagtatttgccaactctttagtgtatggcgctagtgatagcaacgtgtatgacttgctgaaagatttggaggaaggcattcagactctgatgggccggctggaagatggatccccacgaactggtcaaattttcaaacagacatacagcaaattcgatacaaactctcacaacgacgacgcactgctgaaaaattacgggttgctctactgttttagaaaagacatggataaggtcgaaacattcctgagaatcgttcagtgcaggtccgtggaaggctcctgcgggttttag

SEQ ID NO: 5246 - RNA, 771 nt, synthetic construct
  misc_feature 1..771: note = source = /note="Description of Artificial Sequence: Synthetic coding sequence"
  source 1..771: mol_type = other RNA
atggccgccggatcccgtaccagtctgttattggcattcggattgttatgtctgtcatggctgcaagaaggatccgcattcccaacaatccccctttccaggctgttcgataacgcgatgctccgcgcccgcaggctgtatcagcttgcatatgacacttatcaagagttcgaagaagcctacatcttgaaagaacagaaatactctttcctgcaaaacccccagacgagtctttgtttctctgaatctatcccgacacccagcaatagagttaaaacccagcagaaatctaaccttgaacttctccggatttcgttattgcttatccagtcctggcttgaaccagttcagcttcttaggagtgtgtttgccaacagcttggtttacggtgcatccgactccaacgtgtatcgacacctgaaagatttagaagagggaatccagactctcatgtgggttagggttgcccctggcatccccaaccctggcgctcctctggcatcgcgtgattggggagaaaaacactgttgcccgctgttttcctctcaggccctcactcaggagaattccccatattcatcttttccactggttaacccaccaggcttatccttacagcctggcggggaggggggaaaatggatgaacgaacgaggcagagagcagtgccccagcgcatggccattgttgctgttcttgcattttgcggaagctgggaggtggcagcctcctgactgggcagaccttcaatcagtgttacaacaggtgtag

SEQ ID NO: 5247 - RNA, 654 nt, synthetic construct
  misc_feature 1..654: note = source = /note="Description of Artificial Sequence: Synthetic coding sequence"
  source 1..654: mol_type = other RNA
atggccgcaggatctcgaaccagtctgttgctggcatttggcctgctctgtctctcctggctgcaggagggatccgcatttcctacaatacccttatcccgactctttgataatgctatgctccgggcgcgccgtctgtaccagctcgcctatgatacctatcaggaattcgaagaggcttatatcttgaaagagcagaagtactcatttctccaaaatcctcagacatctttatgtttttcagagtccatccctactccctctaaccgtgtcaaaacccagcagaaatctaatctggaactgctcagaatttccctcctactcatacaatcatggctagaacccgttcagctgctcaggtcagtctttgcaaactcccttgtgtatggcgcctcagactccaacgtctatcggcacttaaaggatctagaagaaggtatccaaacgctcatgtggcggctggaagatgggagcccccgcaccggacagatctttaaccaatcctactctaaattcgacacaaagtcccataacgatgatgcgctccttaaaaactatgggctcctctattgcttccggaaagacatggacaaggtggaaacatttcttcgaatagtgcagtgccggtctgtggaaggatcttgcgggttttag

SEQ ID NO: 5248 - RNA, 609 nt, synthetic construct
  misc_feature 1..609: note = source = /note="Description of Artificial Sequence: Synthetic coding sequence"
  source 1..609: mol_type = other RNA
atggccgccggtagccgcacatcacttctcctcgcttttgggctcctttgcctctcatggctacaggagggaagtgcctttccaaccatcccactatctcgtctgttcgacaatgccatgcttagagcaagacggctgtaccaactggcctatgatacataccaggaatttaacccacaaacttctctttgttttagtgagtccattcccacaccatctaatcgcgtgaaaacacagcagaaatccaaccttgaactgctgcggatcagcctactacttattcagagttggctggagccagtacaattgcttaggtcagtgttcgcgaacagtttggtgtatggtgcttccgattctaacgtgtataggcatctgaaagacctggaggagggcatacagaccttaatgtggcggttagaagacggatccccccgaacgggtcagatctttaaccagtcctacagcaagtttgataccaaatcccataatgacgatgcgcttctgaaaaactacgggctgttatactgtttccgtaaagatatggacaaagttgagacatttcttaggattgtgcaatgcaggtctgtggagggatcatgcggcttctag

SEQ ID NO: 5249 - RNA, 738 nt, synthetic construct
  misc_feature 1..738: note = source = /note="Description of Artificial Sequence: Synthetic coding sequence"
  source 1..738: mol_type = other RNA
atggcggcaggctcccgtacatccctccttctcgcgtttggcctcctgtgcctctcgtggctgcaggaagggtcagcctttccgaccatcccgctgagccgactgttcgacaacgcaatgctgagggctagacggctgtatcaactggcgtacgacacctatcaagaatttgaagaagcctacattctaaaggaacaaaagtactcctttctacaaaacccccagacctctctgtgcttttccgaatctatacctacaccctcaaaccgagtgaagacccagcagaagagtaatctcgaactattaagaatcagtctcctcctcattcagtcatggctcgaaccagtgcaactgctgaggtccgtgtttgctaatagtttagtctatggggcttccgactcaaatgtgtatcgacacctaaaggacttggaggaaggcatccagacattaatcggctggaaaatggccgcacctgggctcggcagatcttcaatctcccctaccgcctctctgacccagaaccgaaccactatgacccattgttctcgaaccactggttgcagtactgcctccgggcgcacttggacaaggtcccgccactcttgcgccagctgttccgctgcactctggagagcagccgtcgcgtcatcctgtcctgggggtattcccgtgactcccccacagtgtttgtcctggtcttggaaggtccttctccaatgtccacccgccttgtcttag

SEQ ID NO: 5250 - RNA, 753 nt, synthetic construct
  misc_feature 1..753: note = source = /note="Description of Artificial Sequence: Synthetic coding sequence"
  source 1..753: mol_type = other RNA
atggaaaagggacctgttagggcgcccgctgagaagccaaggggcgcaagatgttcaaatggctttccagagagagatcccccccgcccagggccatcccggccagcagagaaaccaccccgcccagaagctaaaagtgcccaacccgcggatggttggaagggagagaggccccggagtgaagaggacaacgaactaaatctgcctaatttggctgctgcatactcctcgattttgtcaagcctgggcgaaaatccacagcggcaaggcttactgaaaacaccctggagggctgcatctgctatgcaattctttacaaagggctatcaggaaaccatatccgacgtactcaacgatgctattttcgatgaagaccacgatgagatggtgatagtgaaagatatcgatatgttctccatgtgtgagcatcatctcgtaccattcgtagggaaagtgcacatcggctatctccccaacaagcaggtgctaggactgagtaagctggccagaatcgtagagatttattcacgaaggctccaggttcaagaacgccttacaaagcagattgctgtggcgataacggaagctttgcgccccgcgggtgtcggcgtagtggtagaggccacacacatgtgtatggtgatgaggggtgtgcagaaaatgaattccaaaacggtgacctcaaccatgctgggcgtctttcgagaggacccaaaaacacgggaggaatttctaaccttgattagatcatag

SEQ ID NO: 5251 - RNA, 693 nt, synthetic construct
  misc_feature 1..693: note = source = /note="Description of Artificial Sequence: Synthetic coding sequence"
  source 1..693: mol_type = other RNA
atggaaaagggtcccgtccgcgctcccgcagagaagccccgaggcgctcgatgtagtaacggttttccagaaagagatcctccccgaccgggtccatcccggcctgcagaaaaacctccccgtcctgaggctaagtccgcacaacccgcagacggctggaaaggggagcgtccccggtccgaagaagataacgagctaaatctgccaaatctggccgccgcttacagttctatcctctccagtttaggcgaaaacccccagaggcagggtctgctgaaaacaccctggagggcggctagcgcaatgcagtttttcaccaaggggtatcaggaaaccatttccgacgtgctgaatgatgctatatttgatgaagaccacgacgaaatggtgattgtcaaggatatagacatgttttctatgtgcgagcaccatctggtcccttttgttggcaaggtacacattggttatctgcccaacaagcaagtccttggcctgtctaagctcgctagaatcgttgaaatttactccaggcgtctgcaagttcaggagcgactcacaaaacagatagctgttgcaatcaccgaggcgttaaggcccgcaggtgtcggtgtagttgtggaagctacgaaatcaaataaatacaacaagggcctctcatatttcttgctcgctacttttttgtggcaatattag

SEQ ID NO: 5252 - RNA, 753 nt, synthetic construct
  misc_feature 1..753: note = source = /note="Description of Artificial Sequence: Synthetic coding sequence"
  source 1..753: mol_type = other RNA
atggaaaaagggccagtccgtgcccccgccgagaaacctcgcggcgcccgatgttctaatggatttcctgaacgtgatccacccaggcctggacctagtagacccgcagaaaagcctcccaggccagaagctaagagcgctcagcccgcagatggttggaagggggaaagaccccgttcagaagaggataacgagttgaatcttccaaatctggccgccgcttattcttccattttaagttccctgggcgagaacccacaacggcaaggacttcttaaaactccatggcgcgcagcatctgcaatgcagttcttcacaaaagggtaccaagaaactatatctgacgttctaaatgatgccattttcgacgaagatcacgatgaaatggtaattgtcaaggatatcgatatgttcagcatgtgcgagcaccacttagtcccattcgtgggcaaggttcatattgggtatttgcctaataaacaggttctcggcctttctaaactagcacggattgtggaaatctattcaaggcgtcttcaggtacaggaaagacttacaaagcagattgccgttgcaatcactgaggccctcagaccggcaggcgtgggggtcgttgtcgaagcaactcacatgtgcatggttatgaggggcgtacagaaaatgaattctaaaacagttactagcacaatgcttggcgtctttcgggaggatcccaagactcgagaggaattcctaacattaattcgatcatag

SEQ ID NO: 5253 - RNA, 642 nt, synthetic construct
  misc_feature 1..642: note = source = /note="Description of Artificial Sequence: Synthetic coding sequence"
  source 1..642: mol_type = other RNA
atggagaaaggccccgtgcgagcccctgcagaaaaacccagaggagcccgatgttccaacggatttcccgagcgggacccaccaaggcctgggccatctcgtccagcagagaaacccccacgtcccgaggccaagagtgcccagcctgcagacggctggaagggagaaagacctaggtccgaggaggacaacgaactgaatctgcctaacctggctgctgcctactcatccatactttcctcacttggagaaaacccacagagacaaggcctgctgaaaacaccttggagagctgcctccgctatgcaatttttcacgaagggatatcaggagacaatcagtgatgtgttgaacgacgcaatcttcgacgaagatcacgacgagatggtgatcgtgaaagatatcgatatgttttcaatgtgcgaacatcacctggtgccatttgtcggcaaagtgcacatcggatatctacctaacaaacaggttctcggactgagcaaactggcgcgtattgtcgaaatctatagcaggcgactgcaggttcaggaaaggttgaccaaacaaatcgccgtggccataaccgaggcgctcaggccagctggggttggggtcgtcgtcgaagcaactagtgctgagccatag

SEQ ID NO: 5254 - RNA, 702 nt, synthetic construct
  misc_feature 1..702: note = source = /note="Description of Artificial Sequence: Synthetic coding sequence"
  source 1..702: mol_type = other RNA
atggaaaagggtccagtgagagctccagccgagaaaccacggggcgcccggtgcagtaatggatttcccgaacgcgatccaccgcggcctggcccatcaagaccggcagaaaagccacctcgtccggaagctaagagcgcccagcctgccgatggctggaaaggagagcgaccacggtctgaagaagacaatgaactgaacctgcccaatcttgccgccgcctattcatctatcttgagctctctgggtgagaatccccaacggcagggcctgctgaaaacaccatggcgagccgctagtgctatgcagtttttcactaagggctatcaagaaaccatcagcgacgtcctcaacgatgcgatctttgatgaagaccacgacgaaatggtgatcgtgaaagatattgacatgttctccatgtgcgagcaccacctcgtgccctttgtcggaaaggttcacatcggatacttgcctaataaacaggtgctgggcttaagtaagcttgcccgcatagtcgagatatattcaagaaggctccaagtccaagaaaggttaaccaaacaaatcgctgtggctatcaccgaagcactccgtcctgccggtgttggagttgttgttgaggccactaagagtaataaatacaataaaggactctctcccttactttcctcatgtcacttgtttgttgccattttgaaatag

SEQ ID NO: 5255 - RNA, 1281 nt, synthetic construct
  misc_feature 1..1281: note = source = /note="Description of Artificial Sequence: Synthetic coding sequence"
  source 1..1281: mol_type = other RNA
atgggcgagcccggacaaagcccatcccctaggagttcacatggcagccctccgacacttagcacattaaccttgctgctgctgctgtgcggtcacgcacattctcagtgcaaaattttgagatgtaacgcggaatatgtctctagtacactctctctgcgggggggcgggtcctctggagccctgagagggggaggaggaggtgggcgcggaggcggtgttggttccggcgggttatgtcgggcgctgagaagctacgcgctgtgtacacgccgtactgctagaacttgtcgaggagacctcgcattccatagcgctgtgcacggaattgaggatctaatgatccagcataactgttcccgtcagggaccaactgcacccccaccaccacgtggtccagctctccccggcgccggatccggtcttcctgcgcctgacccctgtgattacgagggcagattcagtcgcctccacggacgtcctccagggttcctccattgtgcctcctttggcgatccacacgtacgctcattccaccatcatttccacacctgtcgcgtgcagggtgcgtggcctctcctcgataacgactttctcttcgtgcaggcaacttcttccccaatggccctcggagccaatgctacagcgacaaggaagttaaccatcatttttaaaaatatgcaggaatgcatcgatcaaaaggtctaccaagctgaagttgacaatctacccgtcgcatttgaggacggttcaataaatggcggagatcgccctggcggtagtagcctcagtattcagaccgcaaatcccggaaatcacgtcgagatccaagctgcttacatcggcacaactatcatcataagacaaactgccggtcagctgtctttttctatcaaagtggcagaagacgtcgcaatggcattttctgccgaacaggacctgcagttatgcgtcggcggctgccccccaagtcagcgacttagtcggtccgagcgcaatcggagaggagccatcaccatcgataccgcacggcgcctctgtaaagaaggtctccctgtggaggacgcctatttccatagttgtgtgtttgatgtacttattagcggggatcctaattttaccgtcgccgcgcaggccgcactcgaagacgccagagcattcctgcccgatttggagaaactgcacctttttccctccgacgccggcgtacctttgtctagtgcaaccttacttgcaccacttttaagcggcctctttgtcctgtggttatgtattcagtag

SEQ ID NO: 5256 - RNA, 942 nt, synthetic construct
  misc_feature 1..942: note = source = /note="Description of Artificial Sequence: Synthetic coding sequence"
  source 1..942: mol_type = other RNA
atgatacaacataactgctctcgccagggcccaactgcccccccccctcctcgaggtccagcactgcctggcgctggctcgggcttgccggctccggatccctgcgactacgagggtcggttctcaagactgcacgggaggcccccaggatttctacactgcgcgtcattcggagatccacacgtccggtccttccatcaccatttccatacttgtcgggttcagggcgcttggccattgcttgataacgactttctgtttgtacaggccacttcaagtcctatggccctaggagctaacgccaccgctactagaaaacttacgattattttcaaaaatatgcaagagtgtattgaccagaaagtttatcaggccgaagtagataacctgcccgtagcctttgaagatggatcaatcaatggcggtgatcgccccggtggaagttcactcagcatccagactgcaaaccctggcaatcacgtggagatccaagccgcgtacattgggacaactatcattatccgtcagaccgcaggacagcttagcttctcgatcaaggtcgcggaggatgtggcaatggcttttagcgcagagcaggacctgcagttgtgcgtcggcggatgccccccctcccaaaggctgagcagaagcgagcggaacagacgtggagcaataaccatagacacggcccgccggctgtgcaaggagggccttcccgttgaggacgcctactttcattcctgtgtttttgatgtactgattagcggggacccaaacttcacagtggccgcccaggcagcactcgaggatgcacgagctttccttcctgatcttgaaaagttgcacttattccccagtgacgctggagtgcccctcagctcagcaacactgttggcccctctcctttccggtctgtttgtgctgtggttatgtatccaatag

SEQ ID NO: 5257 - RNA, 282 nt, synthetic construct; identical to SEQ ID NO: 4927
  misc_feature 1..282: note = source = /note="Description of Artificial Sequence: Synthetic coding sequence"
  source 1..282: mol_type = other RNA

SEQ ID NO: 5258 - RNA, 603 nt, synthetic construct
  misc_feature 1..603: note = source = /note="Description of Artificial Sequence: Synthetic coding sequence"
  source 1..603: mol_type = other RNA
atgcaggaatgtatcgatcagaaagtttatcaggccgaagtagataatctgcctgtcgcattcgaagacggatctataaatggtggagataggccagggggtagtagcctctctattcagactgctaatcccgggaatcacgtggaaattcaggctgcgtatatcggaacaacaattatcatcagacagaccgcgggccagctgtcattctctattaaggtggctgaggatgtggctatggcattctctgctgaacaggacctccagttgtgcgtaggtggatgtcctcccagccagaggctatccagatccgaaagaaacaggaggggtgccattaccattgatacagctcggcgattatgtaaggaaggtctgcctgtggaggatgcctattttcattcctgtgtattcgacgtcttaatcagtggcgaccctaacttcaccgtagccgctcaggcagctctggaagatgcaagggcattcctgcctgacctggaaaaattacacctgtttcccagcgatgctggcgtccccctaagctccgccacactattggctccactgctcagcgggctgttcgttctatggctatgtatacagtag

SEQ ID NO: 5259 - RNA, 603 nt, synthetic construct
  misc_feature 1..603: note = source = /note="Description of Artificial Sequence: Synthetic coding sequence"
  source 1..603: mol_type = other RNA
atgcaggagtgtatcgatcaaaaggtgtaccaggcagaagtcgataacttgcctgtggcttttgaagacgggtctattaacgggggcgataggccaggcggaagtagcctgagtatccaaactgcgaaccctgggaaccatgtcgagattcaagctgcttacataggaacaaccatcatcatcagacaaaccgctggacagctgagcttttcaatcaaggttgcagaggatgtggccatggcattttctgccgagcaggaccttcaattgtgcgtggggggatgtccaccttctcaaagattatcgagaagtgagcgaaacagacgaggagccattacgatcgataccgccaggcgcctatgcaaagaaggcctgcctgtagaggatgcttactttcattcttgcgtttttgatgttctgatctccggtgatcctaacttcacggttgctgcccaggctgctcttgaggacgcccgagcatttctcccagatttagagaagttgcacctctttccatctgacgccggagttccactgtcctccgctacactgcttgcccctctgctgagtgggctattcgtgttatggctttgcatacagtag

SEQ ID NO: 5260 - RNA, 1422 nt, synthetic construct
  misc_feature 1..1422: note = source = /note="Description of Artificial Sequence: Synthetic coding sequence"
  source 1..1422: mol_type = other RNA
atggccgtcatggctcctcgcacgctcgtgctcctactctccggcgctctggctctgactcagacatgggcggaagtccaactcgtagaaagcggcggtggcctcgtccaacctggtggaagtctgcggttgagctgtgcagcatcagggttcaatatcaaagatacatacatccattgggtccgtcaggctcctggtaagggtttagagtgggtggcccgaatttaccccacaaacggatacacaagatacgctgactctgtgaaagggagattcacaatctccgccgacactagtaaaaacacagcatatctccaaatgaactctttgcgagccgaggatacagccgtgtactattgttcccggtggggtggcgacggcttttatgcaatggactattggggtcaaggcactctggttacagtgtcttccgcctccactaagggcccctccgtgtttcctctcgctcccagctctaaaagcacatcgggcggcactgcggctctaggctgccttgtgaaggattacttccccgaacccgtgacagtctcttggaatagcggcgcgttgactagtggagtgcacacgtttcctgcggtcctgcagtcatccggcctatactccctgagttctgtagtgacagtgccctcgagtagtttagggacccagacgtatatttgtaatgtgaatcataaaccctccaacactaaagtagacaaaaaggtagaaccaaaaagttgtgataagactcacacatgtcccccctgccccgcaccagagctgctgggcggtccctctgtctttctttttccccccaagcccaaggataccttgatgatttctagaacaccagaagtgacatgtgtggtggtggacgtctcccatgaagacccagaagtgaagtttaactggtacgtggatggcgtagaagtgcataacgcgaagacaaaacctagggaagagcagtataactctacttatagagtggtctcagtgctgacagtgctccaccaggattggctaaacggcaaggaatataagtgtaaagtctccaacaaagccctcccagcacccatcgaaaaaacaattagcaaagctaaagggcagccaagagaaccacaggtctatactctcccgccaagcagagacgaacttaccaaaaatcaggtctctcttacttgtctagtgaaaggcttttacccctcagacattgcggtcgaatgggaatcgaacggccagcctgagaacaactacaaaactacacctcctgtgcttgattccgatggttcattttttctatattccaaactgacggtggataagtctaggtggcaacaaggaaatgtgtttagctgcagcgttatgcacgaagcactgcataatcactacacccagaaatcactttccctgtctccaggatag

SEQ ID NO: 5261 - RNA, 717 nt, synthetic construct
  misc_feature 1..717: note = source = /note="Description of Artificial Sequence: Synthetic coding sequence"
  source 1..717: mol_type = other RNA
atggccgttatggctccgcggactctcgtgttgttgctgtctggtgctcttgctctaacgcagacctgggcagatatacaaatgacacagtccccatccagtctttcagcaagcgtgggggaccgggtaactattacgtgtcgggccagtcaagatgttaacacagctgtcgcgtggtaccagcaaaaacccggaaaagcccccaaactgttaatctactcagcctcttttttgtactccggagtacccagtcgtttctccggctcacgatccggcactgactttacgctgacaattagcagcctccagcctgaggactttgccacctactattgccagcaacactatactacaccacccacattcgggcaaggaacaaaggtcgaaattaaacggacagttgccgcccccagcgtatttatctttccccccagcgacgagcagcttaaatctggaaccgcatctgtggtttgcctactgaacaacttctacccaagggaggccaaggtacagtggaaagtagacaatgccttacagtccgggaacagccaggaaagcgtgacggagcaagattcaaaggactctacctattccctgagctctacacttactctgagcaaagcagattatgagaagcataaagtctatgcctgtgaagttacacaccaaggtttatcgagcccagtcaccaaatcgtttaataggggggaatgctag

SEQ ID NO: 5262 - RNA, 657 nt, synthetic construct
  misc_feature 1..657: note = source = /note="Description of Artificial Sequence: Synthetic coding sequence"
  source 1..657: mol_type = other RNA
atggccacaagatccccaggcgtagtaatctctgacgatgaacccggatatgatctggaccttttctgtataccaaaccactatgcagaagacctggagagagtttttataccacatggactgatcatggatcgaacagaaaggctggctcgagacgtgatgaaagagatgggagggcaccacatagttgctctctgtgtgttaaaaggaggttataagttctttgctgacctgctcgattacatcaaggcgttaaatcgcaactctgaccgcagcatcccgatgactgtcgactttatccggctcaaatcctattgtaacgaccagagtacaggagatatcaaagtgatcggcggtgacgatctctctacacttaccggcaagaacgtgctcattgttgaggacattattgacaccggaaaaactatgcagacattacttagtcttgtgaggcagtacaatccgaagatggtgaaagtagcttccttacttgtcaagagaacacccagatccgtaggctacaaaccagattttgttggctttgaaattccggacaaatttgtggtcggctacgctctggactataatgaatatttcagagacctgaatcatgtgtgtgtaatctctgaaactggcaaagcaaaatataaggcatag

SEQ ID NO: 5263 - RNA, 657 nt, synthetic construct
  misc_feature 1..657: note = source = /note="Description of Artificial Sequence: Synthetic coding sequence"
  source 1..657: mol_type = other RNA
atggctactcggtcacccggtgtggttatctcagacgatgagcctggatacgatcttgatctgttctgcataccaaatcactacgcggaggacctggagagagtgtttattccacatggtttgattatggacagaactgagcggctggcccgggacgttatgaaagaaatgggcggccatcacatagtggcactttgtgtccttaaaggcggctataagttcttcgccgatctgctagattatatcaaagccttaaatagaaacagcgaccgttcgatacccatgactgttgatttcattcgcctgaagtcctattgcaatgatcagagtacgggcgacatcaaggtcatcggcggagatgatctgtctacactgaccggaaaatcaaggctgctggcagaagatattattgatacgggtaagactatgcaaacactcctctctttagtgcgacaatacaaccctaaaatggtgaaggttgctagtctcctggtgaaacgtacgcctcggagcgtaggttataaacctgatttcgttggcttcgaaattcctgataagtttgtggttgggtacgcgttagattataacgagtatttccgggacttaaaccacgtatgtgtaattagtgagactgggaaagcgaaatataaggcatag

SEQ ID NO: 5264 - RNA, 1653 nt, synthetic construct
  misc_feature 1..1653: note = source = /note="Description of Artificial Sequence: Synthetic coding sequence"
  source 1..1653: mol_type = other RNA
atgcctcctccacgcactggcaggggactgttgtggctgggtctagttctgagttctgtatgcgtagcactcggatcagaaacacaggccaactcaactactgatgcccttaacgtcctgctgattattgtggacgacttgcggcccagcctagggtgttacggagacaaactggtaaggtcacccaatatagatcaattagcatcccactctctcttgttccagaatgcctttgcccaacaagccgtgtgcgccccatccagagtgtcctttttgaccggccgtcgccccgataccacacgactatacgatttcaattcatattggcgcgtacatgccgggaatttcagtaccatcccgcagtacttcaaagagaatggatacgtaacaatgagtgttgggaaggtttttcacccagggatttcaagtaaccacactgatgactccccatatagttggagcttccctccttatcacccatcaagcgaaaagtacgagaacactaaaacatgtcgtggacccgatggtgaactccacgcaaacctcttgtgtccagtggacgtcctagatgtacctgagggaacattacctgacaaacagtcaacagaacaggcaatacagctgcttgaaaagatgaagacaagtgcatcccccttctttctcgccgtaggctatcataagccccacattccgtttcggtacccgaaggaatttcaaaagctgtaccctttagagaacataaccctcgcccccgatcctgaagtaccagatggcctgcctcccgtcgcttataacccatggatggatatccgccagcgcgaagatgtccaagcactcaatattagcgtgccttatggccctatccccgtagatttccaacgcaagatacgtcagtcatatttcgcctctgtgtcctatcttgatacacaggtagggagactactttccgcactagatgacttgcaactcgctaactccaccattatagcctttacaagtgaccacggctgggccctgggagagcatggcgaatgggccaaatactcgaatttcgatgtcgccacacacgtgccattaattttctacgtgccaggacgtactgcctctctccccgaagccggagaaaagctcttcccctacctggacccctttgacagcgcctcgcaactgatggaacccgggcggcaaagtatggatttggtggagctggtgtccttattccccacactcgccggacttgctgggctgcaggtgcccccaagatgccccgttcctagtttccacgtggagctatgcagggaggggaaaaacttactgaaacacttccgatttagggaccttgaggaagacccctacttacccggtaacccaagagagctaatagcatattcacagtatccgcgaccatccgatatcccacaatggaactccgataaaccctctctgaaagacatcaagatcatgggctactcaatccgcacaatcgactataggtacactgtgtgggtgggatttaacccagatgaattcttagcaaacttttctgatattcatgcaggagaattatactttgtcgattccgatcctctccaggaccacaacatgtacaacgatagccagggcggcgatctctttcaattactcatgccgtag

SEQ ID NO: 5265 - RNA, 1032 nt, synthetic construct
  misc_feature 1..1032: note = source = /note="Description of Artificial Sequence: Synthetic coding sequence"
  source 1..1032: mol_type = other RNA
atgccaccacccagaaccggccgtggactgttatggttgggactggtgctatcatccgtgtgtgtggccctggggtctgaaacccaagcaaatagtaccactgatgctctgaacgtgctattaattatcgtagatgacctaagaccaagtctgggctgttatggggacaagctagtgcgctcaccaaacatagaccaactagcaagtcattctctgttatttcagaacgcttttgcgcagcaagcagtgtgtgcaccatcacgggtgagctttctgacaggtcgacgaccagacacaaccaggctttacgatttcaactcttattggcgtgtccacgctggcaatttcagcactattcctcaatatttcaaagaaaatggctacgtgaccatgagcgtgggcaaagtgtttcaccctggtataagctcaaaccatactgatgactccccctactcctggtccttccctccgtaccacccaagttctgaaaaatatgaaaacaccaaaacctgcaggggacccgacggtgagttgcacgcgaaccttctctgccctgtcgatgtattggacgtacccgaagggactttacccgataagcagagcaccgaacaggccatccagctccttgaaaaaatgaagaccagtgctagcccattctttctcgcagttggctatcacaagccacacatccctttccgttaccccaaagagttccagaaactgtatccgttggagaatatcactctggctcctgatccagaagtgccagacggtctccccccagtcgcatataacccttggatggacattaggcaacgtgaggacgttcaggctctcaacatcagcgtgccatacggtccgatccctgtcgacttccagcgtaagattaggcagtcctacttcgcctccgtttcatatttggacacacaggttggccgactcctcagtgctctggacgatctacaactggctaattcaacaattatcgccttcactagtgaccatggtttccttatgcgcaccaacacctag

SEQ ID NO: 5266 - RNA, 939 nt, synthetic construct
  misc_feature 1..939: note = source = /note="Description of Artificial Sequence: Synthetic coding sequence"
  source 1..939: mol_type = other RNA
atgccaccgccccggactggcagagggcttctgtggctgggtctcgtgcttagttccgtgtgtgtggctctcggtagcgaaactcaggccaattccacaactgacgccctgaatgtcctgctcattatcgtcgatgatctgcgcccatcactgggatgctacggtgataaattagtgcggtccccgaacatcgaccagttagctagccactccctgctctttcagaacgcctttgcacagcaagcagtatgtgccccttcccgggtatctttcttgacgggacgccgccctgatacaactaggctatacgacttcaactcttattggcgcgttcacgccggcaacttttccactatcccacagtattttaaagaaaacggctacgtaactatgtccgtcggcaaggtgtttcaccctggaatctcaagtaatcatactgacgatagtccgtattcctggtcttttccaccctaccacccttccagtgaaaagtacgaaaacactaagacttgcagaggccctgacggagaactccacgctaacctgttatgccccgttgacgtgctcgatgtgcccgaggggacccttcctgataaacaaagcacagaacaggctatccagcttcttgaaaagatgaaaaccagcgctagcccttttttcctcgccgtcggctatcataaaccacatatcccattcagataccccaaagaatttcagaaactgtatccactcgagaatatcaccctcgccccggaccccgaggtgcctgacggtctccctcccgttgcttataacccttggatggatattagacaaagagaagatgtgcaagcattgaacatcagtgtcccttatggcccgattcccgtggatttccaagaagaccagtcctcaactggattcagactcaagacaagcagcactagaaaatacaagtag

SEQ ID NO: 5267 - RNA, 540 nt, synthetic construct
  misc_feature 1..540: note = source = /note="Description of Artificial Sequence: Synthetic coding sequence"
  source 1..540: mol_type = other RNA
atgcctcccccgagaaccggacgcggactcctgtggcttgggctcgttctctcctccgtttgcgtcgcacttggctctgaaactcaggctaattctaccactgacgccctgaatgtcctgttaatcattgtggatgatctacgaccctcactcggctgctatggcgataagctggtacgctcacctaacatcgaccagttggccagccacagtctcctctttcagaatgcatttgcccagcaggctgtttgtgccccgtctcgggtgtctttcctcactggccgccggcccgacacaacaagactttacgactttaattcttactggcgggtgcacgcaggaaatttcagcactatcccacagtacttcaaagagaacggctacgtcacaatgtcagttggcaaagtgttccatcccggaactgctccgtgccccgagtccgggttttcatggtttgtggtgtcagagtcaagtatacccatcctaggcatgggtttgtccctgcaatcaccactgttggccgggcgggtgccaaggtag

SEQ ID NO: 5268 - RNA, 261 nt, synthetic construct; identical to SEQ ID NO: 4938
  misc_feature 1..261: note = source = /note="Description of Artificial Sequence: Synthetic coding sequence"
  source 1..261: mol_type = other RNA

SEQ ID NO: 5269 - RNA, 462 nt, synthetic construct
  misc_feature 1..462: note = source = /note="Description of Artificial Sequence: Synthetic coding sequence"
  source 1..462: mol_type = other RNA
atggatctggtcgagctcgtctctctgttcccaaccctggccgggctggccggactccaggtgcctcctcgatgccccgtaccaagttttcacgttgagctgtgccgagagggaaaaaacttgctcaaacacttccggttcagagacctggaagaagatccttacctccccggcaatccccgcgaactcatcgcatactctcagtatcctcggccatccgacatcccgcagtggaactccgataaaccctcattgaaagatatcaagatcatgggatattcaattcgaacaattgactaccgctatactgtatgggttggttttaatcccgacgagtttttagccaatttttcagacattcatgccggcgagctgtatttcgtagattctgaccctttgcaggaccacaacatgtataatgatagccagggtggtgatctattccaactgctgatgccctag

SEQ ID NO: 5270 - RNA, 1020 nt, synthetic construct
  misc_feature 1..1020: note = source = /note="Description of Artificial Sequence: Synthetic coding sequence"
  source 1..1020: mol_type = other RNA
atgaagacctctgcatccccttttttcctagcagttggataccacaagccacacattccattcagatacccaaaagaatttcagaagctgtacccgctggaaaatatcacacttgcacctgatcctgaagtaccggatggtctgccccccgtcgcctataatccgtggatggatattcggcagcgtgaggatgtacaagcactcaatatttccgttccatacggccctatccctgtcgacttccagagaaaaatcagacagtcatactttgccagcgtttcttatttagacacccaggttggccgcctcttgtccgcccttgacgacctgcaactggccaactctacaattatcgccttcactagcgatcatggctgggccctgggggaacacggagagtgggcaaagtattcaaatttcgatgtggcgacccatgtccccctgattttctacgtacccggacggactgcttccttgcccgaagcaggcgaaaaattgtttccctacttagaccctttcgactccgcttcacaacttatggaacccgggagacaatccatggacttggtggaattggtttctctgttcccaacgctcgcgggactggcaggactccaggtccccccacgatgtcccgtgccgtcattccacgttgaactttgtagagaaggcaagaatttacttaagcacttccgctttcgcgacttagaagaagatccctatttaccaggcaacccaagggagctgatagcatattcccagtatccgcgcccaagcgatatccctcaatggaacagcgacaagcctagtctgaaggacatcaagatcatgggctactccatccgcaccattgactacaggtacaccgtgtgggttggctttaaccctgacgaattcttagcaaacttttccgatattcacgcgggagaactttactttgtcgacagcgaccctcttcaagaccacaatatgtacaacgattcccaaggcggtgatttgtttcagctgctcatgccctag

SEQ ID NO: 5271 - RNA, 1962 nt, synthetic construct
  misc_feature 1..1962: note = source = /note="Description of Artificial Sequence: Synthetic coding sequence"
  source 1..1962: mol_type = other RNA
atgcggcccctcagaccacgcgccgcactcttggctctcctcgcatccctcctcgctgcccctcccgttgccccggcagaggcccctcatctcgttcacgtagatgccgcccgtgccctctggccattacgaagattctggcggtcaactgggttctgtccccccctgcctcactcacaggctgatcagtatgtattatcctgggaccagcagctgaatctagcttatgtgggagccgtcccacatcgggggatcaaacaggttcgaacccactggctgctggagctagtaacaacccgcgggtcaaccggtcgagggctcagctacaactttacacatctcgacgggtatctcgatcttctccgggaaaatcagctgctgcccggtttcgagctcatggggtctgcgtccggacacttcaccgactttgaggacaagcagcaagtcttcgagtggaaggatttggttagttctctggctagacgatacataggcaggtacggactcgcacacgtatctaaatggaattttgaaacctggaatgaacccgatcaccacgacttcgacaacgtttcaatgactatgcagggtttcttgaattactatgatgcctgcagcgagggattgcgcgcagctagcccagcccttcgtctgggcggccccggagattcgtttcatacccccccacgaagccctctgagttggggcctcttaagacactgccacgacggcaccaacttcttcacaggggaggccggagtaagactcgattatattagtctacaccgtaagggcgccagatctagtatcagcatccttgagcaggagaaagtagtggcccagcagatcagacaactgtttcccaagttcgcagacactcctatctacaacgacgaagccgacccactggtcggatggagcctccctcaaccatggagggccgatgtcacctatgctgcaatggttgttaaggtcatagctcagcaccaaaatttgctcttagccaatacaacctccgccttcccctacgctctcttgtccaacgacaacgcctttctcagctatcatccacatccctttgcccaaagaacattgacagcaaggtttcaggtgaataatacacgacccccccacgtacaattgcttcggaaacctgtgttaacggccatgggactgttggcactacttgacgaggagcagttatgggccgaagttagtcaagcgggcaccgtgctggacagcaaccatactgttggcgttctggcatccgctcaccgaccgcagggtcctgccgatgcctggagagctgctgttttgatttatgctagtgatgatacacgagcccaccctaataggtccgtcgctgtaaccctgcggctgagaggtgtcccccctggacctggtctcgtatatgtaacccggtatcttgacaacggactctgttcacccgatggcgagtggaggcgactggggcgtcccgtcttcccgacagccgagcaatttaggcgcatgcgcgccgctgaagaccctgttgcagctgcacctcgaccgctccctgccggaggcaggcttacccttcgaccagccctgcgactgccaagtctcctcctggttcatgtgtgcgcacgcccagagaagcctccaggacaggtgaccaggctgagggctctccctttaacacaaggccagttagtgcttgtttggtccgacgaacatgtaggctcgaaatgcttgtggacatacgaaatccaatttagccaggatgggaaagcatatacaccagttagccgcaagccaagtacattcaatctgtttgttttcagtcccgataccggcgccgtctcgggcagctaccgtgtaagggcactcgattattgggctcgtccaggccctttctccgatcctgtcccgtacctggaagtccccgttccacgtggacccccctctcccggcaacccctag

SEQ ID NO: 5272 - RNA, 2028 nt, synthetic construct
  misc_feature 1..2028: note = source = /note="Description of Artificial Sequence: Synthetic coding sequence"
  source 1..2028: mol_type = other RNA
atgagaccattgagacccagagcagcgcttttagccctgctggcaagcctgcttgcagctccaccagtcgcccccgccgaggctcctcatttggttcacgtggacgcagctcgagcactttggccattgcgaagattttggcgctctacaggattctggggcagcacaggtaggggcctctcttataattttacacaccttgacggttatctcgacctcctgagagaaaatcagttgttgcctggttttgagttaatggggtcggcctccggacatttcacagactttgaagacaagcagcaggtgtttgagtggaaggacctagtttccagcctggcaagaagatatattgggagatatggactagcccacgtaagcaaatggaattttgagacctggaacgagccggatcaccatgactttgataatgtttcaatgactatgcagggcttcttgaattattatgatgcgtgttcggaagggcttcgggccgcctcacccgctctcagacttgggggtcctggggactcgtttcacacacccccccgctcccctttatcttggggccttctgcgtcattgccatgacgggacaaattttttcaccggcgaagctggggtccggttggactatatttcattgcataggaaagtgaggcccgcccccccaagcgccccagtgttctgcgctctttcccgttgtgcccccggaagagcagatcccggaggagccgaggccgcaccacccgcaggctgcgcccagctgcacttgcatcccggggccggcgaaggtagaagagcagccgacccagccgcccttcctcaggtacgtggacacccacatctgcagcgacgaggcggacctgcaggcggactcgtccccgccaccgcagtagagggcggcagagatcttcggggccatggcggggaaggtggccccgctcagcgccctgcaaggccccccgccacattccttccacgccgagatcgccgtgccgtggcagccccccccggcccttcctgtcccggacatccccaggtaatcgctcaacaccagaatctgctgcttgccaacaccacatctgcatttccttacgctctgctcagtaatgacaatgcctttctgtcctaccaccctcacccttttgcacagcgaaccctcaccgcccgatttcaagttaataacaccaggccacctcacgtgcagctactcaggaagccagttctgactgctatgggtctgcttgcattgttagatgaggaacagctatgggccgaggtgtcccaagccggcacagtactggatagtaatcacaccgtgggcgttttagcctccgctcataggcctcagggacctgctgacgcctggcgcgccgccgtgcttatctatgccagcgatgatacccgagctcatcctaacagatctgtggccgtgactctcaggctgcgtggtgtcccacccggccctggccttgtttacgtaacccggtacctcgacaatgggctgtgttccccagacggcgagtggagaaggcttgggcggcccgtctttcccacggctgaacagttccggaggatgagagccgccgaggacccggtcgcagcagcgccacgcccactgcccgccggtggaaggctaacactgagacccgccttacgactaccctcgctgctccttgttcacgtgtgtgctcgccctgaaaaacccccaggacaagtcaccagactcagggccttacctctcacccagggccagctagtgcttgtgtggtcagatgaacatgttggatctaagtgcttgtggacctacgagattcagttttctcaggatggtaaggcttataccccggtcagccgaaagccctccacttttaatctgttcgtattcagccccgacactggtgccgtatcaggctcatatcgagtaagagctctggactattgggcccgccccggccccttctccgatcccgtaccatacctagaagttcccgtgcccagaggaccacccagccccggtaatccctag

SEQ ID NO: 5273 - RNA, 603 nt, synthetic construct
  misc_feature 1..603: note = source = /note="Description of Artificial Sequence: Synthetic coding sequence"
  source 1..603: mol_type = other RNA
atggctctgtggatgcgcttgctccctctcctagcccttttagcactttggggccccgaccccgcagcggccttcgtgaaccagcatctatgtggaagccaccttgtggaggccctgtatctcgtctgcggcgaacgaggctttttttatacacctaagacaagacgggaggccgaggatctgcaggcttccgcactgtcgctctccagtagcacctcgacttggcctgaaggtctggatgccacagccagagctccccctgctctagtcgttaccgccaatattggacaagccggcgggtcgtcgtccagacaatttcggcaacgcgcactcgggacttctgatagtccggtgttattcatccattgtccgggtgcggccggaactgcccaaggtctcgaataccgcggtagacgtgtcacaactgagttggtatgggaagaagttgattcctccccacagcctcaaggttccgaatccctccctgcacagccccctgcccagccagctccacagccggagccacaacaggcccgagagccctcccctgaagtgtcttgttgcggcctgtggcccagaaggccccagagatcccagaattag

SEQ ID NO: 5274 - RNA, 333 nt, synthetic construct
  misc_feature 1..333: note = source = /note="Description of Artificial Sequence: Synthetic coding sequence"
  source 1..333: mol_type = other RNA
atggctctgtggatgagactgttgccgctgctggctctcctcgctttgtggggcccggatcccgctgcagctttcgttaaccagcatttatgtggatcacacctggtggaggccctttaccttgtctgcggggaacgtggattcttttatacaccaaaaactagacgagaggctgaggatctgcaggtgggacaggtagaactgggcggaggtccaggcgcaggctccttgcaaccgctggctctggaaggttcactacagaagaggggcatcgtagagcagtgctgtacttcgatatgttccctgtatcagcttgaaaattattgtaattag

SEQ ID NO: 5275 - RNA, 333 nt, synthetic construct
  misc_feature 1..333: note = source = /note="Description of Artificial Sequence: Synthetic coding sequence"
  source 1..333: mol_type = other RNA
atggccctttggatgcgcctgttgccgctgctggcacttttagctctgtggggacctgatccagccgcagcgtttgttaatcagcacctgtgcggcagccatttggtggaagccctttacctcgtatgcggcgagcgtggatttttttacacacctaaaaccaggagggaggccgaggacttacaggtaggccaggtcgaactcggaggcggcccaggggcaggtagtctgcagccactcgccctcgaaggaagtttacagaaaagagggatcgtcgaacagtgttgtacctccatctgttctctgtatcagctcgaaaactactgtaattag

SEQ ID NO: 5276 - RNA, 333 nt, synthetic construct; identical to SEQ ID NO: 4946
  misc_feature 1..333: note = source = /note="Description of Artificial Sequence: Synthetic coding sequence"
  source 1..333: mol_type = other RNA

SEQ ID NO: 5277 - RNA, 297 nt, synthetic construct; identical to SEQ ID NO: 4947
  misc_feature 1..297: note = source = /note="Description of Artificial Sequence: Synthetic coding sequence"
  source 1..297: mol_type = other RNA

SEQ ID NO: 5278 - RNA, 333 nt, synthetic construct
  misc_feature 1..333: note = source = /note="Description of Artificial Sequence: Synthetic coding sequence"
  source 1..333: mol_type = other RNA
atggcactttggatgcggctacttccgttactggccttactagctctttggggaccagatccagccgcggccttcgttaaccaacatctgtgtggctcacacctagtcgaagccctttatctggtgtgcggggaaagaggattcttttatactgataaaacccggagagaagccgaggacctgcaggtaggacaagtggagctgggcggaggccccggagcagggtccctacagcctctggccttagaggggtcgttgcaaaagagaggcatagtggaacagtgttgcactagcatatgttctctctatcagctcgaaaactactgtaactag

SEQ ID NO: 5279 - RNA, 333 nt, synthetic construct
  misc_feature 1..333: note = source = /note="Description of Artificial Sequence: Synthetic coding sequence"
  source 1..333: mol_type = other RNA
atggccctatggatgaggctgctcccactcctcgccctacttgcactttggggaccagatccagccgccgccttcgttaatcagcacctgtgcggctctcacctcgttgaagctctctatctcgtgtgcggggaacgtggttttttctatactccaaagacacgtcgggaagccgaagatctgcaggtcggtcaagtagaactgggcgggggaccaggggccggaagtctgcagcctcttgccctagagggaagcttgcagaagagaggcatagtggaacagtgttgcaccagtatctgttcgttataccaactcgagaactattgcggatag

SEQ ID NO: 5280 - RNA, 333 nt, synthetic construct
  misc_feature 1..333: note = source = /note="Description of Artificial Sequence: Synthetic coding sequence"
  source 1..333: mol_type = other RNA
atggcactttggatgaggctgctcccattactggctctactggccttgtggggacccgatcccgcagccgcatttgtgaagcagcatctgtgtgggagtcacttggttgaggccctgtatctcgtgtgcggcgaaaggggattcttctatacccccgaaacccgaagggaggcagaagacttgcaggtcggacaggttgagttgggaggtggacccggtgctggatccctgcaacccttggccctggaaggaagcctgcaaaagagggggattgtggagcagtgctgcacctcgatttgtagtctctaccagctcgaaaactattgtaattag

SEQ ID NO: 5281 - RNA, 333 nt, synthetic construct
  misc_feature 1..333: note = source = /note="Description of Artificial Sequence: Synthetic coding sequence"
  source 1..333: mol_type = other RNA
atggccctctggatgcgcctgcttcccttgcttgctttgttagcactgtggggaccagatcccgccgccgcattcgttaaccagcacctatgtggttcacatctggtggaagccctctatcttgtctgcggggagaggggctttttctatacgaagccaaccagaagagaagcagaggacttacaggtgggtcaggtcgaattgggtggcggcccaggcgccggttctttgcaaccgcttgcactcgaaggctctctccaaaagcgaggaatcgtggaacagtgctgtacatctatatgttccctgtatcagctcgagaattattgtaattag

SEQ ID NO: 5282 - RNA, 570 nt, synthetic construct
  misc_feature 1..570: note = source = /note="Description of Artificial Sequence: Synthetic coding sequence"
  source 1..570: mol_type = other RNA
atggccttatctttctcactactaatggccgtgctggtgctttcttacaagtctatttgctccctcggatgtgacctcccacagacgcactcccttggtaatcgacgagcactgatcttattgggacaaatgggccggatcagccccttttcctgtcttaaagaccgccatgatttcagaatcccacaggaagagttcgacggtaaccaattccagaaggcccaggcgatctctgtacttcatgaaatgatacagcaaaccttcaatcttttctccacagaggattcgtctgctgcatgggagcagagtctcctggagaaattcagcactgagctttaccagcagcttaatgaccttgaagcatgtgtcatccaagaggttggcgttgaagagacccctcttatgaacgaggatagtatattggctgtgagaaagtacttccaacggatcaccctgtatctcatcgagaggaaatatagcccatgtgcctgggaagtggtacgagccgaaatcatgcgtagtctctcattttctacgaacctgcaaaaacggcttcgcagaaaggattag

SEQ ID NO: 5283 - RNA, 573 nt, synthetic construct
  misc_feature 1..573: note = source = /note="Description of Artificial Sequence: Synthetic coding sequence"
  source 1..573: mol_type = other RNA
atgatggccagcccctttgctctccttatggcacttgtcgtgctgtcttgcaaatcttcctgttccctgggctgcgacctgcctgaaacgcattctctcgacaatcggcgaactctcatgcttcttgctcagatgtctcggatatcccccagctcctgcttaatggatcggcacgacttcggcttcccccaagaagagtttgacgggaaccagtttcagaaagcccccgccatttccgtcctgcacgagcttatccagcaaattttcaacctctttacgactaaagactcttccgccgcatgggacgaggatctattggacaagttttgcaccgaattataccagcaactaaatgacttggaggcttgtgttatgcaagaagagcgtgtgggagagacgcccttgatgaatgctgattctatcctggctgtgaagaaatactttcggagaattactctatatctaactgaaaaaaagtacagcccctgcgcctgggaagttgtcagagccgagatcatgcgatccctgagcctcagcaccaacctccaagagcggctgcgcagaaaggagtag

SEQ ID NO: 5284 - RNA, 570 nt, synthetic construct
  misc_feature 1..570: note = source = /note="Description of Artificial Sequence: Synthetic coding sequence"
  source 1..570: mol_type = other RNA
atggctctgccctttgccctcatgatggccctggttgtactgagttgtaaaagttcatgttccttgggatgtaatttaagccagacgcactctctcaataatagaaggaccttgatgctcatggcacagatgcgcaggatctcccctttttcctgtcttaaagaccgccatgacttcgaatttccacaagaagagtttgacgggaatcaatttcagaaagctcaggccatttcagtattacatgaaatgatgcaacagactttcaacctgttcagtaccaagaactcctcagcagcttgggatgaaacactgcttgagaaattttatatcgagctcttccagcagatgaatgaccttgaggcttgcgtgatccaagaggttggagttgaggagaccccactcatgaatgaagactccatcctggccgtcaaaaagtactttcagcgaattaccctgtatctgatggaaaaaaaatattctccatgcgcctgggaagttgttcgggcagaaatcatgagatccctgtctttctctaccaaccttcaaaaaagactaagacgcaaagactag

SEQ ID NO: 5285 - RNA, 570 nt, synthetic construct
  misc_feature 1..570: note = source = /note="Description of Artificial Sequence: Synthetic coding sequence"
  source 1..570: mol_type = other RNA
atggccctctcattttctctgctcatggccgtactggtactctcatacaagtccatttgttctctaggttgtgacctgcctcaaacccattctctgggcaatcgacgcgctctgattctgctcgcccagatgggtcgcatttctcacttctcttgcctgaaagaccgttatgattttgggtttccacaggaggttttcgacggaaaccagttccaaaaggcacaggcaatatccgccttccatgaaatgatccagcaaacttttaatctgttctcaaccaaggactcttcggcagcttgggatgaaacattgttagataagttttacattgagctctttcaacaattaaacgacctggaagcgtgtgtgacacaagaagtaggagtggaagagattgctttgatgaacgaagacagcattctggcagtccgcaaatactttcaaagaatcaccctgtacttgatgggaaaaaaatactcgccatgtgcctgggaggtcgtgcgggccgaaattatgagatctttcagttttagcacaaaccttcaaaaaggcctgaggagaaaggattag

SEQ ID NO: 5286 - RNA, 570 nt, synthetic construct
  misc_feature 1..570: note = source = /note="Description of Artificial Sequence: Synthetic coding sequence"
  source 1..570: mol_type = other RNA
atggccctaagtttttccctgctcatggctgtcctcgtgctctcatacaaatcgatatgctcgttgggatgcgacctgccacagacacattcacttggaaacagacgggcccttatcttactcgctcagatgggcagaatcagtccattctcctgcctaaaggatcgccacgacttcgggcttccccaggaagagttcgacggcaaccagtttcagaaaacccaggctatctcagtcctccatgaaatgattcagcaaacctttaatttattttccaccgaagattcttcagcagcatgggagcaatctctactagagaaattctctaccgaattataccagcagttgaataacctagaagcctgtgtcatacaagaggtcggaatggaagaaacccccctgatgaacgaagacagtatcttggcagtgagaaagtacttccagcgcattactctgtatctaactgaaaaaaagtatagtccgtgcgcttgggaggtggtgagagccgagattatgcgatcactgagcttctctacaaatctgcagaagattttaaggaggaaagattag

SEQ ID NO: 5287 - RNA, 567 nt, synthetic construct
  misc_feature 1..567: note = source = /note="Description of Artificial Sequence: Synthetic coding sequence"
  source 1..567: mol_type = other RNA
atggccctgacattcgcccttctggtggccctcctagtcctgtcctgcaagtccagctgttcagtgggctgcgatctgccccagacacattccctgggctcacgccgcactctcatgttactagcccagatgcgccgaatttctctcttctcttgcttgaaagaccgtcacgatttcgggttcccacaggaagaatttggaaatcagttccaaaaagcggagacaatacccgtgctgcatgaaatgatacaacagatattcaacttattttctactaaagattcctcggccgcctgggatgaaaccctgttagataaattctacacagaactctaccaacagcttaatgatctcgaagcatgtgtcattcagggtgtgggcgtgacagagacccccctgatgaaggaagattccatattggcagtccggaaatactttcagcgaatcactctatacctgaaagaaaagaaatacagcccttgtgcgtgggaagtggtgcgcgcagaaattatgcgctcattcagcttgagcacaaatctacaagaatcattgcgaagcaaagagtag

SEQ ID NO: 5288 - RNA, 570 nt, synthetic construct
  misc_feature 1..570: note = source = /note="Description of Artificial Sequence: Synthetic coding sequence"
  source 1..570: mol_type = other RNA
atggcccttagtttttctctcttaatggccgtgttggtgctcagctacaaaagtatctgctccctaggctgcgacctgccccaaactcattcgctcgggaaccggcgcgcattgattttactggctcaaatgggccgcatcagccctttctcttgcttgaaagaccggcatgatttcggatttccccaagaggaattcgacggaaaccaatttcagaaagctcaggccatttctgttcttcacgagatgatccaacaaacttttaaccttttcagtacgaaagactctagcgctacgtgggagcaaagcctcctggagaagttttccaccgaactgaaccaacaacttaacgacctcgaagcttgcgtaatccaggaagtgggtgttgaagagactccgctaatgaatgttgactcaatactggcagtaaaaaaatactttcagaggatcactttgtacctgaccgaaaaaaaatattccccctgcgcttgggaagtcgtcagagcagaaataatgcggagctttagtctgtccaagatattccaagagagacttaggcgcaaagaatag

SEQ ID NO: 5289 - RNA, 570 nt, synthetic construct
  misc_feature 1..570: note = source = /note="Description of Artificial Sequence: Synthetic coding sequence"
  source 1..570: mol_type = other RNA
atggccctaagtttttcgcttctaatggcagtgctagttttgtcttacaagtcaatatgtagtttggggtgcgacctgccacagactcatagtctcggaaacagaagggccctgattcttctcgcccagatgggacggataagtcacttctcttgtcttaaagacagacatgactttggatttcctgaggaagagttcgatggacaccagtttcagaaggcccaagcaatttccgttctacatgagatgattcagcagacttttaatctttttagtaccgaggattcttcagccgcctgggagcagtctctgcttgaaaaattcagtaccgaactctaccaacagcttaatgatctggaagcttgtgttatacaggaagtcggtgtcgaagaaacaccgttgatgaatgaggactctatcctggccgtgaggaagtactttcaaagaatcaccttgtacctcactgagaaaaaatactctccttgtgcctgggaggtcgtgcgagcagaaattatgaggtctctgagtttctctaccaacctacagaagagactgagaagaaaagattag

SEQ ID NO: 5290 - RNA, 570 nt, synthetic construct
  misc_feature 1..570: note = source = /note="Description of Artificial Sequence: Synthetic coding sequence"
  source 1..570: mol_type = other RNA
atggcattgccctttgtgttactcatggccctggtggtgcttaactgtaagagcatttgttcattgggatgcgacctgccccaaacacactctctctcaaacaggcgtacacttatgattatggcacagatgggccgtatcagcccatttagctgtctcaaagaccggcatgactttggatttccccaagaagaattcgatggtaaccaatttcagaaagctcaggccatctccgttctacacgaaatgatacaacaaactttcaatcttttcagcaccaaagattcttctgctacatgggatgaaactcttctggataaattctacaccgaactatatcaacagctcaatgacctggaggcctgcatgatgcaggaggtcggtgtcgaagatactccgcttatgaacgttgactccatcttaactgtgagaaagtactttcagcgaatcaccctgtatttaaccgagaagaaatactcaccatgcgcctgggaggtagtccgtgccgaaattatgaggagctttagtctgagcgccaatttacaggaaagattgagacggaaagaatag

SEQ ID NO: 5291 - RNA, 570 nt, synthetic construct
  misc_feature 1..570: note = source = /note="Description of Artificial Sequence: Synthetic coding sequence"
  source 1..570: mol_type = other RNA
atggcactccccttcgccttgttgatggcattagtggttttgtcgtgtaaatcctcatgttctttagactgcgacctccctcagacccatagtctgggccacaggcggacaatgatgttgctcgcacagatgcgacgcatctctctattctcatgcctgaaggacagacacgatttccgattcccacaggaagaattcgatggcaatcagttccaaaaggcagaagctataagtgtccttcacgaagttatccagcagactttcaacttgttctcaactaaggattcctcagtagcatgggacgagcgactgttggataaattatatacagaactctatcaacagctgaacgatttggaggcgtgcgttatgcaggaagtctgggtggggggaacaccactcatgaacgaggactctatcctggccgtgcgcaaatacttccagcgtattacattgtacttaaccgaaaagaaatactcaccatgtgcctgggaggtggtcagagctgaaattatgcgatctttctctagctcccggaacttgcaggaacggcttaggcggaaggaatag

SEQ ID NO: 5292 - RNA, 570 nt, synthetic construct
  misc_feature 1..570: note = source = /note="Description of Artificial Sequence: Synthetic coding sequence"
  source 1..570: mol_type = other RNA
atggcgcggtcgttttccctgctgatggtggtgttagtcctgtcctacaaatctatttgttctctcggatgtgatttgcctcagacccactctctgcgcaacaggcgggctcttatattactggcacagatgggtagaatttctccttttagctgtctaaaagacaggcatgagttcagattccctgaagaagagtttgatggacaccagtttcaaaagacgcaggctatttcagtgctgcacgagatgattcagcagacatttaatctcttctctactgaggattcatctgctgcttgggagcaatcactcctagaaaaattttcaaccgaattgtatcagcaactgaacgaccttgaggcctgcgttatccaagaggtgggtgttgaagagactcctttaatgaacgaagattttatccttgcagttcgcaagtactttcagcggatcactttgtatttgatggagaaaaagtacagtccgtgcgcttgggaagtcgtcagggcagagatcatgagatccttctccttttccacgaatctgaagaagggccttcgacggaaggactag

SEQ ID NO: 5293 - RNA, 570 nt, synthetic construct
  misc_feature 1..570: note = source = /note="Description of Artificial Sequence: Synthetic coding sequence"
  source 1..570: mol_type = other RNA
atggctctcaccttctatctactggtggctttggtcgtgctctcctacaaaagctttagttccttaggctgtgacctgccccagacacactcacttgggaaccgtcgcgccctgatccttctcgcccagatgagacgtatctctccttttagttgtctgaaagaccgacacgacttcgaatttcctcaagaagagttcgacgataaacagttccaaaaggcccaggccatctcagttttacatgaaatgattcagcagacttttaatcttttttctaccaaagactccagtgccgcactcgacgagaccctgcttgacgagttttatatcgagcttgaccaacagcttaatgatctcgaatcctgtgttatgcaggaagttggagtgatcgagtcacccctaatgtacgaagattcaatcttagccgtcagaaaatattttcaacgcataacactctacctgaccgaaaaaaaatacagctcatgcgcatgggaagtcgtccgtgcagaaatcatgcgaagttttagcctgagtatcaacctgcaaaagaggctgaagtccaaggaatag

SEQ ID NO: 5294 - RNA, 564 nt, synthetic construct
  misc_feature 1..564: note = source = /note="Description of Artificial Sequence: Synthetic coding sequence"
  source 1..564: mol_type = other RNA
atgaccaataaatgcttactccaaatagcgcttttgctttgtttctccacaaccgccttatcaatgtcctacaacctgctggggtttctccaaaggagcagcaattttcagtgtcagaagctcttatggcagctcaacggaaggctcgagtactgcttaaaggacagaatgaactttgacatccccgaagagattaagcaactgcagcagtttcaaaaggaggacgcggctctgacaatctatgagatgttacagaatatattcgcaatttttcgacaggacagctctagtaccggatggaacgaaaccattgtggaaaatctgctagctaacgtttaccatcagatcaatcatctcaagaccgttctggaggagaaactggaaaaggaagatttcacacggggtaaactgatgtcatccctgcacttgaagagatattacggccgaatcctgcactaccttaaagccaaagagtactctcactgcgcatggacaattgtgagagtggagatcctgaggaacttttacttcatcaatagactgaccggatacctgcgcaactag

SEQ ID NO: 5295 - RNA, 534 nt, synthetic construct
  misc_feature 1..534: note = source = /note="Description of Artificial Sequence: Synthetic coding sequence"
  source 1..534: mol_type = other RNA
atgttccatgtctcatttcgatatatcttcggactgccccccctaatcctagtgctactccccgtcgcgagcagcgattgcgacatcgagggaaaggacggtaaacagtatgagagtgtcctcatggtgagtatagatcaattgcttgacagtatgaaggaaattggatcaaactgcctgaataatgagtttaattttttcaaacgccatatctgcgacgccaataaagaaggaatgtttctgtttcgagccgcacgtaaactcaggcagttccttaaaatgaattccaccggtgatttcgacttacatctgctgaaagtaagcgaaggcacgacaattctgctaaactgtactggacaagtaaagggtcggaaacccgcagcccttggtgaagctcagcctaccaagagtctggaggagaacaagagcctgaaagaacagaagaagctcaacgatctgtgtttccttaagcgcctcctgcaagagattaaaacatgttggaacaagatcttaatgggaactaaagagcactag

SEQ ID NO: 5296 - RNA, 216 nt, synthetic construct; identical to SEQ ID NO: 4966
  misc_feature 1..216: note = source = /note="Description of Artificial Sequence: Synthetic coding sequence"
  source 1..216: mol_type = other RNA

SEQ ID NO: 5297 - RNA, 393 nt, synthetic construct
  misc_feature 1..393: note = source = /note="Description of Artificial Sequence: Synthetic coding sequence"
  source 1..393: mol_type = other RNA
gtcagttttcggtacatttttgggcttccgcccctcattctggtcttgcttccagtggccagtagtgattgtgacatcgaagggaaggacggcaaacaatacgaatctgtacttatggttagtatcgatcagttgttagactccatgaaagaaatcggcagcaactgtctcaacaatgagtttaatttctttaaacggcacatctgcgacgctaacaaggtcaaaggccgaaaaccagctgctctaggcgaggctcaaccaacaaagtcactggaagaaaataagtcccttaaggaacagaaaaagctgaacgatctttgctttctcaaacggctgcttcaggagattaaaacatgttggaataagatactaatgggaacaaaagaacactag

SEQ ID NO: 5298 - RNA, 216 nt, synthetic construct; identical to SEQ ID NO: 4968
  misc_feature 1..216: note = source = /note="Description of Artificial Sequence: Synthetic coding sequence"
  source 1..216: mol_type = other RNA

SEQ ID NO: 5299 - RNA, 114 nt, synthetic construct; identical to SEQ ID NO: 4969
  misc_feature 1..114: note = source = /note="Description of Artificial Sequence: Synthetic coding sequence"
  source 1..114: mol_type = other RNA

SEQ ID NO: 5300 - RNA, 402 nt, synthetic construct
  misc_feature 1..402: note = source = /note="Description of Artificial Sequence: Synthetic coding sequence"
  source 1..402: mol_type = other RNA
atgttccacgtctcgtttcgctacatttttgggctgcctcctctcatcctggtcctgctgcccgtggcatcttccgattgtgacatcgaaggcaaggacggcaaacaatacgaaagcgtactgatggtaagcatagaccagctgctcgatagcatgaaagaaattggctccaactgtcttaataatgaattcaacttctttaaacgtcacatttgcgacgctaacaaggtgaaggggagaaaaccagccgccttgggggaggctcaacctactaagtctcttgaggagaacaaatccctaaaggaacagaagaaattaaatgacctctgcttcctcaagagattactgcaagagattaagacatgctggaacaagatccttatgggcaccaaggaacattag

SEQ ID NO: 5301 - RNA, 114 nt, synthetic construct; identical to SEQ ID NO: 4971
  misc_feature 1..114: note = source = /note="Description of Artificial Sequence: Synthetic coding sequence"
  source 1..114: mol_type = other RNA

SEQ ID NO: 5302 - RNA, 195 nt, synthetic construct; identical to SEQ ID NO: 4972
  misc_feature 1..195: note = source = /note="Description of Artificial Sequence: Synthetic coding sequence"
  source 1..195: mol_type = other RNA

SEQ ID NO: 5303 - RNA, 660 nt, synthetic construct
  misc_feature 1..660: note = source = /note="Description of Artificial Sequence: Synthetic coding sequence"
  source 1..660: mol_type = other RNA
atgaaaatgagatttctcgggctggttgtgtgtttggtgctatggaccctccatagcgagggttccggaggaaagctgaccgcagttgatccagagacgaacatgaatgtcagtgagatcatctcttactggggattcccctccgaagaatatttagtcgagaccgaagatggatatattctgtgcctcaatagaatcccacacggcagaaaaaatcacagcgataaaggccccaaacccgtcgtgttcctccaacatggtctgcttgctgatagttccaattgggtaacgaacctggccaattcttctctgggctttattctggcagacgcaggcttcgacgtgtggatgggaaacagcagaggaaacacctggagccgtaagcataagactcttagcgtctcccaggacgaattttgggcctttagttatgatgaaatggcaaaatacgatttacctgcatcaattaactttatactgaataaaaccggacaggaacaggtatattatgtgggacactcacaaggcaccaccattggctttattgcctttagtcagatccccgaactggccaagcgcataaagatgtttttcgcacttggcccagttgcgtccgttgcattttgtacctcccctatggcaaagttgggacgtctttag

SEQ ID NO: 5304 - RNA, 1200 nt, synthetic construct
  misc_feature 1..1200: note = source = /note="Description of Artificial Sequence: Synthetic coding sequence"
  source 1..1200: mol_type = other RNA
atgaagatgaggttcttgggattggtcgtttgcctcgtactctggacactgcattctgaaggctcaggaggaaagctcacagccgtggaccccgaaacaaacatgaatgtaagtgaaatcatttcctactggggattcccctccgaagagtaccttgtcgaaacagaggatggctatattttatgcctaaatcgcattccccatggtcgtaagaatcactccgataaaggaccaaaacctgtagtgttccttcagcatggactcttggctgatagttcgaactgggtgacaaacctggctaattctagtctcggattcatactggccgatgctggattcgatgtgtggatggggaatagccggggtaatacttggtcacgcaaacacaagaccctgtctgtttcacaggatgaattctgggccttttcttatgacgaaatggcgaaatatgatttacccgcctccatcaatttcatactcaataaaaccggtcaagaacaggtctactacgtaggacattcacaaggcaccactataggctttatcgctttttcacagattccagagctcgccaagcgaattaaaatgttttttgccttaggccccgtggcatccgtggcattttgcacttcccccatggcaaagctagggcgactgcctgatcatctgattaaagacctgtttggcgacaaggagttcctgccccagtccgcgtttttgaaatggttgggtacccacgtgtgtacccatgttatcctaaaagagctttgtggcaacctgtgcttcttgttatgtggcttcaacgaaagaaatcttaatatgagcagggtggatgtttacaccacacattctccagccggaacctccgtacaaaatatgctacattggtctcaggccgtcaagtttcaaaaattccaagctttcgattgggggtctagtgcaaagaactacttccattacaaccagagttatcctcccacttataacgtcaaggatatgcttgtgccaaccgcagtatggtccggaggacacgattggctcgcggacgtctacgatgtgaatatactcctgacacagatcactaaccttgtgttccatgaatctatccctgaatgggagcacctcgactttatctggggactggacgcgccgtggcgcctgtataacaaaatcataaatctcatgcgcaaataccagtag

SEQ ID NO: 5305 - RNA, 1074 nt, synthetic construct
  misc_feature 1..1074: note = source = /note="Description of Artificial Sequence: Synthetic coding sequence"
  source 1..1074: mol_type = other RNA
atgaaactgcggacattagctgttagcgccaccgttgttaaggacggagtcagcggagtttgctcctttcggtgcagcgacgtatctggcgtgttaccctcaggacctaaaccggtggttttccttcagcacggattgttagcggactcgtcaaattgggttacaaacctcgccaactcctctctggggttcattctcgccgacgctgggtttgacgtctggatgggtaattctaggggcaacacatggtcacgcaaacacaagaccctctcagtttctcaggatgagttttgggccttttcttacgacgagatggccaagtatgatctccccgcatccatcaacttcatcttaaacaagacgggccaagaacaagtgtactacgtggggcactctcaggggaccactattgggttcattgccttttctcaaatccccgagctcgctaagagaattaagatgttctttgccttagggccagttgcaagcgttgccttctgcaccagtccaatggccaaactaggaagactgcctgaccacctgattaaagatctgttcggcgacaaggagttcctgccacaatccgcattcctcaaatggttaggtacacacgtatgcacgcatgtaattcttaaagaactttgtggtaacttatgtttccttctgtgtgggttcaatgaaagaaatttaaacatgtctcgcgtcgatgtttacaccacacatagtcctgcaggtacttcagtgcaaaatatgttacactggtcccaagctgtgaaatttcagaagtttcaggcatttgactggggatcaagtgcaaagaattattttcactacaatcaatcctatcctccaacctacaacgtgaaggacatgctggtgcctaccgccgtatggtctggcggccacgactggctcgcggacgtgtatgacgttaacattcttttgactcagattaccaacctcgttttccacgaaagtatacctgaatgggagcatttggacttcatttggggactcgacgcaccctggaggttgtataacaaaatcataaatcttatgagaaagtatcagtag

SEQ ID NO: 5306 - RNA, 1200 nt, synthetic construct
  misc_feature 1..1200: note = source = /note="Description of Artificial Sequence: Synthetic coding sequence"
  source 1..1200: mol_type = other RNA
atgaagatgagatttttaggcctcgtcgtttgtctggttttgtggacgctacactcagaaggctctgggggcaaattaacagccgtggacccggaaaccaacatgaacgtatccgaaatcattagctattggggatttccaagcgaagaatatcttgttgaaaccgaggatggctacatcctctgcctgaatcgcatccctcatggcaggaaaaatcacagtgacaaaggccccaaaccagtggtcttcctgcagcacgggctacttgccgattcatctaactgggtcactaatttggcaaattcatctcttgggttcattcttgcagacgctggtttcgacgtatggatgggtaattcaaggggaaacacctggtcgaggaaacataaaacattgagcgtatctcaggacgagttctgggcattcagctatgatgaaatggcgaaatacgacctaccagcatccattaactttatcctaaataagacagggcaggaacaggtttactacgtcggacatagtcagggaactactattggtttcatcgcgttttcacaaatcccagaactcgcaaaaaggattaagatgtttttcgccctcggtccagtggcatctgtcgccttctgtacctcccctatggcaaaacttggccgcttaccagatcacctgatcaaggatttatttggcgataaagaatttcttccccagtccgcattcctcaaatggctgggaacccacgtgtgtactcacgtgatcctgaaggaactgtgcggaaatctctgcttccttctttgcgggtttaacgagaggaatctgaatatgagcagagttgatgtttacactacccatagtcccgccggcacatcagtacaaaacatgctgcattggtcccaggccgttaagttccaaaaatttcaggcctttgattgggggtcatcagcaaagaactactttcattataaccaaagttaccctccaacctacaatgtcaaggatatgctggtgcctaccgcagtttggtccggcgggcacgactggcttgcagacgtgtacgacgtaaatattctgctgacacaaattaccaacttggttttccatgagtctattcctgagtgggaacatctggattttatctggggcttagatgccccttggcggctgtataataaaatcatcaatcttatgagaaaatatcaatag

SEQ ID NO: 5307 - RNA, 1032 nt, synthetic construct
  misc_feature 1..1032: note = source = /note="Description of Artificial Sequence: Synthetic coding sequence"
  source 1..1032: mol_type = other RNA
atggcctgcttggagtttgtgccttttgatgtacagatgtgcctggagtttctcccatcaggccccaaaccagtcgtcttcctccagcacggacttttagcagacagcagcaactgggtgacaaatctggcaaacagttcactgggatttattcttgccgatgccggattcgatgtttggatgggaaactctagaggaaatacctggtcaagaaaacataagaccttgtccgtgagccaagacgagttctgggctttctcttatgatgaaatggctaagtacgacctgccagctagcattaacttcatcctgaataagacaggacaggaacaggtctattatgtgggacactcacaggggactaccatcgggtttatcgcgttctcccagataccagagctcgccaaacggatcaaaatgttctttgctctaggtcccgtggcttccgtcgccttttgcacctcccctatggccaaactcggtagactgcctgatcatctgattaaagacctatttggagacaaggagttccttccacagtcagcctttcttaagtggctgggaacacatgtgtgtacacacgtaattttaaaagagctctgcggcaacctctgtttcctgctatgcggtttcaacgaacgcaacttgaatatgtcccgcgtcgacgtgtacacgacccactcacctgccggaacctccgttcaaaatatgctgcactggtctcaagcagtcaagtttcagaagtttcaagccttcgactggggtagctccgcaaaaaattactttcactacaatcagtcttatccacccacgtacaacgtcaaggatatgctagtccctacggcggtctggagtggcgggcatgactggttggccgatgtatacgacgttaacatcctgctgacccagatcacgaacctggtattccacgagtccatacctgagtgggaacaccttgacttcatttggggattagatgccccatggagactatataacaagattatcaatcttatgcgcaaatatcagtag

SEQ ID NO: 5308 - RNA, 1206 nt, synthetic construct
  misc_feature 1..1206: note = source = /note="Description of Artificial Sequence: Synthetic coding sequence"
  source 1..1206: mol_type = other RNA
atggcgtgcttggagttcgttcctttcgatgttcagatgtgtttggaattcctgccatcaggagaatttgtggtcttattgacaagcggcgtgcaacttcaaacttttaccgtctcagtaactgatttaaaagggggcgcttcgggcgtggtccggtcaagccgctgggtgcgcggtttcaccgatttcagatcaaaagctgtggacttatgtggacccaaaccggtcgtttttctgcagcatgggctcctggcagacagcagtaattgggtaaccaatctagccaactcatcactgggcttcattttggccgacgccgggtttgatgtttggatgggtaactccagaggaaacacatggtcaaggaaacataaaaccctttcagtgagtcaggacgaattctgggccttcagagtaccctttctcgactattcctatgatgagatggcaaaatacgatttaccagcaagtataaattttattctgaataagaccggccaggagcaggtgtattatgtggggcacagccagggaacaaccatcggatttatagccttttctcagattccggaactagccaagagaatcaaaatgttcttcgcgctaggccctgtggcctcagttgccttttgcacatcaccaatggccaaacttggaagattacccgaccatttgatcaaggacttatttggcgacaaagaattcttgccccaatctgcttttttgaaatggctcgggactcacgtttgtacccacgttattctgaaggaactctgcggtaacctatgcttccttctgtgtggttttaacgaaagaaatttgaacatgtcccgcgtcgacgtgtataccactcactccccagccggaacttcggtacaaaatatgctgcactggagtcaggctgtgaaattccagaaattccaagccttcgactggggatcatcagctaaaaactactttcactataaccaatcctacccccccacctacaacgtcaaagatatgctcgttcctacagctgtttggtcaggcggacatgactggttagctgacgtgtatgatgtaaacatcctgctaacgcaaatcacaaatttagttttccacgagtcaatccccgagtgggagcaccttgacttcatttggggcctggatgccccatggcgcctgtacaacaagatcatcaacctgatgcgtaaataccagtag

SEQ ID NO: 5309 - RNA, 873 nt, synthetic construct
  misc_feature 1..873: note = source = /note="Description of Artificial Sequence: Synthetic coding sequence"
  source 1..873: mol_type = other RNA
atgaaaatgagatttttgggcctggtagtgtgtctggttttgtggaccttgcacagcgaaggatccggaggtaaacttactgccgtagacccagaaacaaacatgaacgtatcggaaatcatctcttattggggttttccttctgaggaatacctcgttgaaacagaagacgggtatatcttgtgcttgaatcgtattccccatggccgtaaaaaccacagtgataaaggtcctaagcccgttgtgttcttgcagcatggcctgttggctgacagttcaaactgggtgacgaacttggcgaactctagtctgggcttcatcctggccgacgcaggatttgatgtttggatgggtaacagtagaggtaacacctggtcgcggaaacacaaaacactctcagtaagccaggacgaattctgggcgttcagttatgacgagatggccaagtacgatctccccgcctcaataaacttcatactgaataagaccggtcaggaacaagtctattacgtaggtcactctcaaggaacaacgattgggttcatcgcttttagtcagattccggaactggccaaacggatcaaaatgttcttcgcattgggtcccgttgcatctgttgccttctgtacgtcacccatggccaaactgggacgattgcccgaccatcttatcaaggaccttttcggcgacaaagagtttcttccacaatctgcattccttaaatggctgggaactcacgtttgtacacacgttatccttaaggaactatgcggcaacttgtgctttttgctgtgcgggttcaatgagcggaatcttaacatgtcaagagtcgatgtctatactacccactcacctgccggcacttccgtgtag

SEQ ID NO: 5310 - RNA, 1200 nt, synthetic construct
  misc_feature 1..1200: note = source = /note="Description of Artificial Sequence: Synthetic coding sequence"
  source 1..1200: mol_type = other RNA
atgaaaatgcgttttcttggcttggtggtctgcctggtactgtggacgctccactcagaaggttcaggtggaaaactgactgccgtagaccccgagacgaatatgaacgtgtccgaaattatctcttattggggttttccaagtgaagaatatcttgtagaaaccgaagacgggtacattctgtgtttgaaccgcataccccacggacggaagaatcactctgacaagggcccaaaaccggtagtgttcttgcagcatggtctgttggctgatagcagtaactgggttactaatctcgcgaatagcagtctcggcttcatcctggcggatgctggatttgatgtttggatgggtaactcccgcggaaacacttggtcccgtaaacacaaaactttgagcgtgtcacaggacgaattttgggccttcagttatgacgagatggctaagtacgatctccccgccagcattaacttcattctaaacaaaacaggacaagaacaagtatattacgttggccacagccaaggcacaacgatcgggtttatcgctttctctcaaatcccagaactcgcaaaacggattaagatgttctttgcactcggccccgtggcgtcagtggcattttgtactagtccgatggccaagctcgggcggctccctgatcatctgattaaagatctctttggggacaaggagtttcttccccagtccgcatttttaaaatggctcggaactcacgtgtgcactcatgtcatcttgaaggaactctgtggcaacctgtgttttctgttgtgtggctttaacgaacgaaatctgaatatgtcccgagtcgatgtatacacaactcattcaccagccggtacatccgtgcagaatatgctgcactggtctcaagcagtgaagttccagaaatttcaagcttttgactggggctcttcagcaaagaattattttcactataatcaaagctatcctccaacatacaatgtaaaagacatgcttgtgccaacagccgtgtggagtggcggtcacgattggctggccgacgtatacgacgtaaacatcctgcttacacaaattacaaaccttgttttccatgagtctatccccgagtgggagcacctggattttatctggggactcgatgccccatggcggctttataacaaaataataaatttaatgcgcaaataccagtag

SEQ ID NO: 5311 - RNA, 87 nt, synthetic construct; identical to SEQ ID NO: 4981
  misc_feature 1..87: note = source = /note="Description of Artificial Sequence: Synthetic coding sequence"
  source 1..87: mol_type = other RNA

SEQ ID NO: 5312 - RNA, 1200 nt, synthetic construct
  misc_feature 1..1200: note = source = /note="Description of Artificial Sequence: Synthetic coding sequence"
  source 1..1200: mol_type = other RNA
atgaagatgcgcttcctggggctcgtagtttgtttagttctgtggacacttcacagtgaagggagcggtgggaagttgaccgcagttgaccccgaaactaatatgaatgtttccgaaatcattagctattggggcttcccatctgaggagtacctggtcgagaccgaggatggttacatactttgcctgaatcgaattccacatggccgcaaaaatcactccgacaaggggcccaaaccagttgtcttcctgcagcacggactcctcgctgatagtagcaactgggttacaaacctcgctaactcgtctctgggcttcattctggctgatgccggattcgatgtgtggatggggaacagcagaggtaatacatggtcacgcaagcacaagacactctcagtgtctcaggatgaattctgggctttctcatatgatgagatggcaaaatacgatctgccagcttctataaattttattttaaataagaccgggcaggaacaagtctactacgtgggtcattcacagggaacaactataggattcatcgctttctcacaaattccagaattggctaaaaggatcaagatgtttttcgcccttggcccggtcgcctctgttgccttttgtacctctccaatggctaagctgggtcgtctgcccgatcacctgatcaaagacctattcggggataaggagtttctccctcaatctgcgttccttaaatggctcggcactcacgtttgcacccacgtcattctgaaggaactgtgcggcaacttatgttttctattgtgcggatttaacgagcgcaacttgaatatgagcagagtcgacgtatacacaacacactcacctgcaggaaccagcgtgcagaatatgctccactggtcccaagctgtgaagttccaaaaatttcaggccttcgattggggatcaagcgccaaaaactactttcattataatcaatcctacccacccacctacaacgttaaagatatgctggtacccaccgccgtttggtcaggtggacatgattggctggctgacgtttatgacgtaaatatcctgctcactcaaattacgaatttggtctttcacgagtccattcccgaatgggagcacctcgattttatctggggcctagacgccccttggagactgtacaacaagattattaatctgatgcggaaataccaatag

SEQ ID NO: 5313 - RNA, 411 nt, synthetic construct
  misc_feature 1..411: note = source = /note="Description of Artificial Sequence: Synthetic coding sequence"
  source 1..411: mol_type = other RNA
atgaaaatgagatttttaggacttgtcgtctgccttgtactttggactctgcacagtgagggatcaggcggaaagctgactgcggtggaccccgagaccaacatgaacgtcagcgagatcatttcctattggggattcccttctgaagaatacctggtagaaactgaagatggctacatactttgcctgaatcggatcccccatggccgaaagaaccactccgacaaaggtcccaagcccgttgtatttcttcagcacggactactcgctgattcaagcaactgggtcacaaacctggcaaactccagcctgggtttcatattagctgatgccggattcgacgtgtggatggggaacagtaggggaaatacatggagtagaaagcacgttacccttgaacctgggtgttag

SEQ ID NO: 5314 - RNA, 1428 nt, synthetic construct
  misc_feature 1..1428: note = source = /note="Description of Artificial Sequence: Synthetic coding sequence"
  source 1..1428: mol_type = other RNA
atggagtcaaaagctcttcttgtgttgactctcgccgtctggctgcagtccctgaccgcctcgagaggaggagtggcagcagccgaccagagacgcgattttattgatatagaatccaagtttgccctccgtacccccgaagatactgcagaggatacctgtcatcttatcccaggtgttgcagagtccgttgctacctgtcacttcaatcatagttccaaaaccttcatggtgatccacggatggactgtaacaggaatgtacgagtcatgggtcccaaaactggtggccgctctctataaaagagaaccggattctaacgttattgtggttgactggctgtctagggctcaagaacattaccccgtgagtgcaggttataccaagctggttgggcaggacgttgcgagatttattaattggatggaagaagagttcaattacccactggacaatgtgcacctgctcggctactcccttggcgcacacgccgcaggcattgccgggtcactgaccaataaaaaagtaaaccgcatcacaggtctggacccagccggtccgaactttgaatatgccgaggctccctcacgactgtcccccgatgacgcagatttcgtcgatgttctgcacacgtttactagaggaagccctgggcgcagcataggtattcaaaaacccgtaggacatgtggatatctacccaaatggaggcacgttccagcctggatgtaatatcggtgaggctatccgcgtcatagccgaaagaggcctgggggacgtagaccagctagtgaagtgcagccacgagcgcagtatccatttattcatcgattccctgctgaatgaagagaatccatctaaggcttataggtgctcaagcaaagaagccttcgaaaaaggactttgcctttcgtgcagaaaaaatcgttgcaataacctcggttatgagattaataaagtcagagctaagagatcttctaagatgtatctgaagacccgatctcaaatgccttataaagttttccactaccaggtcaagatacacttcagcggcaccgaatcagagactcacactaatcaggcttttgagatctccttgtatggcacagttgccgagtcagaaaatattccctttacactcccagaagtcagcacgaacaaaacctattcctttttaatttataccgaggtcgacatcggtgaactgctcatgctaaaactgaaatggaagtcagattcttacttctcgtggagcgattggtggagcagcccaggatttgctatacagaaaattagagttaaagccggtgaaacccagaagaaagtgatcttttgttcaagagaaaaggtttctcacctgcaaaagggtaaagcccctgccgtgttcgtgaaatgccatgataagtcactgaataaaaagtccggctag

SEQ ID NO: 5315 - RNA, 348 nt, synthetic construct
  misc_feature 1..348: note = source = /note="Description of Artificial Sequence: Synthetic coding sequence"
  source 1..348: mol_type = other RNA
atggttatccatggctggactgtgactggcatgtacgaaagttgggttccaaaactggtggccgccctttacaaacgcgagccggattctaatgtgattgtcgtcgattggctttctcgcgcacaggagcattaccccgtgtcggcaggatatactaaattggttggtcaggatgtggcaagatttattaactggatggaggaggaattcaactacccccttgataacgtgcacctgttagggtatagtctgggtgcccacgccgccggtatcgctggctcactcacaaataagaaggtcaacagaatcaccggcttagatccagcaggcccaaactttgaatactag

SEQ ID NO: 5316 - RNA, 321 nt, synthetic construct
  misc_feature 1..321: note = source = /note="Description of Artificial Sequence: Synthetic coding sequence"
  source 1..321: mol_type = other RNA
atggaatcgaaagctttactggtcctgacgctggccgtctggcttcaaagtttaaccgcctccaggggaggcgttgccgccgcagatcagaggcgtgattttattgacatcgagtctaaatttgcattacgcacaccagaggatactgccgaagatacctgtcacttaatccccggcgtagccgagagcgtggccacttgccatttcaaccatagttcaaaaacctttatggtcattcacggctggaccgtcaccggtatgtacgaatcttgggtgcctaaactggtcgctgcactgtacaaacgcgaaccagattcttag

SEQ ID NO: 5317 - RNA, 393 nt, synthetic construct
  misc_feature 1..393: note = source = /note="Description of Artificial Sequence: Synthetic coding sequence"
  source 1..393: mol_type = other RNA
atggaaagcaaagccctgttagtgctcaccctggccgtatggctgcagtctctgacagctagccgtggtggcgttgccgctgctgaccagcgtagggactttatcgatattgagtccaaatttgccctccgcacacctgaagataccgccgaggacacctgtcatctcatacccggcgtcgctgaaagcgttgctacctgccactttaaccattcgtccaagacctttatggtgatccacgggtggacagttaccggtatgtacgagtcgtgggtccccaaactagtcgctgccctttacaagagagagcctgattctaacgtgatcgtcgttgactggttgagcagagcccaggagcactaccccgtatcggctgggtacacaaagctgtag

SEQ ID NO: 5318 - RNA, 1386 nt, synthetic construct
  misc_feature 1..1386: note = source = /note="Description of Artificial Sequence: Synthetic coding sequence"
  source 1..1386: mol_type = other RNA
atggaatctaaggcactgcttgtgttgaccttggctgccgctgatcagaggagagacttcatcgatattgaaagcaaattcgcccttcgcactcctgaggatactgctgaggatacatgccatttaatccccggcgtagctgagagcgttgctacgtgtcacttcaaccacagttcaaaaactttcatggtaattcacggctggacagtaaccggcatgtatgagagctgggttccaaagttagtagccgccctttacaaacgtgaacccgactccaatgtgatagttgtagattggctgtcccgtgcccaagaacactaccccgtttcagctggatacacaaaactcgtaggacaggacgtggcccgctttattaactggatggaggaggagttcaattacccactggataatgtacatttgctaggatactcactgggggcccacgcagccggcatcgctggcagtttaacaaacaagaaggtgaatagaattacaggcctggatcccgctggcccgaacttcgagtacgccgaggccccttcacgcctgagccctgatgacgcggacttcgtcgacgtgctgcacaccttcacacgcgggtcaccaggacgttctattggtatccagaaacccgtcgggcacgtcgacatctatccaaatgggggaacctttcaacccggatgcaatattggcgaagcaatcagagtcatagctgagagaggattgggagacgtggaccagctcgtgaaatgttcccacgaacgttcaatacacctatttatcgactccctactgaatgaggagaacccaagcaaggcataccgttgcagctctaaggaggccttcgaaaaaggattgtgcctgtcatgtcgaaaaaaccgctgtaataatctcggctacgaaattaacaaagtacgcgcaaaacggagttctaaaatgtaccttaagacccggagtcagatgccctataaagtttttcattaccaggttaagatccatttttccgggacagagtctgaaactcacaccaaccaagcctttgaaataagcctttacggtacagttgctgagtcggagaacattccctttacccttccagaggttagtactaacaagacatacagcttcctaatatacactgaagtagacattggagaacttctgatgcttaaactcaaatggaagtctgatagttactttagttggtccgactggtggagctccccaggcttcgcaattcaaaaaatccgcgtcaaagcaggcgagacccaaaagaaagttattttctgctcaagggagaaggtcagccatttacagaaaggaaaagcccccgcggtcttcgtcaagtgccatgataaatcactgaacaaaaagtcagggtag

SEQ ID NO: 5319 - RNA, 828 nt, synthetic construct
  misc_feature 1..828: note = source = /note="Description of Artificial Sequence: Synthetic coding sequence"
  source 1..828: mol_type = other RNA
atggtgattcatggatggacggtgacaggtatgtacgagagttgggttccaaaactggtggcggctctgtataaacgagaacctgacagcaatgtgatcgtcgttgattggctgagtagagcacaggagcactaccccgtgtcagctggatacactaaactcgtaggtcaggatgtggcccgttttataaactggatggaagaggagttcaattatccactggataacgtccatttacttggctacagcctgggagcccatgccgcaggcatcgccgggtcattgacaaataagaaagtcaaccgtattacgggcttagatcctgccggcccaaatttcgaatatgccgaagctcctagtcgattgtcaccggatgatgctgacttcgtcgatgtgctgcacactttcaccagaggctcacccggtagatccatcggtatccagaagccagtgggacacgtggacatttatccaaacggagggacatttcagccaggctgtaatattggcgaggctatcagggtgattgcagagcgcggcttaggtgacgtggatcaattggtcaagtgttcgcacgaaagatcaattcaccttttcatcgatagtctgcttaacgaggaaaacccatcaaaggcatatcggtgctccagtaaagaagcatttgaaaagggattgtgcctgtcttgcagaaagaaccgatgcaacaatttggggtatgagattaataaagttagagctaaaaggagcagtaaaatgtacgaagactccttctcggacgctttacaaagcctccctctcccatccaaggattccttcttctgggattag

SEQ ID NO: 5320 - RNA, 540 nt, synthetic construct
  misc_feature 1..540: note = source = /note="Description of Artificial Sequence: Synthetic coding sequence"
  source 1..540: mol_type = other RNA
atgggtaggcctggactcggagctgccgtatctgaccttggggaggctgtatcgctcagtcagggcctgttgttgctgctcttgttaagtatgggcggggcttgggccagccgagaacctctgcgcccatggtgtcaccctatcaatgctattctggccgttgaaaaggaggggtgcccagtatgcatcacagtaaatactacaatctgtgccggatattgtccaaccatgatgcgggttttacaagccgtcttaccacccttacctcaggtagtgtgcacataccgggatgttcgatttgagtctattcggctcccgggctgtccacgcggcgtagaccctgtggtatccttccctgttgctctctcatgtcgatgcgggccctgtcgaagaagtacctctgattgcggcggccccaaggatcacccccttacatgtgaccatcctcagcaggcctccagctcttccaaagaccctccacggtcactaccatcacccagccggcttctcgaaccggacaccccaatcttgccccagtag

SEQ ID NO: 5321 - RNA, 2253 nt, synthetic construct
  misc_feature 1..2253: note = source = /note="Description of Artificial Sequence: Synthetic coding sequence"
  source 1..2253: mol_type = other RNA
atgctccgcgcgaagaaccaactgttccttctgtccccccactatctgaggcaggtgaaagaatcatcagggtccagactgattcagcaacggttgctccatcaacaacagccactgcatcccgaatgggcagctctcgctaagaaacaactgaagggaaaaaatccagaggacttgatatggcatacaccagaggggatttccatcaaacccttgtatagcaaacgcgacactatggaccttccagaagaactgccaggagtcaagccctttacccgaggcccttatcccaccatgtacacttttagaccttggacaattcgacaatatgcaggattctcaacagtcgaggaatccaataagttctataaagataacatcaaagctggacagcaagggctttccgtggccttcgacttggcgacccacagaggctatgactccgataaccccagagttagaggtgacgtgggcatggccggtgtagctattgatacggtcgaagacactaaaatactgtttgatggcatccctctggagaaaatgagcgttagcatgactatgaatggcgccgtgatccccgtcctcgcaaatttcattgtgactggcgaggagcagggagtgccaaaggaaaaactgacaggtaccattcagaacgacatcttgaaggaatttatggtgagaaatacatatattttcccccctgagccctcgatgaagattattgctgacatatttgaatacacagccaaacacatgccgaaattcaactctatatctatcagtgggtaccacatgcaggaagccggagccgacgctatccttgaacttgcttatacactggccgacggcctagagtattccagaacaggactgcaagctggccttactattgacgaatttgcacccaggctatcctttttttggggaatcgggatgaacttttacatggaaatcgcaaaaatgcgggcaggaaggcgattatgggcccatcttatagaaaaaatgttccagcccaagaacagtaaaagcctgctactgagagcgcactgccagacatctggttggtcactcactgaacaggatccgtataacaacattgtcaggacggccattgaagccatggccgcagtattcggcgggactcagtctctgcatacaaactcctttgatgaagccctaggcctaccaacagtcaaatctgcaagaatcgcacgaaacacccagatcattatacaggaggaaagtgggatacctaaagtggccgatccatggggaggcagttatatgatggaatgtttaacgaatgacgtgtacgatgccgctctcaagctgattaatgagattgaggagatggggggcatggccaaggcagtggcagaaggaatcccaaaactgaggatcgaagaatgtgcagccagacgccaggcaaggatcgattcaggctctgaggtgattgttggggtaaacaaatatcagctggaaaaggaggatgctgtagaagtactggcaatcgataatactagcgtgcgcaaccggcaaatcgaaaagttaaaaaagattaagtcctcgagggaccaggccttggctgaaagatgtttggctgccctcacggagtgcgccgcttcaggcgatggcaatatactggctttagcggttgatgcaagcagagcaaggtgtaccgtgggggagattactgatgcgctgaagaaagtatttggagaacataaagctaatgatagaatggtaagtggtgcctatagacaggaattcggcgaatcgaaggaaatcacatcagcgatcaaaagagttcacaagttcatggaacgtgaaggccggagacccaggcttctcgtggctaagatggggcaggacgggcacgatagaggggctaaagtcatagcaaccggcttcgctgacctgggttttgatgtagacattgggcccctattccagaccccgcgcgaggtggctcaacaggccgtagacgccgatgtgcacgctgttggtatttccaccctagccgccgggcataaaacattggttccagagctgattaaagagctcaattctctgggtagacccgatatcctggtgatgtgtggcggagtgattcccccccaagattacgaattcctgtttgaggtgggcgtgagtaatgtattcggccctggcacccggatccccaaagctgctgtgcaggttctggacgacatcgaaaaatgtttggaaaagaaacaacagtctgtgtag

SEQ ID NO: 5322 - RNA, 594 nt, synthetic construct
  misc_feature 1..594: note = source = /note="Description of Artificial Sequence: Synthetic coding sequence"
  source 1..594: mol_type = other RNA
accaggtatttagcgcggtgtactgtaggagagatcactgacgcccttaaaaaagtgtttggcgaacataaggctaatgataggatggtttccggagcgtatcgccaggaattcggggagtcaaaggaaatcacttccgccattaaacgggtgcacaagtttatggagagagaaggccggagaccgagacttttggtagctaaaatgggacaggatggacacgaccgcggagcaaaagttatcgccactggctttgccgacctgggcttcgatgtggatattggacctctctttcagactccacgggaagtagctcaacaggccgtggatgccgatgtgcatgccgtaggaatctcgacactcgccgccggacacaagacattggtgccagaactcattaaagaactgaattcactgggtagaccggatatcttggtgatgtgtggtggcgtcataccgccacaagactacgaatttttatttgaggtcggagtatcaaacgtcttcggacctgggaccaggatcccaaaagccgctgtgcaggtcttggacgacatagagaagtgtcttgagaaaaaacagcagtccgtatag

SEQ ID NO: 5323 - RNA, 405 nt, synthetic construct
  misc_feature 1..405: note = source = /note="Description of Artificial Sequence: Synthetic coding sequence"
  source 1..405: mol_type = other RNA
atggaccctcagaccgcaccctctagagccctgctgctgttattatttctccacttggcattcctgggcggcagaagtcatccattaggctcccccggatccgcctctgacctagagacttctggattgcaggagcagaggaatcacctgcagggaaaattaagtgaacttcaagttgaacagacctctcttgagcctctccaggaaagcccgaggccgacaggcgtgtggaagagcagagaagtcgcaacagaaggcataagggggcatcgaaaaatggtactgtacacattacgggcgccccggtctccaaaaatggttcagggatctggatgctttggtagaaagatggacagaatctcctcctcttcaggacttggctgtaaggtactccgtaggcattag

SEQ ID NO: 5324 - RNA, 726 nt, synthetic construct
  misc_feature 1..726: note = source = /note="Description of Artificial Sequence: Synthetic coding sequence"
  source 1..726: mol_type = other RNA
atgtccatgcttttctacacccttattacagcctttttaatcgggatccaagcagaaccacacagtgaatctaacgtaccagctggacacacaataccccaggcgcattggacaaaattgcagcacagtttggacacagccctgcgccgggcccggtctgctcccgctgccgctatcgccgcccgcgtggctggccaaacccgaaacatcactgtggatccaaggttattcaagaaaagacgactccgtagccctcgcgtcctattctcaacccaaccccctagagaggccgctgacactcaggatctggatttcgaggttggcggggcagcaccttttaatagaacgcataggtctaagagatcatcaagccatcctattttccatagaggcgaattttcagtgtgtgatagtgtcagcgtgtgggtaggtgataagacgacagccacagatattaagggaaaggaggttatggttctcggtgaggtcaacattaacaattctgtcttcaaacaatactttttcgaaacaaagtgcagggaccccaacccagtggacagcgggtgccgaggaatcgactctaaacattggaactcctactgcactacaacccacacttttgtcaaagccctcaccatggacggaaagcaggctgcgtggcgcttcatccgcatagatactgcttgtgtgtgcgtattatcaaggaaggcggtgcgaagagcctag

SEQ ID NO: 5325 - RNA, 1065 nt, synthetic construct
  misc_feature 1..1065: note = source = /note="Description of Artificial Sequence: Synthetic coding sequence"
  source 1..1065: mol_type = other RNA
atgttgttcaatctcagaattcttctaaacaatgccgcttttcgcaacggccataattttatggtacgcaacttcaggtgtggtcaacccctccagaataaggtgcaattgaaaggacgcgacctgctaaccctgaaaaatttcacaggcgaagagatcaaatatatgctctggctgagtgcagatctaaaattcagaattaagcaaaaaggcgaatatctgccgctgctgcaagggaagtccctgggtatgatctttgagaagcgcagcaccaggacccgacttagcactgaaactggtttcgcattgctcggcggccacccttgctttctgacaacacaggatatacatctgggtgttaatgagtcactgaccgatacggcacgtgtcctgagctctatggccgatgccgtcctcgcccgggtgtacaaacagtcagatctcgatacactggcgaaagaggcctcaatccccatcataaacggattaagcgacttataccaccccattcagatacttgcggactatttaaccttgcaggagcactatagtagcctaaaaggcctcactctctcatggatcggagacggcaataatatcctacactcaatcatgatgagtgctgcaaaatttggaatgcaccttcaagcagctactcctaaaggatacgagcccgatgcatccgtgaccaaactggctgaacaatatgccaaagagaacggcacgaagctactcctgacaaatgatcccctcgaggcggcacacgggggaaacgtgctaattaccgacacctggatttccatgggacaggaggaggaaaaaaaaaaacgattacaggcgtttcagggataccaagtaacgatgaagacggcaaaggtggccgccagcgattggacatttctgcattgtcttccccgtaagcccgaagaggtagacgacgaggtgttctactctcctcgaagcttggtttttcctgaggctgaaaatagaaaatggactatcatggccgttatggtctctctcctgacagattacagtccccaattgcaaaaacccaaattctag

SEQ ID NO: 5326 - RNA, 348 nt, synthetic construct
  misc_feature 1..348: note = source = /note="Description of Artificial Sequence: Synthetic coding sequence"
  source 1..348: mol_type = other RNA
atgatcccagcgaaggacatggcaaaggtgatgatcgtcatgctagcaatatgtttcttgacaaagagtgacggcaagtcagtgaagaaaagatcggtcagcgagattcagttaatgcacaacctcggcaagcatctgaatagtatggagagggtggaatggttacgaaagaaactccaggacgttcataacttcgtggcccttggtgcaccactcgccccgcgggatgctggttctcagaggccgcggaaaaaggaagataatgtactcgtagagtcgcacgaaaagagcctaggggaggccgataaagcagatgttaacgtccttacgaaagccaaatctcagtag

SEQ ID NO: 5327 - RNA, 348 nt, synthetic construct
  misc_feature 1..348: note = source = /note="Description of Artificial Sequence: Synthetic coding sequence"
  source 1..348: mol_type = other RNA
atgattcccgcgaaggatatggccaaggtaatgatcgtgatgctggcaatttgtttcctcaccaagtctgatgggaagagtgtaaagaaacggtctgtttctgagattcagctgatgcataatctgggcaaacacctgaattctatggaacgcgttgaatggcttcggaagaaactccaagatgtccacaatttcgttgcgttaggcgcacccttagctcctcgagatgctggaagccagaggccacggaagaaagaagataacgtgctggtggagtctcatgagaaatcactgggcgaagctgataaggctgacgtaaatgtactcacaaaagcaaaatctcaatag

SEQ ID NO: 5328 - RNA, 354 nt, synthetic construct
  misc_feature 1..354: note = source = /note="Description of Artificial Sequence: Synthetic coding sequence"
  source 1..354: mol_type = other RNA
atgtctacggcagtgcttgagaatcccggacttggtcggaaactcagtgactttggtcaagagacctcatatatagaagacaactgcaaccagaacggagccattagtctgatcttctctctgaaggaggaagtgggagccctcgcaaaagtcctaagactgttcgaagaaaatgatgtaaacctcacccacatcgaaagtaggccttctagactgaagaaggacgagtacgaattctttacccacctcgacaagcgtagcctgcccgccctaaccaacattattaagatcctgcgtcacgatataggcgccaccgtacacgagctctcccgcgataagaagaaagacacatag

SEQ ID NO: 5329 - RNA, 411 nt, synthetic construct
  misc_feature 1..411: note = source = /note="Description of Artificial Sequence: Synthetic coding sequence"
  source 1..411: mol_type = other RNA
atgagcacagctgtgctcgagaaccccgggttaggcagaaagcttagtgatttcggccaagagaccagctatatcgaagacaattgcaaccagaatggagcgatctctctgatcttttctctaaaggaggaagttggggcactcgctaaagtcttgagattatttgaagaaaacgatgtaaacttgacccacatagagtctagacccagccgcttaaagaaggatgagtacgagttttttacacatcttgacaagagatcccttccagccctcacaaatatcatcaaaatcctgagacacgacatcggcgctactgtccacgaactgagcagggacaagaagaaagatacggtaccctggtttccccgcactattcaagaattggatcgctttgccaatcaaattctgtag

SEQ ID NO: 5330 - RNA, 1359 nt, synthetic construct
  misc_feature 1..1359: note = source = /note="Description of Artificial Sequence: Synthetic coding sequence"
  source 1..1359: mol_type = other RNA
atgtctaccgccgtattagaaaatccaggactcggaagaaaactgtccgattttggtcaagaaacatcttacatagaggacaactgcaaccaaaacggagcaatttcgcttatcttttctctgaaggaagaggtgggtgccctggcgaaggtgcttcgtctgtttgaagaaaatgacgtaaatctcacacatattgagtcccggccctcacgcctcaagaaagacgaatacgaattctttactcatctggacaagcgtagccttcctgccctgacaaatattatcaagatcctgagacacgacattggagcaaccgtgcacgaattatcaagagacaaaaagaaggatacagttccttggtttcctagaacaattcaggagttggatcgatttgcaaaccaaatcctttcttacggcgctgagcttgacgccgaccaccccggattcaaggacccagtgtaccgggctcgcagaaagcagttcgccgatatcgcttacaactaccgacatggtcagcctatccctcgtgtcgaatatatggaggaggaaaaaaagacttggggcactgtttttaaaacattgaaatccctttataagacccacgcgtgctatgagtacaatcacatctttcctctgctcgaaaagtattgcggatttcatgaagataatatcccgcagctagaagacgtgagccagtttctgcaaacatgtacaggatttagactgagacctgtcgccggcctactcagctccagagacttcttgggcggcctggcatttagagtgttccactgtactcagtacatcagacatggcagcaagcccatgtacacaccagaaccagacatatgccacgagctactcggccatgtgcccctattcagtgatcgctcttttgcccagttctcccaagagattggacttgcctctctcggggcccctgacgaatacattgagaagcttgcaacaatttattggttcactgttgaattcggcctctgcaaacagggagattctatcaaagcatacggggccggccttctctctagctttggagaacttcagtattgcttgagtgaaaagccaaaactgctccctctagagttagaaaaaacagcaattcagaactatactgtcactgaatttcaaccactctactatgttgccgaatcttttaacgatgcgaaagaaaaagtgcgcaactttgcagcaaccatccctcgtcccttcagtgtccgatacgacccttatacacagagaatagaagtcttggacaacacacagcagcttaaaatactggcagattccataaatagtgagattggtatcctctgttccgcactacagaaaattaaatag

SEQ ID NO: 5331 - RNA, 882 nt, synthetic construct
  misc_feature 1..882: note = source = /note="Description of Artificial Sequence: Synthetic coding sequence"
  source 1..882: mol_type = other RNA
atggacgccatgaaaagaggcttgtgttgtgtgctgctgctttgtggcgccgtctttgtatcacccagccaggagatccacgccaggtttcgaaggggcgcaagatcataccaagtgatatgtcgtgacgaaaagacgcagatgatttatcagcagcatcaatcttggctgcgccctgttttaagatctaatcgtgttgagtattgctggtgcaatagcggtagagctcagtgtcactccgtccccgtcaaatcctgtagcgaaccaaggtgtttcaacggtggcacctgccaacaggctctgtacttctccgactttgtctgtcagtgccctgagggctttgccggcaagtgctgtgaaatcgacactagagccacttgttacgaagaccagggaatttcttatcgtggcacatggtcaactgccgaatctggcgcagaatgtactaattggaatagttctgctcttgctcaaaaaccctatagcggccgacgtccagacgctatccgactcgggctaggtaatcacaactattgtagaaaccccgacagagatagtaaaccctggtgttatgtgttcaaggcaggcaagtactcatctgagttttgcagtacccccgcttgcagtgagggaaatagtgattgttactttgggaatggttctgcatacaggggtacccatagccttactgaatccggagcctcatgtctaccttggaattccatgatcctgataggaaaagtttataccgctcaaaacccctccgcacaggcactgggcttaggcaaacacaactactgtcggtgtagaacaggtcgaagcgtctcctcgccggcaaccgcttcaatgcgcccctgcctgctctccattagatctggctag

SEQ ID NO: 5332 - RNA, 1551 nt, synthetic construct
  misc_feature 1..1551: note = source = /note="Description of Artificial Sequence: Synthetic coding sequence"
  source 1..1551: mol_type = other RNA
atggacgcgatgaaacgtgggctgtgctgtgttctccttttatgtggcgcagtgtttgtttccccatctcaagagatccacgctcggtttcgcaggggagcccgaagttaccaaggttgcagtgagccccggtgtttcaatggcggaacatgccaacaggctctgtatttcagcgatttcgtatgtcaatgccctgagggattcgcaggaaagtgctgtgagattgatactcgagccacgtgttacgaagatcagggcattagttatagaggaacttggtcaactgctgagagcggcgcagagtgtacaaactggaacagctctgcactggcgcaaaagccctactccgggagacgaccagacgctatccgattaggacttgggaatcataactattgccgcaaccctgaccgcgactctaaaccatggtgctatgtttttaaagcgggtaagtacagcagcgagttctgcagcacacccgcctgctcagaagggaactcggattgctactttgggaatggaagcgcatataggggaacgcacagcctgaccgaatccggggccagctgcttaccctggaactccatgatactgattgggaaagtctataccgcgcagaacccctctgcacaggctctgggcctgggaaaacacaattattgcagaaatccggacggtgacgcgaagccttggtgccatgtacttaagaacagacgcctgacctgggaatactgcgacgttcctagttgttccacatgtggcctgagacagtactctcaaccccagtttcgaatcaaaggaggtttgtttgcagacatagcctctcatccctggcaggccgctatctttgccaagcatcgaaggagccccggagagcgtttcttgtgtggaggtattctcatttcatcctgctggattctgtcagctgcccactgtttccaggaaaggttccccccacatcacctgaccgtcatattagggagaacttacagagttgtgccaggcgaagaggagcaaaaattcgaggtcgaaaagtacattgtccacaaggagttcgatgacgacacatacgataacgacatcgcccttctccagctgaaatcggactcaagccgctgtgcccaagaatcaagtgtagtgcggaccgtctgtcttccgccagctgatctgcaactgccggactggaccgaatgcgaacttagtggctatggaaaacatgaggctctgtctcccttttacagtgagaggcttaaggaagcgcatgtaaggctgtacccctcttcccggtgtacatctcaacaccttttgaatcgtaccgtgactgataacatgttgtgcgctggtgatacccggtcaggaggcccacaggccaacttacacgacgcatgtcaaggagattctgggggacctctggtttgcctcaacgatgggcgaatgaccctggtaggcatcatttcctgggggctgggatgcggacagaaagacgtgcccggtgtatatacgaaagtcacgaattatttagattggattagagacaacatgagaccttag

SEQ ID NO: 5333 - RNA, 1689 nt, synthetic construct
  misc_feature 1..1689: note = source = /note="Description of Artificial Sequence: Synthetic coding sequence"
  source 1..1689: mol_type = other RNA
atggatgctatgaagagaggcctctgctgtgttcttcttctctgcggcgccgtgttcgtgtccccaagccaggagattcatgctcgatttcgtcggggcgcaaggtcatatcaagtaatatgtcgggacgagaagacccagatgatatatcagcagcaccagtcctggctgcgtcccgtattgaggtcaaatcgagtggaatattgttggtgcaactcaggtagggcccagtgccatagcgtgcccgtgaaatcttgctccgaacccagatgctttaatggaggaacttgtcaacaagcattgtattttagtgatttcgtgtgtcagtgtcccgaaggcttcgccggcaaatgctgcgagattgatacaagagcaacttgctacgaagaccagggtattagctatcgaggaacttggtccactgccgagagtggagctgaatgtaccaactggaactcctccgcccttgcccaaaaaccttacagcgggaggaggccagacgcaattagacttggactcggaaatcataactattgtcgcaacccagaccgcgattccaagccgtggtgttatgtttttaaggcaggaaaatatagtagcgaattttgctcaactccggcctgctcagagggaaatagcgattgttactttggcaacggaagcgcatacagaggtactcattcactgaccgagtctggggcctcatgccttccctggaattctatgatccttattggtaaggtgtacacagctcagaatccatccgcgcaggctctgggacttggtaagcataattactgccgaaaccctgatggagatgccaaaccttggtgccatgttttgaaaaatagacggcttacgtgggaatattgtgatgtgccttcctgttcgacctgcggtcttagacaatactctcagcctcagtttagaatcaaaggcggcctgtttgcagatattgcctcccacccttggcaggccgcaatttttgctaagcaccggagaagtcccggcgaaagattcctctgtgggggaatactcatttcctcctgttggatactcagcgctgctcattgtttccaggaaaggttccctccgcaccacttaacagtcattctcggacgaacctacagagtcgttccaggcgaagaagaacagaagttcgaggtggagaaatatatcgtgcataaagaattcgatgatgatacatatgacaacgatattgccctcttacaacttaagtctgactcctctaggtgcgcccaggagagctctgtcgttagaactgtttgcctgcctccggctgacctgcagctgccagattggacagaatgcgaactctcgggttatggtaagcacgaagcgctttcaccattctatagcgagcggttgaaagaggcgcacgtccgtttgtaccccagttcaagatgtaccagccagcatttactcaaccgtactgtgaccgataacatgctctgcgctggagatacaagaagcggaggcccacaagcgaacctccatgacgcttgtcagggtgactcaggcggaccccttgtgtgtctgaacgacggcagaatgaccttagtgggcattattagctggggactgggatgtggccagaaggacgtgcccggcgtttatacaaaggtgacaaactatttggattggatcagagataacatgaggccatag

SEQ ID NO: 5334 - RNA, 1311 nt, synthetic construct
  misc_feature 1..1311: note = source = /note="Description of Artificial Sequence: Synthetic coding sequence"
  source 1..1311: mol_type = other RNA
atggatgctatgaagaggggtttatgttgtgtcctgctgctctgcggcgccgttttcgtgtcgccttcccaggagatccacgctcggtttcggagaggggctcggtcatatcaggttatatgtcgcgatgagaaaactcaaatgatctaccagcaacaccaaagctggctccgcccagtcctaagaagcaatagagtagagtactgctggtgtaattcgggccgggcccaatgccactctgtgccagtgaagagaaattccgattgctatttcgggaatggaagcgcctataggggcactcattcactcactgagtctggcgcctcatgcctgccttggaactcaatgattctgatcggcaaagtgtacaccgcccagaatccaagcgctcaggctctagggctcgggaaacacaattactgtagaaatcccgacggagatgctaagccctggtgccacgtcctgaaaaatagacgcctaacatgggagtactgtgacgtgccatcctgttccacctgtggtctccgacaatactcccagcctcaatttagaatcaaaggtggtctgttcgccgatatcgcaagccacccctggcaagctgcaatatttgctaaacatcgaagatctcccggggaaagatttctgtgtggaggcatactgatcagtagctgttggatcctgagcgccgcccactgtttccaggaacgattcccaccacaccacctgacggtaattttaggcaggacttaccgtgttgtccctggagaggaggagcagaaattcgaggtggaaaaatacattgttcacaaagaattcgatgacgacacatacgataacgatatcgccttacttcaacttaagagtgactccagtagatgcgcccaggaaagctctgttgtaagaactgtgtgcttacctcccgccgatctccaactcccagactggaccgaatgtgaactgtccggatatggcaagcacgaggcactgtctcctttttattctgaaagactgaaagaggctcacgttagactgtaccccagtagtcgctgtacttcccaacatcttctgaacagaacagtcacagacaatatgttgtgcgccggggacacccgatccgggggaccccaggccaatctccacgacgcatgtcagggcgactccggaggccccttagtatgcttgaatgacgggagaatgacgttagtggggatcatttcctggggattggggtgtggacaaaaggacgtaccaggagtgtatacgaaggtcacaaactatttggattggatcagagataatatgcgaccctag

SEQ ID NO: 5335 - RNA, 1500 nt, synthetic construct
  misc_feature 1..1500: note = source = /note="Description of Artificial Sequence: Synthetic coding sequence"
  source 1..1500: mol_type = other RNA
atggacgctatgaaacgcggactgtgctgtgtattactgctatgcggcgctgtcttcgtgagcccttcacaagagatccacgcccgattcagacgcggtgccaggagttaccaggtgatctgcagggatgagaaaacgcaaatgatctatcagcagcaccagtcatggctgagacccgtgcttagatcaaatagagtcgagtattgttggtgcaattcaggccgagcccagtgtcacagcgtaccagttaagagttgctccgagcctcgctgcttcaatggcggaacctgccagcaggccttatacttcagcgattttgtatgtcaatgcccagagggatttgccggcaagtgctgtgagatcgatagtaagccctggtgctatgtgttcaaagccggcaaatattcttccgaattttgctcaacacccgcctgcagcgagggcaatagtgactgttactttggaaacggttcagcgtatagggggacgcatagcctgaccgaatctggagcctcttgtctgccttggaacagcatgatcctcatcggcaaggtctatacagctcagaacccctctgcccaagctctcggcctcggaaaacataattactgtagaaatcccgatggcgacgccaaaccttggtgccatgtgttgaagaacaggagactcacatgggagtactgtgacgtcccgagctgttctacctgtggactaagacaatattctcaaccccaatttcgcataaagggcggactgtttgccgatatcgcttctcatccttggcaggctgcaatcttcgcaaaacacagacgtagcccgggcgagcgctttctctgtgggggtatccttatttcttcttgttggatactttctgcagcacattgctttcaggagcggtttcctccccatcatctgacggtgatcctaggccgaacataccgcgtggtacccggggaagaagagcagaaatttgaagtcgaaaaatacatagtgcacaaagaattcgacgacgacacctacgacaacgatattgcacttttacaactgaagtcagacagctcccgatgtgcgcaagagtcttctgtcgtccggacagtatgcctcccacccgccgacctgcagttacccgattggactgaatgtgagctctcaggctacggcaaacacgaggccctgagccccttctacagcgaaagacttaaggaagcgcacgtgcgcctgtacccatcttcccggtgtaccagtcaacatctactgaataggaccgtgaccgacaacatgttatgcgccggcgacacacgatctggtggcccacaagctaacctccatgatgcatgtcagggcgatagcgggggacccttagtttgtctgaacgatgggagaatgactctagttggtatcatttcttggggactagggtgcggacagaaggatgtgccgggggtttacaccaaagtaacgaactacctcgattggatccgagacaacatgcggccatag

SEQ ID NO: 5336 - RNA, 537 nt, synthetic construct
  misc_feature 1..537: note = source = /note="Description of Artificial Sequence: Synthetic coding sequence"
  source 1..537: mol_type = other RNA
atggatgccatgaagcgaggcctctgttgtgtgcttctgctttgtggggcagtgtttgtctcaccatcacaggaaattcacgctcgtttccggaggggtgcgagatcctaccaggtcatctgtcgggacgaaaaaacccaaatgatataccaacagcatcaatcctggctcagacctgttctgcggtcaaaccgcgtcgagtattgctggtgcaactctggccgcgctcaatgtcactctgtccctgttaaaagctgttcggagccccggtgtttcaatggcggcacctgtcaacaagcactgtatttctccgacttcgtctgccagtgtcccgaaggatttgcagggaaatgttgcgaaatcgacaccagagccacatgctatgaggatcaaggtattagctatcgaggaacatggtctacagccgagagtggcgctgaatgcaccaattggaactcttctgccctcgctcagaaaccgtattccggccgccgccctgatgcaatccgcttaggactgggcaaccataactattag

SEQ ID NO: 5337 - RNA, 474 nt, synthetic construct
  misc_feature 1..474: note = source = /note="Description of Artificial Sequence: Synthetic coding sequence"
  source 1..474: mol_type = other RNA
atggatgcaatgaagagggggctgtgttgtgtattactcctctgtggcgccgtcttcgtttcccccagtcaggagatacacgcacgcttcagacgcggtgcacgtagttaccaagtgatttgcagggacgagaagacacagatgatataccaacaacaccagtcttggctcaggcctgtcctacggtccaatcgggtcgagtattgctggtgcaattcaggtcgcgctcagtgccattcagttccagtgaagagttgtagtgagccaaggtgttttaatggcgggacttgtcagcaggctctatacttttccgattttgtgtgccagtgtccggagggcttcgcaggaaaatgctgcgagattgacaccagagctacatgttacgaggatcaaggcatatcataccgcggtacatggtctaccgccgaatccggtgctgaatgcactaactggaactcatccgccctcgcttag

SEQ ID NO: 5338 - RNA, 1422 nt, synthetic construct
  misc_feature 1..1422: note = source = /note="Description of Artificial Sequence: Synthetic coding sequence"
  source 1..1422: mol_type = other RNA
atggatgccatgaaacgaggactgtgttgtgtgcttttgctttgcggagccgtctttgtaagcccatcacaggagatccatgcaagattcaggcgaggggcgcgttcctatcaggtcatatgcagagatgagaaaactcagatgatctaccagcagcatcaatcatggctacgtccagtcctgaggagcaaccgagttgaatattgttggtgcaattctggccgcgcccagtgccactccgtgccagtaaaatcttgttccgagcctcgctgtttcaatggaggtacatgccaacaggctctgtatttcagtgatttcgtttgtcagtgccccgaaggcttcgccgggaaatgctgcgagattggtaacagcgattgttactttggaaatggaagtgcttaccgaggaacccatagcctgacagaatccggtgcctcttgcttgccctggaacagcatgatacttattgggaaagtgtacaccgcacagaacccttctgcacaagcactgggactgggaaaacataattattgcaggaaccccgatggagacgcaaagccgtggtgccatgtgctgaaaaacaggaggctcacctgggagtactgcgatgtccctagctgttctacctgtggcctgaggcagtattcacaaccccagtttagaatcaaaggagggctttttgccgatatcgcctctcatccttggcaggctgctatcttcgctaaacaccggcgctcgcccggtgaaagatttttgtgcggaggaatcttgatttcgtcatgttggatcttaagcgctgcacactgcttccaagagcggttcccccctcatcatctcacagttattctgggccggacctatcgcgtcgtaccaggagaggaggaacaaaaattcgaagtcgaaaaatatatcgtccacaaagaattcgacgatgatacttatgacaatgacattgcattgctccagctgaagtccgattcctctcgctgtgcccaagagtcatccgtcgttaggactgtttgtttaccccccgctgatctgcagctgcccgattggacagaatgtgaactatcagggtacggaaaacacgaagctctgtcaccattttatagcgagcggctgaaggaagcccacgttagactctatccctcatcgcgctgtacaagtcaacatcttctgaaccggaccgttactgacaatatgctgtgcgctggcgatacaaggagtggcggtccccaggctaatttgcacgatgcttgtcagggtgatagcgggggacccctggtatgcttaaacgacggaaggatgacactagtaggaatcatctcatggggcctgggatgcggacagaaagatgtgccaggagtgtacaccaaggtgaccaattatctggattggattcgagacaatatgaggccatag

SEQ ID NO: 5339 - RNA, 1488 nt, synthetic construct
  misc_feature 1..1488: note = source = /note="Description of Artificial Sequence: Synthetic coding sequence"
  source 1..1488: mol_type = other RNA
atgtggcagcttacatcactgctcctctttgtcgccacctggggcatatccggcacgcctgccccattagatagtgtttttagctcatcagaaagagcacaccaggtacttcggatacgtaaaagagccaattcttttctagaggaactgaggcacagcagtttggaacgtgaatgcattgaagaaatctgtgactttgaggaagcaaaggaaattttccaaaatgtggacgatactctggcgttttggtccaaacacgttgacggagatcaatgcctagtcctgccgctggaacacccctgtgcttctttatgctgcggtcatgggacctgtatagatggaatcgggtcatttagctgcgactgccgatccgggtgggaaggcaggttttgtcagagaggtgaaggtgaaagatggatgctcgcaggaggaggggcaggactgggaccaggatggggaagaggtacatccactagctgtcctcggcctccacttccagctgaagtgtcttttttgaattgctccctggacaatggcgggtgtactcactattgcttggaagaggtagggtggaggcggtgctcctgcgcacccggctacaaacttggggacgacctcctccagtgtcacccagctgtgaaattcccctgtggcagaccctggaaacgcatggagaagaaaagatcacatttgaagagagacaccgaagaccaggaggaccaggtggatcctagactgatagacggtaaaatgacacgtaggggtgatagtccctggcaggtggtgctgctggattcaaagaagaaattagcctgcggcgctgtgctgatccatcccagttgggtcctgactgctgcacactgtatggatgaaagcaagaaattattagttagactgggggaatatgatctgcgtcgctgggaaaaatgggaacttgacctggatataaaggaagtgtttgtccatcccaactattcaaagagtaccacggataacgatattgctctgctacatcttgcacaaccagccacactgtcccaaacaattgtgcctatttgtctccccgatagcggccttgccgaacgcgaacttaaccaggccgggcaggaaacactcgtcactgggtggggttaccattctagccgtgagaaggaagctaaacgcaaccgcacttttgttctcaactttatcaagatacctgtcgtgcctcacaacgaatgctcagaggtgatgtcaaatatggtgtcagagaacatgctgtgtgcagggattttaggagataggcaggacgcctgcgagggcgactcaggcggccccatggtggctagttttcatggtacatggtttcttgtgggcctcgtttcttggggggagggatgtggacttctacataattatggcgtctatacaaaggtgagtagatatcttgattggatccacggacacatcagggacaaggaagctccacagaagagctgggccccgtag

SEQ ID NO: 5340 - RNA, 1386 nt, synthetic construct
  misc_feature 1..1386: note = source = /note="Description of Artificial Sequence: Synthetic coding sequence"
  source 1..1386: mol_type = other RNA
atgtggcagctcacctcactgctgctgtttgtagctacttggggtatctcggggacccccgctccgttagattccgttttttcatcatccgagagagcccaccaagtgctcagaatccggaaacgcgccaatagctttttagaggagttacggcacagtagtctagaaagggaatgcattgaagaaatttgcgattttgaggaagctaaagagatctttcagaatgtagatgataccctggccttttggtccaaacacgtagacggcgatcagtgtctagtgctccccttagagcacccatgcgcaagcctgtgctgtggacatgggacttgtattgacggtatcggctccttttcatgcgattgccgctccggttgggaagggcgattttgccagagagaagtgtcctttctgaattgcagcctggacaacggaggttgcacacattactgtctcgaagaagttggctggaggagatgctcctgtgcacctggttataagctgggagacgacttgctgcagtgccatcctgctgtcaaattcccctgcggtagaccctggaaaagaatggaaaagaagagaagtcacttaaagagggatacagaagatcaggaggaccaagtcgaccctaggctgatagatgggaaaatgacaagaagaggagatagcccgtggcaggttgtacttctagacagcaaaaagaagctcgcctgtggggcagtgctcatacacccttcctgggtcctgacggccgcccactgtatggatgaatccaaaaagcttctggtaagattgggtgagtatgacctacgccgatgggaaaagtgggaattagacctcgacatcaaggaagtttttgtgcaccctaattattcaaagtctactacggacaacgacattgccctcctgcacctagctcaacccgcaactttgtcacagactatagtcccaatttgccttcccgactcaggcctcgcagaaagggaactaaaccaggccgggcaggagaccctggtcactgggtggggataccacagttcacgcgagaaggaggctaaacggaaccgcacttttgtgctgaattttattaaaatacccgtcgttcctcacaacgaatgcagtgaagtgatgtccaacatggtttctgaaaatatgctgtgcgctggaatattgggcgacagacaggacgcatgcgaaggagattccggcggccctatggtggctagttttcacggtacatggttccttgtcggtctcgtatcatggggcgagggctgcggattgttgcacaattatggagtttataccaaagtgagtcgctacttagattggatacacgggcacatacgcgataaagaagcacctcagaagtcttgggccccatag

SEQ ID NO: 5341 - RNA, 351 nt, synthetic construct
  misc_feature 1..351: note = source = /note="Description of Artificial Sequence: Synthetic coding sequence"
  source 1..351: mol_type = other RNA
atgtggcagctgacaagcctactgttatttgtggccacgtggggcatctcgggaacacccgcaccgctcgactcagtgttctcaagcagcgaacgggctcatcaggtactcagaatccgtaaaagggcaaattcctttttagaggagttgcgacactcatcactggaaagagagtgtatagaggagatttgtgattttgaagaagctaaagagatctttcaaaacgtcgatgacactttagcgttctggtctaaacacgtggatggagatcaatgcctagtgttacctctcgaacatccatgcgcctctttgtgctgtggacatgggacttgtattgacggaattggatag

SEQ ID NO: 5342 - RNA, 381 nt, synthetic construct
  misc_feature 1..381: note = source = /note="Description of Artificial Sequence: Synthetic coding sequence"
  source 1..381: mol_type = other RNA
atgtggcaattaacctctttactgttattcgtggcaacttggggtatttcagggacccctgctcccttggacagcgtctttagtagcagcgagcgagctcaccaagtcctaaggatacgcaaacgagctaattcttttctcgaggagcttcgacactcttctctggagcgcgaatgcatagaggagatatgtgactttgaagaagccaaggagatcttccagaacgtggatgacactttggccttttggtctaagcacgtagatggtgatcaatgcctagttctgcctcttgaacatccttgtgcgtccctgtgttgcggccatggcacgtgtatcgatggaattggctcattctcttgtgattgtagatctggatggtag

SEQ ID NO: 5343 - RNA, 1551 nt, synthetic construct
  misc_feature 1..1551: note = source = /note="Description of Artificial Sequence: Synthetic coding sequence"
  source 1..1551: mol_type = other RNA
atggccgctggccgccgtacatgttctatcagtacaaccagaccctgtgcgagcgcatcccgtatgtggcaacttacctctctgctcctctttgtggctacttggggcatttctggaaccccggcacccctggattccgtcttctcctcgtcagaacgagcacaccaggtcctccggatacgcaaacgggcgaactcctttctggaggagctccgccattcctctctcgaacgcgagtgtatcgaagaaatctgtgacttcgaagaagctaaggaaatcttccaaaacgtggatgataccctcgcgttttggtccaagcatgtcgatggtgaccagtgtctcgttctcccgctggaacatccttgcgcgtcactgtgttgtggacatggaacctgtattgacggcatagggagctttagctgcgattgtagatccgggtgggagggcagattttgccagaggggggagggagaaagatggatgcttgctggaggcggggctggtttgggacccggatggggacgcgggacaagcaccagttgcccacgccctccactccccgccgaagtctcatttctgaactgttccctggataacggcggctgtacccactactgcttggaagaagtgggatggagacgttgttcctgtgcaccaggctacaagttgggagatgatctgctgcagtgccaccccgctgtgaagttcccgtgtggacgcccttggaagcgcatggaaaagaaaagatcccatctcaaaagagatacagaagatcaagaagatcaagtcgatccaaggcttattgatggtaagatgacccgtcgtggtgactccccctggcaggtcgttctgcttgattctaagaaaaagctggcttgcggggcagtacttatccacccatcttgggtgctcacagccgcccattgtatggacgaatctaagaagctgctagtccgcctgggagagtatgatttaaggagatgggagaagtgggagttagatctggatatcaaagaggtgttcgtgcatcctaattacagtaaatccacaaccgataatgatattgcccttctgcaccttgcacagccggctactctatctcaaacaattgttccgatttgtctccctgatagtggcctggcggaacgtgaactcaatcaggctgggcaggagaccctagtgacaggttggggctatcactcaagtagggaaaaggaagccaaaagaaatagaacgtttgtgcttaactttattaaaattcctgttgtgcctcataatgaatgctccgaagtgatgtcgaacatggtgtcggaaaatatgctttgcgctgggattctgggcgaccgccaggatgcctgtgaaggcgattcaggggggccgatggttgcatctttccatgggacctggtttttggtgggattggtatcctggggcgaaggttgcggactgcttcataattacggagtttacactaaagtctctagatatctcgattggatacatggacacatcagagataaagaagctccccaaaaatcctgggccccttag

SEQ ID NO: 5344 - RNA, 1263 nt, synthetic construct
  misc_feature 1..1263: note = source = /note="Description of Artificial Sequence: Synthetic coding sequence"
  source 1..1263: mol_type = other RNA
atgtggatgacccactggccatccggcccctcaacttctacagtcaccagcgcctggagttgtccttggtccactagggcaccagcctgtgccgccggaaccgccagggcatccacggcctccgctgcatcggccgctactgcagctgcagctggaagggcggcgtccgcctcagcagtcagaggaaggggggggtgttggagagggggtgcgggcctagggcctggctgggggagaggaacaagcacatcatgcccacgtccacctttgcctgccgaggtttccttcctgaattgttcgctggataacggaggatgcacccattactgtctggaagaagttggttggagaagatgctcatgtgccccgggctataaactaggggatgatctcctgcaatgccacccggcagtcaaattcccctgcggtcgaccttggaaaagaatggagaagaagagaagtcatcttaagagggatacggaggaccaggaggatcaggttgaccccagattaatagatggtaagatgacccggcgcggtgattctccgtggcaagtggtgcttctcgacagcaaaaagaagttggcctgtggcgcagtattaatacatccatcctgggtgctcaccgctgcgcattgtatggacgagagtaaaaaactcctggttagacttggagaatacgacctgagacgctgggaaaagtgggagctcgatctcgacattaaagaagtctttgtgcatcctaactattcaaagtcaaccacagacaatgacatcgccttgctgcacctcgctcagcccgctactttatctcagactattgtccctatatgcctgccagactccggcctcgctgaacgcgaactcaatcaggcaggtcaagagaccctggttaccgggtgggggtatcattcttctcgggaaaaggaagctaagagaaaccgaaccttcgtgctgaacttcatcaaaattccagtcgtcccccataacgagtgcagcgaggttatgagtaatatggtgtccgaaaatatgctttgcgctggaattttaggagacagacaggatgcatgcgagggagatagcggagggccaatggttgcatcattccatgggacttggtttctggtgggattggttagctggggggagggctgcgggttgctgcacaactacggcgtctatactaaggtgagtagatacctggattggattcacgggcatattagggacaaagaagcaccgcaaaagtcatgggcaccgtag

SEQ ID NO: 5345 - RNA, 1047 nt, synthetic construct
  misc_feature 1..1047: note = source = /note="Description of Artificial Sequence: Synthetic coding sequence"
  source 1..1047: mol_type = other RNA
atgaatggcaccgaaggcccgaatttctatgtacccttttccaacgcaaccggcgtggtcagatccccatttgaatatccccaatactaccttgctgaaccttggcagtttagtatgctggcagcttacatgtttttgttgattgtcctgggatttccaataaatttcctaactctatatgtgacagtgcagcataaaaaactgcggacccctctcaattatattcttcttaacttggctgtcgctgacctcttcatggtcctgggaggtttcacttcaacactgtatacaagtttacacggatactttgtctttggccccacaggctgcaacttggaaggattttttgccaccctggggggagaaatcgcactctggtcactcgtggtactggcgatcgaacggtacgtcgtagtgtgtaaaccaatgtccaatttcagatttggcgaaaaccacgcaattatgggagttgccttcacctgggtgatggctcttgcctgtgctgcgccgcctttagccgggtggtccaggtacatccccgaaggcctacaatgcagctgcggaatcgactattacacactgaagcccgaagtaaataacgagtcattcgtcatctatatgttcgtcgtacacttcacaatccccatgatcattattttcttctgttatggtcagctggtctttaccgtcaaagaggccgcagcccagcaacaggagtcagccactacccagaaggccgaaaaagaagtcactaggatggttatcattatggtaatcgcctttctgatctgttgggtaccatatgcttccgttgccttctacatctttacccaccaaggctccaatttcggacctatcttcatgaccatccccgctttctttgcaaaatctgcagcgatctacaaccctgtgatatatattatgatgaataaacaatttcgcaattgcatgctgactacaatttgctgtggaaagaatcctcttggcgacgatgaagcatcagctactgtgagcaagaccgaaacatcccaagtagccccggcctag

SEQ ID NO: 5346 - RNA, 1257 nt, synthetic construct
  misc_feature 1..1257: note = source = /note="Description of Artificial Sequence: Synthetic coding sequence"
  source 1..1257: mol_type = other RNA
atgccaagctcagtcagttggggcatcctgctccttgccggcctttgttgtttggtgcccgtatcacttgcagaggatccccagggtgatgccgctcagaagacagatacttcacaccacgatcaggaccatcccacctttaataagattaccccgaacttggcagaatttgctttcagtctgtaccgtcagctagctcatcaatctaacagtactaatatctttttctcccctgtttctatcgctaccgcctttgctatgctttcattaggcaccaaggcagacacccacgacgagattcttgagggtctgaattttaatctgacagagatacccgaagcacaaatccacgaggggtttcaggagctgctgcgcaccctcaatcagccggactcacaactgcagctgaccacaggaaatggcctattccttagcgaggggttgaagctcgtggacaagttcttggaggacgtgaagaaactctatcactcggaagcattcaccgtgaatttcggggataccgaagaggcgaagaaacaaatcaatgactacgtggagaagggaacccagggaaaaatagttgacttggtgaaagagctggatcgggacacagtgttcgctctcgtgaattacattttctttaaaggcaagtgggaacgtccctttgaggtgaaagatactgaagaagaggatttccatgtggatcaagtgacaactgtaaaagtccccatgatgaagagacttgggatgtttaatatccaacattgtaaaaaactgagctcctgggtgttactcatgaagtacctgggcaacgcgactgccatttttttcctgccagacgagggtaagctgcagcatctggagaacgaactgacacatgatatcattactaagttcctcgaaaatgaagatcgtcggagcgcatccctccatctaccaaaattaagcatcacaggcacatatgatttgaaaagcgtcctgggccagttaggaatcacaaaagttttctctaatggggcagatttgagcggcgtaaccgaagaggcacctctgaaactgagcaaggctgtgcataaggctgtgctcacaattgatgagaagggaacagaagccgcaggcgctatgttccttgaagcaattccgatgtccatcccaccagaagtaaagtttaacaaacctttcgtatttctaatgattgaacagaataccaaatctccactcttcatgggtaaagtcgttaatccaacacaaaagtag

SEQ ID NO: 5347 - RNA, 1257 nt, synthetic construct
  misc_feature 1..1257: note = source = /note="Description of Artificial Sequence: Synthetic coding sequence"
  source 1..1257: mol_type = other RNA
atgccatcatccgtgtcctggggaatattacttctggccggactttgttgtctggtccccgtgtcgctggcggaagacccacagggagacgcagcacagaagaccgacaccagtcaccacgaccaagatcacccgacttttaataaaatcacacccaacctggccgagttcgcgttcagtctgtacagacagctcgctcaccaatccaactccactaacatattcttctcacccgttagcatcgccaccgcttttgctatgttgtccctcggaactaaagctgacacacacgacgaaatactggagggtctaaatttcaatctgacagaaattcccgaggcacaaatccacgagggatttcaggagttactcaggacacttaatcagcccgactcacagttgcaactaacaacaggaaacggtcttttcttgtctgaaggactcaagctcgttgacaagtttctcgaagatgtaaagaaattataccactctgaagcctttacggtcaacttcggggatacggaggaagccaagaagcagattaatgactacgtagagaaggggacccagggaaagattgttgatcttgtgaaggaactcgatcgggatacagtcttcgccctggtcaattatatcttctttaaggggaagtgggaaagaccttttgaagttaaggacacagaggaggaggattttcatgtggaccaggttacaactgtgaaggtgcccatgatgaagaggctagggatgtttaatatacagcactgcaagaaactttccagctgggtcttactcatgaagtatcttggtaacgctacagcaatcttttttttaccagacgagggaaaattgcaacacttagaaaatgagttgacacatgatataataacgaagtttctggagaacgaagaccgacgctctgcctccttgcacttaccaaaactatcaataaccggcacctacgatctcaagtccgtactggggcaactcgggattaccaaagtattttccaacggtgcagatctatctggggttacagaggaggccccacttaaactatcgaaggccgttcataaagccgtgctgacaattgacgagaagggcaccgaagctgctggtgcgatgttcctggaagccatacctatgtcaatccctcctgaggtcaaatttaataagccatttgtgttcctgatgatcgagcagaacaccaaaagccctctttttatgggaaaagttgtcaaccccacccagaaatag

SEQ ID NO: 5348 - RNA, 1257 nt, synthetic construct
  misc_feature 1..1257: note = source = /note="Description of Artificial Sequence: Synthetic coding sequence"
  source 1..1257: mol_type = other RNA
atgccttcaagcgtgtcttggggcattttgcttctggccggtttatgctgcttggtgcccgtctctctcgccgaagatccacagggagacgctgctcagaaaacggatacctcccatcatgatcaagaccaccctacgtttaacaagattactcccaatttagcggaatttgctttctctctatacagacaactggcccaccagtccaatagcacaaacatcttcttctctcccgtttcgatcgctacagccttcgccatgctgagcctgggtacaaaagccgacacacatgatgaaatcctggaaggcttgaacttcaatcttacagagatccccgaggcgcagatccatgagggatttcaagaattgcttcgaaccttaaatcagccggattcccagctccagcttaccacagggaatggtctctttctatcagagggcctcaaactcgtcgataaattcctggaagatgtcaagaaactgtaccattccgaagcattcactgttaatttcggggacacagaagaagctaaaaaacagatcaatgactacgtggaaaagggaactcaagggaaaattgttgacctggtaaaggaacttgatagagacacggtgttcgccctggtgaattatatcttctttaagggaaagtgggagagaccatttgaagtgaaagataccgaagaagaagactttcatgtagatcaggtaactacagtgaaggttcccatgatgaaacgcttaggcatgttcaacatacagcattgtaaaaaactatccagctgggtgctcctgatgaaataccttggtaatgcaactgccatatttttcctacctgacgaaggaaagctccagcatttggaaaatgagctcacacacgacataatcacaaaatttctggagaatgaagatcgccgaagcgctagtctgcacctgccaaagctctctataactgggacgtatgaccttaagagcgtgctcggacagttaggaattactaaagtgtttagcaacggggccgacctgtccggtgtcactgaggaagccccccttaagctcagcaaggctgtccacaaagctgtgctcaccatcgacgagaaaggaacagaggctgctggagccatgtttttagaagcaatacctatgtcaattccccctgaggtgaaatttaataaaccattcgtgttcctcatgatagagcagaataccaagtctccgctgtttatgggcaaagtcgtgaatcctactcagaaatag

SEQ ID NO: 5349 - RNA, 1080 nt, synthetic construct
  misc_feature 1..1080: note = source = /note="Description of Artificial Sequence: Synthetic coding sequence"
  source 1..1080: mol_type = other RNA
atgccaagtagtgtgtcctggggaattctgctgctggccggactttgctgcttggtaccagtgtccctggccgaagatccccaaggagatgcagcacagaaaaccgacacaagtcaccacgaccaagaccatccgaccttcaataagattacaccgaacctcgctgaattcgccttctccctgtaccgacagttagctcaccagtctaactctaccaacatttttttctccccagtctccatcgccaccgcattcgctatgctgtctctgggcaccaaagccgacactcatgacgagatacttgaagggttgaatttcaatctgaccgaaattccagaagcccagatacacgagggattccaggaactgcttagaacattaaatcagcctgattcccaactgcagttgaccacagggaatggattgttcttaagcgaaggcctcaagctggttgataagtttcttgaggacgtgaaaaagctctatcattcggaggcatttacggttaatttcggagatacagaggaagcaaaaaaacagataaacgactacgtcgagaaaggtacacagggcaagattgtggatcttgtaaaggaattggatcgggataccgtgttcgctctcgtgaattacattttttttaagggaaaatgggagagacctttcgaggttaaagataccgaggaggaggatttccatgtagatcaggtaaccaccgttaaagtgccaatgatgaaacgcttgggaatgttcaacatccagcactgtaaaaaactgtcctcctgggtcctgctcatgaagtaccttgggaacgcgaccgctatcttttttttgccagatgagggtaaactgcagcacctggagaatgaactgacccacgacataattactaagtttctggagaatgaggatcgtcgctccgcttctctccacctgcctaagctgagcatcaccggtacctacgatctaaagagcgttttgggccagttgggcataaccaaagtatttagtaacggcgccgatttatcaggcgtgacagaggaagctccactcaagcttagcaaagttcggagtccatag

SEQ ID NO: 5350 - RNA, 1257 nt, synthetic construct
  misc_feature 1..1257: note = source = /note="Description of Artificial Sequence: Synthetic coding sequence"
  source 1..1257: mol_type = other RNA
atgcccagcagcgtgtcctggggcatcttgttgctcgctggcctgtgctgtctggtgccagtctcccttgccgaggacccacaaggcgatgccgcccagaaaaccgatacctctcaccatgaccaagaccatccaacctttaataagatcacgccaaatcttgcagaatttgctttcagcctttaccgccaactcgcccatcagtcaaactccacaaatatttttttctctcctgtgtccatcgctactgccttcgcaatgctcagcctgggaactaaggccgacacacatgatgagattctggaaggattaaattttaacttaaccgagatccctgaagcgcaaattcatgaaggctttcaggagcttctgcgcactcttaatcagccagattctcaactacagctcacaaccggcaatggacttttcttgtctgaaggactgaagctcgtagacaagttcctagaggatgtcaaaaagttataccactccgaagctttcacagttaattttggagacacagaggaggcaaaaaaacagattaatgactatgtcgagaagggaacacagggcaagattgtggatctcgtgaaggagctggaccgagatacagtgtttgccttagtcaattacattttttttaaaggaaagtgggaacgcccctttgaagtcaaagacactgaagaagaggatttccatgtagatcaggtgactacagtaaaggttccaatgatgaagagacttggtatgttcaatatacagcactgcaagaagttgagctcctgggtactattgatgaaatacttgggaaatgcgaccgctattttcttcctcccagacgaaggaaagcttcaacacctggagaacgaactcacacacgatattataacaaagtttcttgagaatgaagaccgacgttctgcatccctgcacctgccaaagctctccatcaccggcacatatgacctgaaatcagtgctgggccagcttggaataacaaaggtcttctcgaatggtgccgaccttagcggcgtaactgaagaagccccacttaagctttccaaggctgtccacaaagctgtgcttacaattgatgaaaaaggcaccgaggcagctggggcaatgttcctggaagccattcctatgtctattcctcccgaagtcaaatttaataaaccttttgtgttcctgatgattgaacagaataccaagtctcccctcttcatgggtaaagtcgtaaacccaacccaaaaatag

SEQ ID NO: 5351 - RNA, 1257 nt, synthetic construct
  misc_feature 1..1257: note = source = /note="Description of Artificial Sequence: Synthetic coding sequence"
  source 1..1257: mol_type = other RNA
atgcctagtagtgtctcctgggggattctcctgttagcgggtctctgctgcttggtgcctgtcagcctcgccgaggatccccagggcgacgccgcacagaaaaccgacacttcacaccatgaccaagaccacccaacttttaataaaataactcctaacctcgctgaattcgcttttagcctttaccgtcaacttgcccaccagtctaactctaccaacatctttttctcaccagtatccatcgcaacagccttcgccatgcttagcttagggactaaagccgatacacacgatgaaatactcgaggggctcaattttaacttaacagaaattcccgaggcacaaatccatgaggggtttcaggaacttctgcgaaccttgaatcagccggattctcaactccaactcaccaccggaaacgggctattcctgtccgaaggcctaaaattagttgacaagttcctcgaggatgttaaaaagttatatcacagtgaggcttttacagtaaattttggggataccgaggaggcaaaaaagcagatcaatgactacgtggagaagggcacacagggcaaaatcgtcgatttggtaaaggaactggatcgagacacagtctttgcactggtcaattatattttcttcaaaggtaaatgggagcggccttttgaagtgaaggataccgaggaggaagatttccatgttgatcaggtcaccacagtgaaggtgcccatgatgaaaagactcggaatgtttaacatccaacattgcaaaaaactgtccagctgggtcttgctgatgaagtatctggggaacgctactgctatctttttcttgcccgatgaaggaaaattacaacacctggagaatgaattaactcatgatattataacaaaatttctcgagaatgaagacagaaggagcgctagtttgcacttacccaaactgtctatcacaggcacctatgatctgaaatccgtgttggggcagctgggcatcacgaaggtcttttctaacggcgctgacctgtccggagtgactgaagaagcccccctcaagttgtctaaggctgttcataaggctgtgttgaccatcgatgagaaagggaccgaggccgcgggcgcaatgttcctcgaagcaatacccatgtctataccccctgaagttaaattcaacaaacccttcgtgtttctgatgatagaacagaatactaagtcacccctctttatgggcaaagttgtaaaccccacacagaaatag

SEQ ID NO: 5352 - RNA, 1257 nt, synthetic construct
  misc_feature 1..1257: note = source = /note="Description of Artificial Sequence: Synthetic coding sequence"
  source 1..1257: mol_type = other RNA
atgccctcctccgtttcatggggcatcttactcttagcggggctctgctgcctcgtccccgtaagcctggccgaagaccctcaaggcgatgctgcccagaaaaccgatacaagccatcacgaccaagatcaccctactttcaacaagattactcctaacctcgcagagtttgccttctcactgtatcggcaactggcacaccaatctaactctacaaacattttcttttcccccgtgtcaatcgctaccgccttcgccatgctctccctaggtactaaggccgacacacatgatgaaatcttggagggattgaacttcaacttaacagaaattcctgaagctcaaatacatgaaggctttcaagaactgctgagaacattgaatcagcctgattcccaactccagctaactaccggaaacggactgtttttaagcgagggtttgaaactggtggacaaattcctggaagatgtaaaaaaactgtaccactccgaagcctttactgtcaatttcggcgatacagaggaggcaaaaaaacaaattaatgattacgtagaaaaaggaacacagggaaaaattgtggatctggtgaaggagctggacagagacaccgtgtttgcactggttaattatatttttttcaagggcaaatgggagcgaccatttgaggttaaagatacagaggaagaggactttcacgttgatcaggtgacgacagttaaggtcccaatgatgaagagactgggaatgttcaatatacagcattgcaagaaactgtctagttgggttctgctcatgaaatacctaggtaacgctactgcaatattcttcctgcctgacgaaggcaagctgcaacacttagagaacgaactgacacacgatattatcacgaagtttttggagaacgaagatcgcaggtcagcaagccttcacctaccaaaactgagcatcacaggaacctacgacctgaaatccgtactaggccaactgggtatcacgaaggtttttagcaatggcgccgatttgagcggcgtgactgaagaggccccgctcaaacttagcaaagcagtccacaaggccgtcctaactattgacgagaagggtaccgaagctgctggggcgatgttcctggaagccattcctatgagcattcctcctgaggtaaagtttaataagccttttgtgtttctgatgattgagcagaacaccaaatcaccgctcttcatgggaaaagtcgtcaacccaacacagaagtag

SEQ ID NO: 5353 - RNA, 1257 nt, synthetic construct
  misc_feature 1..1257: note = source = /note="Description of Artificial Sequence: Synthetic coding sequence"
  source 1..1257: mol_type = other RNA
atgccttcaagcgtatcttggggcatacttttactcgcgggattatgttgcttagttcccgtaagtctcgccgaggacccccaaggagacgccgcccagaagactgataccagccatcacgaccaagaccaccctactttcaataagataactccgaatctggccgagtttgccttcagtctgtatcgccagttggcccaccaatccaattctaccaatatctttttctcccctgtatctatagctaccgccttcgcgatgctctcactcggcaccaaagctgatacccacgatgagatcttggagggattgaactttaacttaactgagatcccagaggcacagatccacgaggggttccaagaactgctgcgtaccctgaaccaacctgactcccagcttcaactaactactggcaatggattatttttgtctgaaggactgaaactggtagataaattcctggaggacgtcaagaaactctatcacagtgaagcttttaccgtgaattttggcgatactgaggaagctaagaaacagattaatgattacgtggaaaaggggacacaaggaaaaatagtcgatctcgtgaaagagcttgatagagatacagtctttgcgttggttaattacatatttttcaagggaaagtgggaaaggccctttgaagtaaaggacacagaagaggaggacttccacgtggaccaggtgacgactgtcaaggtccccatgatgaaaagactgggtatgtttaatattcagcattgcaaaaagctctctagttgggtgctcttgatgaaatatctagggaacgccaccgccatttttttcctcccagatgaaggtaaattgcaacatttagagaatgaactcactcatgacatcatcactaagttcctggaaaacgaggaccgaagatctgccagtctccacctgcctaaattaagcattacagggacttacgacttgaagagcgtcctggggcagctcggaatcactaaggtattttcaaatggcgcagacctgtccggagtcaccgaagaagccccactgaagctgagcaaagcagtgcacaaggccgtgttgaccatcgacgaaaagggtacagaagccgcaggtgctatgtttctggaggccatcccaatgagtatcccgcctgaagttaagttcaacaaaccgttcgtgttcctcatgattgagcaaaataccaaatcccccctcttcatgggaaaggtcgttaatccaacacagaaatag

SEQ ID NO: 5354 - RNA, 1257 nt, synthetic construct
  misc_feature 1..1257: note = source = /note="Description of Artificial Sequence: Synthetic coding sequence"
  source 1..1257: mol_type = other RNA
atgccctcaagtgtcagctggggtatactgctcctcgctggcttatgttgcctggtcccagtcagcctcgccgaggacccacagggggacgctgcccagaaaaccgatacctcccaccacgaccaagaccatccaacatttaataaaattactcccaacctcgccgaattcgcttttagcttatatagacaactggcccatcaatccaattctactaacatctttttcagccccgtgagtatcgcgaccgcgtttgccatgctgagcctcggaaccaaagccgatacgcatgacgaaatcctcgagggcttgaattttaatttgacggagatacccgaggctcagattcatgagggatttcaagaactgctcagaaccctgaatcaacccgacagccaactccagctcaccacagggaacgggctattcttgtccgaagggctcaagctggttgacaaatttttggaggacgtcaaaaaattgtaccacagcgaagcttttacagtcaatttcggggatacagaagaagcgaagaaacagatcaacgattacgtcgaaaaaggcactcaaggaaaaatcgtagatctcgttaaagaactggaccgagacaccgtttttgcgctcgtgaactacatcttttttaaaggcaaatgggaacggcctttcgaggtcaaggacacagaggaggaagactttcacgtagatcaagtgaccacagtgaaagtacctatgatgaaacgccttgggatgtttaacatccagcattgtaaaaagctcagtagttgggtcctgctaatgaaatacctggggaatgctactgctatattcttcctccccgatgaaggaaaactacagcatctcgaaaacgagctgacccatgatataattactaaattcttggagaacgaagatagaagaagcgcctccttacacttacctaagctttccatcactgggacttacgatcttaagtctgtactggggcaacttggaatcacaaaggtgttcagtaatggggctgacctatccggcgtgacagaagaagcacccttaaaactgagtaaggctgtgcataaggccgtactgaccattgacgaaaaaggcactgaagctgctggcgcgatgtttctggaagctatacctatgtccatccctcctgaggtaaagttcaataaacccttcgtctttttgatgatcgaacagaatactaaatctccactctttatgggcaaagtcgtgaaccccactcaaaaatag

SEQ ID NO: 5355 - RNA, 279 nt, synthetic construct; identical to SEQ ID NO: 5025
  misc_feature 1..279: note = source = /note="Description of Artificial Sequence: Synthetic coding sequence"
  source 1..279: mol_type = other RNA

SEQ ID NO: 5356 - RNA, 471 nt, synthetic construct
  misc_feature 1..471: note = source = /note="Description of Artificial Sequence: Synthetic coding sequence"
  source 1..471: mol_type = other RNA
atgccatcttccgtatcttggggcatcctcctcctcgccggattatgctgtctggtccccgtatcattggccgaggacccccagggggatgccgcccaaaaaaccgacacctcccatcacgaccaagaccatcccacttttaacaaaatcactccaaacctggcagaattcgcattttccctgtatagacaactggcccatcagagcaattcaaccaatatatttttttctccagtgtcaatcgctactgcattcgccatgctgtctctgggtactaaagccgacactcatgacgagatcttagaaggactgaatttcaacctgaccgagatcccagaggcacagatccatgaaggatttcaagagctccttaggaccctgaatcagcctgactcccagctgcaactcaccacgggaaatggcctcttcctgtcagagggcttaaaattggtggacaagttcctcgagtag

SEQ ID NO: 5357 - RNA, 354 nt, synthetic construct
  misc_feature 1..354: note = source = /note="Description of Artificial Sequence: Synthetic coding sequence"
  source 1..354: mol_type = other RNA
atgccatcttccgtctcctggggcatccttctccttgctggcctatgctgcctggtccccgtgtcattagctgaagacccacaaggtgacgctgcgcagaagacagatacatcccaccacgaccaggatcatcccactttcaacaaaattactcccaacctcgccgagttcgccttctccctataccgacagttagctcaccagagtaactctacgaacattttcttttcccccgtcagcatcgcaacagcctttgccatgctctctctgggcacaaaagctgatacccacgatgagattctggaaggattaaactttaacctaaccgagatccctgaagcacaaatacattag

SEQ ID NO: 5358 - RNA, 69 nt, synthetic construct; identical to SEQ ID NO: 5028
  misc_feature 1..69: note = source = /note="Description of Artificial Sequence: Synthetic coding sequence"
  source 1..69: mol_type = other RNA

SEQ ID NO: 5359 - RNA, 435 nt, synthetic construct
  misc_feature 1..435: note = source = /note="Description of Artificial Sequence: Synthetic coding sequence"
  source 1..435: mol_type = other RNA
atgccatccagcgtctcttggggtattctgctgcttgccggcctgtgctgcttggtgccagtcagtctcgcagaggatccacagggggatgcagctcagaaaaccgataccagtcaccacgaccaagaccatcctaccttcaacaaaatcactcccaaccttgccgaattcgccttttctctctataggcagctagctcatcagtccaattcaacaaatatcttctttagcccagtgtctatagctaccgcttttgctatgttaagtcttggcaccaaagccgatacacacgatgaaatactagaaggcctaaacttcaatttaaccgaaatccctgaggctcagatacatgaagggtttcaagagcttctccgcaccctcaaccagcctgacagtcaactccagctaacaacaggtaacggtctatttctctag

SEQ ID NO: 5360 - RNA, 780 nt, synthetic construct
  misc_feature 1..780: note = source = /note="Description of Artificial Sequence: Synthetic coding sequence"
  source 1..780: mol_type = other RNA
atgtactctaatgttataggcaccgtgacttctgggaagaggaaggtgtatctcttgtccttgctgctcatcggattctgggactgcgtaacttgtcacggatctccagtggacatttgcacagctaaaccaagagatatccccatgaaccctatgtgtatttacagatccccagaaaaaaaagccacagaagacgagggaagcgagcagaagatccccgaggcaactaatagacgcgtgtgggaactctccaaggctaactctagattcgccaccactttctaccagcatttagcagacagtaaaaatgacaacgataacatcttcctatcccctctgagcatctcaacagcattcgctatgaccaaactcggagcttgtaatgatacccttcaacagctaatggaggtttttaaattcgataccattagtgagaaaacttccgatcagatacacttcttcttcgctaagttgaactgcagactgtaccgtaaagcgaataagtcttctaaattagtttctgctaaccgactgtttggtgacaaatctttaacgtttaacgacctgtatgtgagtgacgccttccataaagccttcctggaagtgaatgaagaggggagcgaagcagcggcaagtacagctgtcgttattgccgggagatccctcaacccgaacagagtgaccttcaaagccaaccgcccttttctagtttttatcagggaagtaccattgaacaccattatcttcatggggagagtggctaatccgtgcgttaagtag

SEQ ID NO: 5361 - RNA, 1395 nt, synthetic construct
  misc_feature 1..1395: note = source = /note="Description of Artificial Sequence: Synthetic coding sequence"
  source 1..1395: mol_type = other RNA
atgtattccaacgttatcggcactgtgacatcagggaagcgaaaggtctacctgctttcccttcttttgattgggttttgggattgtgtgacgtgtcacgggtccccagtggacatctgcacagccaaacctagagatattccaatgaacccgatgtgcatttaccgaagtcctgaaaagaaggccaccgaagacgaaggttcagaacaaaagatacccgaagccacaaatagaagagtctgggagttatcaaaagctaatagcagattcgcaaccactttttaccagcatcttgcagacagcaagaacgataatgacaacatcttccttagcccactgtccatttctactgctttcgctatgacaaagcttggagcctgcaacgacaccctgcagcaactcatggaagtatttaagttcgacacgatcagtgagaaaaccagcgaccaaattcattttttctttgctaaactcaactgcagactgtatcgaaaagccaacaaatcctcgaagttagtgagcgccaaccgactctttggggataaatccctgaccttcaacgaaacatatcaagacatcagtgagctggtatacggagcgaagcttcaaccgctggacttcaaggaaaatgcagagcaatcaagagctgccataaataagtgggtatcgaataaaacagaaggaagaatcacagacgtaatccccagcgaggcaatcaatgaattgactgtacttgttctcgttaacacaatatacttcaagggcttatggaagagtaagttctcaccagaaaatacgcgaaaagagctgttttacaaggctgatggcgagtcctgttcagcttccatgatgtatcaggagggcaagtttcggtatagacgagttgcagaggggacacaggtcctcgaattgcccttcaagggcgacgacattactatggtcctcatactgccaaagcccgagaaatctctcgccaaagtggagaaagaacttacccctgaagtgttacaagaatggctcgacgagctggaggaaatgatgttggtggtgcacatgcctcgtttcagaattgaagacggttttagcttaaaagagcaactccaggacatgggcctggttgatttgtttagtccagaaaagtctaagttacctggcattgtcgctgaaggaagagacgatctttatgtctccgatgctttccacaaggcctttctcgaggttaatgaagaaggttctgaagccgctgcctctaccgcagtggtgatagctggccgaagcctgaatcctaaccgcgtcacattcaaagccaacaggccctttcttgtcttcatcagagaagtcccactgaataccatcattttcatgggtagagtcgccaatccttgcgtcaagtag

SEQ ID NO: 5362 - RNA, 1503 nt, synthetic construct
  misc_feature 1..1503: note = source = /note="Description of Artificial Sequence: Synthetic coding sequence"
  source 1..1503: mol_type = other RNA
atggcatccagactcacactactcacccttctcctgctgctgctcgctggagatagagcatcatccaatcctaacgctacatctagtagctcccaagacccagagtccctgcaagatcgaggcgaagggaaggtcgccaccactgtgatctccaagatgttattcgtggaaccaattctagaagtgtcctccctcccgacaaccaactcgaccacaaactcggccaccaagatcacagcgaacacaaccgatgagcccactacccagccaactaccgaaccaaccactcagcccacaatacagcccacacagccaactactcaactgcctacagactctcccacccagcccactacaggctcattttgtccaggccctgtcaccctgtgttctgacttggagtctcattccactgaagccgtccttggggatgcacttgtcgactttagcttgaaactttaccacgccttttcagccatgaaaaaagttgagaccaacatggccttttcacctttctctattgcatccttgctgacccaggtcttactaggtgccggcgagaacactaagaccaatttagaatcaattttgagctaccctaaggattttacatgcgtgcaccaggcacttaaaggattcacaaccaaaggagtcacctctgtttcacagatatttcactctcctgacttagccattcgagacaccttcgtcaacgcctcccgtactctgtatagtagttcacctagagttctgtcaaataattcagacgccaacctagagctcatcaacacatgggtcgctaaaaacactaacaacaagatctctaggctccttgacagtctgccaagtgatacaaggctcgtgttgttgaacgccatatacctcagcgccaagtggaagacaaccttcgatcctaaaaaaacgcgaatggaaccattccatttcaagaacagtgtgatcaaagtaccaatgatgaatagtaagaagtaccctgttgcccatttcatcgatcaaaccctcaaagcaaaagtcggccagctacagcttagccataacctcagcttggtgattcttgtaccacaaaaccttaaacacaggctggaggacatggaacaggctctgtccccaagcgtcttcaaagctatcatggaaaaactcgagatgtctaaatttcaacctacattacttactctaccgagaatcaaggtgactacttcacaggacatgctgagtattatggagaaacttgaattcttcgacttttcttacgatctcaatctctgcggactgaccgaagacccagatttgcaagtgtctgccatgcagcaccagactgtcctcgagttaaccgaaactggagtagaggcagcagcggccagtgccatctcggttgcacggactctgctcgtatttgaagtgcaacaaccatttctatttgtcctatgggatcagcagcataagttcccagtgtttatgggaagagtgtacgaccctagagcctag

SEQ ID NO: 5363 - RNA, 1518 nt, synthetic construct
  misc_feature 1..1518: note = source = /note="Description of Artificial Sequence: Synthetic coding sequence"
  source 1..1518: mol_type = other RNA
atggccagcagactgacactcctcactctactgctcctgttacttgccggatttctggaaccccaagaccgcgcatcctcaaaccccaatgccacatcatccagctcccaggaccccgagagcttgcaggacaggggcgaaggcaaagtggcaacaacagtaatctccaaaatgttatttgtcgaacctattctcgaggtgagtagcctccccaccactaacagcacaacgaacagcgcaactaagatcacagcaaacacaaccgatgaacctaccacccagcccaccacagaaccgacaacccagcccactatccagccaacacaaccgactacacaactgcccactgatagtcctacacagcctaccacagggagcttttgtccaggtccagtaactctatgttctgatttagaaagccactctacagaagccgtgctgggggatgccttagttgacttctcactcaaattgtatcacgcctttagtgccatgaaaaaggtcgagactaatatggctttttcaccgttttccatcgcttccctgttaacccaggtgttactcggcgccggcgagaacacaaaaacaaatttggagagcatcctcagctatcccaaagatttcacttgtgtccatcaggccctcaaaggttttactaccaaaggagtgacttctgtttcccagatcttccatagccccgacctggccataagggatacattcgtcaacgccagccgcacactctactcttccagccccagagtcctctcaaataattcagacgccaacctggagctgatcaatacctgggtagctaaaaacactaataataagatctctcgtttattggactccctcccttctgatacaagactggtcctgctcaacgccatttacttatcagcaaagtggaaaacaacatttgatccaaagaaaaccagaatggagccattccacttcaaaaactccgttatcaaagtccctatgatgaattcaaaaaaataccccgtagcgcactttatagaccagaccttaaaggctaaggtggggcaactgcaactatcacacaatctcagcttagtaatactggtgccacagaatctgaaacaccgcctggaagacatggagcaggccctcagccctagcgttttcaaggcgatcatggaaaaactcgaaatgtcaaagtttcagcctactctcttaacgttgccaaggattaaagtgaccacaagccaggacatgctctctattatggaaaagcttgaatttttcgattttagctacgacttaaacctctgcggtctcaccgaagatcccgacctacaagtgtccgcaatgcaacatcaaaccgtgttggagttgaccgaaactggcgtggaggcagcagcagcatccgcaatcagcgtggctcgaactctgcttgtgtttgaggtacagcaacccttcctgttcgttctgtgggaccagcagcacaagtttccagtcttcatgggcagagtttatgatccaagagcctag

SEQ ID NO: 5364 - RNA, 1347 nt, synthetic construct
  misc_feature 1..1347: note = source = /note="Description of Artificial Sequence: Synthetic coding sequence"
  source 1..1347: mol_type = other RNA
atgttattcgtagaacctattcttgaggtgagctcattaccaaccactaattccacaaccaactctgctaccaaaattaccgccaatactaccgacgaaccaaccacccaacccaccaccgaaccaactacacaacctacaattcagcccactcaaccaaccacgcaactccctaccgattctcccacccagccgacaacaggtagtttctgtcctggaccagtgaccctttgttccgacctcgaatcccattctactgaagcagttcttggagacgccctcgtggacttttcactcaaactgtaccatgcttttagcgcaatgaaaaaggtcgaaaccaacatggcctttagtccattttccatagcttccttactgacccaggtcctgctgggggcaggcgaaaacacaaagaccaatctcgaaagcattttgtcatacccaaaagattttacttgtgtccaccaagccttgaaaggcttcaccacgaaaggtgtcacttcagtcagccagattttccatagtccagatcttgccatcagagacacctttgtcaatgcctctaggaccctctactcctccagtcctcgcgtgctctcaaataattctgatgctaacctggaacttattaatacctgggtggcaaaaaacactaataataagatctctcgtctcctcgattctttaccaagtgatacaaggctggtgcttctcaacgccatatatctctctgctaaatggaagaccacattcgacccgaaaaagaccaggatggaaccttttcacttcaagaactctgtcattaaagtgccgatgatgaacagtaaaaaatatccagtagctcacttcatcgaccaaaccctgaaagccaaagtagggcagctgcaactctctcataatctgagcctggtcatattagtcccacaaaacttgaagcatcgtctcgaagatatggagcaggccctttcccctagcgtgttcaaagctataatggaaaaactcgaaatgtcgaaattccagccaaccctccttacgctacccagaataaaagtgactacctcccaggacatgctgtctatcatggaaaaactggaattctttgacttttcttatgaccttaacctttgcgggttaaccgaagatcccgacctccaggtatcggcgatgcaacaccaaacagtgctagaactgactgagacaggtgtggaagccgcagccgcatcggccatctccgtagctagaactttattggtgtttgaggtccagcagccttttctgtttgtcctctgggatcagcagcacaaattcccagttttcatgggccgagtgtacgaccctcgcgcatag

SEQ ID NO: 5365 - RNA, 483 nt, synthetic construct
  misc_feature 1..483: note = source = /note="Description of Artificial Sequence: Synthetic coding sequence"
  source 1..483: mol_type = other RNA
atggcatcccgcctcaccctgctcacccttctactcctccttctggctggcgaccgggctagtagtaaccccaatgcaacctctagcagttctcaggatccagagtccctccaagacagaggtgaggggaaagttgcaaccactgtgatctctaaaatgttatttgtggagcctattctggaagtaagcagcctacccacaacaaattcaactaccaattccgccacgaagataacagctaacacgacagacgagccaacaactcaacctacgaccgagcccactactcaacccaccattcaacccactcagccaacgacccagctgcccactgattctcccacccagccaactactggttctttttgtcccggtccagttactttgtgctcagatttggaaagccattctactgaagcagtgctcggggacgccctcgttgatttttctctcaaattgtaccacgccttctccgcaatgtag

SEQ ID NO: 5366 - RNA, 402 nt, synthetic construct
  misc_feature 1..402: note = source = /note="Description of Artificial Sequence: Synthetic coding sequence"
  source 1..402: mol_type = other RNA
atggcctcccgtttaacccttctcaccttactgttactccttttggcgggcgaccgggcctcaagcaatcccaacgccactagtagtagttcacaagatccggagtcattacaagatcggggggagggtaaagttgccacgacggtcatatccaaaatgctgtttgtggagccaatccttgaagtcagctcacttcctacaacaaattctacgaccaattccgcgacaaagataactgccaacacaactgatgagcctacaacacagccaaccaccgagcccacgacacagcctacaattcagcccacccaacccacaactcaactacccactgactccccaacccagcccggttatgccctcaatcacggagagatcggcattctgcgcttcttcctctag

SEQ ID NO: 5367 - RNA, 1335 nt, synthetic construct
  misc_feature 1..1335: note = source = /note="Description of Artificial Sequence: Synthetic coding sequence"
  source 1..1335: mol_type = other RNA
atgtgcctctgttctggaaggaaaacaattttggaaatctaccccggtcaatttcaaccctctttgtgtcataagttcattgccctcagcgacaaggagggaaaactcttgcgcaactatacccaaaacatagacacactagagcaagtggccggcatacaaagaatcattcagtgccacggaagcttcgctactgcctcctgcctcatatgtaaatataaagtggattgcgaagcagtaaggggggatatcttcaatcaagtagttccacgatgccccagatgcccagctgacgagcctcttgccattatgaagcccgagatcgtgtttttcggcgaaaacttaccggagcaattccaccgggctatgaagtacgataaggatgaggtggatctgctaatagttatcggctcatctctcaaggtccggcccgtggctcttatcccatctagtataccccacgaagtccctcaaattctgatcaatcgcgaaccactgcctcacctgcacttcgatgtagaactgttgggagactgcgatgttattattaatgaactctgccaccgcttaggaggagagtacgcgaaattgtgttgcaacccagttaagctgtcagagataacagaaaaacccccccgaacacagaaagaactggcatacctctccgagctgcccccaacccccttgcacgtgagtgaagattctagtagtcctgagcggacctcaccccctgattctagtgtgatagtcactcttctggatcaagctgcaaagtcaaacgatgatctggatgtcagcgaatccaaaggttgcatggaagagaagccccaagaggtgcaaacaagcagaaacgtggaatcaatagccgaacagatggaaaatcctgacttgaaaaacgtcggaagttccaccggcgagaaaaacgagagaacatccgttgccggtactgtgcgcaaatgttggccaaatcgtgttgccaaagaacaaattagccgccgtttagacggaaaccaatacttgttcctgcctcctaacagatatattttccacggggcggaggtctattccgatagcgaagatgacgttcttagtagttcatcctgtgggagcaacagcgattctggcacctgtcagtccccttcactcgaagagcctatggaagatgagtctgaaatcgaggaattctataacggcctcgaggatgagccagatgtcccagagagagccggtggtgctggtttcggcacggacggggatgaccaggaagcgattaatgaagcaatctcagttaagcaggaagtcaccgatatgaattatcctagtaacaaaagctag

SEQ ID NO: 5368 - RNA, 1335 nt, synthetic construct
  misc_feature 1..1335: note = source = /note="Description of Artificial Sequence: Synthetic coding sequence"
  source 1..1335: mol_type = other RNA
atgtgcctgtgttctggacgcaaaacaatccttgagatctatcccggtcagttccaacccagcttgtgtcacaaattcattgcccttagtgataaagaggggaagcttctgcggaattatacccagaatatcgatacactagagcaggttgccggtattcagcggattatacagtgccacggctcatttgccaccgcatcttgcctcatctgcaagtataaagttgattgcgaagccgtgagaggagacatattcaaccaagtcgtgcctaggtgtccccgatgccctgcggacgaacctttagccattatgaagccagaaattgtgttctttggtgagaatctgcctgaacaattccatagagcgatgaaatatgacaaggacgaggtagaccttctcattgtaataggatcctcattgaaggtgagaccagttgcacttattccttcatcaattccacacgaagttccacagatcctgataaacagagaacccctgccccatttgcactttgatgtggaactcctaggggactgtgacgttattattaatgagctttgtcaccgtctggggggggagtacgctaagctctgctgcaaccctgttaaactgtctgagattacagaaaaaccgccacgaacacagaaagagctcgcatatctcagcgaactccccccaacaccgctgcatgtttcagaggacagctctagcccggaaagaactagcccaccagattcaagcgtgattgtgaccctgctggatcaggctgctaaaagtaatgacgacctcgacgtgtcagaatcgaaaggatgtatggaagaaaagcctcaggaagtgcagacatcgcgcaacgttgaatcaatcgccgagcagatggagaaccctgacctcaagaatgtaggctcatccactggtgagaaaaacgaaagaacctctgtagctggaacagtgagaaaatgttggcccaatagagtcgcaaaggaacagatctcacgacgtctggatggaaaccagtatctgtttctccctcccaaccggtatatttttcatggagccgaggtgtactcagatagtgaggatgatgtgctgagttcttccagctgcggcagcaactctgattccggaacttgtcagagcccttctctggaagaacccatggaagatgagagtgagattgaggagttctataacggcctggaggatgaacccgacgttcccgaacgggcaggcggcgccggattcggaaccgatggcgatgaccaggaagcaataaatgaagcaatatccgtaaaacaagaagtgaccgacatgaactacccctcaaataaatcgtag

SEQ ID NO: 5369 - RNA, 1359 nt, synthetic construct
  misc_feature 1..1359: note = source = /note="Description of Artificial Sequence: Synthetic coding sequence"
  source 1..1359: mol_type = other RNA
atgtttgatatcgagtatttcagaaaggatcctagacccttcttcaaatttgccaaagagatctacccgggacagtttcagccttcattatgccataaattcatcgcactaagcgacaaggaagggaagctcttaagaaattatacacaaaatatagacactctcgagcaggttgccggcattcagcgtattatacaatgccacggttcctttgccaccgcttcttgtcttatctgtaagtacaaagttgactgtgaagccgtgaggggggacattttcaatcaggtagttccccggtgtccccggtgccctgcagacgaaccacttgcaatcatgaaacccgaaatagtgttctttggcgaaaatctgccagaacagtttcaccgcgccatgaagtatgataaggacgaggttgacctgctgattgttattgggagttccttgaaagttcgacctgtggccctcatcccctcttctatccctcacgaagttccgcagatactgatcaatcgcgagcctctgccacacctgcactttgatgtcgaattgttgggtgattgtgatgtgatcattaatgaactctgccatcgtctcggtggagaatacgccaagctctgctgtaatccagttaagctctctgagattactgaaaaacccccccgaactcagaaggagctagcctatctgtcagaactcccccctacaccacttcatgtctccgaggactcttcatctcctgaacgaacgtctccacccgattcttcagttatcgtgactcttctggaccaagccgctaaatccaacgacgatctggatgtttctgaatccaaaggctgtatggaagaaaaaccacaagaagtgcagaccagccgtaatgttgagtccatagctgagcaaatggagaaccctgacctgaaaaacgtgggaagtagtaccggagagaaaaacgagagaactagcgtggcaggaacagtccggaaatgttggccgaatcgagtagccaaagaacagattagtaggaggctggacggcaaccagtaccttttcctccctcccaataggtatatctttcacggcgccgaggtctattcagactccgaggacgatgtgctcagctcaagctcttgtggaagcaacagcgacagcgggacatgtcagagcccctcactggaagagccaatggaggacgagagtgaaatcgaggagttctacaacggcctggaagatgagcccgacgttccagaaagggcaggcggcgcaggtttcggaacagacggagatgatcaagaggctatcaacgaagcaatttcggtcaagcaagaggttacggacatgaattacccatcaaataagagttag

SEQ ID NO: 5370 - RNA, 987 nt, synthetic construct
  misc_feature 1..987: note = source = /note="Description of Artificial Sequence: Synthetic coding sequence"
  source 1..987: mol_type = other RNA
atgtccgtgaactatgccgcgggtctgagtccatacgcagataaggggaaatgcggattgccggaaatatttgatccaccagaggagttggaacggaaagtgtgggaactggcaagactagtctggcagtcatcaagtgtagtgttccacactggagcgggtatctcaacagctagcggcatcccagactttcgaggaccacacggggtttggacaatggaggaaagaggtctggccccaaagttcgacaccacgttcgaaagcgctagacccacacaaacgcatatggctctggtgcagctagagagagtgggattgctgcggtttttggtaagtcagaacgttgatggactccacgtgagatccggatttcctcgagacaaattagccgaattacacggcaacatgttcgttgaagaatgcgcgaagtgcaaaacccagtatgttcgggatactgtagtggggacaatgggcttgaaagctaccggccgcctctgcaccgtggcaaaagcaaggggcttgcgagcttgccggaacgcagacctttcaattacgctcgggaccagtctccagattagaccctccggtaacctaccacttgccacgaagagacgcggcggtcgactggtaatcgttaacctgcagccaacgaagcatgataggcatgccgacctgaggattcatggatatgtcgatgaagtgatgacaagactgatgaaacatctgggtctggagattccagcctgggatggccctagggtgttggagcgcgctttgccgcctctgccaagacctcccacccctaaacttgagcccaaagaggaatcacccaccagaatcaacggaagtatcccagcaggcccgaagcaagagccatgcgcacagcacaacggaagcgagcctgccagcccaaagagagaaagaccgacatcccccgctccccaccgaccccccaaacgcgtcaaagccaaggccgtgcccagttag

SEQ ID NO: 5371 - RNA, 1068 nt, synthetic construct
  misc_feature 1..1068: note = source = /note="Description of Artificial Sequence: Synthetic coding sequence"
  source 1..1068: mol_type = other RNA
atgtccgtgaattatgccgctggcctttcaccttatgctgacaagggcaagtgtggactgcccgagatcttcgacccaccggaagaactggagagaaaggtttgggaattggcccggctggtctggcagtcctcctccgtggtgtttcatactggtgcaggaatttcaactgcctctggaattcccgactttagaggaccccatggtgtttggaccatggaagagcgaggtttagctcctaagtttgatacaacctttgagagcgcaagacccactcagacgcatatggcactcgtccagttggaacgggtggggctcttgcgatttctggtgagccaaaatgtggatgggttgcatgtcagatcaggcttccctagggacaaactggcagagctgcatggcaatatgttcgttgaggagtgtgcaaaatgcaaaacccaatatgtcagagacactgttgtgggaactatgggactcaaggcaacgggaagactatgtacagttgccaaggctcgtggtctccgtgcctgcaggggtgagctcagagatacaattttggattgggaggatagccttccagatagagatctggctttagctgatgaagcaagccgaaacgccgatctgtctattacattgggcacgagcctgcagatccgtccgagtggtaacctcccactagcgaccaaacggcgcggaggccgccttgtaattgtgaatcttcagcccacaaagcatgatcgacacgccgacctcaggatccatggttatgtggatgaggtgatgacacgtctgatgaaacacttgggattagagatcccagcttgggacggacccagagttcttgaaagggccctgcccccactgcctagaccccctacacctaaattggagcctaaagaggagtctcccacaaggattaatggcagcatccccgcaggcccaaagcaagaaccatgcgctcaacataatggaagtgagccagcctcacccaagcgagagagacccacgagcccagccccacatcggccccctaagcgtgttaaggcaaaggcggtcccgtcctag

SEQ ID NO: 5372 - RNA, 852 nt, synthetic construct
  misc_feature 1..852: note = source = /note="Description of Artificial Sequence: Synthetic coding sequence"
  source 1..852: mol_type = other RNA
atggaagagagagggctcgcccctaaatttgatacaacatttgagagcgcaagaccgacccagacacacatggcgctggttcaactggaacgggtgggtttattgaggtttctggtgtctcagaacgtcgatgggctccacgtgagatctggcttccccagagacaaattggctgaactccacggaaatatgttcgtcgaggaatgcgccaaatgcaaaacacagtacgtacgggacacagtggtcggcactatggggctgaaggctaccgggcgcctctgtacagtcgccaaggcaaggggcctcagagcttgtaggggggaactgagggataccatccttgactgggaagactcactccccgatcgcgaccttgcccttgccgatgaggcgtctcggaacgccgacctctcgatcaccttgggtacctccctccagattcgtccgagcggcaatttacccttagccactaagaggagaggaggccgactggtgattgtaaatcttcagccaactaagcacgacaggcatgccgatttaagaatacacggatatgtcgatgaagtgatgacgcgcctgatgaaacacttgggacttgagatccccgcttgggatggacctagggttttagaaagagcgctacccccactccctagaccccccactcctaaattggagcctaaggaggagtcaccaacgaggattaacggaagtattccagcaggccccaagcaggagccctgtgcacagcataatggttcagagcccgcgtcccccaaacgagagaggcctacatcccccgccccacatcgcccgccaaagagagtcaaagccaaggccgtgcccagctag

SEQ ID NO: 5373 - RNA, 2496 nt, synthetic construct
  misc_feature 1..2496: note = source = /note="Description of Artificial Sequence: Synthetic coding sequence"
  source 1..2496: mol_type = other RNA
atggagagaccttggggcgctgctgacggtcttagtcgttggcctcatggattgggactcctcttgctgctccagctactgcctccctctacacttagccaggatcgtctggacgccccccccccacccgccgctccccttcctcgttggtctgggcctatcggtgtgtcctggggactgagagccgctgcagctgggggtgcttttcctcgcggcggtcggtggagaaggtccgcacccggggaagacgaggaatgcggtcgagtgagggacttcgtcgcaaaactggcaaataacactcaccagcatgttttcgatgatctgaggggaagtgtttctctctcatgggtgggcgactcaacaggcgtgattctggttctgaccacttttcatgtccctctggtgatcatgacattcggacaaagtaaactttaccgctcagaagattatggaaaaaactttaaagacatcacagatttgatcaataacaccttcattcgcacagaattcggaatggccatcggcccggagaactctggtaaggtggtactcacagctgaagtgagcgggggcagccgggggggaagaatattccgtagctccgattttgcgaagaatttcgtacaaaccgacctccccttccacccccttacgcaaatgatgtactcccctcagaatagtgactacctgctggccttgagcactgagaatggattatgggtgagtaagaacttcgggggcaagtgggaggaaatacacaaagcagtttgcctagcaaaatggggatctgacaacacaatcttttttactacatacgccaatgggtcatgcaaggcggatctgggagccctcgaactgtggcggacgtctgatttaggtaaaagctttaagaccattggggtgaaaatttattcttttgggcttggcggtagattcctgtttgcctcagtgatggcagataaagatacaactcgccgcattcacgtcagcacagatcagggtgatacgtggagtatggcccagcttccttctgtagggcaagaacaattctatagcatcctcgccgccaatgatgacatggtttttatgcatgtagatgaacccggcgatacagggtttggtaccatctttactagcgacgacagaggcattgtttattctaagtcccttgataggcacctctacacaacaacggggggggagaccgactttacaaatgttacatcgctgcgcggagtgtacattacctcagtactgtccgaggacaattctattcagacaatgattaccttcgaccagggcggcagatggacccacctgaggaaacctgagaactcggagtgcgatgccaccgctaagaacaagaacgaatgctcgctacacatacacgcctcttatagtatctcgcagaagctcaacgtacccatggcgccgttgtcggaacccaatgccgtaggtatcgtgatcgctcatggatcagtcggcgatgcaataagcgtgatggtgccagacgtttacatctcagatgacggcggctattcttggaccaagatgcttgaaggaccacactactacaccatattggacagcgggggaatcatagtggctattgaacacagcagtcgtcccatcaacgtgatcaagttttccactgacgaagggcagtgctggcaaacatacacctttactagagatcctatttattttacgggcctggcatccgaaccaggcgcacgctccatgaatatttcaatttggggatttactgagtcatttctcacatcacaatgggtatcatataccatcgattttaaggatatattggagaggaattgcgaagagaaggattacaccatttggttagcacattccacagacccggaagactatgaagatggctgcattttagggtacaaagaacagtttctaaggttgagaaaatcatcagtctgccagaacggccgggattatgtcgtgaccaagcaacctagcatctgtctttgttcactcgaagattttttgtgtgactttggttattatcgacccgaaaatgatagcaaatgcgtggaacagccagagctcaaaggccacgatctcgagttctgcctctatgggcgtgaagagcacctcaccactaatggatatagaaagatacccggagacaaatgccaaggcggcgttaaccccgttagagaagtgaaggaccttaagaaaaaatgtacaagtaattttctctccccagaaaagcagaacagtaagtctaacagtgtgcctattatcctggcaatcgtcggtttaatgttagtaactgtggtcgcaggagtactgattgtgaagaagtatgtttgcggagggcgatttctggtgcatcggtacagcgttctgcagcagcatgcggaggcgaatggagttgacggggtcgatgctctggacactgcctctcacacaaacaaatctggataccacgatgattctgacgaagacctgctcgagtag

SEQ ID NO: 5374 - RNA, 2085 nt, synthetic construct
  misc_feature 1..2085: note = source = /note="Description of Artificial Sequence: Synthetic coding sequence"
  source 1..2085: mol_type = other RNA
atgacattcggccaatccaagctctatagatctgaagactacgggaaaaattttaaagatatcaccgaccttatcaataacacgtttatacgcacagagttcggcatggctattggacctgaaaattctggaaaagtcgtactgacagcggaagtctctggcgggtcaaggggcgggcgaatattccggtcatcagatttcgccaaaaactttgtccagactgatctcccgtttcaccctctgacccagatgatgtacagcccacagaactccgactatctgctagctctttcaacagagaatggtctgtgggtaagtaagaattttggcggaaaatgggaagaaattcataaagctgtatgcctcgctaagtggggctccgacaatactatcttcttcaccacgtacgctaacggttcctgtacggatttgggcgctttagagctctggcggaccagcgacttaggaaaatccttcaagactatcggcgttaagatctactctttcggattgggaggcagattcctgttcgcaagcgttatggccgataaagacacaactaggagaatacacgtttctactgaccagggcgatacttggtctatggctcagctaccgagcgtgggccaggagcagttttacagcatactggcagcaaacgacgatatggtttttatgcacgtggacgagccaggtgacaccggatttggaaccatcttcacaagtgatgaccgtggcatcgtatatagcaaatcactcgacagacacttgtacacaacgaccggcggcgaaactgacttcactaatgtcacatctctccggggggtctacattacttcagtgctctccgaggataactctatccaaactatgattacatttgatcaaggaggaagatggacacacctaagaaaaccagagaacagcgaatgtgatgccactgccaaaaataaaaacgagtgttctctacatatacatgctagttattctatctcccaaaaattgaacgtgcctatggcccccctgagcgaacctaacgcagtgggcattgtgatagcccacggatcagtgggtgacgcaatctctgtgatggtacccgacgtatatataagcgacgatggcggctattcctggacaaagatgctggaggggccccattactacacaatcctcgactcaggtgggattattgttgccatcgagcatagttctcgcccaattaacgtcataaagttctctactgatgagggacaatgttggcagacctatactttcaccagggatcccatctatttcaccggcttagcctctgaacctggagctcgctctatgaacattagtatttggggcttcactgaatcctttctcacttctcaatgggtcagctataccatagactttaaagacatcctggagcgcaactgtgaggaaaaagattacacgatctggttagcacattcgacagacccggaggattacgaagacggatgcattttgggatacaaagaacagttcctccggctcaggaaatccagcgtgtgccaaaatgggagggattacgttgtcactaaacaaccaagcatctgtctgtgcagtctagaagattttctgtgcgattttgggtattaccggccagaaaacgattccaaatgtgtggagcagcctgaattaaaaggtcatgatctcgagttctgcttatatgggcgagaagaacatttaacaacaaacggctaccgaaaaatacctggcgacaaatgccaggggggagtcaaccctgtgcgagaagtgaaggatctgaagaagaaatgcacctccaattttctatcccccgagaaacagaactcgaagtctaattccgtgcccattatacttgcaatcgtgggactaatgcttgtcaccgtcgttgccggcgttttaatcgtgaagaagtatgtttgcggagggagatttttggtgcacaggtattcggtgttgcagcagcatgccgaggctaatggcgtagatggagtggatgcattagataccgcctctcacaccaacaaaagtgggtaccacgatgactccgacgaggaccttttggaatag

SEQ ID NO: 5375 - RNA, 1536 nt, synthetic construct
  misc_feature 1..1536: note = source = /note="Description of Artificial Sequence: Synthetic coding sequence"
  source 1..1536: mol_type = other RNA
atgggagtgctgaagtttaaacacatatttttcagaagtttcgtcaagtcttctggtgtgtctcaaatcgtgttcacttttcttctgatcccttgttgtctgactctcaattttcgtgcccctcctgtcatacctaatgttccctttctctgggcctggaatgccccatcggagttttgtctgggtaaattcgatgagcccctggatatgagtctgttcagcttcattggttcacccaggattaatgccacaggtcagggagttaccattttttacgttgatcgactcggatactacccatatatagactctataacaggcgtgacagtaaatggcggcattcctcaaaagatctcacttcaagaccatctcgataaggcaaaaaaagacataactttctacatgcctgttgacaacttgggcatggccgtaatcgactgggaagagtggagaccaacgtgggccagaaattggaaacctaaggatgtgtacaaaaaccgcagcattgaactcgtacagcagcagaatgtccagttgtccctgacagaggctacagagaaagccaagcaggagtttgagaaggccggtaaggacttcctcgtggaaactatcaaactcggtaaactgttacgcccaaaccatctctggggctactacctttttcctgattgttacaatcaccactataaaaaaccgggatacaacggctcttgttttaatgtcgaaatcaaaagaaatgatgacctgtcgtggctctggaatgaatctaccgctttgtaccccagcatctacctgaacacgcagcagtctccggtagccgccactttgtatgtgcgtaatagagtgcgtgaagcaattcgtgtgtctaaaatccccgatgccaaaagcccattgcccgtgtttgcttacacccgaattgtgttcactgatcaagtgctgaagtttttgtcccaagacgagctggtatataccttcggagaaactgtggcgttgggagcttcaggtatcgtaatatggggtaccttgtctataatgaggagtatgaaaagttgcctgttactcgacaattacatggagaccatcctcaacccgtacataattaacgtgactttggctgctaagatgtgctcacaagtgctttgccaggagcagggcgtctgtattaggaagaattggaactctagtgactatctgcaccttaatccggacaattttgccattcagctggaaaagggtggcaaatttactgttaggggaaagccaacccttgaagatttggaacagttctcagagaaattttactgcagctgctactctaccctgtcatgtaaagagaaggccgatgttaaagacaccgacgctgtggacgtatgcattgccgacggagtctgtatcgacgctttcctaaagcctcccatggagacagaagaacctcagattttctacaacgcaagcccatccactctgtccgctactatgtttatctggcgcctggaggtctgggatcaaggcatatctagaatcggcttcttttag

SEQ ID NO: 5376 - RNA, 1530 nt, synthetic construct
  misc_feature 1..1530: note = source = /note="Description of Artificial Sequence: Synthetic coding sequence"
  source 1..1530: mol_type = other RNA
atgggagtattaaagttcaagcacatcttctttcgttctttcgttaagtccagtggggtttctcagattgtgttcacctttctgctgattccatgttgcctgactcttaacttcagggccccaccagtaattccaaatgtgccatttctctgggcgtggaatgccccttctgagttttgcctgggcaaattcgacgagccactggacatgagcctgttctcattcattggtagcccccgtataaacgccaccggacaaggcgtgactatcttttacgttgatcgcctcggatattatccgtatattgattcgatcacaggggttacagtaaatggggggatccctcaaaaaatcagtcttcaagatcacctcgataaagcaaagaaagacataaccttctatatgcccgtggacaaccttggaatggcagtaatagactgggaggaatggaggccaacctgggcccggaactggaagcctaaagatgtctataaaaatcgttccattgagttggtgcaacagcagaacgtccaactgtctctaactgaggctacagagaaagccaagcaggaatttgaaaaggctgggaaagacttcctcgtagagacgatcaagctgggaaaattattaagaccgaaccatctttggggatactacctgtttcccgactgttataaccatcactacaaaaaaccagggtataacggatcctgcttcaatgtggagataaaaagaaacgatgacctttcttggctatggaacgagtctaccgcactctacccatctatctatctgaacacacaacagtcccccgtcgcagccactctctatgtgcgtaaccgagtgagggaagctatcagggtgtctaagattcctgacgctaagtcccccctccctgtctttgcttacactaggatcgtattcaccgatcaagtgctgaagtttttgtctcaggatgaacttgtctatacattcggagagactgttgctctcggtgcctcaggtatagtgatctgggggactctttcaattatgcgctcaatgaaatcctgtctgctcctggacaactatatggagactatccttaatccatacatcatcaacgtaacgctcgcagccaaaatgtgcagtcaagtgctgtgtcaggaacagggcgtctgcattagaaaaaactggaactcctctgactatttgcaccttaaccctgataacttcgccatacagctcgagaaaggaggtaagtttaccgtacggggcaagccaactctagaggatctagaacagtttagtgagaaattctactgctcctgttactccacactgagctgtaaagaaaaggctgacgtgaaagataccgacgctgtggatgtctgcatcgcagatggcgtgtgtattgatgcctttcttaaaccgccaatggaaaccgaggaaccccaaattttctacaatgcttcccccagtaccctttcggcaaccatgttcattgtaagtattctttttcttattatctcatcagtcgccagcctctag

SEQ ID NO: 5377 - RNA, 243 nt, synthetic construct; identical to SEQ ID NO: 5047
  misc_feature 1..243: note = source = /note="Description of Artificial Sequence: Synthetic coding sequence"
  source 1..243: mol_type = other RNA

SEQ ID NO: 5378 - RNA, 1530 nt, synthetic construct
  misc_feature 1..1530: note = source = /note="Description of Artificial Sequence: Synthetic coding sequence"
  source 1..1530: mol_type = other RNA
atgggcgtgttgaaatttaagcatatcttttttaggtctttcgtgaaaagctccggcgtgtcccagatcgtgtttactttcctcctgattccgtgttgcctgaccctcaatttccgagcacccccagtgattccaaacgtccccttcctttgggcttggaatgccccttctgagttctgtcttggaaagttcgacgaaccattagacatgtcattattctcattcattggtagtccacgtatcaatgcaactggccagggcgtgactattttttacgtagaccgtttgggttactatccatacatcgatagcataaccggagtgactgtgaatggcggaattccacaaaagatttccctgcaggatcatctggataaggccaaaaaagacataacgttctatatgcctgttgacaacctgggaatggctgttattgactgggaagagtggagacctacgtgggcccgcaactggaaacccaaggatgtttataaaaacagatcaatcgaactggttcagcaacagaacgtacagctctcgctgaccgaggctactgagaaagcaaaacaagagttcgaaaaggcaggaaaggattttctggtggagacgattaaactcggcaaactgttgcgccccaaccacctttggggctattacctcttccccgactgttataatcaccactacaagaaacccggctacaacggctcatgcttcaacgttgaaatcaaacggaatgacgacctctcatggctatggaatgagagcaccgccctctacccttcaatatatctcaacactcagcaatcaccagtggcagctaccctctatgtgcgtaaccgcgtgcgggaagccattcgagtctctaaaattccagacgcaaaatcaccgctcccagtgtttgcttatacccgtattgtcttcacggatcaagtgctaaaattcttatctcaggatgagcttgtgtacacctttggcgaaactgtggctctgggggcatctgggatcgtgatatggggaacgctttccatcatgcggtcaatgaaaagctgtctcctactcgataactatatggaaactatcctgaacccatacatcatcaatgttactttggccgctaagatgtgcagtcaggtcctctgtcaggagcaaggcgtttgcatcaggaaaaactggaacagtagtgattacctgcatctaaacccagataattttgcgatccagttagagaaggggggaaaatttactgtgcgcggcaagccaaccctcgaggacctggaacaattttctgagaagttctattgctcttgttactccactttgagttgcaaggagaaagcagatgttaaggacactgatgctgtcgatgtgtgtatcgctgacggagtttgtatcgatgcgttcctgaagccacccatggaaacggaagagccgcagatattctataacgcctcgccttccacgttgagtgctaccatgtttattgtgtctattttgtttcttattatctcttctgtggcatctctttag

SEQ ID NO: 5379 - RNA, 1530 nt, synthetic construct
  misc_feature 1..1530: note = source = /note="Description of Artificial Sequence: Synthetic coding sequence"
  source 1..1530: mol_type = other RNA
atgggcgtcctcaagtttaagcatatctttttcaggtccttcgttaagtcttctggtgtctcgcagatagtctttacttttttactaattccctgctgcctgactctgaattttcgcgccccccccgttattccaaatgtgcctttcttgtgggcctggaatgccccctcggagttctgcctaggaaagtttgatgaaccgctcgacatgtctctcttcagcttcattggatccccaagaatcaacgcaaccggtcaaggcgtgaccattttttacgtcgataggctcggctactatccttacatcgactccattaccggcgtcaccgtgaatggcgggattcctcagaagatatctctgcaagatcatctggataaggccaaaaaagacatcacattttatatgcctgtggacaatttgggtatggctgtgattgactgggaagagtggcggcccacctgggctaggaactggaaacctaaggacgtgtataaaaatcggtccatcgaactggtacagcaacaaaatgtccaactgtccctgaccgaggcgactgaaaaagcgaaacaagaatttgagaaagccggcaaagacttcctggtagaaaccattaagttgggaaagctgctccggcccaaccatctttgggggtactacctgttccccgactgctataatcaccactacaaaaagcctggatacaatggctcctgcttcaacgttgaaatcaagcggaacgacgatctttcatggctttggaacgaatccacagcattgtacccttccatatatctgaatacccaacagtctcccgttgctgccactctctatgttcgcaacagagtcagggaagcaatccgagtttcaaagatcccagacgcaaaatcccctctaccggtgtttgcctatacccgcatcgtgtttacggatcaggttttaaaatttctgagccaggatgaactggtttacactttcggagagactgtcgccctgggggcaagcggtattgtgatttggggaactctcagcattatgcgtagtatgaagtcttgtcttctgctggataattatatggaaaccatcttaaacccctacattattaacgtaacccttgctgctaagatgtgtagccaagttttgtgtcaggagcaaggagtctgtatcagaaaaaattggaatagctcggactatctgcacttaaatcccgataattttgccatacagctcgaaaaagggggcaaatttacagttcgaggcaaacctaccctggaggatttggaacaattctccgaaaaattttattgttcatgctactcgaccctctcatgcaaagaaaaagcagacgttaaggatacagatgcagtggatgtgtgtatcgctgatggagtctgtattgacgctttcttaaagcccccgatggagacggaagaacctcagatattctataatgctagccccagcaccctctcagccacaatgtttatagtgtccattctgtttcttattatctcttccgttgccagtctctag

SEQ ID NO: 5380 - RNA, 1764 nt, synthetic construct
  misc_feature 1..1764: note = source = /note="Description of Artificial Sequence: Synthetic coding sequence"
  source 1..1764: mol_type = other RNA
atgcccagatatggcgcttcattacgccaaagctgccctcgatcaggcagggaacaaggtcaggacgggacagctggggctcccgggcttttgtggatgggacttgtactggcccttgcgctcgcccttgcgctggccctggcactgagcgactcccgtgttctttgggctcctgcagaagcacatcctctttcacctcaaggacaccctgctaggttacatcgaatcgtgccccgattaagagatgtcttcggatgggggaatctgacatgcccaatttgtaagggactgtttaccgccatcaatcttggccttaaaaaagaacccaatgtggctcgcgtgggcagcgtcgctatcaaactctgtaacctcctcaaaattgcccctcccgcagtctgtcagtcaattgttcacctttttgaagacgatatggtcgaggtctggaggcgctctgtgctgtctccaagtgaagcctgtggcttactcctaggtagtacatgcggtcactgggacatcttctccagttggaatatctccctgcccactgtacctaagcctcccccgaaaccacctagcccaccagctcctggagcgccggtgagtcgtatcttgtttttaaccgacctccattgggaccacgactatttggaaggtaccgatccagattgcgccgatcctctatgctgcagacggggctcaggcttgccacccgcatcgaggccaggagcgggatactggggagaatactcaaagtgtgacctgcctcttaggacattggaatctctgttgtctggactgggcccagctggcccttttgatatggtctattggactggcgacatacctgcccacgacgtgtggcaccagactcgacaagaccaactccgggctctgactactgtgacggcgctggtcagaaaattcttaggcccagtgccagtctacccagccgtaggcaatcacgaatcaacaccagtcaacagttttcctcccccttttattgagggtaaccactcatcacgctggctgtacgaggcgatggctaaggcttgggaaccttggctgcccgcagaggcactgcgcacattacgctatctgtctagcgtcgaaactcaagagggcaagagaaaagtgcacatcatcggtcatattccacccgggcattgtcttaaatcgtggtcttggaattattatagaatcgtagcacgctatgaaaatacccttgcagctcagttctttggacatacacacgtggatgaattcgaggtattttacgacgaagagacactaagccgtcccctggccgtagccttcctggccccatcagctaccacatacatcggactgaatcctgggtaccgggtttatcagatcgatggtaattatagtgggtcctctcatgtcgtgctggatcacgaaacttatatccttaatctcacccaggccaacatcccaggagcaatccctcactggcagctgctttatcgcgcccgagaaacctatgggctgccaaacacccttcctacagcctggcacaaccttgtttatcgcatgcgaggtgacatgcaattattccagacattctggtttctgtaccacaagggtcacccccccagcgaaccgtgcggaaccccatgcaggttagctaccttatgcgctcaactaagtgcgagagcagactccccggcgctatgccgccacctgatgccagatggaagccttccggaagcccagtctttgtggccacgtcctttgttttgttag

SEQ ID NO: 5381 - RNA, 1896 nt, synthetic construct
  misc_feature 1..1896: note = source = /note="Description of Artificial Sequence: Synthetic coding sequence"
  source 1..1896: mol_type = other RNA
atgccccgctacggagcctccttacgacaaagctgtcccagaagcggtagggaacaggggcaagatgggacagccggtgcacccggactgctatggatgggcctggttctggcactggccttggctctcgcactagcacttgcgctgagtgattctcgcgttctgtgggccccggcagaagctcaccccctatcgccacaaggtcatccggccaggctacatcgtatcgtccccagactgagagatgtattcggttggggtaatctcacctgtccaatctgcaaaggcctctttactgccattaacctaggtctaaaaaaggaaccgaacgtggccagagtcggctccgtggctataaaattgtgcaatctgttaaagattgcccccccagcagtctgccaatcaatcgtgcatttgtttgaggatgacatggtggaagtgtggcgaagatcagtcttgtcccccagcgaagcctgcgggctgttactcgggagcacctgcggccactgggacatcttctctagttggaatatctcactgcctaccgtgcctaaaccaccacctaaacctccaagcccacccgcccctggcgcccccgtgagccgcatcctctttttgaccgatctccactgggatcacgactacctagaaggcaccgatcccgactgtgcagaccctctgtgttgccggcgcgggtccggtctaccccccgcatcccgcccaggcgccggatactggggtgagtactccaaatgcgatctccccttacggacgctggaatctcttttgtcaggcttaggccccgctgggccctttgatatggtgtattggacaggcgacatccccgcccatgacgtatggcatcagacacgccaagatcagcttcgcgccctgacaacagttaccgcccttgttagaaagtttcttggacccgttcccgtgtaccctgcagtgggcaatcatgaatcaacaccagtgaactcgttcccccctcctttcatcgagggcaatcactcttcgcggtggttatatgaggccatggcaaaagcttgggagccctggctgccggctgaggcgctgcgaaccctcagaatcggtggcttctacgccctctcgccctaccctggattacgattgatcagcctgaacatgaatttctgctctagagagaatttttggttactgataaactcaacagatcctgccggccaactacagtggttagtaggtgagctgcaggccgccgaggacagaggagataaggtccacatcataggacatatcccccccgggcattgtttaaagtcatggagttggaattactaccggattgtcgcccgatacgagaatactttggccgcacaattcttcgggcatacacacgttgacgaattcgaggtattctatgatgaggagaccctaagccgtcctctcgctgtggcctttttggccccttccgcaaccacgtacatcggactgaacccaggttaccgtgtttaccagatagatggaaactatagtggaagctctcatgttgttctcgaccacgaaacctatatcttaaaccttactcaggcaaatattcccggtgcgattccccattggcagctcctctaccgcgcacgggaaacctatggactaccgaataccctgcctaccgcatggcacaacctggtgtatagaatgcgcggcgacatgcaattgttccaaactttctggttcctttaccacaagggtcacccaccttcggagccgtgcggcaccccttgccggctggccacactatgcgctcaactcagtgcccgcgccgactcccccgccctgtgcagacatctgatgccggacggttcactgccagaagcccagtctctgtggccccgacctctgttttgctag

SEQ ID NO: 5382 - RNA, 1728 nt, synthetic construct
  misc_feature 1..1728: note = source = /note="Description of Artificial Sequence: Synthetic coding sequence"
  source 1..1728: mol_type = other RNA
atgccccggtatggagcaagtttaaggcagtcctgtccccggtcaggtcgcgagcaaggacaggatggaactgcaggtgcgcccggcctcttgtggatgggactggtactcgccctggctctggccctggccttagctcttgcactgtccgattcaagagttctttgggctcctgcagaagcccacccattatcccctcagggtcacccagccagactgcacaggattgtgcctaggttaagagatgtgttcggatgggggaaccttacctgtcctatttgtaagggattatttaccgctataaacctgggtttgaagaaggaaccaaacgtagcaagagttggttcggtggccattaaattatgcaatctcctcaaaatcgccccaccagcagtctgtcagagtatcgtccatctgttcgaagatgacatggttgaagtctggcgcagatccgtgttaagcccctccgaagcttgcggcttgcttcttggatccacctgtggtcactgggatatattctcgtcctggaatatttcgttgcccacagtccctaaacccccaccaaaacccccgagccccccagcaccaggcgccccagtttcccggatactttttctgaccgatcttcactgggatcacgattatctcgaaggcaccgacccagattgtgctgaccctctgtgctgtagacgggggagcggacttcccccggcaagtagacctggcgctggctactggggggagtacagtaagtgtgatcttcctctaaggacactggaaagtctgctgagtggcctgggacctgccgggccctttgatatggtatattggactggagatatccccgcacatgatgtatggcatcagacccgccaggaccaactgagagccctcaccaccgtgacagcccttgtcagaaaattccttggccctgtaccagtgtatccagccgtcggaaatcatgaaagcactccagtcaactcatttcctccacctttcatagaagggaaccacagttctagatggctctacgaagccatggctaaagcttgggaaccctggcttcccgcggaagctctgcgaacgctccggaaggttcatataatcggccacattcctccagggcactgcctcaaatcttggtcatggaactactaccgcattgtggccaggtatgaaaacacgctggcagcccagttcttcggccacacccacgttgatgagtttgaagtgttttatgacgaagaaaccctaagccgaccccttgccgtagcctttttagctccctccgccacaacttatatagggctgaatcccggttaccgggtatatcaaattgacggaaattattctgggagctctcacgtagtgcttgatcacgaaacctacatcctgaacttgacccaggctaacatcccaggagccataccacactggcaactcttgtaccgagctagggagacttacggactgccgaataccttaccaacggcctggcataacctggtgtaccgtatgcgcggcgacatgcaactctttcaaacattctggttcctttaccataagggccacccgcctagtgagccatgtgggacaccttgccgtcttgccacactctgtgcccaattgagcgcccgcgccgattcacccgccctgtgccgccatttaatgcccgatggatccctccccgaagctcagagcctgtggcctagacctttgttttgctag

SEQ ID NO: 5383 - RNA, 1893 nt, synthetic construct
  misc_feature 1..1893: note = source = /note="Description of Artificial Sequence: Synthetic coding sequence"
  source 1..1893: mol_type = other RNA
atgccacgctatggtgcgtcgcttcggcaatcttgtcctaggtcaggtcgggaacaagggcaggatggaacagcaggagcgcctggtcttctgtggatgggattggttcttgccctcgcactggccctcgccttagccctggctcttagcgattcgcgggtgctctgggctccggctgaggcccacccgctgtccccacagggtcaccccgcaagacttcatagaattgtcccaaggctcagagacgtctttggctggggtaacctgacttgccctatctgcaaagggcttttcaccgctataaacctcggcctgaaagaacctaatgtggcccgtgtcggcagcgttgctatcaagttatgtaacctcctgaagattgcgcctcccgccgtctgtcagtcgattgtgcatctgtttgaagatgatatggtggaagtgtggagaagatcagtgctcagcccctcagaagcctgtgggctccttctaggcagcacttgcggacattgggatatcttttcttcatggaacatcagccttcctaccgtgcccaagcctccacctaaacctccaagccccccggcacccggcgcaccagtttcccgcatcctctttctaaccgatctgcattgggatcacgattacctcgagggcacagaccccgattgcgctgaccccctgtgctgtcgaagaggttctggactaccccccgcctcccgccctggcgcaggttactggggagaatatagtaagtgtgacttgcctctgcgaacccttgagtcgcttctctctggccttggaccagcagggcccttcgatatggtgtactggacaggagacatcccggcccatgacgtttggcaccagaccaggcaggaccaactacgggccttaacaaccgttactgcccttgtgagaaagttcctgggacctgtacccgtttacccggcagtgggcaaccatgagtccacaccagttaatagttttcccccgcccttcattgagggtaaccactccagccgttggctctacgaagctatggcaaaagcctgggaaccttggctgccagcagaagcgctccgtacccttcgaatcggtggattctacgcgctgtctccatacccgggtctgcgcctcatctctcttaatatgaatttctgctcgagagagaacttctggcttttgattaactcaaccgatccggccggacaattacaatggctcgttggcgaacttcaggccgccgaggacagaggagataaagttcacattatcggccacattccacctggacattgccttaagagctggagctggaactactaccgtattgttgctaggtacgaaaatacgcttgccgctcagtttttcggccatactcatgtggacgaattcgaggtattctatgacgaggagacattatcacggccgctcgctgtagcatttctcgccccatctgccactacttacatcgggttgaacccaggctaccgcgtgtatcagatcgacggtaattatagcggcagcagtcacgtcgtactagaccacgaaacttatatcctcaacctaacacaggcaaatatacccggggctataccacactggcagttgttatatcgcgctagggagacctatggactcccgaatacacttcctactgcctggcacaacctcgtctacagaatgagaggggacatgcagttatttcagaccttttggttcctttatcacaaaggtcatcctccctcagaaccctgtggcacaccctgtcgcctcgctactctgtgtgcccagctctccgcccgagccgactccccagccctgtgccgacatctcatgcccgacggcagcttaccagaagcacaatctttgtggccacgccccctcttttgttag

SEQ ID NO: 5384 - RNA, 1101 nt, synthetic construct
  misc_feature 1..1101: note = source = /note="Description of Artificial Sequence: Synthetic coding sequence"
  source 1..1101: mol_type = other RNA
atgcccagatacggcgcaagcctccgtcaatcatgccctagaagcggcagggaacagggtcaagacggcaccgccggcgctcctggcctgctttggatgggacttgttctcgcattggccctagcccttgcactggctttagccttgagtgattctagagtactttgggcaccagctgaagctcatcccctttcaccccaggggcatcccgctcgactgcacaggatagtgcctcgcctgcgagatgtgttcggctgggggaacttgacttgtcctatttgcaagggtctgttcaccgctattaacctaggactcaaaaaagagcccaacgtagcaagagttggtagcgttgcaattaagctgtgtaatctcctaaaaattgcaccccctgccgtatgccagtcaatagtccacctgtttgaagatgatatggttgaagtgtggcgtcgctccgtactttcgcctagtgaagcctgtggcctcctcttagggagtacttgcggccactgggatatcttctcatcttggaatatcagtctacccacggtccctaagccacccccgaaacctccaagtccgcccgcaccaggagcacccgtgtcaagaattctcttcctaacagaccttcactgggaccacgactacctcgaaggaaccgaccctgattgcgctgaccccctctgttgcaggcgcggctccggactaccccccgccagccgccccggcgccggctactggggcgaatactctaaatgtgacttgcccctgcgcacactggaatccctccttagcggactgggtcctgcgggcccattcgacatggtgtattggacgggcgatattccagcccacgacgtatggcaccagacacgccaggaccagctaagagccctgacgactgttaccgctctcgtaagaaaatttttggggcctgtgcccgtctatcccgctgtgggcaaccatgaatcaacacctgtaaacagttttcctccccctttcatcgaagggaatcattctagtaggtggctttatgaggccatggcaaaagcctgggagccctggttaccagccgaagcattacggacactccgatgtatttag

SEQ ID NO: 5385 - RNA, 1209 nt, synthetic construct
  misc_feature 1..1209: note = source = /note="Description of Artificial Sequence: Synthetic coding sequence"
  source 1..1209: mol_type = other RNA
atgcccagatacggagccagtctgagacagagttgccctagaagcgggcgtgaacaggggcaagatgggactgccggtgcccccggtctgctgtggatgggattagtccttgcactcgccctcgccctcgccttagccctagccttatcagattctcgggtgttatgggcccctgccgaggcccacccgctcagtccccagggacatccggcaaggctgcatcggatcgtcccaagacttcgagatgtgtttggatggggaaatcttacatgcccaatctgcaagggattattcaccgcaatcaaccttggattaaagaaagaacccaatgttgctagagttggctctgtggccattaagttgtgtaacctgttaaaaatcgctcccccagccgtctgtcagtcaatcgtgcatctctttgaggacgacatggtagaagtgtggagaagatctgtactgtccccaagtgaggcctgcggcctccttctcgggagcacttgcggacattgggatatattctcaagctggaatatctctctcccaacagttcccaagcctccccccaaacccccttctcctccagcccccggcgctcccgtgtcccggattctatttttaactgacctgcactgggatcacgattaccttgaaggcacagaccctgactgcgctgatccattgtgttgtcgtcgaggttcgggactgccacctgctagccgacccggcgccggttactggggcgagtactccaaatgcgatctgccactacgtactctcgagagcttactgtccggtctcgggcctgctggaccatttgacatggtctactggacgggcgatattccggcccatgacgtctggcaccagactcgacaagatcagctccgtgcgctgacaactgttaccgcactcgttaggaaatttttagggccggtacccgtttatccagcggtgggcaaccatgaaagtacacctgttaacagctttccacctccttttatcgaaggcaaccactcatctcggtggctatacgaggcaatggccaaagcttgggaaccctggctccctgccgaagcccttcgcactcttagatatcttagtagcgtagagacacaagaggggaagagaaaaaactggggtgtgctctgtagcttccccattccacgctccccaccccacctgtcccagtacgagttccttttcccatag

SEQ ID NO: 5386 - RNA, 1062 nt, synthetic construct
  misc_feature 1..1062: note = source = /note="Description of Artificial Sequence: Synthetic coding sequence"
  source 1..1062: mol_type = other RNA
atggaactgaccgagctgcttcttgtggtcatgcttttgctgactgccagactcacactctcctctcccgcacccccggcctgcgacctgcgcgtactttctaaactgctacgcgactcacatgtcctccattctcgactgtcccaatgtccggaggtccaccccctacctacccccgttctccttccagccgtagacttttccctgggagagtggaagacccagatggaagaaaccaaggctcaggatatactgggcgctgtcacacttctgttggaaggtgtaatggccgcccgaggccagctcggaccaacctgcctttcttcactcctcggacagctctccgggcaagtgcggctgctcttaggcgctctccaatcactgctgggcacgcagctacccccacaaggcaggaccactgcacacaaagatcccaacgctatcttcttgtctttccagcatttgttgcgaggtaaggttcggttcttaatgctggttgggggaagtactctttgtgtccgacgagccccacccaccaccgccgtcccgtctcggacctcactggtactgacattgaatgagctgcctaatcggacttcggggctccttgagactaactttaccgccagcgctcgtactactggaagtggactcctaaaatggcagcagggcttccgcgcgaagatacccggcctccttaatcaaacttcacgttcgctcgaccagattcccggttaccttaaccgtatacatgaattgctcaacggcacaagaggtctgttcccagggccgagtcgccgtacattgggagctcccgacatctcgagcggcacaagcgatacagggtcattacctcccaatctgcagcccggctactcaccttcacccactcatccccccaccggccagtacacattgttcccattaccacctacacttcctacccctgtcgtacagctccaccccctactccctgacccatccgccccaacaccgactccaacctctccactgctcaatacatcctatacccactcccagaatctgtcacaggagggctag

SEQ ID NO: 5387 - RNA, 945 nt, synthetic construct
  misc_feature 1..945: note = source = /note="Description of Artificial Sequence: Synthetic coding sequence"
  source 1..945: mol_type = other RNA
atggaactgaccgaactcctgttggtggtcatgctgctgttgaccgcccgactgacacttagctctcccgctccaccagcctgcgaccttcgcgtactcagtaaactcctccgagactcccacgtgctccactcaagactgagccagtgtcccgaggtacacccgctgcccaccccagtcctcctgccagcagttgatttctctcttggagaatggaagacccagatggaagaaacaaaggcccaagacattctaggggctgttacccttttactcgagggagtcatggccgccagaggccaactcggacccacctgcctttcatctcttctgggccagctaagtgggcaggtgagattgctgttaggagcgctgcaatcattactcggaacccagctcccacctcagggacggacaacggcccacaaggatcccaacgctatatttctttcttttcaacacctgctccgagggaagacaagcggattgttggagactaacttcacagctagtgctagaaccaccggatctggacttttaaaatggcaacaaggattccgcgccaaaattcctggcctgctcaatcagacctcccgtagtttggatcaaatacccggctatttaaacagaatccacgagttactcaatgggacccgcggacttttcccagggcctagtagacgcacactgggcgcaccagacattagttctggaaccagcgacactgggtccctacctccaaatctgcagccagggtactccccatcccccacccacccacctactggacagtacacccttttcccactcccaccaactctgcctactcctgttgtgcaacttcatcccctcctgccagatccaagcgccccaactcccacaccaacaagtcccctgctaaatacatcatacacacactctcagaatctgtcccaggaaggctag

SEQ ID NO: 5388 - RNA, 861 nt, synthetic construct
  misc_feature 1..861: note = source = /note="Description of Artificial Sequence: Synthetic coding sequence"
  source 1..861: mol_type = other RNA
atggaactgacagagctactcctggtggtcatgctgctcctcacagctcgcttaaccctcagctccccagctccacccgcctgcgaccttagagtcctctccaagctactgcgagactctcacgtgttacactctcgactgtcacagtgcccagaagtgcacccccttcctactcccgtgcttttgcccgcggtggattttagcctcggcgaatggaagacccaaatggaagaaaccaaggcccaggacattctcggagccgtgaccttacttcttgagggtgtgatggcggcgcgtgggcaacttggacctacgtgtctgtccagcctgttagggcaactgagtgggcaggtacggcttctgctgggtgccctccagagcctgctcggaacacagctacccccccagggacgaacaacggcacataaggaccctaacgctatttttctaagtttccagcatttactccgtgggaaagacttttggatcgtgggagataaattgcactgcctgtcacagaactattggttatgggccagcgaggtggcagccggaatacagagccaggatagctggtcggccgaaccaaacttacaggttcctggaccaaatccgagaatcccagaacaagatactagaaccctggagtggaattcatggaccctgagctggacccttacacaagatccacgttctcctgggcacttcctgcgcaacatccgccaccgcctccctgccacccaaccgcctgcatggatctttagtttccctaacccatcctcatattggactgtgtacgctttgccttcctccacccatctggcccacccctgtggacccgctcctccaccagcatcttag

SEQ ID NO: 5389 - RNA, 1050 nt, synthetic construct
  misc_feature 1..1050: note = source = /note="Description of Artificial Sequence: Synthetic coding sequence"
  source 1..1050: mol_type = other RNA
atggaactgactgaactactcctggtggttatgctcctacttaccgcccgtctgacactgtcatcacccgcaccaccagcatgcgatctaagagtcttaagcaaattactccgcgattcccacgttctgcactcccgtctgtcgcagtgtccagaggtgcaccccctacctacaccagtcctcctgccagctgtggatttttctctgggagaatggaagacccagatggaagagaccaaagctcaagatattctaggggccgtcacactcctgctggagggagtgatggccgctcgtggccagctcggaccaacctgcttatcctcactactaggccagctgtcggggcaggtgaggctgttacttggagccctgcaaagtttgcttggaacacagggccgcactactgcacacaaggatccaaatgctattttcttatcttttcagcacttgcttcgtggtaaagtacgcttcttgatgttagttggcgggtcaacattgtgcgtccggcgggctccacccactaccgccgttccctctcggacatccctagtactgacccttaacgaactgccaaatcgcacatcaggcctgctcgagacgaactttaccgccagcgcacgaactacaggctctggcctactgaagtggcagcaaggctttcgggccaaaattccaggcctgctcaaccagacatcccgctcgttagaccagatacctggctatctcaatcggatacatgaactccttaacggtacgcggggcttgttccccggaccgagccgacgcactctcggggcaccagatatttcaagcggcaccagcgacacgggttcactcccacctaacctccaacccggctattccccttcccctacgcaccctcccacgggccagtacacgctgtttcctctgcctccaacactgcctaccccggtcgtgcaactacacccccttcttccagatcctagcgctcccactccaactccaacatcccccctgctgaacacatcatatactcattctcaaaatctaagccaagaaggttag

SEQ ID NO: 5390 - RNA, 1239 nt, synthetic construct
  misc_feature 1..1239: note = source = /note="Description of Artificial Sequence: Synthetic coding sequence"
  source 1..1239: mol_type = other RNA
atgaagatgcatctacagagagccttagtcgtactcgcgctgctgaattttgccaccgtcagcctctccctaagcacctgtactacattagacttcgggcatattaaaaaaaagagggtagaagcgattagaggccagatcctgagcaaactaagactgactagtcctcctgagcctaccgtcatgactcatgtaccctatcaggttcttgcattgtataattcgaccagagagcttttggaggaaatgcatggggagcgggaagaaggatgtacgcaggaaaatacagagtcagaatattatgctaaagagattcacaaattcgacatgatccagggattggcggagcataatgaactcgctgtctgcccaaaaggcatcacaagcaaggtgtttcgtttcaacgtgtcttctgtagagaagaatagaaccaacctctttcgcgctgaatttagagtgctcagggtgcctaacccatcttccaaacgaaacgaacaaagaatagagttatttcagatcctcaggccggatgagcacatagctaaacagagatatataggcggcaagaacttaccaacacggggaactgccgagtggctttcattcgatgtcactgatacagtgcgagaatggctgttgcgcagggaaagtaacttgggactcgagatcagtattcattgtccctgccacacatttcagcctaacggggatatcctggagaacatccacgaagtgatggagatcaagttcaagggagttgacaatgaagatgatcatggacgtggcgacctcggtagacttaaaaagcagaaagaccatcataacccgcatttaatactcatgatgatccccccacaccggctggacaatcctggacagggcggacaaagaaaaaaaagagctctggacacaaactactgcttcagaaaccttgaggaaaattgctgcgtaaggccactgtacatcgactttagacaagacctcggttggaaatgggtgcatgaaccaaaaggctactatgcgaacttttgttcgggaccttgcccctatttgcgcagtgcagacaccactcactccaccgtgttagggctctacaatacgcttaaccccgaggcctctgccagcccttgctgcgtgccacaagacctcgagcctctaaccattctttactacgtaggccggacacccaaagtggagcagctctccaatatggtcgtgaagtcttgtaaatgcagctag

SEQ ID NO: 5391 - RNA, 930 nt, synthetic construct
  misc_feature 1..930: note = source = /note="Description of Artificial Sequence: Synthetic coding sequence"
  source 1..930: mol_type = other RNA
atgaaaatgcatttacaaagagccctcgtcgtccttgctctgttgaatttcgcaaccgttagtctgtctttatcaacctgcactactttagattttgggcatatcaagaagaaacgtgtggaagcaatccgagggcagatcctgtctaaactgagactcacaagcccccctgaacctacagtgatgacccacgttccataccaggtgttggctctctacaacagtacccgggagttgcttgaggaaatgcacggtgagcgggaggagggctgtacccaggagaacactgagtccgaatactacgccaaagaaattcacaaattcgacatgatacagggtctcgccgagcacaacgagctggccgtgtgcccaaagggcatcacttccaaagttttccgtttcaatgtgtcatcagtggagaaaaaccgtaccaacctgttcagagctgaattccgagtactccgcgtgcccaatccctccagtaaacggaacgaacagaggatagagctattccagattctacgccccgacgagcatatagcaaaacagcggtatatcggaggaaaaaacttaccaaccagaggaacagctgagtggttgagctttgacgtgacagatacagtgcgcgaatggcttctacgcagggaatcaaatttgggactggaaatctccatacattgcccttgtcatacatttcaacccaacggcgacatactcgaaaatatacacgaagtcatggagattaagttcaagggagtagataacgaggatgaccatggaagaggagacttgggacggttgaagaagcaaaaggatcaccacaacccccacctgatcttgatgatgattcccccccatagactcgataatcctggtcagggcggacagaggaagaaaagagctctcgacacgaattactgctttagatag

SEQ ID NO: 5392 - RNA, 996 nt, synthetic construct
  misc_feature 1..996: note = source = /note="Description of Artificial Sequence: Synthetic coding sequence"
  source 1..996: mol_type = other RNA
atgaacggaactcggaattggtgtaccctcgtcgacgtgcacccagaagatcaagcagcagtttatctgaaagggcggagcggtgacaagatgatacacgagaaaaatattaaccaactaaagagtgaggtccaatatattcaggaagcaaggaattgcctgcagaagttgagagaagatatatctagcaagctggatcgtaatctcggcgactccctacatcggcaagaaattcaagttgtgttagagaagcccaatgggttttcacagtctccaactgctctgtacagctcaccaccggaagttgatacgtgtataaatgaagatgtggaatcactgcgcaaaacagtccaagacctgcttgctaagttacaggaggctaaaagacagcaccagtccgattgcgtggcatttgaagttactttatcacgctaccagagagaagctgagcagtctaatgtcgctctccagcgggaagaggatcgagtagaacagaaagaggcagaagtgggcgaactccagcggcgtctgctgggcatggaaactgagcaccaggcactgctggctaaggttcgggaaggagaggtggctcttgaggagttaagatcaaataacgctgactgccaggctgaacgtgagaaggccgcaacactagagaaggaagtagccggtttgagggaaaagatacaccatttagacgacatgctgaagtcgcaacagagaaaagtgagacagatgatcgagcaactgcagaattccaaagccgtgatccagtcaaaggacgcaactattcaagaactgaaggagaaaattgcctacttagaagccgaaaatcttgagatgcacgaccggatggagcatctgattgaaaaacagatcagccatggcaatttttcgacccaggccagagctaaaaccgagaatcccgggtctatcagaatatcaaagcctccatcccccaagcccatgccagtcatccgagtcgtcgaaacctag

SEQ ID NO: 5393 - RNA, 1098 nt, synthetic construct
  misc_feature 1..1098: note = source = /note="Description of Artificial Sequence: Synthetic coding sequence"
  source 1..1098: mol_type = other RNA
atgaatggcacacgaaattggtgtacactggtggacgttcatcccgaagaccaagccgcagccggcagaaagacctatgcaatggtgagctcacatagtgctggccacagccttgcgagtgaactggttgagtctcatgatggacatgaggaaattattaaggtatatctcaagggccgttcaggcgataaaatgatccacgaaaaaaacataaaccagttgaaatcagaggtgcaatacattcaagaggcccgcaactgcctgcaaaaacttagggaggacatctcatctaaacttgatcgcaatctgggagacagcttgcatcgacaggagatccaggtcgtgttggagaagcccaatggattcagtcagagccctaccgccttatacagttccccccccgaggttgacacctgcattaatgaggatgtggagtccctgcgcaaaaccgtccaggatttactggccaaactacaagaggccaaaaggcagcaccagtcagactgcgtcgcctttgaagtgacactgagccgctaccagcgagaagccgagcaatccaacgttgccctgcaaagagaggaggatcgcgtagaacaaaaggaagctgaggttggggagctacaaaggaggttactggggatggagactgaacaccaagccctcttagctaaagttagggaaggggaagtcgccctcgaggaactcaggtcgaacaacgcagactgccaggccgagagagaaaaggctgcgacgctcgaaaaggaggtggccggactccgcgaaaaaatccaccacttggacgacatgctaaagtcacagcaacgaaaagtgcgtcagatgatcgaacagctgcagaattcaaaggccgtgattcaaagtaaggacgccaccatacaggagttgaaggagaaaattgcctacttggaggccgaaaacttagagatgcacgaccgaatggaacacttgattgaaaagcaaatctcccatggaaatttctctacacaggcccgcgctaaaactgagaaccccggctccataagaatcagtaagccccctagccctaaaccaatgccagtgattagagtggtggagacatag

SEQ ID NO: 5394 - RNA, 1173 nt, synthetic construct
  misc_feature 1..1173: note = source = /note="Description of Artificial Sequence: Synthetic coding sequence"
  source 1..1173: mol_type = other RNA
atgaacgggacccgcaattggtgcacactggtagacgtgcatcctgaagatcaagcagcaggctccgtagacattctccgcctcacactgcagggagaactaaccggagacgaactcgagcacatcgcacagaaggctggccgcaagacctacgctatggtttcttcacactctgccgggcattcgctagcctctgagttagttgaatcacacgacggccacgaagagatcatcaaggtatatttgaaaggtcgctccggggacaaaatgatccatgaaaagaacattaaccagctgaagagtgaggtacagtacattcaagaagcacgcaactgcctacaaaagctacgcgaggatattagctcaaaactggatagaaacctgggggactcgctacatagacaagagatccaagttgttcttgaaaagcccaacggcttctcccagagccctaccgctctttacagttctccaccagaggtggatacctgcatcaatgaagatgtggaatccctaaggaaaacagtgcaggatctgctagcaaagctccaggaggcgaaaaggcaacatcaaagtgattgcgtggccttcgaggttaccttgagtcgataccagagagaagccgagcagagtaacgtcgcactccagcgtgaagaggatagggttgaacagaaagaggcagaagtgggggaactccaaagaaggctgcttggaatggagaccgaacaccaggcgcttttggcaaaggtacgtgaaggcgaggtggctttggaagaactcagatccaacaatgcggactgtcaagcggaaagagaaaaggccgcgactctcgaaaaggaggttgcaggcctacgggagaagatccaccaccttgacgacatgctaaaatcccagcagcgcaaagtcaggcaaatgattgagcaattacagaattccaaggccgtgatacagagtaaagatgcaactatccaagaacttaaggaaaagatcgcctatctggaagccgaaaacctagaaatgcatgacaggatggagcacctcatagaaaagcagattagtcacggaaatttttcaacacaagcaagagccaagaccgagaatcccggaagcatccgtattagcaagcccccaagcccaaaaccaatgcctgtgattagggtggtcgagacctag

SEQ ID NO: 5395 - RNA, 600 nt, synthetic construct
  misc_feature 1..600: note = source = /note="Description of Artificial Sequence: Synthetic coding sequence"
  source 1..600: mol_type = other RNA
atgaacggaacgaggaactggtgtactcttgtggatgtccaccccgaagatcaggccgctgccgggcggaaaacttacgcgatggtttcatcccattctgctggtcatagcctggcatccgagctcgttgaatctcatgacggccacgaggagattattaaagtgtatttgaagggcagatccggtgataaaatgatacatgaaaaaaatatcaatcagctgaaatcagaagtgcagtatatccaggaagctcgaaattgtctgcagaaactgagagaggatattagtagcaagctggaccggaacctcggagactcgctgcacagacaggaaatccaggtcgttctagagaagcctaatggatttagccagagcccaactgccctgtacagcagcccccccgaagttgacacctgtattaacgaagacgtcgagagcctgcggaaaaccgtgcaggacttgctggccaaacttcaagaagctaaaagacagcatcagtccgattgtgtggcctttgaggtgaccttatcaagatatcagagagaggccgagcaatccaacgttgctctgcagagagaggaggatcggtgccctgagtag

SEQ ID NO: 5396 - RNA, 1230 nt, synthetic construct
  misc_feature 1..1230: note = source = /note="Description of Artificial Sequence: Synthetic coding sequence"
  source 1..1230: mol_type = other RNA
atgagctctcccggaatgacttctctgcagctggaaaaggaggaatgtatgcagtgcgtgccatgttcaccacgcaccagggtagctctactggaactgtacagggccatgtgccaaggctctgttgatatacttcgcctgacactgcagggtgaactaacaggagacgaactagaacacatcgcacagaaagcgggtcgaaaaacgtacgctatggtcagctcccacagcgccggccactccctggcaagcgagttagtggaatcacatgatggacacgaggagataataaaagtgtatctaaaggggcgctccggcgataagatgatacatgagaagaacattaaccagctgaaatccgaggtacaatacatccaggaagctaggaattgcttgcaaaaactgcgggaagatatctcctccaagcttgatagaaatctgggtgattccctgcatagacaagaaatacaagttgtgttggagaaacctaacggcttctctcagtctccaaccgccctatactcttccccccccgaggtggacacgtgcattaatgaggacgtcgagagtttgagaaaaactgtccaggatctgttggccaagctacaggaagcaaaacgacagcaccaatcagattgtgtggcatttgaagtgacattatctcgttatcagagagaggccgaacagtctaatgtggcgctgcagagagaggaggatagggtggaacagaaggaggcagaggtcggagaactccagcgccgactcttgggaatggagaccgaacatcaagcactgttggctaaagtaagagaaggagaggtcgcgcttgaagagttgcggtctaacaacgccgactgtcaggccgaacgggagaaggctgccacactggagaaggaagtagcaggtttacgcgagaagatacaccacttagacgatatgttgaaaagccagcagaggaaggtcagacaaatgatcgaacaattgcagaattccaaggccgttatccagtcaaaggatgcgacaattcaggaactaaaggagaagatagcatacctagaggccgagaacctggaaatgcatgacagaatggagcatttaattgagaagcaaattagtcacggcaattttagcacacaggccagagctaaaaccgaaaacccaggatccatccggatttctaagccccccagtccaaaaccaatgccagtgatacgtgtagttgaaacctag

SEQ ID NO: 5397 - RNA, 543 nt, synthetic construct
  misc_feature 1..543: note = source = /note="Description of Artificial Sequence: Synthetic coding sequence"
  source 1..543: mol_type = other RNA
atgaacggaacccgaaactggtgcaccctagtggatgtacaccccgaggatcaggccgcagcagggagaaaaacctatgccatggtctctagtcacagtgccggacattccctagcaagcgaattagttgagtctcatgacggtcacgaagagatcatcaaggtctatctaaagggcagaagtggcgacaaaatgatccacgaaaaaaacattaatcagctgaagtcggaagtgcagtatatacaggaagctcggaactgcctccagaaactgcgagaagacatctcgtctaaactggatagaaaccttggcgacagcttgcaccgccaagagatccaagtggtacttgagaaaccaaatggattttctcagtcccctaccgcccttaaagccggagatacggacgtccaaagtgactggcgcatgtcttgggggaacgaggtccctagtacgaatacagcccagtttctggcaactaattgtttattcttttatctgctccacctgcaaccgacccttccatggccaccagctgaccgatag

SEQ ID NO: 5398 - RNA, 1182 nt, synthetic construct
  misc_feature 1..1182: note = source = /note="Description of Artificial Sequence: Synthetic coding sequence"
  source 1..1182: mol_type = other RNA
atggaagagccgcagagtgatccaagtgtagagcctcctctgtctcaagaaactttttccgacctgtggaagcttctgcccgaaaataatgtgctttctcctttgcccagccaagctatggatgacctgatgctttcacctgatgatatcgagcagtggtttaccgaagaccccggtccagacgaggcacccagaatgcctgaagccgctccaccagtcgcccctgcccctgccgccccaactcctgccgcccccgctccagccccctcgtggccactgagctcttcagtcccttcacagaaaacataccagggatcatacggcttccggctggggtttctccacagtggcacagccaaaagcgtaacctgcacatactctccagccttaaacaagatgttctgccagctggctaagacctgccccgtgcaactctgggtggatagtacaccgccgcctggcaccagagtcagggctatggcaatttacaagcaatcccagcatatgaccgaagtagtcagaagatgtccacatcacgagcgttgctccgatagtgatggactcgcccctccacagcaccttatcagagtcgaaggcaacctgagagtggagtatttggatgatagaaacactttccgacactccgtggtcgtgccttacgagcctcccgaagttggcagcgactgcaccacaatccattataactatatgtgcaacagcagctgtatgggcggaatgaatcggcgccccatcctgacaataattaccctggaggattccagcggaaatttgctgggacgcaatagcttcgaagtgcgggtatgtgcttgtcctggcagagacagacgaaccgaggaagaaaatctccgtaaaaaaggcgaaccccaccatgaactaccaccgggcagtaccaaacgggcgttacccaataacacctcctcgtcgcctcaacctaagaaaaaacctcttgatggagagtactttactctacaaattcgcggcagagagcgctttgaaatgtttcgcgaactgaatgaagcactggaattaaaggatgcgcaagccggaaaggaacccggcggttccagggcccactcttcccacctcaagtcaaagaaaggacagagcacctcacgccacaaaaaactcatgttcaagaccgaaggccctgacagtgattag

SEQ ID NO: 5399 - RNA, 1032 nt, synthetic construct
  misc_feature 1..1032: note = source = /note="Description of Artificial Sequence: Synthetic coding sequence"
  source 1..1032: mol_type = other RNA
atggaggagcctcagtctgatccttcagtggaaccccccctcagtcaagaaaccttttccgacctgtggaagttattacccgaaaacaatgttctttccccccttccttcccaagccatggatgatttaatgctgtcacccgacgacattgagcagtggtttaccgaagatcctgggcccgacgaggcccctcggatgcctgaagccgccccgcctgtcgcccccgcccctgcggcccccacaccagccgcacctgcaccagccccctcttggcctctatcctcaagtgtgccatctcagaagacctaccaggggtcctatggatttcgcctcggatttctgcatagtggtacggctaaaagtgtcacctgcacttactcccccgcactaaacaaaatgttctgccagcttgcaaaaacttgccctgttcagctttgggtcgattccacccctccccctggaacaagagtacgcgctatggcaatctataaacaatcacaacatatgacagaagttgtccgtcggtgcccacatcacgaacggtgttctgacagcgatggtttggcccccccgcagcatctcattcgagtggaaggcaacctgagggtagagtatctagatgatcgcaacacctttcgccactccgtcgtcgtgccctatgagccaccagaggttggatccgattgcaccaccattcactataattacatgtgcaactcttcctgtatgggtggaatgaaccggcggcctatcctcactatcatcactctcgaggacagctctggcaaccttcttggacggaattcctttgaggtgagagtgtgcgcgtgcccaggcagagatcgaagaaccgaggaggagaacctacgcaagaaaggggagccacaccacgagcttccaccaggctccacgaagcgcgccctgcctaataatacctcatcctcacctcagcctaagaaaaaacctttggatggcgaatatttcactctgcagaagacattcccggctcgacatggcggttcccatttatag

SEQ ID NO: 5400 - RNA, 1149 nt, synthetic construct
  misc_feature 1..1149: note = source = /note="Description of Artificial Sequence: Synthetic coding sequence"
  source 1..1149: mol_type = other RNA
atggaagaaccccaatcagacccgagcgtagagcctccgctcagtcaagaaactttttccgacctctggaaactgttgccagagaacaacgtgctcagtccccttccatcccaggcaatggatgatctcatgctctctcctgatgacattgaacaatggttcactgaagatcccggccccgacgaagctcccagaatgcccgaggctgcacctccagtagctcccgctccagctgccccaacacctgctgctcctgcacccgccccctcctggcctctatcatctagtgtgccatcccagaagacataccagggcagctatggttttagactgacctgcacctactcccctgccctgaataagatgttctgtcagttggctaagacctgtccagtccagttgtgggtagactccaccccccccccaggcacccgcgtcagagcgatggcaatctataagcagtctcagcacatgaccgaggtggtacgaagatgcccgcatcatgagagatgtagcgattccgacggtctagcgccacctcagcacttgatcagagtggaaggcaatttaagagtggagtacttagatgatcgaaatacattccgacattccgttgtggttccatacgagccgccagaggtgggatctgattgtactacgatccattacaactacatgtgtaatagttcctgcatggggggaatgaacaggcgtcctattttgacaatcataacattagaggattcatctggcaacctgctcggccgcaacagttttgaggttcgggtctgcgcttgcccaggaagggacagacggacagaggaggagaatttgcgcaaaaaaggcgagccccaccacgaactccctcccggttctacaaagagggccttacccaacaacacatcttcatcccctcagccaaagaaaaaaccattagatggggaatactttacgctgcagattcgggggagggaacgatttgagatgtttagggaattgaacgaggcattggaactcaaggatgcccaagcagggaaggaaccaggcggttcaagggctcatagctcccacctaaagtctaagaagggacagtccactagccggcataaaaaactgatgttcaagactgagggaccagacagcgattag

SEQ ID NO: 5401 - RNA, 858 nt, synthetic construct
  misc_feature 1..858: note = source = /note="Description of Artificial Sequence: Synthetic coding sequence"
  source 1..858: mol_type = other RNA
atggaggaaccgcagtctgatcctagtgtggagcctcctctttcccaggaaaccttctctgacctctggaaactgctgcctgagaacaacgttctgtcccctctgcccagccaagccatggatgacctgatgctatctcccgacgacatagagcaatggttcacggaagatcctggccccgatgaagctccacgtatgcctgaggccgcgccacccgtagcacccgcacctgccgccccgacgcctgccgcgcctgctcctgccccaagttggccactgtcttccagcgtgcctagtcaaaaaacctaccagggtagttatggttttagactcggcttcctgcacagtggaacagccaaatccgtcacttgcacatattctcccgcgttaaacaagatgttttgccagctggccaaaacttgcccagtgcaactctgggtggattccacacctccgccaggtacccgcgtgcgtgcaatggctatctacaaacagtcccagcacatgacagaggtggttaggagatgcccacaccacgaacgatgttcagattcagatgggcttgcgcctccacagcacctgattcgcgtggaaggcaatctgcgcgtagagtatctcgacgacagaaatacttttaggcattccgtggtcgtaccatacgagccccccgaagtgggatccgactgtactacgattcattataactacatgtgtaactcctcctgcatgggaggtatgaaccggcgcccgatactgactataattacactggaagattcaagaccacgacaggttgatcacttacgttccggcgtgcaggattcactggctaacatcgccaagagccacttatattag

SEQ ID NO: 5402 - RNA, 273 nt, synthetic construct; identical to SEQ ID NO: 5072
  misc_feature 1..273: note = source = /note="Description of Artificial Sequence: Synthetic coding sequence"
  source 1..273: mol_type = other RNA

SEQ ID NO: 5403 - RNA, 135 nt, synthetic construct; identical to SEQ ID NO: 5073
  misc_feature 1..135: note = source = /note="Description of Artificial Sequence: Synthetic coding sequence"
  source 1..135: mol_type = other RNA

SEQ ID NO: 5404 - RNA, 1026 nt, synthetic construct
  misc_feature 1..1026: note = source = /note="Description of Artificial Sequence: Synthetic coding sequence"
  source 1..1026: mol_type = other RNA
atggaggaaccccagtctgacccgagtgtcgaaccaccattgagccaagagactttttccgacctgtggaagttgctgcccgagaataacgtgcttagccccttgccatcacaagcaatggacgatcttatgctgtccccagatgatattgaacagtggtttactgaagatcccgggcccgacgaggctccaagaatgcccgaagccgcccctcccgtggcaccggcccccgcagcaccaacccccgccgctcctgctcctgctccttcatggcctttaagtagcagcgtcccatctcagaaaacataccagggcagctatgggttccgactgggattcctccacagcggcactgcaaagagtgtaacctgtacctactcacccgcacttaacaaaatgttctgtcagctcgctaagacctgcccagttcaattatgggtggactccaccccccctcctggcacaagagtcagagctatggcaatatataaacagagccaacacatgacagaggtcgttcgccgatgtccacaccatgagcggtgctctgatagtgatggccttgcccccccccagcatttgatacgagtggaaggcaacctgcgcgtcgaatatctagacgacaggaacacttttcgacactctgttgttgtgccctacgagccgcctgaggtcggaagcgattgtactaccattcattataactatatgtgtaactcgagctgtatgggcgggatgaaccggagacccatcctaactataattaccctagaagactcgtccggaaacctgttggggagaaactcattcgaagttagagtttgcgcgtgccctggccgcgaccgcaggactgaggaagagaatctacgcaagaagggagagccccaccacgaattgcctcctgggtcaactaagagagcccttccgaacaatacatccagtagcccacagcctaaaaaaaaaccactcgacggtgaatattttacactccaagaccagacctcatttcagaaagagaactgctag

SEQ ID NO: 5405 - RNA, 1182 nt, synthetic construct
  misc_feature 1..1182: note = source = /note="Description of Artificial Sequence: Synthetic coding sequence"
  source 1..1182: mol_type = other RNA
atggaagaaccgcagtcagatccttctgtggagccccccctgtcgcaggaaactttctctgacttgtggaagttgttgcccgaaaataacgtgctcagccctttaccctcacaagcaatggacgacttgatgttgtcgcctgatgatatagaacaatggtttaccgaggatcctgggccagacgaagctccaagaatgcctgaagcagccccccctgtcgcccccgcccccgcagctccgactcccgcagcccccgctccagcgcccagttggcccttaagtagttctgtgcctagccaaaagacctatcaaggtagttatggcttcagactcggattcctgcactccggtaccgccaaaagtgtaacttgcacctactctcccgccttgaacaaaatgttttgccagcttgctaagacgtgcccagtgcagttatgggttgactccaccccaccccccggcacacgggtcagagccatggccatatacaagcaatcccaacatatgaccgaggtcgtgcgccggtgccctcatcacgagcgttgttccgatagcgacggattagctcccccccaacacttgattcgcgtggaagggaacttgcgggtggaatacttggacgaccgtaatacattcagacatagcgttgtggtcccttacgaaccacccgaagtaggctccgactgtactacaatccattataactatatgtgcaattcctcttgtatgggcggaatgaacaggaggcccattcttaccatcattactctggaggatagctcaggaaatctgctggggcgcaattccttcgaagttcgggtgtgtgcttgccctggacgcgacagacgaaccgaagaggaaaatctccgcaaaaaaggagaaccacatcatgaactcccacctggcagtactaaaagagccctgcctaacaatacatcatccagcccccaaccgaaaaagaagcctctcgacggcgaatattttacactgcagatcagagggcgagagagattcgagatgtttagagaacttaatgaggcccttgaactaaaagatgcacaggcagggaaggaacccgggggatccagggcccacagcagccatctcaaaagcaaaaagggtcagagcacctcacgacacaaaaagctgatgtttaagacagaaggtcctgattctgactag

SEQ ID NO: 5406 - RNA, 1041 nt, synthetic construct
  misc_feature 1..1041: note = source = /note="Description of Artificial Sequence: Synthetic coding sequence"
  source 1..1041: mol_type = other RNA
atggaggagcctcaatccgatccatctgttgagccgcctctgtcacaggaaaccttctcggacctctggaagctgctccctgagaataacgtcttgagccccctgccgtcacaggccatggacgacttaatgctctcccccgacgacattgaacaatggttcaccgaagatcccggacccgatgaagcgccccgcatgccagaagccgccccacctgtggcacccgcccctgccgcccctacacccgcagcccccgccccagcccccagttggcccttatcctccagcgtgccaagccaaaagacataccagggttcttacggcttccgattaggctttcttcattcaggcactgcaaagtccgttacttgtacctactcaccggcactgaataagatgttctgccagcttgccaaaacatgtcccgtccagctatgggttgactctacgcccccccccggaacgagagtgcgcgctatggcgatatataagcagtctcagcatatgacagaagttgtgcgcagatgtccccatcacgagagatgctctgacagcgatggtctcgcaccccctcagcacctgatccgcgtggaaggcaatctgcgggtggagtatctggatgacagaaatactttccgacattccgttgtagtcccttacgaaccccctgaagttggatcagattgtacgactattcattacaactacatgtgtaacagctcatgtatgggaggcatgaacagacgaccaatactgaccatcattacgttagaggatagctctggcaacctgctgggccggaattcttttgaggttagagtgtgcgcttgtcctgggagagatagaagaacagaggaggagaacctgagaaagaagggagaacctcatcacgagctacctcctggatcaaccaagagagccctacccaataacaccagtagctcccctcaaccaaaaaaaaaaccccttgatggagaatattttaccttgcagatgctattagaccttagatggtgttacttcctgatcaattcatcgtag

SEQ ID NO: 5407 - RNA, 387 nt, synthetic construct
  misc_feature 1..387: note = source = /note="Description of Artificial Sequence: Synthetic coding sequence"
  source 1..387: mol_type = other RNA
atggaagagccacagtctgacccttctgtcgaacctccgctgtcccaagaaaccttctccgacctctggaagcttcttcctgaaaacaacgtgctctccccacttccatctcaagccatggatgacctaatgctcagccccgacgacatcgagcaatggttcactgaggacccagggcctgatgaggcacctcgcatgcctgaagctgccccacccgtggccccagcaccagcagccccaacccctgccgcccccgcccctgcgcctagttggccattgtctagttctgtaccctctcagaaaacctatcagggatcctatggattcagacttggcttccttcactccggtaccgcgaaatctgtcacctgcacttattcgccttag

SEQ ID NO: 5408 - RNA, 498 nt, synthetic construct
  misc_feature 1..498: note = source = /note="Description of Artificial Sequence: Synthetic coding sequence"
  source 1..498: mol_type = other RNA
atggaggagccacagagtgatccaagcgtggaacctcctctatcccaagaaaccttctccgacttatggaagttgttaccagaaaataacgtgctctcccctttgccttctcaagccatggacgaccttatgttgagccccgacgacatagagcagtggtttacagaagacccaggccccgacgaagcccctcgaatgcccgaggccgcgccaccagttgcccccgctccggcggcacccacccccgcagcaccggccccagccccatcatggcctctcagtagtagtgtccctagccaaaaaacctaccaaggcagttacggcttccgcctgggatttttgcattcgggcactgcaaaatctgtaacttgcacctactcccctgctctgaacaaaatgttttgtcaacttgccaaaacgtgtccggtccaactttgggttgattccacaccaccccccggtaccagggtccgagccatggcaatctataagcaatag

SEQ ID NO: 5409 - RNA, 600 nt, synthetic construct
  misc_feature 1..600: note = source = /note="Description of Artificial Sequence: Synthetic coding sequence"
  source 1..600: mol_type = other RNA
atgttctgccaattagccaaaacttgccctgtgcagctgtgggtcgattcaaccccccctcctggaacaagggtcagggcgatggcaatttataagcagtcccaacacatgacggaagtggttcgtcgctgtccccaccatgagagatgttctgactcagacggcctcgcacccccccaacatctgatcagagtcgaggggaacctcagagtggaatacttggatgatcggaatacatttagacactctgttgtagtgccttacgaaccccccgaagtcggcagtgactgtacaaccatccactataattatatgtgtaacagttcttgcatgggcggaatgaaccgccgacctatcctaacgatcatcacacttgaagatagctccggcaatctcttaggaagaaactccttcgaagttcgagtttgtgcgtgccctggacgggatagaagaacagaagaggaaaacctcagaaaaaagggcgaaccacatcatgagcttcctcctggttccactaaacgagccctcccgaataacacatcttccagtcctcagccgaaaaagaaacccctggacggagagtactttacactccagtag

SEQ ID NO: 5410 - RNA, 468 nt, synthetic construct
  misc_feature 1..468: note = source = /note="Description of Artificial Sequence: Synthetic coding sequence"
  source 1..468: mol_type = other RNA
atggaagagccccagagcgacccatctgtggagccacctctgtcccaagaaacatttagcgatttatggaaactactgcctgaaaataatgtgctgtatagcccagctttgaataagatgttctgtcaactggccaaaacctgccccgtgcaactgtgggttgattcaacccccccccctggtacacgggtgagagcaatggcgatttacaaacaatcccaacacatgacggaagtagtacgcaggtgccctcaccatgaacgctgttcagattctgatggccttgcacctccccagcacctgatcagggtggaggggaatttgagagtggaatacctggatgatcgcaatacttttcggcactcagtggtcgtgccatacgaaccgcctgaagtaggaagtgactgtaccactatccactataactacatgtgtaactcatcttgcatgggaggtatgaatcgctag

SEQ ID NO: 5411 - RNA, 468 nt, synthetic construct
  misc_feature 1..468: note = source = /note="Description of Artificial Sequence: Synthetic coding sequence"
  source 1..468: mol_type = other RNA
atggaagaacctcaatctgacccatccgtcgaaccgcctctctcacaggagaccttctcggacctctggaagctactcccagagaataacgtcctgtattctcctgcactgaacaaaatgttctgccaactcgcaaagacatgtcccgttcaactgtgggtggactccacgcctcctcccggaacaagagttcgcgctatggccatctataagcaatcacagcacatgacagaagtcgtccgccggtgtccccatcacgaaagatgcagcgatagtgacggtctcgccccacctcagcacctcatccgagtggaaggtaacctccgggtagaatacctcgacgaccgaaacacatttaggcattcagtagtagttccttacgagcctcccgaagtcggctcagattgcacaaccatccactacaattatatgtgcaactcctcctgcatgggcggcatgaatagatag

SEQ ID NO: 5412 - RNA, 1470 nt, synthetic construct
  misc_feature 1..1470: note = source = /note="Description of Artificial Sequence: Synthetic coding sequence"
  source 1..1470: mol_type = other RNA
atggcggggcagagggtcttgcttctggttgggtttctcctccctggcgtactacttagtgaagccgcaaagatcctgaccatttcgaccgttgattttaaaaaggaagaaaagtcatatcaggtgatttcctggttagcacctgaagaccaccagagggaattcaaaaagtctttcgattttttcctggaagagacactcggagggcgaggcaagttcgaaaacctcttaaacgtcctggagtatctggccttacagtgcagccactttttgaataggaaagatatcatggattcattgaagaacgaaaatttcgacatggtgattgttgagacatttgattactgcccttttctcatcgcagaaaaacttggcaagcccttcgtagccatcctttctacgagcttcggcagcttagagttcggtctgccgatcccattatcctatgttcccgtcttccgctcgctattaactgatcacatggatttttggggcagagttaagaactttctgatgtttttttccttttgcagacggcagcaacacatgcagtcaacattcgataatacaattaaagaacactttactgaggggtcccgacccgtgctttcccatcttctgctgaaagctgaactttggttcatcaattctgacttcgcttttgactttgcccggcccctgctcccaaacaccgtgtacgtgggcggcctgatggaaaaacctatcaaacctgtcccacaggacctggaaaactttatcgccaaattcggggactccggatttgtgctcgttactctcggatccatggttaatacctgccagaaccctgagatcttcaaagagatgaacaacgcgttcgcacatcttcctcaaggtgtcatatggaaatgccagtgtagtcattggcctaaggacgtacatctcgcagccaacgtcaagatagtggattggttgcctcagtctgacttgctagcccaccccagcataagactcttcgttacccatggaggtcaaaactctattatggaggccatccagcacggggtacccatggtcggaatccccctttttggggatcaaccagagaacatggttcgagtcgaagccaaaaagtttggagtatcaatccagctgaaaaagcttaaggctgaaacactggctctgaagatgaaacagataatggaagataagagatataaaagtgcagcagtagctgccagtgtcatcctcagatcacatccactctcacctactcagcgtctggttggctggattgaccatgtactccaaacagggggagccacccacctaaaaccatacgtttttcagcagccttggcatgagcagtacctgctggacgtatttgtgttcttacttgggcttactttgggaactctttggctgtgtggcaaattattaggcatggccgtctggtggcttaggggagcacgcaaggtgaaggaaacatag

SEQ ID NO: 5413 - RNA, 1572 nt, synthetic construct
  misc_feature 1..1572: note = source = /note="Description of Artificial Sequence: Synthetic coding sequence"
  source 1..1572: mol_type = other RNA
atggcgggtcaacgcgtccttctgttagtggggtttttgttacctggggtccttttatctgaagctgccaagatcctgactatctccactgtcggtggcagtcactacctcctgatggacagagtgagtcaaatcctgcaggatcatggacacaatgtaacaatgctcaaccacaaacgagggcccttcatgccagacttcaaaaaagaggagaagagttatcaggtgatcagttggttagcccctgaagatcatcaaagagaatttaagaagagttttgactttttcctggaagaaactttagggggtagggggaaatttgaaaatctgttgaatgtcttggaatatctggccttgcaatgttctcacttcctcaatcgtaaggatataatggactccttgaaaaacgaaaatttcgacatggtgatagtagaaacctttgactactgcccattcctgatcgcagaaaaactaggcaaaccatttgtcgctatactgtccacttcattcgggagtctagagttcggtttgcctatcccgctgagctacgtgcctgtctttcgaagcctactgactgatcacatggacttttggggccgtgtcaaaaacttcctgatgttcttctctttctgtcgccgtcaacagcacatgcaatcaacattcgataacaccattaaggagcactttacagaaggttccaggcccgtcttgagccacctactgctaaaggccgagctctggttcatcaattcggacttcgcttttgacttcgccagaccgctactgcctaacacagtttacgtgggaggactcatggaaaaacctatcaagcccgtccctcaagatctcgaaaatttcatcgccaagttcggtgatagtggctttgtccttgtgaccctgggatctatggtgaacacttgtcagaacccggagatctttaaagaaatgaataacgctttcgcacaccttcctcagggcgttatttggaaatgccaatgttcccactggcctaaggacgtccacttggcagcaaatgtgaaaatcgtggactggctaccgcagtctgatctgctggctcaccctagcataagactgtttgtgacgcacggaggtcagaactctataatggaagctattcagcacggagtacctatggtcgggattcctttatttggtgatcagcctgagaatatggtgagagtggaagctaaaaaattcggggtctctattcaattaaaaaagttgaaggccgagaccctcgcccttaagatgaaacaaattatggaagataagaggtacaaatccgctgccgtcgcggctagtgtcatactccgaagccaccccctgagcccaacccagcggctggtcggatggatcgaccatgttctgcaaaccggaggcgcaacacatctaaaaccatacgttttccaacagccatggcacgagcagtacttgttagatgtattcgtctttctcctgggactcactttgggcactctgtggttgtgtggcaaacttttaggaatggccgtttggtggctgcggggggctcggaaggtgaaagagacttag

SEQ ID NO: 5414 - RNA, 417 nt, synthetic construct
  misc_feature 1..417: note = source = /note="Description of Artificial Sequence: Synthetic coding sequence"
  source 1..417: mol_type = other RNA
atggcgggccaacgggtgcttctactggtgggcttcttgttaccgggggtcctgttgtcagaagctgcgaaaattttaaccatcagcacagttgggggatctcattacctacttatggacagggtgtcccaaatcctgcaagatcatggccataatgtgacaatgttaaaccataaacgaggacctttcatgcctgattttaagaaagaagagaaaagttaccaggtgatcagttggctggcgccagaggaccaccagcgcgagttcaaaaaaagcttcgatttttttctcgaggaaaccttggggggccgaggaaaatttgagaatttactcaatgtactggaatatcttgcattgcaatgctcacacttcctaaatcgaaaagacataatggactctttgaagaatgaaaattag

SEQ ID NO: 5415 - RNA, 666 nt, synthetic construct
  misc_feature 1..666: note = source = /note="Description of Artificial Sequence: Synthetic coding sequence"
  source 1..666: mol_type = other RNA
atggtgaatacatgccagaaccctgagattttcaaggaaatgaataatgccttcgcccaccttccgcagggagtcatatggaaatgtcagtgctctcactggcctaaagacgtccatttagccgctaacgtaaagatagttgactggctaccccaaagtgaccttctcgcccatcccagcattcgactcttcgtgacccacggcggacagaacagtatcatggaggctatccaacatggtgtgccaatggtcggaatcccacttttcggtgatcagcctgagaacatggtgagagtggaggcgaaaaagtttggagtgtcaatacaattgaagaagctcaaagcagagacactggctctgaagatgaaacagatcatggaggacaagagatacaaatcagctgctgtagccgcctctgtaattctgaggagccacccactctctcccacacagagactggttggttggatagatcacgtactccagacgggaggcgccacccacttgaaaccttatgtctttcagcaaccttggcatgaacaatatttgctggatgtttttgtgtttctgctgggattaacattgggaaccctgtggctgtgcgggaagttgctgggtatggcagtgtggtggttacgaggcgcaagaaaggttaaggaaacatag

SEQ ID NO: 5416 - RNA, 954 nt, synthetic construct
  misc_feature 1..954: note = source = /note="Description of Artificial Sequence: Synthetic coding sequence"
  source 1..954: mol_type = other RNA
ttgacagaccggcagacggatacggcaccttccccatcttatcatctgttacctgggcgaagaaggactgttgacgccgccgctagccgtgggcaagggccagagcccgcacccgggggaggagttgagggcgtgggcgcaagaggagtggcgctgaaactctttgtccaactcttagggtgcagtaggttcggcggggccgtggtaagagcaggagaagctgaaccatccggggctgctagaagcgcttcaagcggcagagaggaaccacagcccgaagagggggaggaggaggaggagaaggaggaggaacgcgggcctcaatggagactgggggccagaaaacctggttcatggaccggcgaggctgcggtctgtgcggacagtgcaccagccgccagagccccccaagcactggccagagcttctggcaggggtggaagagttgcaagacgcggagctgaggagagtggacctcctcattctccctcgagacgaggtagcgccagtcgagcgggacccgggcgtgctagcgaaactatgaatttcctgctgtcatgggtacattggagcctggctttactcctgtaccttcaccacgccaagtggtcccaggctgccccaatggctgaagggggagggcagaaccaccacgaagtcgttaagtttatggacgtgtatcagcggtcatactgtcatcctatagaaacattggtcgacatcttccaggaataccctgatgaaattgagtatatctttaaacctagctgcgttccactgatgaggtgcggtggatgttgtaatgacgagggtttggaatgtgtccctaccgaggaaagcaatataacaatgcagatcatgagaatcaaaccacatcaaggccagcatataggcgaaatgtccttcctccagcacaataaatgcgaatgtagatgcgataagccaagacgatag

SEQ ID NO: 5417 - RNA, 1239 nt, synthetic construct
  misc_feature 1..1239: note = source = /note="Description of Artificial Sequence: Synthetic coding sequence"
  source 1..1239: mol_type = other RNA
ctgacggacagacagactgatacagccccgtctccatcctatcacttgttaccaggcagacgaagaaccgtcgacgccgctgcctctcgtggtcaaggacctgagcctgcacctggggggggagtggagggcgtgggagcaagaggagtagcattgaagctgtttgttcagctgctcggatgcagcagattcgggggagcagtggtacgcgccggcgaggccgagccgagcggagctgccaggtcagcttcatcaggccgggaagagccacaacccgaagagggcgaagaggaagaggaaaaggaagaagagagaggaccccaatggaggttaggagcacggaaaccgggcagctggaccggagaagcagctgtatgtgccgacagcgctcctgcagcaagagccccccaagcattggctcgtgcaagcggacggggtggtagagtagctcggcggggtgcagaggaaagtggtccaccccattccccctctcgcagaggctctgcctctcgggcaggccccggcagagcgtcggagaccatgaactttcttctcagctgggtacattggtctcttgccctgcttttatatctgcatcatgctaagtggagccaggctgcccctatggccgaaggaggagggcagaatcatcatgaagtcgtcaagttcatggacgtttaccaacggagttattgtcatcccattgagaccctagttgacatctttcaggagtacccagacgagatcgaatacatcttcaagcctagctgtgtgcctctcatgcggtgtggtggctgttgtaacgatgaaggcctcgagtgtgtacccaccgaagaatccaatattacaatgcaaattatgaggatcaaacctcatcagggacagcatatcggcgagatgtcattcctgcaacacaataaatgcgagtgccgcccaaaaaaagacagagcccggcaagaaaagaagagtgttcgaggcaagggcaagggtcagaaaagaaagagaaaaaaatcaagatacaaatcgtggagtgtgtacgtaggagctcggtgttgcttgatgccatggagtctccccggaccccacccatgtggaccgtgttctgaacgccgcaagcatctgttcgttcaagacccccaaacatgtaagtgttcttgcaagaataccgattctcgatgcaaggcacggcaactggagttaaacgaaagaacatgccgttgcgacaaacccaggagatag

SEQ ID NO: 5418 - RNA, 984 nt, synthetic construct
  misc_feature 1..984: note = source = /note="Description of Artificial Sequence: Synthetic coding sequence"
  source 1..984: mol_type = other RNA
ctgacggatcggcagaccgacacagctccatcacctagttaccatttactgccaggtagacggcgcacagtggacgcggcagcgtcaaggggacaaggaccagaaccagctccgggaggcggggtagaaggtgtgggcgctcgtggcgtggctctgaaactgttcgtgcaactgttaggttgttcacgttttggtggcgccgtcgtcagagcaggcgaggccgaaccaagtggtgccgcccgttccgcttcaagcggtcgcgaggaaccacaaccagaagagggcgaagaggaggaggagaaagaggaggagagaggcccccaatggaggctaggcgcccggaaacctggatcgtggaccggtgaagctgctgtatgcgcagattctgctcctgctgcccgggcgccccaagcgcttgctagagctagcggaagaggaggcagggtcgcccggagaggggccgaggaaagcggtccacctcactcaccctctcgtcgtgggtctgcaagccgtgctggaccaggtcgtgcgagtgaaaccatgaatttcctgctgagctgggtgcattggtctctcgctttgttgctgtatctccatcatgcgaaatggagccaagcagcccccatggccgagggcggcggccagaatcaccatgaagttgttaaatttatggacgtataccagcgatcttattgtcaccccattgaaaccctcgtggacatcttccaagaatatcctgatgaaatcgaatatatatttaaaccatcttgtgtgccactaatgagatgcggggggtgttgtaatgacgagggcctggaatgcgttcccactgaagaaagcaatattaccatgcaaataatgagaattaaaccacaccagggtcagcatatcggcgaaatgtccttcctccagcataataaatgcgagtgccgcccaaaaaaggaccgggcccgacaagagaaatgtgataaaccaagacgatag

SEQ ID NO: 5419 - RNA, 1116 nt, synthetic construct
  misc_feature 1..1116: note = source = /note="Description of Artificial Sequence: Synthetic coding sequence"
  source 1..1116: mol_type = other RNA
ctcaccgatagacagacagacactgcgccaagcccatcctaccacttacttccagggaggaggaggaccgtggatgcagccgcttccagaggacaagggccggaacccgctccaggcggcggtgttgagggggttggagcacgcggagtggctctcaagctttttgtacagctgttgggatgtagtcgattcggcggcgcggtcgtgagggctggtgaagctgaaccttcaggggcagcaagaagtgcttccagcggaagggaggagccacaacccgaggagggggaggaagaggaggaaaaagaagaggagcgcggaccacagtggaggcttggcgctcggaagcccggtagctggacaggggaagccgctgtatgcgccgattcagcccctgctgctagggctcctcaagcacttgcccgagcaagcggacggggaggaagagtggcccgcagaggagcggaagaatcaggaccacctcatagcccaagccgcagaggttctgcatcaagagctggaccgggcagagcttccgaaacaatgaactttctcctgtcctgggttcactggtcactagctctcctgctgtatctacatcacgcaaaatggtcacaggccgcccccatggcggaaggcggaggacagaaccaccacgaagttgtcaagttcatggacgtctatcagaggtcctattgtcacccaattgagactctcgtagatatatttcaagaatacccagatgaaatcgaatacatctttaagccttcttgcgtccctctgatgaggtgcggaggatgctgtaatgacgaggggctggagtgtgtgccgactgaggaaagcaatattacgatgcaaattatgagaattaaaccacaccagggacagcacattggagaaatgtcttttctgcagcataataaatgtgaatgtaggccgaagaaagaccgggcccggcaagagaacccatgtggcccctgctcagaaaggagaaagcacctgttcgtccaagatcctcagacatgcaaatgttcatgcaaaaacactgacagcagatgcaaggcgagacaactggagctgaatgaaagaacttgcaggtgcgataaacccagacgctag

SEQ ID NO: 5420 - RNA, 444 nt, synthetic construct
  misc_feature 1..444: note = source = /note="Description of Artificial Sequence: Synthetic coding sequence"
  source 1..444: mol_type = other RNA
atgaactttctgttgtcttgggtccactggtctttagcgctgcttctgtatctccaccatgcaaagtggtcgcaggctgcccctatggccgagggtgggggtcagaaccatcacgaggttgttaagttcatggatgtgtaccagagatcgtactgccatcctatcgaaacactggtggacatttttcaggagtaccctgatgagatcgagtacatctttaagcctagttgtgttccgttgatgaggtgcggaggatgctgtaacgatgagggactggaatgcgtacctactgaagaatccaatattactatgcaaataatgagaatcaaaccacatcagggccaacacattggcgaaatgagctttttacaacataacaagtgtgagtgcaggcctaagaaagacagggctcgccaggagaaatgtgacaagccacgacggtag

SEQ ID NO: 5421 - RNA, 1170 nt, synthetic construct
  misc_feature 1..1170: note = source = /note="Description of Artificial Sequence: Synthetic coding sequence"
  source 1..1170: mol_type = other RNA
ctaactgacagacaaaccgataccgctccatcaccatcttaccatctcctgcccgggcggagacgaaccgtggatgccgccgcttctagaggacaggggcctgagcctgcaccaggaggcggagtagaaggggtaggggctcgcggcgtggctctgaagttgtttgttcagctcctgggatgcagccggtttggtggtgccgtcgtgcgagcaggggaggccgaacctagtggagcagctcggagcgcgagtagtggaagagaagaaccccaacccgaagagggagaagaggaggaggagaaagaggaggaacgcggccctcagtggaggctgggcgcccggaagcctgggagctggaccggcgaagctgctgtatgtgccgattccgccccagcagctagagctccccaggccctggcaagggctagcggaaggggcggcagagtagcccggagaggagctgaagaatcaggcccaccccatagcccatcacgaagaggatccgcatcacgggcaggtcccggcagagcgtcagagaccatgaatttcctgttatcttgggttcactggagcttagccttgcttctttatctgcaccatgctaagtggagccaggccgcaccaatggctgaaggcggaggccagaatcaccacgaagtagtcaaattcatggacgtgtatcagcgctcctactgccacccaatcgagacgctggttgacatatttcaagagtatcctgatgaaatcgagtatatctttaaaccttcctgtgtacctctgatgcgctgcggcggatgttgtaatgatgaaggactggagtgcgttcctacagaggagtcaaacattactatgcagataatgaggattaaaccccaccaaggacagcacattggagaaatgtcttttttacaacacaataaatgcgaatgtagacccaagaaagatagagccagacaggaaaaaaaaagtgtcagaggtaagggcaagggccaaaaaaggaagaggaaaaagtctcgcccatgcggcccatgtagcgagcgtagaaagcacttgttcgtgcaggacccacagacttgtaagtgctcttgcaaaaatacagactcacgttgtaaggcccgacagctggaacttaacgagcgcacctgtcggtgtgacaagccccggagatag

SEQ ID NO: 5422 - RNA, 1065 nt, synthetic construct
  misc_feature 1..1065: note = source = /note="Description of Artificial Sequence: Synthetic coding sequence"
  source 1..1065: mol_type = other RNA
ctgaccgataggcaaacagacacggcccctagcccatcctatcacttgctgcctgggcgacggcgaactgttgacgcagcagcctcaagaggccaaggacccgaacctgcgcctggaggaggagtcgagggagtgggggcccggggagttgctctgaaacttttcgtgcagttgctgggatgtagccgatttggcggagctgtcgtgcgcgctggcgaggccgagcctagtggtgcagcgaggtcagctagttccggtagggaggaaccacaacctgaagagggagaagaggaagaggagaaagaagaagaacgcggcccacagtggcgcctcggggcaaggaagccgggcagctggactggagaagcagctgtgtgtgcagactctgcccctgctgcacgggcgccacaagctctggcccgcgcatccggacgaggcggaagagttgccaggaggggagcagaagaatccggccctccccacagtccttcccgaagaggaagcgccagtcgcgcaggacctgggcgagcctccgagactatgaacttcctgctcagctgggtccactggtcattagctttgctgctgtacctgcatcacgccaaatggagccaagcagcacctatggccgagggcggcggacaaaatcatcacgaagttgtaaagtttatggatgtatatcagaggtcctattgccacccgattgaaacactagtggatatctttcaggaataccctgatgaaatcgaatacatatttaaaccttcctgtgttccgctgatgcgctgcggcggatgttgtaatgacgaaggattagagtgtgtccctaccgaggagtccaatataaccatgcagatcatgaggataaagccccaccaagggcagcatatcggggaaatgagcttcctccagcataataaatgtgaatgcagaccaaagaaagacagggcgagacaggaaaatccatgcggcccctgcagtgaacgccgcaagcatctattcgtgcaggacccccagacgtgtaaatgtagctgtaagaataccgactcccgatgtaaaatgtag

SEQ ID NO: 5423 - RNA, 1188 nt, synthetic construct
  misc_feature 1..1188: note = source = /note="Description of Artificial Sequence: Synthetic coding sequence"
  source 1..1188: mol_type = other RNA
ctcaccgacagacagaccgacacagcaccgtcaccatcttaccatctgctgcccggtcgcagaaggacagtggacgcagccgcatctagagggcaagggcctgaaccagctcccggagggggtgtggagggcgtgggcgcgcgaggcgtggctctcaagctgttcgttcaattattgggatgtagccgctttggtggcgcagtcgtaagagcgggagaagccgagccttcgggcgccgcaagatccgcctcatcaggtagggaggagccgcaacccgaagagggagaagaagaggaagaaaaagaggaagaaagggggcctcaatggaggttgggggcccggaaacccggatcgtggactggggaggcagccgtgtgtgctgacagtgcgcctgccgctagggccccgcaagcactagctagagcgtcaggcagaggcggccgcgtagctagacggggtgccgaggagtctggacctccccatagcccttctcgacgaggtagcgcctcacgagccgggcccggaagagcttctgaaacaatgaattttctgctgtcttgggtacattggagcttggccttgctgctttacttacaccacgctaaatggagtcaggccgccccaatggcagaaggcggcggacagaatcaccatgaggtagttaagttcatggatgtctatcagaggagctattgtcatcccatcgagaccctggtcgatatttttcaagaataccccgacgagatcgaatatattttcaaaccttcatgcgttccccttatgaggtgcggagggtgctgtaacgacgagggcctcgagtgcgttccgaccgaagaaagcaatatcaccatgcaaatcatgagaatcaaaccccaccaaggccaacatataggagaaatgtccttcctgcagcacaacaagtgcgaatgtagaccgaagaaggaccgggcgaggcaggaaaagaaatccgtgagaggcaagggcaaaggacagaaaagaaagagaaaaaagagtcggtataaatcatggagcgtaccgtgcggaccttgtagcgagagaagaaagcacctgttcgtgcaggacccacaaacctgtaaatgctcctgcaagaacactgactcccgctgtaaggctagacagctggaactaaatgaaagaacatgtcgctgtgataaaccaagaagatag

SEQ ID NO: 5424 - RNA, 414 nt, synthetic construct
  misc_feature 1..414: note = source = /note="Description of Artificial Sequence: Synthetic coding sequence"
  source 1..414: mol_type = other RNA
atgaatttcctacttagttgggttcattggtccctggcgttgctgctgtatctacatcatgctaaatggtctcaggctgcacccatggccgagggtggaggacagaaccatcacgaagtcgtcaagtttatggacgtctaccagaggagttactgccatcccattgagacattagtcgatatcttccaggaatatcctgacgagatcgaatatatctttaaaccatcctgcgtcccacttatgcgctgcggcggctgttgtaacgacgagggtctcgaatgcgtacctaccgaggaatctaatattactatgcagatcatgagaattaagcctcatcaaggtcagcacatcggagagatgagtttcctgcagcataacaaatgtgagtgtagatgcgacaagcccagaagatag

SEQ ID NO: 5425 - RNA, 1116 nt, synthetic construct
  misc_feature 1..1116: note = source = /note="Description of Artificial Sequence: Synthetic coding sequence"
  source 1..1116: mol_type = other RNA
ctcacggaccggcagaccgacacagcaccgtccccgtcataccacttactgcccggtcggagaaggacagtagatgcagccgccagcagaggccaggggccagagcctgcacccggaggcggtgtagaaggggtgggagccagaggggtcgctttgaagctctttgtacagctacttggttgctcgagatttggaggcgcagtagtgagagccggtgaggcagaaccgtcgggcgctgcaaggagcgcttccagcggccgagaggagccccagccagaggagggtgaggaagaggaagaaaaagaggaagagcgggggccacagtggcgtttaggggctcggaaacccggttcttggaccggagaggctgctgtgtgtgccgattccgccccagctgctcgcgctccacaagcccttgccagggcttccggtcgcggaggacgagtcgccaggcggggagctgaagagtctgggccaccccactctcccagccgtagaggtagcgccagtcgagccggccctgggcgagcctctgagacaatgaattttctccttagttgggtgcactggtcactagcacttcttctgtatctgcatcacgcaaaatggagtcaggcagcaccaatggccgaaggcggcggacaaaaccaccacgaagtagtgaaattcatggacgtctatcagcgatcatattgccatcctatagaaacactggtcgacatttttcaagagtatccggatgaaatcgagtatatcttcaagccatcctgcgtgcccctgatgcggtgcggcggctgttgtaacgacgaaggtttggaatgtgtgcctacagaagagtccaacattaccatgcaaatcatgcgaatcaaacctcatcagggtcagcatattggagagatgagcttcctccagcacaacaagtgtgaatgccgcccaaaaaaggaccgagcccgtcaggaaaacccatgtgggccatgcagtgaacggagaaaacacctttttgtacaggaccctcagacatgtaaatgtagctgcaagaacacggattctcgatgcaaagcacgccaactcgagttgaatgagagaacatgcaggtccctgaccagaaaagactag

SEQ ID NO: 5426 - RNA, 630 nt, synthetic construct
  misc_feature 1..630: note = source = /note="Description of Artificial Sequence: Synthetic coding sequence"
  source 1..630: mol_type = other RNA
atgaactttctgctgagctgggtgcactggtcactcgcccttctgctgtatttacatcatgccaaatggtcccaggctgccccaatggccgaaggtggcgggcagaatcaccatgaagtagttaagtttatggacgtttaccagcgcagctattgccaccctattgaaactctggtcgatatcttccaggagtatccagatgagatcgaatacatcttcaagccttcctgcgtcccactcatgagatgcggcggctgttgcaatgacgagggcctggagtgcgtacctactgaagagtcgaacataacgatgcaaattatgagaataaaaccccaccagggccaacatatcggcgagatgagttttctgcagcacaataaatgcgagtgccgacctaagaaggaccgcgctaggcaggaaaaaaaatctgtcagaggcaaaggtaaaggacaaaaacgcaagagaaagaagagcagaccgtgcgggccgtgtagcgaaaggcgaaaacatttgtttgttcaggatccccagacctgtaagtgttcttgcaaaaacacagattcacgatgtaaggctcgccagctggaactgaatgagagaacgtgccgttgtgacaagccaagaagatag

SEQ ID NO: 5427 - RNA, 576 nt, synthetic construct
  misc_feature 1..576: note = source = /note="Description of Artificial Sequence: Synthetic coding sequence"
  source 1..576: mol_type = other RNA
atgaattttttattgtcctgggtgcactggtcccttgcgcttctgctgtatctgcatcacgcaaagtggtctcaggcggcacctatggcggagggtggaggacagaaccatcatgaagtggtcaagttcatggacgtataccaacgctcctattgccatccaatcgaaacgttggttgacatattccaagaatatcccgatgagatcgaatacatattcaaacctagctgtgttccattgatgagatgcggaggatgttgtaacgatgaaggccttgaatgcgtcccaaccgaagagtctaacattaccatgcaaatcatgcgaatcaaaccacatcaaggacaacatattggggaaatgagcttccttcagcacaataaatgcgaatgtcgcccaaagaaggatcgggctcggcaggaaaacccttgcggaccatgctccgaaaggcgtaagcatctttttgttcaggatccacagacgtgcaagtgttcctgtaaaaacacagacagcagatgtaaggcaagacaactggagctgaacgaacgaacctgtcggtctctcaccagaaaggactag

SEQ ID NO: 5428 - RNA, 972 nt, synthetic construct
  misc_feature 1..972: note = source = /note="Description of Artificial Sequence: Synthetic coding sequence"
  source 1..972: mol_type = other RNA
taacggggtcagggaccggaacctgctcctggcggaggagttgaaggagtgggtgcccggggagtggctttaaaactgttcgtgcagttgctcgggtgttccagattcggaggcgcggtggtgagagcgggcgaagcagaacctagtggcgcagcccggagtgcttctagcggccgtgaggaaccacaaccagaggaaggcgaagaggaggaagaaaaggaggaagagagaggcccccagtggaggctaggcgcacgcaaaccaggaagttggaccggtgaagccgccgtttgcgcagactcggctcctgctgccagggcgccacaggcattagcacgtgcttctggcagaggagggagggtcgcacgcaggggcgccgaagagtctggaccaccccactctccttctcgaagaggtagtgcgagccgggccggacctggacgtgccagcgaaactatgaacttcttactttcttgggtgcactggagcctggccctcctgctctacctccatcacgctaagtggtcccaagccgcacccatggcggagggcggcggacagaatcatcacgaagtggtcaagtttatggacgtgtatcaacgtagctattgccacccaatagagacactggtcgatattttccaagagtaccctgatgaaattgaatatatcttcaaaccaagttgtgtgccactcatgcgatgcgggggctgttgtaacgacgaggggctcgagtgtgtccccacagaagagtcgaatatcaccatgcaaattatgagaattaagcctcaccagggacaacacattggtgagatgtcttttcttcagcataataaatgtgaatgtcgccctaaaaaagaccgagccaggcaggaaaagaagagcgtacgaggcaagggaaaaggtcaaaagaggaagcgcaaaaaaagtaggtacaagagttggagtgtgtgtgataaaccacggcgatag

SEQ ID NO: 5429 - RNA, 648 nt, synthetic construct
  misc_feature 1..648: note = source = /note="Description of Artificial Sequence: Synthetic coding sequence"
  source 1..648: mol_type = other RNA
atgaacttcctgcttagctgggttcactggtcccttgccttattgctttatctgcaccatgctaagtggtcacaggctgcacccatggctgagggaggcgggcagaatcaccatgaggtggtgaaatttatggacgtgtatcagcgatcctattgccaccctatcgaaacactggtcgatatcttccaagagtaccccgatgaaatcgaatatatttttaaaccatcttgcgtcccgttaatgcggtgcgggggctgctgcaacgacgagggtctggaatgtgttcctacagaagagagtaatatcaccatgcaaattatgagaatcaaaccacaccaaggtcagcacattggcgagatgtccttcttacaacacaataagtgcgaatgtcgccccaaaaaagatcgagctaggcaggagaagaagagtgtcagaggtaaaggaaagggtcagaaaagaaaaagaaagaagtctcgatataaaagttggtcagtaccctgtggcccatgttcggagaggagaaagcacctgttcgtccaggatccacagacatgtaagtgtagctgcaagaatacagactccagatgcaaagcccggcagctggaactcaatgagcgaacatgtaggtgcgacaaaccgcgtagatag

SEQ ID NO: 5430 - RNA, 525 nt, synthetic construct
  misc_feature 1..525: note = source = /note="Description of Artificial Sequence: Synthetic coding sequence"
  source 1..525: mol_type = other RNA
atgaattttctcctgagttgggttcattggtcgctcgcactgcttttatacttacatcatgcaaagtggtcgcaggctgctccaatggccgaggggggtggacagaaccatcatgaagtggtcaagttcatggatgtgtatcagcgctcctattgtcatcctattgaaactctggtagacatattccaggaataccccgatgagatcgagtatatctttaaaccaagctgtgttccgctgatgagatgtggtggctgctgcaacgatgaaggattggaatgtgtacctactgaagagtcaaatatcactatgcagatcatgcgaattaaacctcaccaggggcagcacattggcgagatgtcatttctgcagcacaataaatgcgagtgtcggccaaaaaaagacagagccagacaggaaaatccttgcggcccgtgttctgaacggcgcaaacacctcttcgtccaagatccccagacctgcaaatgtagctgtaaaaacacggattcacgatgcaaaatgtag

SEQ ID NO: 5431 - RNA, 699 nt, synthetic construct
  misc_feature 1..699: note = source = /note="Description of Artificial Sequence: Synthetic coding sequence"
  source 1..699: mol_type = other RNA
atgaacttcctgttgagttgggtgcattggagcctggctctgcttttgtacctgcatcatgcgaaatggtcacaggcggcgcctatggcagaagggggagggcagaatcaccacgaagtagtcaaatttatggacgtttatcagagatcatactgtcaccctattgagacacttgtggatatctttcaggagtatcccgacgaaatcgagtacatattcaaaccttcttgtgtcccactgatgagatgtggggggtgttgtaacgatgagggcctggagtgcgtgccaaccgaagagtccaatattacaatgcagataatgagaatcaaaccccaccagggtcaacatattggcgaaatgtcttttctccaacacaataaatgcgaatgcaggcctaagaaagatagggcgcgccaagaaaaaaagtcagtcagaggaaagggaaaagggcagaagagaaagagaaagaaaagccgttacaaatcttggagtgtctacgtgggggcgcggtgctgccttatgccatggagcctccctggacctcatccctgcggtccctgtagcgaaagacgcaagcacctgtttgttcaggacccccaaacatgtaaatgtagctgcaaaaacaccgattcacgatgtaaagcgagacaacttgaactgaacgagagaacgtgtagatgtgacaaacctaggagatag

SEQ ID NO: 5432 - RNA, 576 nt, synthetic construct
  misc_feature 1..576: note = source = /note="Description of Artificial Sequence: Synthetic coding sequence"
  source 1..576: mol_type = other RNA
atgaactttctcttaagctgggtgcactggagcctggccctcctcctgtatctacatcacgctaaatggagtcaagctgctccgatggccgagggcggcggacagaatcatcacgaagtggtcaagttcatggacgtctaccagcgctcttactgtcacccaatcgagacacttgttgacatctttcaggaatatccagatgaaattgaatatatatttaagccaagttgcgtgccattgatgcggtgtggaggctgctgtaatgacgaggggttggaatgcgtgccaactgaagagtccaatattacaatgcagatcatgcgcataaagccccatcagggtcaacacattggagagatgagtttcctgcagcacaacaaatgcgagtgccggcccaagaaagatagagctaggcaggagaacccatgcggcccttgctccgaaagaaggaagcacctgttcgtccaggatccacagacttgcaaatgctcttgcaaaaatacagacagtcgatgtaaagcgaggcaacttgaactgaacgaacggacctgtcgatgcgacaaacccagaagatag

SEQ ID NO: 5433 - DNA, 1179 bp, synthetic construct
  misc_feature 1..1179: note = source = /note="Description of Artificial Sequence: Synthetic coding sequence"
  source 1..1179: mol_type = other DNA
atgaccacgtactctgataagggggcaaaacctgagcgggggcggttcctccatttccactctgtgactttttgggttggtaacgcaaagcaggccgctagcttctattgttcaaaaatgggtttcgaacccctcgcctatcggggtctggaaacgggctcccgggaggttgtctcccacgtcataaagcaggggaagattgtctttgtgttatcaagcgccttaaatccttggaacaaggagatgggtgatcacctcgtaaagcacggggatggagttaaggatattgcgttcgaggtcgaagactgcgactacatcgtgcaaaaggcacgggagagaggggccaagatcatgagagagccgtgggtcgaacaggacaagtttggcaaggtgaaattcgctgtgttgcagacgtatggtgacactacccatacccttgtcgagaagatgaactatatcgggcagtttctcccaggatacgaagcacccgccttcatggacccgctgctgccaaaactgcccaagtgcagcttggagatgatcgatcacatcgtgggcaatcaaccagaccaggagatggtgagtgccagcgagtggtacttgaagaacctgcagttccataggttctggtccgtggatgacacccaggtgcatactgaatatagttctcttaggtcaatcgtggtggccaactatgaggagtccattaagatgcccatcaatgaacctgcccccggaaaaaagaagagccaaatacaagagtacgtcgactacaatggtggcgcaggagttcagcatatagcgcttaagaccgaggatatcattaccgccatccggcacctgagagaacgcggccttgaattcttatctgttccttctacctactacaaacagttacgcgagaagctcaagaccgctaaaataaaggtgaaggagaacatcgacgccctggaagaactcaagattctcgtcgattacgacgaaaaggggtaccttctgcagattttcactaagcccgttcaggatcgtcctactctgttcctcgaagtcatacagcggcataaccatcaggggtttggagctggaaacttcaacagtttattcaaagcgttcgaagaagagcaaaacctgaggggcaatcttactaacatggaaactaatggagtggtcccaggtatg

SEQ ID NO: 5434 - DNA, 1179 bp, synthetic construct
  misc_feature 1..1179: note = source = /note="Description of Artificial Sequence: Synthetic coding sequence"
  source 1..1179: mol_type = other DNA
atgacgacttattccgataaaggcgccaaacctgagagaggtcggttcctgcactttcacagcgtgactttctgggtcgggaatgctaagcaggccgcaagcttctattgttctaaaatggggttcgaacccttggcatataggggtctggaaacaggttctcgcgaggtggtttcccacgtcattaagcaagggaaaatcgttttcgtcctgagtagcgcccttaacccctggaataaagagatgggcgatcacctggtcaagcacggagatggcgtcaaggacattgctttcgaagtggaagactgtgattacatagtacagaaggcccgcgaacgtggcgcaaaaatcatgagagagccgtgggtggaacaggacaagtttggaaaagtgaagttcgcggttctacagacctatggcgacaccacacatactctggtggagaagatgaactacattgggcagtttttgccgggatatgaggcaccggcttttatggatccattattgcccaagctgcctaaatgctcactggaaatgattgatcacattgtggggaatcaacccgatcaggagatggtgtcagcctctgaatggtacttgaagaatctccagttccataggttttggtccgtcgacgatacacaggttcacaccgagtactcctccctccggagtattgtggtggccaactacgaagaatcaatcaagatgcctatcaacgaaccagcgcccggaaaaaagaagagccagattcaggagtacgtggattacaatggaggtgcaggagtacagcacatagccctcaaaactgaggatattataaccgccatacggcacctgcgtgaacgcggcctagaatttctgtcggtgccgtctacttactataagcaacttagggagaaactgaaaacagcaaagattaaggtgaaagagaatatcgacgctttagaggagttgaagatcctggttgactacgatgagaagggctacctcttacagatattcactaagcccgtacaggatcgccccacactctttctggaggttattcaaagacataatcatcagggctttggcgcaggcaactttaatagtctgtttaaggccttcgaagaggaacagaatcttcggggcaacctgacaaatatggagactaacggcgtcgtgcccggaatg

SEQ ID NO: 5435 - DNA, 1179 bp, synthetic construct
  misc_feature 1..1179: note = source = /note="Description of Artificial Sequence: Synthetic coding sequence"
  source 1..1179: mol_type = other DNA
atgaccacctactccgataagggcgcaaagccagagcgaggacgcttcttgcatttccattcagttactttttgggtggggaacgctaaacaggccgcttcgttctactgcagcaaaatgggcttcgaacctctggcatatcgcggccttgaaaccgggagcagagaagtggtgtcacacgtcatcaagcaaggaaagatcgtgttcgtcctcagctctgctcttaatccctggaataaggagatgggagatcacctggtcaagcacggcgacggagtgaaagatatcgctttcgaggtggaggactgcgactacattgtgcagaaagcgagagagcgcggtgccaagattatgagggagccatgggtcgaacaggacaaattcggaaaggtcaagttcgccgtgctgcagacttacggcgatactacccataccctcgtcgaaaagatgaactacatcggacaattcctgcctggatacgaggcccctgcctttatggaccctctgctgcctaagctgccgaagtgttcacttgaaatgattgatcatatcgtagggaatcagccggatcaggaaatggtgtccgcctcagaatggtacctgaaaaacctgcagttccaccggttttggagcgtggatgatacccaggtccacactgagtactcgtcgcttagaagcatcgtcgtggcaaattacgaagaatcaatcaagatgccaatcaacgagcctgctcccggtaaaaagaagtcgcagatccaggaatatgtcgattacaacggaggagcgggagtgcagcatatcgccctgaaaaccgaggacataatcacggccatccgccacctgcgggagcgggggttggaattcctgagcgtgccatccacttactacaagcagctgcgggaaaagctcaagactgccaagatcaaggtgaaagagaacattgatgccctggaagagttgaagatactggtcgattacgacgagaagggatacctgctgcagatcttcactaagcctgtgcaggacagaccaacccttttcctcgaagtgatccagcgccataatcaccagggatttggagcgggaaatttcaactcactgttcaaggcttttgaggaagaacagaatctccggggaaacctgaccaatatggaaaccaacggagtggtgccgggcatg

SEQ ID NO: 5436 - DNA, 1179 bp, synthetic construct
  misc_feature 1..1179: note = source = /note="Description of Artificial Sequence: Synthetic coding sequence"
  source 1..1179: mol_type = other DNA
atgaccacctacagtgacaagggtgccaaaccggagagaggcaggttcctccactttcactctgtgaccttttgggtggggaacgccaagcaggctgctagcttttattgctccaagatgggatttgagccattagcgtatcgcggcctggaaaccgggagcagagaggtggtttcacacgtcatcaagcaaggcaaaatagtcttcgtcctctccagcgcacttaacccctggaacaaggaaatgggggatcacctggtgaagcatggcgacggagtcaaggatatagcctttgaggttgaagattgtgattacattgtgcagaaagcaagggagagaggcgcaaagatcatgcgggagccttgggtcgagcaggacaagttcggcaaagttaagtttgccgtccttcaaacatatggcgacacaactcacaccctggtggagaaaatgaactatatcggacaattcctacctggatatgaggcgccagccttcatggatccgctcttacccaaactgcctaagtgcagcttagaaatgatcgaccacattgtcggaaatcagcctgaccaggaaatggtttccgctagtgaatggtacctcaaaaacctgcagtttcatcgtttctggtctgtggacgatacccaagttcatacggagtatagctcattgaggagtattgtggtggccaactatgaggaaagcatcaaaatgccaatcaacgagcccgcacctggcaaaaaaaagagccagatccaggagtacgtggattacaacggaggcgcaggagtgcagcacattgctctcaagacagaagatatcataaccgcaataagacacctgagagaaaggggcctggagttcttgtctgtgcctagcacatactataagcaactcagggagaaactgaagaccgctaagatcaaggtgaaggaaaacatcgacgctttagaggaacttaaaattctcgttgactacgatgaaaagggctatttgctgcagatctttacaaagcctgtccaggatagacctacactgttccttgaagtgatccagaggcataaccaccagggatttggcgcgggcaacttcaatagcctgtttaaagccttcgaggaggagcaaaaccttcgcggaaacctgaccaacatggaaacaaacggcgtcgtgcccggcatg

SEQ ID NO: 5437 - DNA, 1179 bp, synthetic construct
  misc_feature 1..1179: note = source = /note="Description of Artificial Sequence: Synthetic coding sequence"
  source 1..1179: mol_type = other DNA
atgaccacttattcagataaaggagcaaagccggagagagggagattcctgcacttccactcagtgaccttctgggtgggaaatgcgaagcaagccgcgtccttctattgctcaaagatgggatttgaaccgctggcctaccgcggactggagactggttcgagggaggtcgtgtcgcacgtcatcaagcagggtaagatcgtgttcgtcctcagctcggccctgaatccgtggaacaaagagatgggggatcatcttgtgaagcacggagacggagtcaaggacatcgcattcgaggtggaggactgtgactacatcgtgcagaaagcaagggagcggggtgcaaaaatcatgcgggaaccttgggtcgagcaagacaagttcggcaaggtcaagtttgcagtgttgcaaacctacggcgatactacccacacgcttgtggagaagatgaattacatcggacagttcctcccgggatacgaagcaccggccttcatggatcccctgctgccaaagctcccgaagtgcagccttgagatgatcgaccacatcgtgggaaaccaaccagatcaggagatggtgtctgcctcagaatggtacttgaaaaacctccagttccatcgcttctggtcggttgacgacacgcaagtgcacacggagtacagctcgctgcgcagcatcgtggtcgcgaattacgaggagtcaattaagatgcccatcaacgaaccggctccaggcaaaaagaagtcacagatccaggaatacgtcgactacaacggaggcgccggtgtccagcatatcgctctgaaaaccgaagatatcatcacggctatccggcatctgcgcgaaagaggtctggaattcctttcggtcccctcaacttactacaagcagctgcgagaaaaacttaagacggcaaagattaaggttaaggaaaacatcgacgctctcgaagaactcaaaattctggtggattacgatgaaaagggataccttctgcagattttcaccaaaccagttcaagatagacctaccctgttcttggaagtcatccaacgccataatcaccagggctttggagccggcaactttaactccctcttcaaggcgtttgaagaggagcaaaacctgcgcgggaacctcactaacatggaaacgaacggagtggtgccaggcatg

SEQ ID NO: 5438 - DNA, 1179 bp, synthetic construct
  misc_feature 1..1179: note = source = /note="Description of Artificial Sequence: Synthetic coding sequence"
  source 1..1179: mol_type = other DNA
atgactacctattcggacaagggggcaaagccagaaagggggcgctttttgcattttcactccgtgactttttgggtcggtaatgcaaagcaagccgcatccttttactgctccaagatgggttttgagccccttgcgtacaggggtcttgaaactggaagccgtgaggtggtcagccacgtgattaagcagggtaagattgtgttcgtgctgagctccgcccttaacccttggaataaggagatgggcgatcacctggtgaagcatggagatggagtcaaggatattgcatttgaagtggaagattgtgattacattgtccagaaggcgcgtgaaagaggtgcgaagatcatgagagaaccttgggtggaacaagacaagtttggaaaggtcaaatttgcggtgctgcaaacctacggtgataccactcatacccttgtggaaaagatgaattacattggacagtttctgcctggctacgaagcacccgctttcatggatcccctgctgccaaagctcccgaagtgcagccttgaaatgatagatcatattgtgggaaatcaaccagatcaggaaatggtgtcagcttcggaatggtacctgaaaaacctgcaattccataggttctggagcgtggatgatactcaagtgcataccgaatactcgtcgcttcgttccatagtggtggcgaactatgaagaatcaatcaagatgccaatcaacgagccagcacccggaaagaagaagtcacagattcaagaatacgtcgactacaacggaggtgcaggagtgcaacatattgcactcaagactgaggatatcatcaccgccataaggcacttgagagaacgcggactggagttcctgtccgtgccctcgacttactacaagcagctgagagaaaaacttaaaaccgcaaagatcaaggtgaaggagaatatagatgcacttgaggaactgaagattctggttgattacgacgaaaaggggtatcttctgcaaatcttcactaaacccgtccaagatagacccaccctgtttcttgaagtgattcagcgacataatcatcaaggcttcggtgccggaaatttcaactccctgttcaaagcattcgaggaggagcagaacctccggggaaacttgaccaacatggaaactaacggtgtcgtccctgggatg

SEQ ID NO: 5439 - DNA, 1179 bp, synthetic construct
  misc_feature 1..1179: note = source = /note="Description of Artificial Sequence: Synthetic coding sequence"
  source 1..1179: mol_type = other DNA
atgaccacgtactccgataagggagcaaaaccagagagggggcgcttccttcactttcattcagtgaccttctgggtgggaaacgcaaagcaagcagcatcgttctattgcagcaagatgggctttgaaccactcgcgtacaggggtttggagactggttcacgggaagtcgtgtcgcatgtgataaagcagggtaaaatcgtctttgtgctttcctcagcattgaacccttggaataaagagatgggtgaccacctcgtgaagcatggtgatggtgtgaaggatattgcatttgaagtcgaggactgtgattacatcgtgcagaaggcaagagagcgcggggcgaagattatgagagaaccatgggtcgagcaggacaagtttggaaaggtgaagtttgcagtccttcaaacttacggggatactactcataccctcgtggaaaagatgaactacattggtcaatttctgcccgggtacgaagcacctgcatttatggatccactgctcccgaagctgcctaagtgctctctggaaatgatagaccatattgttggtaaccagccagatcaagagatggtgtcggcttccgagtggtacttgaagaatttgcaattccatcgattttggagcgtggatgatactcaagtccataccgaatactcatcgctgagatccattgtggtggcaaactacgaagagagcatcaagatgcctataaacgaacccgctcctggaaagaagaagtcacaaatacaggaatacgtggactacaatggaggtgcaggcgtgcaacacattgcacttaaaacggaagatatcatcacggcaatacggcatcttagggagcggggactggagtttttgagcgtgccatcgacctactacaagcagctgcgggaaaaactgaaaaccgccaagatcaaggtgaaggaaaacatcgatgctctggaggaactgaagattcttgtcgactacgatgaaaagggatatctgctgcagatattcacgaaacccgtccaggatagaccaaccctgttccttgaggtcattcagaggcacaatcatcagggattcggagcaggtaacttcaactcgcttttcaaggctttcgaagaggaacaaaatcttagagggaatcttactaatatggaaaccaacggtgtagtgccaggaatg

SEQ ID NO: 5440 - DNA, 1179 bp, synthetic construct
  misc_feature 1..1179: note = source = /note="Description of Artificial Sequence: Synthetic coding sequence"
  source 1..1179: mol_type = other DNA
atgacaacttattctgataaaggggcaaagcctgaacgcggacgcttcctccattttcactcagtcacattttgggtggggaacgccaaacaggccgctagtttctattgttccaaaatggggttcgaaccattagcctaccgcgggctcgaaacagggtcaagggaggtcgtctcccatgtaatcaaacaggggaaaatcgtatttgtccttagttctgcacttaatccttggaacaaagagatgggggatcatctcgtcaaacatggggacggagtgaaggacatagcatttgaggttgaagattgtgattacatcgttcagaaagctcgcgaacgaggggccaaaattatgcgagaaccctgggtggaacaggacaaatttgggaaggtcaaattcgccgtcctccagacgtatggggacacaacacatacattggtggaaaagatgaattatattggacagttccttccaggatatgaggctccagctttcatggatcccctactgccaaaactccccaaatgttctcttgaaatgatcgatcatatcgtggggaaccagccagatcaggaaatggtgtcagctagtgagtggtatctcaagaatctccagttccacagattctggtctgtggatgacacacaggtccatactgaatacagttccctgcggtctatcgtagtggcaaattatgaagaatccattaaaatgcctattaacgaaccagcacccggaaaaaaaaaatcccagatccaggagtatgtcgattataacggaggggcaggagtccagcacatagcacttaaaacagaagatatcatcactgcaataagacaccttagagaacgaggacttgaattcctctctgtaccctccacttattataaacaactcagggaaaaactcaaaacagccaagatcaaggttaaagagaatatagatgccctagaagaactcaaaattctagtcgactatgatgaaaaaggatatctgttacagatatttacaaaacctgtgcaagatcggcctacactttttttggaggtaatacagcgtcataaccaccagggatttggagcagggaattttaatagtctgtttaaggcttttgaagaagaacagaacctccgcggaaacctcacaaacatggaaactaatggagtcgtcccagggatg

SEQ ID NO: 5441 - DNA, 1179 bp, synthetic construct
  misc_feature 1..1179: note = source = /note="Description of Artificial Sequence: Synthetic coding sequence"
  source 1..1179: mol_type = other DNA
atgactacgtattctgacaagggcgccaaacctgaaaggggaaggtttttgcacttccattccgtcactttttgggtgggtaatgctaagcaggcggcctcattctattgttcaaaaatgggctttgagcctctggcatacagaggtctggaaacgggaagtcgagaagtagtctctcacgtaatcaaacaggggaaaattgtgttcgtcctcagctctgctcttaatccttggaataaggaaatgggcgatcacctggtgaaacatggtgacggggtcaaggatatcgcttttgaggttgaggattgtgactatattgtgcagaaagcacgggaaaggggcgccaaaattatgcgtgaaccgtgggtcgagcaagataagttcggcaaggtgaagtttgcagtcctgcagacctacggtgacaccacccacactcttgttgaaaaaatgaactatatagggcaattcttacccggctacgaagcccccgcctttatggatcccctgcttccaaagctgcctaaatgctctcttgagatgattgaccacatagtgggtaaccagccagaccaggagatggtcagcgcgtccgaatggtaccttaagaacctccaatttcatcgattttggtctgtggacgatacacaggtgcacacagaatatagttccctgcgctcaatcgtagtggccaattacgaggagtcaattaagatgccaattaatgaaccagcaccaggaaagaaaaagtctcagattcaggaatacgtggactataatggcggagcaggagtgcagcatattgccctgaagacagaagacatcatcaccgcgatcaggcatctacgagagagaggtctggaattcttgtcagtgccatccacctattacaagcagttaagagaaaagttaaagaccgctaagattaaggtgaaggaaaatatcgatgcactggaagagctcaaaatcctagtggattatgacgaaaagggctacctcttgcagatcttcaccaagcccgttcaggatcgaccgactttattccttgaggttatccaacgccacaatcaccagggctttggagccggaaacttcaattctctgttcaaagcatttgaggaggagcagaatctccggggcaatctgacaaacatggagactaacggggtcgttcccgggatg

SEQ ID NO: 5442 - DNA, 1179 bp, synthetic construct
  misc_feature 1..1179: note = source = /note="Description of Artificial Sequence: Synthetic coding sequence"
  source 1..1179: mol_type = other DNA
atgaccacttactcagataaaggagccaaacctgaaaggggaagattccttcactttcactcagttactttttgggtcggaaacgcgaagcaggccgcatccttttactgctctaaaatggggtttgaacctctcgcctatcgaggtcttgagactgggagtcgggaggtcgtctcacatgttatcaagcaaggcaaaattgtcttcgttctaagcagtgctctgaacccttggaataaagagatgggggatcatttggtgaagcacggtgacggggtgaaagatatcgcttttgaagtcgaagattgtgactacattgtgcagaaggcccgggagcgcggagctaagataatgcgagaaccatgggtggagcaggacaagtttggcaaagtcaagttcgcggtgttacagacttacggggatacgacccacacactggtagagaaaatgaactatatcggtcagttccttcctgggtacgaggccccggctttcatggatccgctactgcccaagctgccaaagtgtagtctggaaatgatcgatcatattgttggaaatcagccagatcaagagatggttagcgcaagtgagtggtacctcaagaacctgcagttccatcgcttctggtccgtggacgacacccaggtgcatacagagtactcttctctgaggtccatagtcgttgctaactacgaggagtctatcaaaatgcccattaacgaaccagcccccggcaagaaaaaaagccagatccaggagtacgtcgattacaacggaggcgcaggtgtccagcatattgctctgaagacagaggatattattaccgccatcaggcacctgcgagagcgtggcctcgagttcctatccgtgccatctacctactacaagcaactgagagagaagctgaagaccgcgaaaatcaaggtcaaggagaatattgatgcccttgaagagctcaagattcttgtggactatgatgagaagggctatctcctgcagatattcacaaagccggtccaggatcgccccaccctatttcttgaagtgattcagaggcacaatcaccagggcttcggagcaggcaactttaactctctcttcaaggcattcgaggaggaacagaacttgcggggcaatctgaccaacatggaaacaaatggggtggtgcccgggatg

SEQ ID NO: 5443 - DNA, 1179 bp, synthetic construct
  misc_feature 1..1179: note = source = /note="Description of Artificial Sequence: Synthetic coding sequence"
  source 1..1179: mol_type = other DNA
atgactacttactccgacaagggcgccaagccggagcggggccggttccttcattttcacagcgtcaccttctgggtgggcaacgcaaaacaggccgcttccttctactgctccaagatgggattcgaaccgctggcgtatagaggacttgaaaccggatccagggaggtcgtgtcccacgtgatcaagcagggtaagatcgtctttgtcctcagttcagctctcaatccttggaacaaggagatgggtgaccacctggtcaagcacggcgatggtgtcaaagacatcgcctttgaagtggaagattgcgactacattgtgcagaaagcgcgcgagcgcggtgcaaagatcatgcgcgaaccgtgggtggaacaggacaaattcggaaaggtgaaattcgcggtcctccaaacctacggcgacactacccacaccttggtggaaaagatgaactacatcggccagttccttccggggtacgaggcgccggccttcatggatcccctcctgccaaagttgccaaaatgttcgctggaaatgatcgaccacatcgtgggaaaccagcccgaccaagagatggtttcagcctcagaatggtacctgaagaacctgcaattccatcgcttctggtctgtggacgatacccaagtgcatactgagtactcgagcttgagatcgatcgtggtggcaaattacgaggagtcaatcaagatgccaattaacgaaccagcccctggaaagaagaaatcgcagatccaggagtacgtggattacaatggaggggctggagtgcaacatattgcgctgaaaaccgaagatatcatcacggccatccggcacctccgggaacgaggactggaattcctgtcggtgcctagcacttactacaagcaactgcgcgaaaagctcaaaaccgccaagatcaaggttaaagaaaacattgatgccctggaggaactgaagatcctcgtcgactatgacgagaagggatacctgctgcagatattcactaagcccgtacaggatcggccgaccctgtttctggaagtgatccagagacataaccaccaaggattcggggcaggaaatttcaatagcctctttaaggcttttgaggaggaacagaacttgaggggaaatctcacgaacatggagactaacggcgtcgtgccggggatg

SEQ ID NO: 5444 - DNA, 1179 bp, synthetic construct; identical to SEQ ID NO: 5441
  misc_feature 1..1179: note = source = /note="Description of Artificial Sequence: Synthetic coding sequence"
  source 1..1179: mol_type = other DNA

SEQ ID NO: 5445 - DNA, 1179 bp, synthetic construct
  misc_feature 1..1179: note = source = /note="Description of Artificial Sequence: Synthetic coding sequence"
  source 1..1179: mol_type = other DNA
atgaccacatacagcgacaagggggctaagccggagagggggcggttccttcactttcatagcgtcacgttctgggttgggaatgccaagcaggcggcttcgttttactgcagtaagatggggtttgaacccctcgcctaccgaggcttggagacaggatcccgggaagtggtgtcacatgtgattaagcagggcaagatcgtctttgtgctttccagcgccctgaacccatggaataaagagatgggagaccacctggtgaagcacggggacggcgttaaggacatagcctttgaggttgaggactgcgactatatcgtgcaaaaggcgagggagaggggggcaaagatcatgcgggagccctgggtggagcaggacaagtttgggaaagtgaagttcgctgtgctacagacttacggcgatacaacccataccctggtagagaaaatgaactatattggacaatttttacccggatatgaagctcccgccttcatggaccccctccttcccaaacttccaaaatgctcactagagatgattgatcatattgttggtaatcagcctgaccaagagatggtatctgcaagtgaatggtatctgaaaaatctgcagttccatcggttttggtcagtcgatgacacccaggtacacaccgaatactccagtctccggagcattgtggtggccaactacgaggaatctatcaaaatgcctataaacgagccggctcctggcaaaaagaagagccaaatacaggagtacgtggactataacgggggagcgggggtacagcacattgctttaaaaaccgaggatatcatcacagccattaggcacctgcgggagagaggccttgaatttctctctgttcccagtacctactataaacaactgcgggagaaactgaaaactgccaaaattaaggtgaaggagaacatcgacgcactggaagaacttaaaatcctggttgattatgacgaaaagggctatttgcttcagatcttcactaagcccgttcaggatcgcccaacactgtttttggaggtgatccagagacataaccatcaaggctttggagctggaaattttaacagccttttcaaggcctttgaggaggagcagaacctgaggggcaacctgacgaacatggagacaaacggggtcgtgccagggatg

SEQ ID NO: 5446 - DNA, 1179 bp, synthetic construct
  misc_feature 1..1179: note = source = /note="Description of Artificial Sequence: Synthetic coding sequence"
  source 1..1179: mol_type = other DNA
atgacaacctatagcgacaaaggcgcgaagcccgagagggggaggttcctccatttccatagcgtgacattttgggtcggtaacgcgaagcaggcggccagcttctactgttcaaagatgggtttcgagcccctggcctaccgggggctggagacaggttcaagagaagtggttagccatgtcatcaaacagggaaaaatcgtgttcgtattgagtagcgctctcaatccatggaacaaagaaatgggcgaccacctcgtcaagcacggagatggagtgaaggatatagcttttgaggttgaagattgtgattacatcgtgcagaaggcaagagaacgaggggcaaaaattatgagggaaccttgggtggagcaggataaattcggaaaggtgaagtttgcggtgctccagacatatggagatacaacccatactctggtggagaagatgaattacatcggacagtttttgcccggctacgaggcacctgccttcatggacccactgttgccaaaactgcccaaatgcagtctggagatgatcgaccatattgtgggtaaccaacctgaccaggagatggttagcgccagcgaatggtatcttaagaatctccagttccataggttttggagcgtcgacgacacacaggtgcacaccgagtattctagtctgaggtctattgttgttgccaactatgaggagagcattaaaatgcctatcaacgagccagcgcctgggaagaagaagagccaaatccaggagtacgtagactacaatggcggggccggagtccagcacatcgccctgaagaccgaagatatcatcacagcaatacgccatctgcgggagaggggtctggagtttctctccgtccccagcacatactataagcagctccgcgagaaattgaagaccgctaagatcaaagtgaaggagaacatcgacgccctggaggaattgaaaattctggtcgattacgacgaaaaggggtacttgctgcaaatatttaccaaaccagttcaggaccgcccaaccctgttcctcgaagtgattcagcggcataaccaccaagggtttggcgccggtaacttcaactcattgttcaaggccttcgaggaggagcagaatctgcgggggaatttgacgaacatggagacaaacggcgtcgtacccggtatg

SEQ ID NO: 5447 - DNA, 1179 bp, synthetic construct
  misc_feature 1..1179: note = source = /note="Description of Artificial Sequence: Synthetic coding sequence"
  source 1..1179: mol_type = other DNA
atgaccacctactcggataagggagcaaagccagagagaggtcgctttctgcattttcactccgtcaccttttgggtcggaaatgcaaagcaggccgcatcgttctactgctcgaaaatgggctttgaacctctggcgtacaggggactggagactggcagccgggaggtcgtgtcgcacgtcattaagcaaggaaagattgtgttcgtgctttcctcggccctcaacccctggaataaggaaatgggtgaccaccttgtgaagcacggggatggggtgaaggatattgcatttgaggtggaggattgtgactacatcgtgcagaaggcgagagaacgcggggccaagattatgagagaaccttgggtggaacaagacaagtttggcaaagtgaagtttgctgtgctgcaaacttatggcgatactactcacactcttgtggagaagatgaattacatcggtcagttcctgcctggctacgaagcacccgcctttatggatccactccttcccaagctccctaaatgttccctcgaaatgatagaccatatagtgggaaaccagccagaccaggagatggtgagcgcaagcgaatggtatctgaaaaatctgcagttccaccgcttttggtccgtggacgatacccaagtgcacaccgaatactcaagcctccgatccattgtcgtggcaaactacgaagaaagcattaagatgcctatcaacgagccggccccagggaagaagaaatctcaaattcaagaatacgtggattacaacggaggcgctggggtgcaacatattgcactcaagaccgaggatatcatcaccgccattcgccacctcagggaaagaggattggaatttctgtctgtcccctcgacctactacaaacagcttagagaaaagctgaaaacggcaaagatcaaggtcaaggagaatatcgacgcactcgaagaactcaagatcctggtcgattatgatgagaagggttacctgctgcagattttcactaagcctgtccaagatcgaccaacgctgtttcttgaagtcattcagagacataaccatcaaggcttcggtgccggaaacttcaacagcctctttaaggcattcgaggaggaacagaaccttcgtggcaatctcaccaatatggaaactaacggtgtcgtgccaggaatg

SEQ ID NO: 5448 - DNA, 1179 bp, synthetic construct
  misc_feature 1..1179: note = source = /note="Description of Artificial Sequence: Synthetic coding sequence"
  source 1..1179: mol_type = other DNA
atgactacctactcagataagggggctaagcccgaacgaggaagatttctgcattttcactccgtgaccttctgggtgggaaatgccaagcaggcagcatcgttttactgttccaagatggggtttgaacctttggcttacaggggtcttgagacgggatcgcgcgaggtggtgtcgcatgtcatcaaacaaggtaagatcgtgtttgtgttgagcagtgcacttaatccttggaacaaggaaatgggcgaccatctcgtcaaacatggcgacggtgtgaaggacattgctttcgaggtcgaagattgcgactacattgtgcagaaagcccgagaaaggggagcaaagatcatgcgcgaaccctgggtcgagcaggataagttcggtaaggtgaagtttgctgttctgcagacttacggtgacaccactcatactcttgtcgagaagatgaactacattggtcaatttcttccaggttacgaggcccctgcattcatggatcctcttcttcctaagctccctaagtgttcgcttgagatgattgaccacattgtcggcaatcagcctgatcaagaaatggtgagcgcctcggaatggtatttgaaaaatctgcagtttcatcggttttggtccgtggatgatacccaagtgcacactgaatactcatcccttagatctatcgtcgttgccaactatgaggaatccataaagatgcccattaatgaacctgcaccagggaagaagaagtcacaaatccaagaatacgttgattacaacggcggcgcaggtgtccaacacatagcgttgaaaaccgaggatatcattactgctattagacatttgcgggagagaggcctggagttcctgtcggttcccagcacttattacaagcaactccgcgaaaagctgaaaacggcgaaaatcaaggtgaaagagaacatagatgccctggaggaactgaagattctcgtcgattacgacgaaaaaggatacctcttgcaaatctttaccaagccagtgcaggatcggcccaccctcttcctcgaggtgatccagaggcacaaccaccagggttttggagcaggcaactttaactcattgtttaaggccttcgaagaagagcaaaacttgcgggggaatcttaccaacatggaaacgaatggagtggtgccagggatg

SEQ ID NO: 5449 - DNA, 1179 bp, synthetic construct
  misc_feature 1..1179: note = source = /note="Description of Artificial Sequence: Synthetic coding sequence"
  source 1..1179: mol_type = other DNA
atgaccacctactcagacaagggcgcaaaaccagaacgcggccggttcctccacttccattcagtcaccttttgggtgggcaacgccaagcaggcggcctcgttctactgctcgaagatgggcttcgaaccactcgcctaccggggtcttgaaactggatctcgcgaagtcgtctcccatgtcatcaagcaaggaaagattgtctttgtgttgtcgagcgccctgaatccgtggaacaaagaaatgggcgatcatctggtgaagcacggcgacggagtgaaagatattgcattcgaagtggaagattgcgactatatcgtgcaaaaggcacgggagcggggtgccaagatcatgcgcgaaccctgggtcgagcaggacaaatttggaaaggtgaagttcgctgtgctgcagacttatggtgataccacccatactctggtggaaaagatgaactacattggtcagtttttgccaggatacgaagccccggccttcatggaccctctgttgccgaagctgccgaagtgctcgctggaaatgatcgaccacatcgtgggaaaccagcctgaccaggaaatggtgagcgcgtccgaatggtacctcaagaacctgcagttccaccgcttctggtcagtcgatgacacccaagtccacaccgaatacagctcgctgcggagcatcgtggtcgctaattacgaggagtcaattaagatgccgatcaacgaaccggcgccgggaaagaagaagtcccaaatccaggagtacgtcgactacaatggcggagctggcgtgcagcacatcgccctgaaaaccgaggacattatcactgcaatcaggcacctccgggagcggggactcgagttcctttcggtgccctccacctactacaaacaactcagggagaaacttaagactgctaagatcaaggtgaaggagaatatcgatgcgctggaggagctcaaaattctggtcgattacgacgaaaaaggatacctgctgcaaatctttactaagccggtgcaagatcggccaactctgttccttgaggttatccaaaggcataaccatcagggtttcggtgccggcaatttcaactcactcttcaaggcgttcgaggaagagcaaaacctgcgaggcaatcttactaatatggaaacgaacggcgtggtgccgggcatg

SEQ ID NO: 5450 - DNA, 1179 bp, synthetic construct
  misc_feature 1..1179: note = source = /note="Description of Artificial Sequence: Synthetic coding sequence"
  source 1..1179: mol_type = other DNA
atgactacctatagcgataagggggccaagccagaacgcggccgcttcctgcacttccactctgtgacgttctgggtgggaaatgccaagcaggctgcaagtttctactgtagcaagatgggatttgaaccgctagcatatagagggttggaaaccggttcacgggaggtggtgagccatgtgatcaagcaggggaaaattgtgttcgtgcttagtagcgcattgaacccatggaataaggaaatgggcgatcaccttgtgaaacacggtgacggcgtaaaagacatcgcctttgaggtcgaggactgcgactacatagtccaaaaagcaagagagcgcggcgcaaaaatcatgcgggagccctgggtcgaacaagataagttcgggaaggtgaagttcgcagtattacagacatacggggatactacacacactctggtggagaagatgaactatatcggtcagttcctgcctggctacgaagcccctgcgtttatggatcccttgttgcctaagctgcctaagtgtagtctggagatgatagaccacatagttggaaatcagccggaccaggaaatggtttccgcgtcagagtggtacttgaaaaacctacagttccaccgcttctggtccgtggacgatacgcaagtccacacagaatactccagtctcagatctatcgtcgttgctaattacgaagagagcatcaaaatgccaatcaatgaaccagcccccggaaagaaaaagagccagatacaagaatatgttgactacaatgggggagccggagtccagcatatagctcttaagaccgaggatattatcaccgcaatcagacacctcagggaacgcggcctcgagttcttatctgtcccaagtacctactacaagcagttgcgggagaaactgaaaacagccaaaattaaggttaaagagaatatcgacgcactagaggaacttaagatcctcgttgactacgacgagaaggggtacctcctgcagatctttactaagcctgttcaagatcggccaacactctttctggaagtcatccagcgccacaatcaccagggttttggcgcaggcaacttcaattctctttttaaggctttcgaggaagagcagaatttaaggggcaatctcaccaatatggagaccaacggcgtcgtgcccgggatg

SEQ ID NO: 5451 - DNA, 1179 bp, synthetic construct
  misc_feature 1..1179: note = source = /note="Description of Artificial Sequence: Synthetic coding sequence"
  source 1..1179: mol_type = other DNA
atgaccacttattctgataagggcgctaagccagaacgaggtcgatttcttcacttccattctgtgacgttctgggtgggcaacgccaagcaggctgcaagcttttattgcagcaaaatgggctttgaacctctggcgtatcgcggtctggaaacagggtccagggaggttgtgtcgcatgttattaagcagggcaagatcgtgttcgtgttgagtagcgccttaaacccatggaataaagagatgggcgatcacctcgtgaagcacggggacggcgtgaaagatatagcattcgaggtcgaggactgcgactatattgtgcagaaagctcgggaacgcggcgcaaaaataatgcgagagccatgggtcgaacaggacaagtttgggaaggtgaagtttgctgtcttacagacatacggtgatactactcacactctggtcgagaagatgaattacatcggtcagttcctgcccgggtacgaggctcccgcgtttatggatccgctgctgcccaagctcccgaagtgctctcttgagatgatcgaccatatagtgggaaatcagcccgaccaagagatggttagcgcgagtgaatggtatctgaagaatcttcagtttcatagattctggagcgtggatgacacgcaagtccatactgagtattcttccctgcgatccatcgtggttgcgaattatgaagaaagtattaagatgcctatcaatgagccagcgccaggcaagaaaaaatcacaaatccaagagtatgtcgactacaatgggggagcaggggtccaacatatcgcattgaagacagaggatattattaccgcgattaggcatctgcgggaaaggggactggagttcctaagcgtgcccagcacgtattacaagcaacttcgcgagaaactcaagacagctaagatcaaagtgaaggagaatatcgacgcgctggaagagctaaagatactcgtggactacgacgagaagggttatcttctccagatctttaccaaacccgtccaagataggcctacactgtttctcgaggtgatccagcgtcataaccaccagggatttggggctggaaatttcaatagcctgtttaaggcatttgaggaggagcagaatcttcgaggaaacttgaccaatatggaaacgaacggcgttgttcccggcatg

SEQ ID NO: 5452 - DNA, 1179 bp, synthetic construct
  misc_feature 1..1179: note = source = /note="Description of Artificial Sequence: Synthetic coding sequence"
  source 1..1179: mol_type = other DNA
atgactacttattcggataagggtgcaaagcctgagagagggcgctttctgcattttcattcggtgacgttctgggtcggaaacgcgaaacaggcagcctcgttttactgtagcaaaatgggatttgaacctctcgcttaccggggacttgagacgggctcgagagaggtcgtcagccatgtgatcaagcagggaaagatagtgttcgtgctttcgagcgcgctgaacccgtggaacaaggaaatgggggatcacctcgttaagcacggcgacggagtaaaggatatcgcatttgaagttgaggactgtgactacatcgtgcagaaggcgcgtgagagaggagcaaagattatgagagagccgtgggtggagcaagataagttcggcaaggtgaaattcgcagtgctgcaaacttacggtgacaccacgcacactctggtggaaaagatgaactacattgggcaatttctccccggatacgaagcccctgcctttatggacccactgctcccaaaactcccgaagtgttcattggaaatgattgaccacattgtcggaaatcaaccagatcaagaaatggtatccgcaagcgagtggtacctgaagaacctgcagtttcatcggttttggagcgtcgatgacactcaagtgcataccgagtacagctccctgcgctcgattgttgtggcaaactacgaagaatcaataaagatgcctataaacgaaccggcgcctggaaaaaagaagtcccaaattcaagaatacgtggactacaatggaggagcaggggtgcagcatatagcacttaagaccgaggacataatcaccgcaatccgccatcttagagaacgcggtcttgaattcctgtccgtgccttctacttactacaagcaacttcgagagaaacttaagactgcaaagattaaggtcaaggagaatattgacgcgctggaagagctgaagattcttgtggattatgatgaaaaaggataccttctccaaatcttcaccaagcccgtgcaagaccgcccaactctctttcttgaagtcattcagcgccacaaccaccagggttttggtgcaggaaacttcaatagcctctttaaagcctttgaggaagagcagaatcttagaggtaacctcactaatatggaaaccaacggcgtcgtgcccggaatg

SEQ ID NO: 5453 - DNA, 1179 bp, synthetic construct
  misc_feature 1..1179: note = source = /note="Description of Artificial Sequence: Synthetic coding sequence"
  source 1..1179: mol_type = other DNA
atgacaacctactcagataagggcgctaaacctgaacggggacgcttcctgcacttccacagtgttaccttctgggtcgggaatgccaagcaggccgcatctttctattgcagtaagatgggcttcgaaccactggcttacagaggtctagaaaccggctcaagagaagtggtgtctcacgtgatcaagcagggaaaaattgtgtttgtgcttagcagcgccttaaacccttggaataaggaaatgggcgatcacctcgtgaagcacggcgatggtgtcaaagatatcgctttcgaagtggaggattgtgactacatcgtgcagaaggcccgcgaacgcggtgcaaaaatcatgagggaaccctgggtagagcaggacaaatttggcaaagtgaaatttgccgtcctgcaaacttatggtgacaccacacacaccctggtggaaaagatgaactacatcggccagtttctccccggctacgaagcacctgccttcatggaccctctgctacctaagctccccaagtgcagcctggagatgattgatcatatagtgggaaaccaacctgaccaggaaatggtgagcgcttctgaatggtatctgaagaatctgcaattccataggttttggtctgtggacgatacccaggtgcataccgagtactcctccctgagaagtatcgtggttgctaactatgaagagtctattaagatgccgatcaatgaacccgccccgggtaaaaaaaagagccagatccaggagtacgtggattacaatgggggggctggggtgcaacacatcgcattaaagactgaagatatcattacggccatccgacatctacgcgagcgggggttggaatttcttagcgtcccatccacttactacaaacagctaagagagaaactcaagaccgctaaaatcaaggtgaaggaaaacatcgacgcactggaggaattgaagatcctggtggactatgatgaaaagggatacctgctgcagatctttaccaagcccgtgcaggatcggccaacgctcttcctcgaggtgatccaacggcacaatcaccagggattcggcgccggaaatttcaactctctgtttaaggccttcgaggaggagcagaaccttcgcgggaatctgaccaatatggaaacaaatggagtcgtgcctggtatg

SEQ ID NO: 5454 - DNA, 1179 bp, synthetic construct
  misc_feature 1..1179: note = source = /note="Description of Artificial Sequence: Synthetic coding sequence"
  source 1..1179: mol_type = other DNA
atgaccacttacagcgataaaggagccaagcccgagagaggccgcttcttacatttccatagtgtcactttctgggtgggtaatgctaaacaggcggccagcttttactgctcgaagatgggttttgaacctctcgcctaccgtggtctagagacgggttcgcgcgaggtcgtgtcccatgtcatcaaacagggtaaaattgtgttcgtcctgagcagtgcgctgaacccatggaacaaagagatgggtgaccacctggttaaacatggtgatggtgtgaaggacatcgcgttcgaggtcgaggactgtgactatattgtccagaaggcgagggaacgcggcgcgaaaattatgcgcgaaccctgggtggaacaagacaagtttggaaaagttaagttcgctgtgctgcagacgtatggagacactacgcatactttggtcgagaagatgaactatattggacaatttctgcctggttatgaagcaccggcatttatggacccgcttctgcctaagctgccgaagtgttccttggagatgatagaccatattgtggggaatcagccagatcaagagatggttagcgcgtccgagtggtatttgaaaaacctgcagttccataggttctggagcgttgacgatacacaggtgcacacggagtattctagcctgcgctccattgtggtagccaattacgaagaaagcatcaagatgccaattaacgagcccgcaccgggtaaaaaaaaaagccagatccaggagtatgttgattacaatggtggtgccggtgtgcaacacatcgctctcaaaaccgaagatattatcacggcaatccgccatctgcgcgaacgcgggcttgagtttctgagcgtcccaagtacctattataaacagctccgcgaaaagttgaagacggcgaagattaaggtaaaggaaaatattgatgcgcttgaagagctcaaaattttagtcgactatgacgaaaaaggttacctgctgcagatctttacaaagcctgttcaggaccgcccgaccctcttcctggaggtcattcagcgccacaaccaccaagggttcggggccggaaatttcaacagtctgttcaaggctttcgaggaagaacaaaatcttcgtggcaatctgaccaacatggagaccaacggcgtggtaccaggcatg

SEQ ID NO: 5455 - DNA, 1179 bp, synthetic construct
  misc_feature 1..1179: note = source = /note="Description of Artificial Sequence: Synthetic coding sequence"
  source 1..1179: mol_type = other DNA
atgacgacttattcagataagggagcaaagcctgaacgcggcaggttcttgcacttccatagcgtgaccttttgggtgggtaacgcgaagcaggcagcttcgttttactgctcaaaaatggggttcgagccgctcgcttaccggggcctcgagacgggatcgagagaagtcgtgagccacgtcataaagcaaggcaagattgtgttcgtcctctcgtccgccctcaacccttggaacaaagaaatgggtgatcacttggttaaacatggcgacggcgtcaaggacatagcgttcgaggtggaagattgtgattacatcgtgcagaaggcacgggaacgcggcgctaagatcatgagagaaccttgggtcgaacaggacaaattcggaaaagtgaagttcgctgtacttcagacttacggagacaccactcatactctcgtggagaaaatgaactacatcggacaattcctgccgggatacgaagccccggcgtttatggaccccctgctgccaaagctgcccaagtgttccctcgagatgatcgatcacatcgtcggaaaccagcccgatcaggagatggtgtccgcatcagaatggtacctgaagaatctgcagttccatagattttggagcgtggacgacactcaggtacacaccgagtactcctcgctgcgatcgatcgtggtggccaattacgaagagagcatcaagatgcccatcaacgagccggccccgggcaaaaagaaatcgcagatccaagaatatgtcgactacaatggtggggcgggggtgcagcacatcgcgctcaagaccgaagatatcatcaccgccatcagacacctgagagagcggggccttgaatttctgtccgtgccatcaacttactacaagcagctccgcgaaaagctgaaaaccgccaagatcaaggtgaaagagaacattgacgcccttgaggagctcaaaatcctggtggactacgatgaaaagggatacctgcttcaaatcttcacgaagcctgtgcaggaccgcccgaccctctttttggaagtgattcaaaggcataatcaccagggattcggagcgggaaacttcaactcccttttcaaggcctttgaagaggaacaaaacttgcggggcaacctcactaacatggaaactaacggggttgtgcccggcatg

SEQ ID NO: 5456 - DNA, 1179 bp, synthetic construct
  misc_feature 1..1179: note = source = /note="Description of Artificial Sequence: Synthetic coding sequence"
  source 1..1179: mol_type = other DNA
atgaccacctactccgataagggggcgaagcctgaacgcggacggttcctccattttcattccgtcaccttttgggtggggaacgcgaagcaggcagcgtccttttactgctccaagatgggtttcgaaccacttgcatacagaggattggaaactggatcgcgcgaggtcgtgtcacatgtgatcaaacaaggaaagatagtgtttgtcctttcatcggcgcttaatccctggaacaaagaaatgggagatcacctggtcaaacacggggatggcgtgaaagacatagcttttgaagtggaggactgcgattacattgtgcaaaaagcgcgcgaacggggtgcaaagatcatgagagaaccttgggtcgaacaggataagttcggcaaggtgaaatttgccgtgctgcagacctacggcgatacgacccatacgctcgtggaaaagatgaactatattggccagtttctgcctgggtacgaagcaccagcgttcatggatcccctgcttcctaaactgcctaaatgttccctggaaatgatagatcatattgtgggaaaccaacctgatcaagaaatggtgtcggcatcggagtggtaccttaagaacctccaattccataggttttggagcgtcgacgatactcaagtgcatactgaatacagctcgctgaggagcatcgtcgtggccaactacgaggaaagcattaagatgcctattaacgagcctgcacctggaaagaaaaagtcacagatccaggaatatgtggactacaatgggggcgcaggagtgcagcatattgcgcttaagaccgaggacatcatcactgcaattagacaccttcgcgaacggggactcgagtttctttccgtgcccagcacttactacaagcagctgcgcgaaaaacttaagaccgcaaagattaaggtgaaggagaatatcgacgcacttgaagaactcaagattcttgtggactacgatgaaaagggatacctgctgcagatctttacgaaaccggtccaggacaggcctactctgtttctcgaggtgatccagcgccataaccatcaggggtttggtgcaggtaatttcaattcgctgtttaaggcctttgaagaagaacaaaacttgcgaggtaatctgactaacatggaaaccaacggagtggtgcctggcatg

SEQ ID NO: 5457 - DNA, 1179 bp, synthetic construct
  misc_feature 1..1179: note = source = /note="Description of Artificial Sequence: Synthetic coding sequence"
  source 1..1179: mol_type = other DNA
atgactacctactctgataagggagcgaaacccgaaagagggcgctttcttcatttccattccgtgactttttgggtggggaatgccaagcaagcagcctcattctactgctcaaagatgggttttgagccgctcgcatacagaggacttgaaaccggaagccgggaggtcgtgtcgcacgtgattaagcaaggtaaaatcgtctttgtcctttcatccgcactcaatccatggaacaaagaaatgggcgatcatttggtgaagcatggggatggcgtgaaggatattgcatttgaagtggaggattgtgattacattgtgcagaaggcccgcgagcggggagcgaagatcatgagagaaccttgggtcgagcaggacaagttcggaaaggtcaaattcgcagtgctgcaaacctacggggataccactcatactctggtcgagaagatgaactacattggtcagttccttcctggatacgaagcaccagcctttatggacccacttctcccaaagttgccgaagtgctcgcttgagatgattgaccacattgtgggtaaccagccagaccaggagatggtgtccgcatcagaatggtatttgaagaatcttcaatttcatcgcttctggagcgtggatgatactcaagtgcacacggaatactcctccctccgctcaatcgtcgtggcaaactacgaggagagcattaagatgcctatcaatgagcctgcacccggtaagaagaaatcgcaaatccaggagtacgttgactacaacggtggggcaggagtccagcatatcgcacttaagaccgaagatatcataaccgcaattcggcacctgagggaacgaggtctggaatttctttcggtgccttccacttactacaagcagcttcgcgagaagctgaaaaccgccaagatcaaggtgaaggaaaacattgatgcccttgaggagcttaagattcttgtggattacgacgaaaagggctatttgctccagatctttaccaagccagtgcaggataggccaactctctttttggaagtcattcaacgtcacaaccaccaggggttcggggcgggcaactttaactcactctttaaggcgtttgaggaagaacaaaatcttagaggtaatcttaccaacatggagactaacggtgttgtgccaggtatg

SEQ ID NO: 5458 - DNA, 1179 bp, synthetic construct
  misc_feature 1..1179: note = source = /note="Description of Artificial Sequence: Synthetic coding sequence"
  source 1..1179: mol_type = other DNA
atgaccacatatagcgataagggggctaaacccgagagaggaaggttcctacattttcattcagtgaccttctgggtcggtaacgctaagcaagccgcctccttttactgctccaagatgggtttcgaaccactggcctatagaggacttgagaccggcagtcgagaagtggtctcacacgtgatcaaacagggcaagatcgtgttcgtgctctcctcagctcttaatccatggaacaaagagatgggcgatcatctggtgaaacacggtgacggggtaaaagacattgccttcgaggtggaagattgtgactacattgtgcagaaggcccgggaaaggggcgcaaagatcatgcgggagccttgggttgagcaggataagttcgggaaggtcaagttcgccgtcctgcagacttacggtgatacaactcacactttggtcgaaaagatgaattacatcgggcagttcctgccaggctacgaagccccagccttcatggacccactcttaccaaaacttcccaagtgcagtctggaaatgattgaccacatcgtcggcaaccagcctgatcaagaaatggtttcagcctccgagtggtacctaaaaaacctgcaatttcacaggttttggtctgtggacgatacacaagtccacactgaatattcttccctgcggagcatcgtagtcgctaactatgaggagtctattaaaatgcctataaacgaaccagcaccgggcaagaagaaatcacaaattcaggaatacgtcgactataacgggggggctggcgtccaacatatagccctaaagacggaggatattatcaccgccatccggcacctgagagagagaggtttagagtttctgtctgtgcccagcacatattataagcagctaagggagaagcttaaaaccgcaaagataaaagtgaaagaaaacatagacgcactagaagagctcaagatccttgtggattacgacgaaaagggctatctgctgcagatcttcacaaagcccgtgcaagacaggccaaccctgtttcttgaggtgattcagaggcacaaccatcagggatttggggctgggaacttcaattcgcttttcaaggcattcgaggaggaacaaaatcttcgggggaatcttaccaatatggagaccaacggggtggtgcctggtatg

SEQ ID NO: 5459 - DNA, 1179 bp, synthetic construct
  misc_feature 1..1179: note = source = /note="Description of Artificial Sequence: Synthetic coding sequence"
  source 1..1179: mol_type = other DNA
atgacaacatacagtgataaaggagctaagcccgaaagagggagattcctgcactttcattcagtgactttctgggttgggaacgcaaaacaggccgcttctttctattgtagtaagatgggattcgaacctctcgcgtacaggggacttgaaactggatcaagggaagtggtgtcacatgtgatcaagcagggaaaaatagtgttcgtgttgtcatctgctctcaacccttggaataaagaaatgggggatcatcttgtcaaacatggggatggggtgaaagacatagccttcgaagtggaagattgtgattatattgtgcagaaagccagggaaaggggggcaaaaattatgcgggaaccatgggtcgaacaagataaatttggaaaagtcaaattcgcagtgctacagacttatggagatacaactcacactctcgtggaaaaaatgaattatatagggcagttccttccagggtatgaagctccagcattcatggatcccctgctgccaaagctgcctaagtgttctttagaaatgatcgatcacatcgtggggaaccagccagatcaggagatggtgtctgcatctgaatggtatctcaagaaccttcagttccatagattctggtccgtggacgacacacaggtgcatactgagtattcatctctaaggagtatcgtcgtggccaactatgaagaatctatcaaaatgcctattaacgaacctgcgccagggaaaaaaaaatcccagattcaggaatatgtcgattacaacgggggggcaggggtccaacacatcgctcttaagacagaagatataatcacagctatccgccatttaagagagcgaggactggaatttctctctgtgccatccacatattataaacagcttagggaaaaactcaaaactgccaagatcaaagtgaaagaaaatatcgacgctctagaagaactcaaaatcctcgttgattatgatgaaaaaggatatttattgcaaatattcactaaaccagtgcaagatcggccaacactattcctggaagtgatccagcggcataatcatcaggggtttggagctggaaatttcaactccctctttaaagcctttgaagaggaacagaatctcagggggaatctgactaatatggagactaacggagttgtgcccggaatg

SEQ ID NO: 5460 - DNA, 1179 bp, synthetic construct
  misc_feature 1..1179: note = source = /note="Description of Artificial Sequence: Synthetic coding sequence"
  source 1..1179: mol_type = other DNA
atgactacttattcggataagggagctaagcccgagcggggacgcttcctacacttccattctgtgacattctgggtgggcaacgcaaaacaggcagccagtttttattgtagcaaaatggggtttgaacccctggcataccgcggccttgagaccgggtcccgggaggtggtctctcatgttataaagcaaggcaaaatagtgtttgtgctatcctccgccctgaacccctggaataaggagatgggtgatcacttggtaaagcacggcgatggcgtgaaagatatcgcatttgaggtcgaggactgtgactacatcgtacaaaaagctcgagagaggggcgccaaaattatgagggaaccatgggtagaacaagacaagttcggcaaggtcaaattcgccgtgctgcagacttatggagacactactcacactttggtagaaaagatgaattatatcggtcagttcctgcctggctatgaggctcctgcttttatggatccgctcttgcctaagctcccgaagtgtagtcttgaaatgatcgaccatattgtcggaaaccagcctgaccaggaaatggtgtcggcatccgaatggtacctcaagaacctccagttccataggttttggtctgtggatgacacgcaggtccacacagagtactcaagtcttcgcagcatagtggtggccaactacgaagagtccatcaagatgcctataaacgagccggctccaggcaagaaaaagtctcagattcaagaatacgtggactacaacggtggggcaggtgtgcagcacattgccttgaaaaccgaggacattatcactgcaatccgacacctgagagagagggggctggagttcctcagcgtgccgtctacatactataaacagctcagggagaagctaaagacagcgaaaattaaagtgaaagaaaacattgatgcattggaagagctgaagattctcgtggactacgacgagaagggatacctgctgcagatcttcacaaagcccgtgcaggacagaccaactctattcctagaggtgatccagcgccacaatcaccagggttttggcgcgggtaactttaatagcttattcaaagcatttgaagaagaacaaaaccttaggggcaatctcaccaacatggagaccaatggtgttgtgccaggaatg

SEQ ID NO: 5461 - DNA, 1179 bp, synthetic construct
  misc_feature 1..1179: note = source = /note="Description of Artificial Sequence: Synthetic coding sequence"
  source 1..1179: mol_type = other DNA
atgaccacctactccgataaaggcgctaagcctgagcgcggtaggtttttgcacttccacagcgttaccttctgggtgggaaacgccaagcaagcggcctccttctactgctcaaagatgggctttgagcctttggcctacagaggtctggaaaccggatcacgcgaagtcgtcagccacgttatcaagcaaggaaaaatcgtgtttgtgttgtcgtccgcactgaacccgtggaacaaggagatgggcgatcacctggtgaagcatggagatggagtcaaggacatcgcgtttgaggtcgaagattgtgattacattgtgcagaaagcccgagaaagaggagcaaagatcatgagggaaccgtgggtggaacaagacaagtttggaaaggtcaagtttgctgtgctgcagacctacggggatactactcatactttggtcgaaaagatgaattacattggccagttcctgccaggatatgaggcgcccgcttttatggacccgttgctcccaaaactgccgaagtgctcgctggaaatgatcgaccatatcgtgggaaatcagccagaccaggaaatggtgtccgcttccgaatggtatctgaaaaatctccaattccaccgattctggagcgtggacgatacccaggtgcacaccgaatactcgtcactcaggtccatcgtggtggctaactacgaagaatctatcaagatgccaattaacgagccggcgcccgggaaaaagaagtcccagatacaagaatacgtcgattacaacgggggagccggcgtgcagcacatcgcgctgaaaactgaggacatcatcaccgccatccgccacctgcgcgaaaggggactggagttcctctcagtcccatcaacttactacaaacaactgcgggagaagctcaagaccgcgaagatcaaagtgaaagagaatattgacgccctcgaggagctgaaaattctcgtggactacgacgaaaagggttaccttctccagatcttcactaaaccggtgcaagatcgtccaaccctcttcctcgaggtgatccagcgccataatcatcagggcttcggagcagggaactttaactcgttgttcaaagccttcgaagaagagcaaaatcttcgcggaaacctcactaacatggaaacgaacggagtggtcccagggatg

SEQ ID NO: 5462 - DNA, 1179 bp, synthetic construct
  misc_feature 1..1179: note = source = /note="Description of Artificial Sequence: Synthetic coding sequence"
  source 1..1179: mol_type = other DNA
atgactacctattccgacaaaggtgcaaaacctgaacgaggaagattcttgcactttcacagcgtgactttttgggtcgggaatgctaagcaggctgcttctttctactgttctaaaatgggattcgaacccctggcatatcgcggattggaaacaggaagtagggaagtagtcagtcacgtgatcaagcaaggcaaaatcgtctttgttctttcatccgctctgaacccttggaacaaggagatgggggaccatcttgtgaagcatggagatggagtgaaggatattgcttttgaagtcgaggattgtgattatattgtgcaaaaggcacgcgaacgcggtgccaagataatgagagagccctgggtcgaacaagataagttcggcaaagttaaattcgccgtgctccagacctacggcgataccacacatacactggtagagaaaatgaattacataggacagtttctgcctggatacgaggccccggcgtttatggatcctctcctccctaagctccctaagtgttccctcgaaatgatcgatcatatagttgggaaccaacccgaccaggaaatggtgagcgcttctgaatggtacctcaaaaacctccagtttcacaggttttggtctgttgacgatacccaggttcatactgagtactcgagcctgaggtcaatcgtcgtcgctaactatgaggagtctatcaaaatgcctatcaatgagcctgctcccggcaaaaaaaagagccagattcaggaatacgtcgactacaatggaggagcaggagtgcaacacatcgcactcaaaactgaggatattatcaccgcgattcgtcatctgagagagagaggcctggagttcctgtcagtgcctagcacttactataagcagctgagagaaaagctcaagaccgctaagattaaagtcaaagagaacattgatgctctggaggagctcaagattttggtggattacgatgaaaagggatatcttctgcaaatattcaccaagcctgtgcaggataggcctactcttttcctggaggttatccagagacacaaccaccaggggtttggcgccggcaacttcaactctcttttcaaagcattcgaggaggaacaaaacctccgaggtaatctcacgaatatggagacaaatggagtggtgccaggcatg

SEQ ID NO: 5463 - DNA, 1179 bp, synthetic construct
  misc_feature 1..1179: note = source = /note="Description of Artificial Sequence: Synthetic coding sequence"
  source 1..1179: mol_type = other DNA
atgactacttactccgacaagggtgccaaaccagaacgcggacgcttcctgcacttccattcagtgaccttctgggtcggaaacgccaagcaagcagcctccttctactgctctaagatgggtttcgagccattggcctaccgcgggttggaaactggctcgcgagaggtggtgagccacgtcatcaagcagggcaaaatagtgtttgtcctcagctccgctttgaacccgtggaacaaggagatgggcgaccatttggtgaagcatggggatggcgtgaaggacattgcattcgaagttgaggactgcgattacatagtgcaaaaggcgcgcgagaggggcgctaagattatgcgagagccttgggtggaacaagataagttcggtaaagtgaagtttgcggtcctgcagacctacggagataccacccataccctggtggaaaagatgaattacatcggacagtttcttcccggatacgaggcacctgccttcatggacccactgctgccgaagttgcctaagtgttccctggaaatgatcgaccacatcgtcggaaaccagccggaccaggaaatggtgtctgcttccgaatggtacctcaagaatctgcaatttcatcggttctggagcgtggacgatacccaggtgcacaccgagtactcatcactcagaagtatcgttgtggcaaattacgaagaatcgattaagatgccaatcaatgagccagccccgggaaagaagaagtcccaaatccaggagtacgtcgattacaatggcggagcgggtgtacaacatatcgccctgaaaaccgaggacatcatcaccgcgatccgtcatctgagggaacgggggctcgaattcctctctgtcccttcaacttactataagcagctgagggagaagttgaaaacggccaaaatcaaggtgaaagaaaacatcgatgcactggaggaattgaaaatcctggtggactacgacgaaaagggctatctcctgcagatcttcactaaaccggtgcaagatagaccgactctctttctggaagttatccaacgccacaaccaccagggcttcggtgctggcaactttaactcgctgttcaaagccttcgaagaagagcagaacctgcggggaaatctgactaacatggaaactaatggagtcgttccaggaatg

SEQ ID NO: 5464 - DNA, 1179 bp, synthetic construct
  misc_feature 1..1179: note = source = /note="Description of Artificial Sequence: Synthetic coding sequence"
  source 1..1179: mol_type = other DNA
atgactacttactccgataagggtgctaagccagaaagaggacggtttctgcacttccactctgtgacattctgggtgggcaatgcaaaacaggccgccagtttctattgctccaaaatgggcttcgagccactcgcatatcggggcctggaaacaggctcaagagaggtggtgtctcacgtcatcaaacaagggaaaattgtttttgtgctgagctccgccctcaatccttggaacaaggagatgggtgatcacttggttaagcatggcgacggagtcaaggatatcgcttttgaggtggaagattgtgattacatcgtgcagaaagctcgcgagagaggcgccaaaataatgagagaaccatgggtggaacaggacaaattcgggaaggttaaatttgccgtgctgcagacttatggtgacactacccacacgctcgttgaaaaaatgaactacattggacagttccttcctggctacgaggcacccgcctttatggacccactgctgcccaaactgccaaagtgctccttggagatgatagaccacattgtggggaatcaacctgaccaagagatggtgagcgcctctgagtggtacctaaagaatctgcagtttcacagattctggtcagtggatgacactcaagtacatacagaatacagcagtctcagatctatcgtggtggccaactacgaggagtctatcaagatgcccattaacgaacccgcacccggaaagaagaagtctcagatacaagagtatgtcgattataatgggggggcaggcgtgcaacatatcgccctcaagaccgaggacatcatcacagccatcagacatttgcgagaacgcggactcgagttcctgtctgtgcccagtacatactataagcagctgcgcgagaagctcaaaaccgccaagattaaggttaaagagaacatcgatgctctggaggagctcaaaatcctggttgattacgacgagaaaggctatctgcttcagatctttaccaagcccgtccaagacagaccaaccttgttcctggaggtaatccaaagacacaaccaccaagggtttggagccggcaactttaattcactgtttaaagcgttcgaagaagaacagaacctccggggcaatcttactaatatggagacaaatggcgtggtccccgggatg

SEQ ID NO: 5465 - DNA, 1179 bp, synthetic construct
  misc_feature 1..1179: note = source = /note="Description of Artificial Sequence: Synthetic coding sequence"
  source 1..1179: mol_type = other DNA
atgactacctactccgataagggagcaaaacctgaaagggggagattcctgcacttccatagtgtcactttttgggtggggaacgctaagcaggctgcctccttttactgttccaagatgggttttgaacctctggcgtacaggggtttggagacgggctctcgtgaagttgtttcacacgttattaagcagggaaaaatagtgtttgttttgagcagcgcacttaatccatggaataaggaaatgggtgatcatctagttaagcatggagatggagttaaggacatcgccttcgaagtcgaggattgtgattacattgtccagaaagcaagagaaagaggcgccaagatcatgagagagccctgggtggagcaagacaaatttgggaaagttaagttcgccgtcttgcagacatatggagatacaacccatactcttgtggaaaagatgaattatattggccaatttttgcctggttatgaagctccagcttttatggatccactattgccaaaattgcctaagtgctcgttagaaatgattgatcacattgttggtaaccagcccgaccaagagatggttagcgcctctgaatggtacttgaaaaatttgcaatttcacagattttggagtgttgacgatactcaagttcatacagaatatagttcactcagatcgatcgtggtcgctaactatgaagaatcaataaagatgcctataaacgaaccagccccggggaaaaaaaaatcacagatccaggagtatgttgattacaacggcggggcaggcgtgcaacacatcgctttgaaaaccgaggatattatcacggccattcgacacctcagagagaggggactggaattcctctcggtgccttccacatactataagcaattaagggagaagctaaagaccgctaaaatcaaagtaaaggaaaacatcgacgccttggaagaattgaagatcttagtggattatgatgaaaaagggtatttgttgcaaatcttcactaaaccagtgcaagatagaccaactttgttcttggaagtgattcagaggcacaaccaccaaggttttggtgccggtaatttcaacagtctttttaaagcatttgaagaagagcaaaatcttcgaggaaacttgactaatatggaaactaatggggtggttcctggaatg

SEQ ID NO: 5466 - DNA, 1179 bp, synthetic construct
  misc_feature 1..1179: note = source = /note="Description of Artificial Sequence: Synthetic coding sequence"
  source 1..1179: mol_type = other DNA
atgactacttactcagataaaggagcaaagcctgaacgcggaagatttctgcattttcactcagtgaccttttgggttggaaacgcaaagcaagcagcatccttttactgctccaagatggggttcgagcctttggcttaccgcggtctggaaacgggttcgagagaagtggtgtcacacgtcataaagcagggcaagatcgtgttcgtgctgagctccgccttgaatccatggaataaggaaatgggtgatcatctggtcaaacatggagatggtgtcaaggacattgccttcgaggtggaggattgcgactacatcgtgcaaaaagcacgggagcgtggcgcaaagattatgagagagccttgggtggagcaagataagtttggtaaggtgaagttcgcagtcttgcagacgtacggagatactacccatactttggtcgagaaaatgaactatatcggccagttcctgccaggttacgaagctcctgcatttatggatccccttcttcctaaattgccaaagtgctctctggaaatgattgaccatatagtgggaaaccagccagaccaggaaatggtgagcgcgtcggaatggtacctcaagaacctccaatttcaccggttttggtccgtggacgacacccaagttcacaccgaatacagctcccttcgcagcatcgtggtcgcaaattacgaagaatctattaagatgcctatcaacgaaccagcccccggaaagaagaaatcacaaatacaggaatacgtggattacaatggaggggcgggtgtgcagcatatcgcccttaagaccgaggatatcattaccgccatacgccatcttagagagcgaggcctcgagttcctttccgtgccatccacctactacaaacagctgcgcgaaaagctcaaaaccgccaaaatcaaagtgaaagaaaacatagatgcattggaggagctgaagattctcgtggattatgatgaaaagggctatctcctgcagattttcactaagcccgtgcaagacagaccaactctttttctggaagtgattcaacgtcataaccatcaaggctttggagcaggaaacttcaactcgctctttaaggcattcgaggaagagcaaaacctgcgtggaaatttgaccaacatggagactaacggagtggtgcctggtatg

SEQ ID NO: 5467 - DNA, 1179 bp, synthetic construct
  misc_feature 1..1179: note = source = /note="Description of Artificial Sequence: Synthetic coding sequence"
  source 1..1179: mol_type = other DNA
atgaccacctactcagacaaaggtgccaagcctgagcgagggaggtttctgcactttcattcggtgacattttgggtgggcaacgccaagcaagccgcttccttctactgttctaagatgggatttgaaccactggcctaccggggcctggagacaggctcaagagaggtagtttcccatgtcattaagcagggaaaaatagtgttcgtgttgtcaagtgcgctcaacccctggaataaggagatgggcgatcatttggttaagcatggggacggcgtgaaggatattgcgtttgaagtggaggactgcgactatattgtgcaaaaggctagagagcgaggggcgaaaatcatgcgggagccttgggtcgagcaggacaaattcggcaaagtcaagtttgcggtgttgcagacctatggtgacactacccacactcttgtcgagaagatgaattatattggacagtttcttcctggctatgaagctcctgctttcatggatcccctcctaccaaaacttccaaagtgcagcctggagatgatcgaccacatagtcgggaatcaaccggaccaggagatggtctcggccagcgaatggtacttaaagaaccttcagttccatagattttggagcgtcgacgacacacaagtgcacaccgagtactcatccctgaggtcaattgtggttgctaactacgaagagtcaataaaaatgcctattaacgagcctgctccgggcaagaagaaatcccagatccaagaatacgtggattataatggcggcgccggcgtgcagcacatagccctcaaaacagaggatatcattacagccatacggcaccttcgggaaagaggattagagtttttgtccgtcccttccacgtattataaacagctgcgcgaaaaactgaagaccgccaagatcaaggttaaagagaacattgatgctttggaggagctcaaaatcctcgtagactacgatgagaaaggatacctgctgcagatatttactaaacctgtgcaagacagaccaacgcttttcctggaggtgattcagcgccacaatcatcagggctttggcgctggaaattttaacagcctgttcaaggccttcgaggaagaacagaacttgcgcgggaatctcactaatatggagacgaacggggttgtgcccggcatg

SEQ ID NO: 5468 - DNA, 1179 bp, synthetic construct
  misc_feature 1..1179: note = source = /note="Description of Artificial Sequence: Synthetic coding sequence"
  source 1..1179: mol_type = other DNA
atgaccacctattccgacaagggggctaagcctgaacggggtagattcctccactttcattccgttaccttttgggtggggaatgccaagcaggcggctagcttctattgttctaaaatgggattcgagcctctggcctacaggggcctcgaaacgggtagtcgcgaagtggtttcccacgtcataaagcaggggaaaatcgtgtttgttctgtctagtgccctcaatccatggaacaaggaaatgggggaccatctggtcaaacacggagatggagtaaaggatatagcctttgaagtggaagactgcgattatatcgtgcaaaaggccagagagcggggcgccaaaataatgcgggaaccctgggtggagcaagataagtttggtaaggtgaagttcgccgtcttgcagacatacggcgacacaacacacaccctcgtagagaagatgaactacattggccagttccttcctggttatgaagcccccgcattcatggaccccctcctgcctaagctccctaaatgttcactcgagatgatcgatcacatcgtaggaaatcaacctgatcaggagatggtttccgcctccgagtggtatctcaagaacctccagtttcatcggttttggagcgttgatgacacccaggtgcacactgaatactcttccctgcgctccatcgtggtggccaactatgaagagagcatcaaaatgcccatcaacgaaccagcccctggcaaaaagaaatcccagatacaggagtatgtcgactacaacggaggcgcgggggtgcagcatattgcactgaaaaccgaggacataatcaccgccatcagacatctgagggagaggggactggaattcctgtcagtcccatcaacatattacaagcagctgagagaaaaactcaagaccgcaaaaattaaggtgaaggaaaatatcgatgccctcgaagagttgaagattctggttgactatgacgagaagggataccttctgcagattttcacaaaacctgtgcaggatcgcccaaccctcttcctggaagtgatccagaggcacaatcatcaggggtttggcgctggaaactttaactctcttttcaaggcttttgaggaagaacaaaatctcagggggaacctgaccaatatggagaccaatggtgttgtgcccgggatg

SEQ ID NO: 5469 - DNA, 1179 bp, synthetic construct
  misc_feature 1..1179: note = source = /note="Description of Artificial Sequence: Synthetic coding sequence"
  source 1..1179: mol_type = other DNA
atgaccacctactccgataagggtgccaaacccgaacgcggacggtttctgcactttcactccgtgactttctgggtcggtaacgcaaagcaggctgcctccttctactgctcgaagatgggattcgaaccgctcgcctaccggggcctggaaactggatcgcgggaagtggtcagccacgtcatcaaacaaggcaaaatcgtgtttgtcctgtcctccgcgctgaacccgtggaacaaggagatgggagatcacctcgtgaagcatggcgacggagtcaaggacatcgccttcgaagtggaggactgcgactatatcgtgcagaaggcaagagaacggggcgcaaagatcatgcgggagccgtgggtggaacaggataagtttggcaaggttaagttcgccgttctccagacttacggcgacactacccatactctggtggaaaagatgaattacattggccagttcctgcctggttacgaggcccctgcatttatggatccgctgctcccgaagctgccaaagtgctccctcgaaatgattgaccatattgtgggtaatcagccggatcaagagatggtgtcagcctctgaatggtacctcaagaacttgcagtttcatcggttctggtctgtggatgacacccaggtgcacactgagtactcttcactgaggtcgattgtggtcgccaactacgaagaatccatcaagatgcctatcaacgagcctgctcctgggaagaagaagtcgcaaattcaggaatatgtggattacaacggcggggcgggagttcaacatatcgccctgaaaaccgaggacattatcaccgcgattcgacacttgagggaaaggggcctcgaatttctctcagtgccgtcaacctactacaaacaactgcgggaaaaacttaagaccgcgaaaatcaaggtcaaagagaatattgacgctctggaagagctgaagatccttgtggactacgacgaaaagggatacttgctgcaaatcttcactaaacccgtccaagacagacccacgctcttcctggaagtgattcagcggcacaatcaccaggggtttggcgccggcaatttcaatagcctgttcaaggcattcgaggaggagcagaacttgcgcggtaacctgaccaatatggaaaccaacggtgtggtcccaggaatg

SEQ ID NO: 5470 - DNA, 1179 bp, synthetic construct
  misc_feature 1..1179: note = source = /note="Description of Artificial Sequence: Synthetic coding sequence"
  source 1..1179: mol_type = other DNA
atgaccacctactccgacaagggtgcaaaaccagaaaggggaaggttcctgcatttccattccgtgactttttgggtcggtaatgcgaaacaagcagcctcgttctactgctcaaagatgggatttgaacccctggcatatcgaggactggaaactggcagccgcgaagtggtgtcgcacgtgataaagcaggggaagattgtgtttgtcctctcctcagcattgaacccttggaacaaggaaatgggagatcatcttgtcaagcatggagacggagtgaaggacattgcctttgaggttgaagattgtgactacatagtgcaaaaggcaagagaacggggagcaaagatcatgcgggaaccttgggtggagcaagacaagtttggtaaagtgaagttcgcagtccttcaaacttatggggacaccactcatactctcgtggaaaagatgaactacattggtcagtttcttcctgggtacgaagcacccgcgtttatggatcctttgctgccaaaacttcctaagtgttcccttgagatgatcgaccacatcgtggggaaccaaccagatcaagagatggtgagcgcgtcagaatggtacctcaagaaccttcagtttcataggttttggtcggtcgatgatacccaggtccacactgagtattcatcgctgcggtccatagtcgtggccaactacgaggaatccatcaagatgccgattaacgagccagcgccgggtaagaaaaagtcgcaaattcaggagtacgttgattacaatggtggcgcgggagtccagcatatagctctgaaaaccgaagatatcattaccgcaatcaggcacctcagagaacggggcctcgagttcctgtcagttccttcgacttactacaagcaactccgagagaagctcaagactgcaaagatcaaagtgaaagagaatattgacgcgctggaagaacttaagatccttgtggattacgatgaaaagggttaccttctccaaatcttcaccaagcccgtgcaggaccggcccaccctgttcctcgaggttattcagagacataatcaccaaggtttcggtgcaggaaactttaactcgctcttcaaagccttcgaagaagaacaaaatctgagaggcaatcttacgaacatggaaactaacggagtcgtcccaggtatg

SEQ ID NO: 5471 - DNA, 1179 bp, synthetic construct
  misc_feature 1..1179: note = source = /note="Description of Artificial Sequence: Synthetic coding sequence"
  source 1..1179: mol_type = other DNA
atgactacctacagcgataaaggggcaaagcccgagagggggcggtttctgcatttccatagcgtaactttttgggttggcaacgctaaacaagctgcttccttttactgttccaagatgggctttgagcccctcgcgtaccgtggtttggaaacagggagccgggaggtggtctcgcacgttatcaagcaagggaaaatcgtcttcgttctaagtagtgctctgaatccgtggaacaaggaaatgggcgaccacttagtgaagcacggtgatggagttaaggatatcgcattcgaggtagaagactgtgattacatcgtccaaaaggccagggagcgcggagccaagataatgcgggaaccctgggtcgagcaggataagttcggtaaggtgaaattcgctgttctgcagacctacggcgatacaactcacaccttagtggaaaagatgaattacattgggcagtttctccccggttacgaggcccctgcttttatggatcctctgctgccgaaactgccaaagtgttctctggagatgattgaccatatcgtggggaaccaaccagatcaggagatggtgtctgcctcagagtggtacttgaagaacctacagtttcacaggttttggtcagtggacgacacccaagttcacaccgagtatagtagccttaggagtatcgttgttgcaaattatgaagaatctataaaaatgcctatcaatgagcccgctcccggtaaaaagaagagccagatccaggaatacgtagactataatggcggcgcaggggtgcagcacatcgccctgaagaccgaggacatcatcacagcaatccggcatctccgggagaggggtcttgagtttttgtctgtgccctccacttactataaacaacttagggaaaagctgaagaccgcgaagatcaaagtgaaagagaatattgacgcactggaggagcttaagatcctagttgactacgacgaaaagggctacctcctccagatcttcacgaagccagtgcaggacagacccaccttattccttgaggtgattcagaggcacaatcaccaggggtttggcgcagggaatttcaattccctgttcaaggcttttgaggaagaacaaaacctaagggggaacctcaccaacatggagaccaatggcgtcgtgcccgggatg

SEQ ID NO: 5472 - DNA, 1179 bp, synthetic construct
  misc_feature 1..1179: note = source = /note="Description of Artificial Sequence: Synthetic coding sequence"
  source 1..1179: mol_type = other DNA
atgaccacctattccgacaaaggagccaagccagaaaggggtaggttcctacattttcattcggtgaccttctgggtcggcaatgcaaaacaggccgcttccttttactgctctaaaatgggatttgaaccacttgcctatcggggcttggaaactgggagccgggaggttgtgagtcacgtgatcaagcagggtaaaatcgtatttgtcctgagctccgcgcttaatccgtggaacaaagaaatgggcgaccacctcgtcaaacacggcgatggggtcaaagacatcgcatttgaagtggaggattgcgattacattgttcagaaggcacgagaaaggggtgctaagatcatgcgcgagccctgggtggaacaagacaagttcggcaaagtgaaattcgcggtgctacagacgtacggcgatactacccataccctcgttgaaaagatgaattacatcggacagttcctgccgggctatgaagcaccagcattcatggacccactcctccctaaactgcctaaatgtagtttagaaatgatcgaccatatcgttggcaatcaaccagaccaggaaatggtgagtgcctcggaatggtacttgaagaaccttcagttccatcggttctggtctgtggacgatacccaggtgcacacagaatattcctctctgcgatctatcgtggtcgcaaattatgaagaatctatcaagatgccgataaacgaacccgcgccagggaaaaagaagagccaaatccaggagtatgtcgattacaacggcggcgcgggagtccagcacatcgctttaaaaacagaagacatcattaccgctatacgacatctgagggagcggggcctggagttcctgtccgttccttccacttattataaacagttgagagaaaaattgaaaaccgcaaagatcaaggtcaaagagaatatagatgccctggaggaactgaagatcctggttgactacgacgaaaaaggatacttgctccagatcttcacaaagccggtacaagacagacccaccctgtttctggaggtgattcaacgacataaccaccaggggtttggcgccgggaacttcaattctctctttaaagcttttgaagaggagcagaacctccgcggtaacctgactaatatggagactaacggagtggtaccgggcatg

SEQ ID NO: 5473 - DNA, 1179 bp, synthetic construct
  misc_feature 1..1179: note = source = /note="Description of Artificial Sequence: Synthetic coding sequence"
  source 1..1179: mol_type = other DNA
atgacgacgtattcggataaaggtgcgaaaccggaacgtggtcgttttctacattttcattcggttacgttttgggtaggtaatgcgaaacaagcggcgtcgttttattgttcgaaaatgggttttgaaccgctagcgtatcgaggtttagaaacgggttcgcgagaagttgtatcgcatgttataaaacaaggtaaaatagtatttgttctatcgtcggcgttaaatccgtggaataaagaaatgggtgatcatttagtaaaacatggtgatggtgttaaagatatagcgtttgaagtagaagattgtgattatatagttcaaaaagcgcgtgaacgaggtgcgaaaataatgcgtgaaccgtgggttgaacaagataaatttggtaaagttaaatttgcggttctacaaacgtatggtgatacgacgcatacgctagtagaaaaaatgaattatataggtcaatttttaccgggttatgaagcgccggcgtttatggatccgttattaccgaaattaccgaaatgttcgttagaaatgatagatcatatagttggtaatcaaccggatcaagaaatggtatcggcgtcggaatggtatctaaaaaatttacaatttcatcgattttggtcggttgatgatacgcaagtacatacggaatattcgtcgttacgttcgatagtagtagcgaattatgaagaatcgataaaaatgccgataaatgaaccggcgccgggtaaaaaaaaatcgcaaatacaagaatatgttgattataatggtggtgcgggtgttcaacatatagcgctaaaaacggaagatataataacggcgatacgacatctacgagaacgtggtctagaatttctatcggtaccgtcgacgtattataaacaattacgagaaaaactaaaaacggcgaaaataaaagtaaaagaaaatatagatgcgttagaagaactaaaaatattagtagattatgatgaaaaaggttatctattacaaatatttacgaaaccggttcaagatcgtccgacgttatttttagaagtaatacaacgtcataatcatcaaggttttggtgcgggtaattttaattcgctatttaaagcgtttgaagaagaacaaaatttacgaggtaatctaacgaatatggaaacgaatggtgtagtaccgggtatg

SEQ ID NO: 5474 - DNA, 1179 bp, synthetic construct
  misc_feature 1..1179: note = source = /note="Description of Artificial Sequence: Synthetic coding sequence"
  source 1..1179: mol_type = other DNA
atgaccacatacagcgataaaggagccaagcccgagcgaggtcgtttcctacacttccacagcgttaccttctgggtcgggaacgcaaaacaggcggccagtttctactgttctaaaatgggtttcgagccactggcctaccgcgggctcgaaaccggctctcgcgaagtcgtgagccacgtgattaagcaagggaaaatagtcttcgtcttgtccagtgcactcaacccctggaacaaagaaatgggagaccatcttgtgaagcacggagacggagtgaaggacatcgcattcgaggtggaggactgtgattatatcgtacagaaagccagagagcgaggggctaagatcatgagagaaccatgggtggagcaggataagtttggaaaggttaagttcgccgtgctccagacatacggagatacgacccacacactggttgaaaagatgaactacatcggccagtttctacccggctacgaggctcctgctttcatggatcccttgttgccaaagctccccaagtgctcccttgaaatgattgaccacatcgtgggaaatcagcctgatcaggaaatggtgagcgcatctgaatggtatctcaagaacctgcagttccaccgattttggtcagtggatgatacccaagtccacactgagtactcatcgctgcgttccatcgtggtcgccaactatgaggaaagtatcaagatgcccattaacgagcccgccccaggtaagaaaaaaagccagatacaggaatatgttgattacaacggcggtgctggtgttcagcacattgcactgaagaccgaagatataatcacagcgattagacacctgcgcgaaagaggcctggaatttctgagcgtgccgagcacctactataaacagctgcgggaaaagctgaaaacagccaagattaaggtcaaggaaaatatagatgccctggaagagttgaagatcttagtagactatgatgaaaaggggtatctcttacagatctttactaagcccgtacaggaccgccccaccctgttcctggaagttattcagagacacaaccatcagggatttggtgcgggcaacttcaacagtttattcaaggcctttgaggaggagcagaacctgaggggtaatcttaccaatatggagacgaatggcgtggtaccaggcatg

SEQ ID NO: 5475 - DNA, 1179 bp, synthetic construct
  misc_feature 1..1179: note = source = /note="Description of Artificial Sequence: Synthetic coding sequence"
  source 1..1179: mol_type = other DNA
atgactacttactcggataagggggcaaaaccggaacggggacgcttccttcacttccactccgtgaccttctgggtgggaaatgccaaacaggcagcatcattctactgctctaaaatgggattcgagccgctcgcctaccgcggtctggaaaccggctcgcgggaggtggtgtcccacgtcatcaagcaaggtaagatcgtgtttgtgctgtcctcggccctgaatccatggaataaagaaatgggagatcacctggtcaagcatggcgatggggtgaaggacatcgcattcgaagtggaagattgtgactacattgtgcagaaggccagagaaaggggcgccaaaatcatgcgcgagccatgggtcgaacaagataagtttgggaaggttaagttcgccgtcttgcagacgtatggggatactacccacactctggttgaaaagatgaattacatcggccagtttctccccggatacgaggctccagcgttcatggacccgctgctcccaaagctcccgaagtgtagccttgaaatgatcgaccatatcgtgggaaaccaacccgaccaggaaatggtgtctgcatctgagtggtacctgaaaaacctccagtttcacagattttggtcggtggacgacactcaggtccacactgaatactcaagcctgcggtccatcgtggtggcgaactacgaggagtccatcaagatgcctattaacgagccggccccaggtaaaaagaagagccagattcaggagtacgtggattacaacgggggagcgggggtgcaacacatcgctttgaaaactgaggacatcattaccgcgattcggcaccttcgcgaaaggggtcttgagtttctgtcggtgccttcgacgtactataagcagctccgcgagaaacttaagaccgccaagattaaagtcaaggaaaacatcgacgccctggaagagcttaagatcctcgtcgactacgacgagaagggatacttgctgcagatcttcaccaaacccgtgcaagaccgacctacgctcttcctggaggtgatccagagacataaccatcagggattcggagcagggaacttcaattctttgttcaaggcattcgaggaagaacagaacctgcggggtaatttgaccaacatggagactaacggagtggtgccggggatg

SEQ ID NO: 5476 - DNA, 1179 bp, synthetic construct
  misc_feature 1..1179: note = source = /note="Description of Artificial Sequence: Synthetic coding sequence"
  source 1..1179: mol_type = other DNA
atgaccacgtactcggacaagggagcgaagccagagagaggaaggttcctgcacttccacagtgtcactttttgggtggggaacgccaagcaggcagcgtctttctactgctcgaagatgggattcgaaccactcgcctaccgcggacttgaaaccggatccagagaggtcgtttcgcatgtgatcaagcagggaaagatcgtgttcgtgctgtcatcagcgcttaacccatggaacaaagagatgggcgaccacctggtgaaacatggtgacggcgtgaaggacattgcgttcgaggtggaagattgcgactacatagtgcagaaggcccgggagcgcggagccaagattatgcgggagccgtgggtcgaacaggataagttcgggaaagtcaaatttgcggtgctgcaaacctacggagatactactcatactttggtggagaagatgaattacatcgggcagttccttccaggttacgaggctcctgccttcatggacccgcttctcccgaagttgcctaagtgctcactggagatgattgaccatatcgtgggcaaccaacccgaccaggagatggtcagcgcttccgagtggtacctcaaaaatctgcagttccaccggttttggtcggttgatgatactcaggtccacactgaatactcatccctcagaagcatcgtcgtggccaattacgaagaatcgatcaagatgcccatcaacgagccggctcctggaaagaagaagtcgcagatccaagaatacgtggactacaatggaggcgctggagtccaacatatcgcactcaagaccgaagatatcatcactgcgatccggcacctgcgcgagcgcggactggaattcctgtcagtgccaagcacttactacaagcaactccgcgagaagctcaaaaccgctaaaatcaaagtcaaggaaaacattgacgcattggaggagctgaagatactggttgattacgacgaaaagggatacctgctgcaaatcttcaccaagccggtccaagaccgtcctaccctgtttcttgaagtgatccagaggcacaaccatcagggatttggagcagggaatttcaacagcctgtttaaggctttcgaggaagagcaaaacctccgcggcaatctgactaacatggagactaacggcgtggtgccgggaatg

SEQ ID NO: 5477 - DNA, 1179 bp, synthetic construct
  misc_feature 1..1179: note = source = /note="Description of Artificial Sequence: Synthetic coding sequence"
  source 1..1179: mol_type = other DNA
atgaccacttacagcgataagggtgcaaagcctgaacgtggcagatttcttcacttccactcggtcaccttttgggtggggaacgcaaagcaggcagcttccttctactgttcaaagatgggattcgaaccactggcctacagaggtctggaaacgggctcgagggaagtggtgtcccacgtgataaagcagggaaagatagtattcgtgcttagcagcgctctgaacccttggaataaagaaatgggtgaccatctggtcaagcatggtgacggagtgaaggatattgcctttgaagtcgaggattgcgattacatagtgcaaaaggcgcgcgaacgtggggcgaaaatcatgcgcgaaccctgggtcgaacaagataagtttgggaaagtgaagtttgcagtgcttcaaacgtacggggataccactcatactctggtggagaaaatgaactatatcggtcagtttctgcctggatatgaagcgccagcattcatggaccctcttctgcccaagttgccaaagtgttccctggaaatgattgaccatattgtgggaaatcaaccagaccaagaaatggtgtcggcatcagaatggtacctgaagaaccttcagttccacagattctggtccgtggatgatacccaggtacataccgagtactcctcgctgaggtcgatcgtcgttgcaaattacgaggaatcgattaagatgcctattaacgaaccggcgccgggaaagaaaaagtcacagattcaagaatacgtcgattacaacggtggagcaggggtccaacacatcgcactgaaaactgaggacatcatcaccgcgattcgtcatcttcgagagaggggtttggagtttctctcggtgccttcgacctactacaagcagcttcgggaaaaactcaagactgcaaagatcaaagtgaaagagaacatagacgctctggaggaactcaagatcctggtggattacgatgagaagggatatctgcttcaaatctttactaaaccggtgcaggataggccgaccctgtttctcgaggtgattcaacgtcataaccatcaaggcttcggggccggaaatttcaattcactgtttaaagcctttgaagaggaacaaaacctgagaggcaacctgaccaacatggaaactaatggtgttgtcccagggatg

SEQ ID NO: 5478 - DNA, 1179 bp, synthetic construct
  misc_feature 1..1179: note = source = /note="Description of Artificial Sequence: Synthetic coding sequence"
  source 1..1179: mol_type = other DNA
atgaccacatatagcgataagggggccaagcccgagaggggacggtttctccactttcactccgtgaccttttgggtaggcaatgctaaacaggccgcttcgttttactgcagcaagatgggatttgagccactcgcttaccgtggtctcgagaccggatcccgagaagtagtgagtcatgtgatcaagcaggggaaaattgtctttgtgttgtctagtgctcttaacccctggaacaaggaaatgggtgatcacctggtcaagcacggggacggggtaaaggacatcgctttcgaagtcgaagattgcgattacattgttcagaaggctagggaacggggggcaaagatcatgagagaaccctgggttgaacaggataaatttgggaaagtcaagttcgccgttttgcagacttacggagacactacacacacactcgtggagaagatgaattacatcggacagtttctaccaggatacgaagccccagccttcatggatcccctgctgccaaaactgcccaaatgctctcttgagatgattgaccatatcgttggaaaccagccagatcaggaaatggtctcagcctctgagtggtacctcaagaacttgcaattccacaggttttggtctgtggatgacactcaggtgcatactgaatatagttctctgagatcaattgtggtggcaaattacgaagagtctatcaagatgcctataaacgagcccgctcctggcaagaagaagtcacaaatccaagaatatgtggattataatggaggagccggcgtgcagcatatcgccttgaagacagaagatatcataacagctattcgccatctgcgggaacgaggccttgaatttctttccgtgccctctacgtactacaagcagcttagagaaaaacttaaaactgcgaaaatcaaggttaaagagaatatcgacgcgctggaagaattgaaaattctggtagattatgacgaaaaaggctacctgctgcagatcttcacaaagccggtacaggaccgtcccactttatttctagaggtgatccagaggcacaatcatcagggtttcggcgcagggaattttaacagcctcttcaaggccttcgaagaagagcagaacctccggggcaacctaactaatatggaaaccaacggcgtcgtgccaggcatg

SEQ ID NO: 5479 - DNA, 1179 bp, synthetic construct
  misc_feature 1..1179: note = source = /note="Description of Artificial Sequence: Synthetic coding sequence"
  source 1..1179: mol_type = other DNA
atgaccacttacagcgataagggagcgaagcccgagcggggcagattcctccatttccatagcgtcactttctgggtcggaaacgccaagcaggctgcgtccttctactgttcgaaaatgggattcgaaccgctggcgtaccgaggattggaaaccggatcaagggaagtggtgagccacgtgataaagcaggggaaaatcgtgttcgtgctgagcagcgccctcaacccgtggaacaaggagatgggagatcaccttgtgaagcacggggacggcgtcaaagacatcgccttcgaagtggaagattgcgactacatcgtccagaaggcgcgcgaaagaggcgcaaagattatgcgggaaccatgggtcgaacaggacaagtttgggaaggtgaaattcgccgtcctgcagacttacggtgacaccactcacactctggtggagaagatgaactacattggtcagttcctgcccggatatgaagcccccgcgtttatggacccgttgcttccgaagctgccaaagtgctctttggagatgattgatcatatcgtgggaaatcagccagatcaggaaatggtgtcggcgtccgaatggtacctgaagaacctgcaattccaccgcttttggtctgtcgacgatactcaggtgcacaccgagtactcctcactgcggagcattgtagttgctaattacgaagagtcaatcaagatgccgatcaacgagccagcaccgggtaagaagaaaagccaaatccaagagtacgtcgactacaatggcggagccggtgtacagcacattgccctcaagactgaagatatcataacggccatccggcacctgagagaacgcggcctcgaattcctgtcggtgccatcaacctactataaacagcttcgggaaaaactcaaaaccgccaaaatcaaggtcaaggagaatatcgacgcactggaggaactcaagatccttgttgactacgatgagaagggatacctcctgcaaatctttacgaagccagtccaggacagacctacgttgttcctcgaggtgatccaaagacataaccatcaaggatttggagctggtaactttaactcacttttcaaggctttcgaggaagagcaaaacctgcggggaaacttgactaatatggaaaccaatggagtggtcccgggcatg

SEQ ID NO: 5480 - DNA, 1179 bp, synthetic construct
  misc_feature 1..1179: note = source = /note="Description of Artificial Sequence: Synthetic coding sequence"
  source 1..1179: mol_type = other DNA
atgactacctacagcgacaagggggctaaaccggagaggggcaggttcctgcacttccatagcgtgaccttctgggtggggaatgcgaagcaggcagcctctttctattgcagtaagatgggtttcgagcccctcgcctacagggggctggaaacgggcagccgggaagtggtcagccatgtgatcaagcaaggaaagatcgtctttgtgctctcatctgctctcaacccatggaataaggaaatgggcgaccatctggtgaagcacggggacggagtgaaggacattgcgttcgaagtcgaggactgtgattacattgtgcagaaagccagagaacgcggggccaaaatcatgcgggaaccttgggtcgagcaagataagtttggaaaggttaagttcgctgtgctgcagacctacggtgacacgactcataccctggtggagaaaatgaactacattgggcagtttctcccagggtacgaagccccagccttcatggaccctcttctgccaaagctgccgaagtgcagcctggagatgatcgaccacatcgtgggcaaccaaccggatcaggaaatggtgtccgcttctgaatggtacctgaagaatctccagttccaccgcttctggtcggtggacgatactcaggtgcacacggaatactcgagcttgcgatccatcgtggtggccaactacgaagagtccatcaagatgccgatcaatgagccggcgcccgggaagaagaagtcccagatccaggaatacgtggactacaacggcggagccggggtgcaacacatcgctctgaaaaccgaggatatcatcactgcaattcgccaccttcgggagcggggacttgaattcctctcggtgccatccacgtactacaagcaattgagagagaaacttaagactgcaaaaatcaaggttaaagaaaacattgacgcactggaagagctcaagatcctggtggattacgacgagaaaggatacttgctgcagatctttacgaagcctgtgcaagatagaccgaccctcttcctggaggttatccagcgccacaatcaccaaggcttcggagccggcaactttaactctctgtttaaagcgttcgaagaggaacagaatctccggggaaacttgaccaacatggaaactaatggagtcgtcccaggaatg

SEQ ID NO: 5481 - DNA, 1179 bp, synthetic construct
  misc_feature 1..1179: note = source = /note="Description of Artificial Sequence: Synthetic coding sequence"
  source 1..1179: mol_type = other DNA
atgaccacttactcggacaagggtgcgaagccggaacggggtcggttcctccacttccactctgtcaccttctgggtgggtaacgccaagcaggcggcatccttttactgctctaagatgggattcgaacctctggcttaccgcggcctggagactggtagcagagaggtcgtgtcccatgtgatcaaacaagggaaaatcgtgttcgtcctgtcgtccgctttgaacccgtggaataaggagatgggggaccacctcgtgaagcatggagacggagtcaaagacatcgctttcgaagtggaggactgtgactacatcgtccagaaagctcgagagagaggtgcgaagataatgcgggaaccttgggtggaacaggataagtttggcaaggtgaaattcgctgtcctgcaaacttatggagacactactcacaccctcgtggaaaagatgaactacatcgggcagttcctgcctggatacgaggcccctgctttcatggaccccttgctccctaagctgccgaagtgctcgcttgaaatgattgaccacattgtgggaaaccaaccggatcaggaaatggtgtccgcttccgagtggtatctcaagaaccttcagttccaccgcttctggagcgttgacgacactcaagtgcataccgagtacagctcgctgaggtccatcgtggtggccaactacgaagaatcgattaagatgccgatcaacgaaccggcacccggaaaaaagaagagtcagatccaggagtacgtggattacaatggaggagcaggcgtgcaacatattgccctgaaaaccgaggatatcataactgcgatccgccaccttcgggaacgtgggctcgaattcctcagcgtgccatcaacttactacaaacaactccgggagaagctgaaaaccgccaagatcaaggtgaaagaaaacattgacgcccttgaagaacttaagattctggtggactacgatgagaagggatacctcctccaaatctttactaagccggtgcaggataggccaaccctgttcctcgaggttattcagagacataatcaccaaggattcggggcaggaaacttcaactcactgtttaaagcgttcgaggaagagcagaatttgaggggtaacctcacgaatatggaaactaatggcgtggtgccgggtatg

SEQ ID NO: 5482 - DNA, 1179 bp, synthetic construct
  misc_feature 1..1179: note = source = /note="Description of Artificial Sequence: Synthetic coding sequence"
  source 1..1179: mol_type = other DNA
atgacaacctactctgacaagggagccaagccggaacgaggccgcttcctccactttcactctgttaccttctgggtggggaacgctaaacaggccgctagtttctattgtagcaagatgggatttgaacctctggcttatagggggctggaaaccggttctagggaggtggtctcccacgtgatcaaacaggggaagatcgtgtttgttttgagctccgccctgaacccctggaacaaggaaatgggcgaccatctagtcaaacatggagatggagtgaaggacatcgcctttgaagttgaggactgcgattacatcgtgcagaaggctagggaacgaggcgccaagattatgcgagagccctgggttgaacaggacaaattcgggaaggttaagttcgccgtgctgcagacgtacggtgacacaacccatacccttgttgaaaagatgaattacatcgggcaatttcttccaggatatgaggcaccagccttcatggacccgctgctgcctaagctgcctaaatgtagccttgaaatgatcgaccatatagtaggcaaccagccagatcaggagatggtgagcgcatctgaatggtacctgaagaacctccaattccatcggttctggtctgtggacgatacacaggtgcatactgaatactcctccctgagatccatcgtggtcgccaattatgaggagagcattaagatgccgatcaatgaaccggcccccggtaagaaaaaatcccaaatccaagaatatgtagactacaatggcggggccggagtgcagcacatcgccctcaagacagaggatataatcactgcgataaggcatctgagggaaaggggtctcgagttcctatcagtgccttccacatattacaagcagttgcgtgagaagttgaaaacggcgaagatcaaggtgaaggagaacattgatgcccttgaggagttaaagatcctcgtggactacgacgaaaagggctatttgttgcaaatctttactaaaccagttcaggaccgaccaacgctcttcctggaggtcattcagcggcacaaccatcaaggcttcggggccgggaatttcaattcgctttttaaagcatttgaagaggagcagaatcttcggggaaacttgacaaatatggaaacgaatggggtggttcccggaatg

SEQ ID NO: 5483 - DNA, 1179 bp, synthetic construct
  misc_feature 1..1179: note = source = /note="Description of Artificial Sequence: Synthetic coding sequence"
  source 1..1179: mol_type = other DNA
atgactacatattctgataaaggggcgaaaccggaaagagggagatttttgcattttcattccgtaacattttgggttgggaatgccaagcaagcagcctcgttctattgctctaaaatgggattcgaacctttagcataccgtggccttgaaaccggaagtagagaggtggtgtctcatgttatcaaacagggtaaaattgtcttcgtactgtcctctgctttaaatccttggaacaaagagatgggagatcatctggtgaaacacggcgatggagttaaggatatcgctttcgaggtcgaggactgcgactacattgttcagaaagcacgagaacgcggggcaaaaattatgagggaaccctgggtcgaacaagataaatttggcaaggtgaagttcgcagtcctgcagacgtatggcgatacaacgcatacacttgttgaaaaaatgaattatattgggcagtttctacctggatacgaagcaccggcctttatggatccgttgcttcctaaacttccaaagtgttcattagaaatgatcgaccacatcgttggaaaccagccggaccaggaaatggtgtccgcttcggaatggtatctgaaaaatcttcagtttcaccgcttttggtcagtcgatgatacacaagtacatactgaatactctagcttaagatctatcgtggtggcaaattatgaagaaagcatcaaaatgccgattaacgaaccggcgccaggtaagaaaaaatcacagattcaggagtacgttgactataacggcggagcgggggttcagcacatcgcgttgaaaacagaagacatcataaccgcgattcgacatcttcgcgagcgtggtctcgaatttcttagcgttccatcgacatattataaacagcttcgggaaaaacttaaaacggcgaaaattaaagtcaaagaaaatatcgatgcccttgaggaattgaaaattctggtggattatgatgaaaaaggttatctgcttcaaatctttacaaaaccggtccaagataggccgactctttttcttgaggtgatccaaagacataatcatcaaggctttggcgcgggtaactttaacagcctgtttaaggcatttgaggaagaacagaatctgcggggcaatttgacaaacatggaaaccaacggtgtcgtcccgggtatg

SEQ ID NO: 5484 - DNA, 1179 bp, synthetic construct
  misc_feature 1..1179: note = source = /note="Description of Artificial Sequence: Synthetic coding sequence"
  source 1..1179: mol_type = other DNA
atgaccacttactctgacaagggggcaaagcctgaaaggggaagatttctccattttcattccgtcaccttttgggtcggaaacgcgaagcaggctgcatccttttactgctcaaagatgggattcgaacctctggcgtacagaggacttgaaaccggatccagggaagtggtgagccacgtgatcaagcagggtaagattgtgttcgtgctgtcatcggcccttaacccatggaataaggaaatgggagatcatctggtgaagcatggtgatggagtgaaggatattgccttcgaagtggaagattgtgattacattgtgcaaaaggctcgggaacgtggcgccaagattatgcgggagccgtgggtggagcaagacaaattcggaaaggtgaagtttgcagtgctgcaaacttacggcgatactacccataccctggttgaaaagatgaactacatcggacagtttttgcctggctacgaggctcctgcatttatggatccactcctgcctaagctgcctaaatgcagccttgaaatgatcgatcacattgtgggcaaccaaccagatcaagaaatggtgtcggcatcagagtggtacctgaaaaacctccagtttcataggttctggtcagtggatgatacgcaagtgcacactgaatactcgagtttgcgttcaatcgtggtggccaattacgaggagagcatcaagatgcctataaacgaacctgcacccggcaaaaagaagtcgcaaattcaggagtacgttgattacaatggaggagctggagtccaacatatcgcccttaagactgaggacatcataactgcaattcggcacctgagggaaagaggccttgaatttctttccgtgcccagcacttactacaaacaactccgtgaaaagctgaaaactgccaagatcaaggtgaaggagaatatcgacgcacttgaagaacttaagattctggtcgattatgatgaaaagggctatctgcttcagattttcaccaaacctgtgcaggaccgtccaacccttttcctggaggtgattcaacgccataaccatcaaggttttggtgctggcaactttaacagcctctttaaagcattcgaggaggaacaaaaccttagaggaaaccttaccaatatggaaactaacggagtggtcccgggtatg

SEQ ID NO: 5485 - DNA, 1179 bp, synthetic construct
  misc_feature 1..1179: note = source = /note="Description of Artificial Sequence: Synthetic coding sequence"
  source 1..1179: mol_type = other DNA
atgaccacttactcggacaaaggagcgaaaccagagcgtggaagattcttacatttccatagcgttaccttctgggtaggaaatgcaaaacaagccgcatcgttttattgtagcaaaatgggattcgaacctcttgcgtatcggggcttggagactggtagtcgtgaagttgtttcccatgttattaagcaagggaagattgtcttcgtcctgagttcagcactgaatccgtggaacaaagaaatgggagatcacttagtaaagcatggagacggagtaaaagacattgcattcgaagtggaagactgtgattatatcgtccaaaaagcacgagaaagaggagccaagattatgcgagaaccatgggtcgaacaggataagttcggaaaagttaagtttgcagtccttcagacttatggagatactacacacactctggtagagaagatgaattacataggacaatttctgccaggatatgaggccccagcttttatggacccattattgccaaaacttcctaagtgctcactcgagatgatcgatcacattgtcggaaaccaaccagatcaagaaatggtaagcgcttcagaatggtatcttaaaaacctccagttccaccgtttctggtctgtcgacgatacacaagttcatacggagtattcatcattgagatcaatcgtggttgcaaattatgaagaatcgattaagatgccaattaatgaaccggcaccaggaaagaaaaagagccaaatacaagaatacgtggactacaatggaggggcgggagtccaacatattgcattgaagacagaggatataatcactgcaatcagacacctacgtgagcgaggactggagttcttgtcagttccaagtacatactataaacagctacgagagaaactcaagaccgctaaaattaaagtcaaagagaatatagatgcgctggaggaattgaaaattttagttgactatgatgaaaagggatacttgttgcagatttttaccaaaccagttcaagatcgtcccacactttttctggaggtaattcaacgtcataatcaccagggttttggtgcaggtaactttaacagccttttcaaggcattcgaagaggagcagaacttgcgtggaaatctgactaacatggagaccaatggagtcgtcccgggaatg

SEQ ID NO: 5486 - DNA, 1179 bp, synthetic construct
  misc_feature 1..1179: note = source = /note="Description of Artificial Sequence: Synthetic coding sequence"
  source 1..1179: mol_type = other DNA
atgacgacctattctgacaaaggggcaaaaccagagaggggacggttcctgcatttccattccgtgacgttctgggtcggaaacgcaaaacaagcggcatccttttactgttctaagatgggtttcgaaccactggcctaccgaggactcgagacgggctcgagagaagtggtgtcccatgtgattaagcaaggaaaaatcgtgtttgtgctgtcaagcgctctgaatccttggaacaaggaaatgggggatcatctggtgaagcacggggacggtgtcaaggatattgcctttgaggtcgaggattgcgattacattgtgcaaaaggcccgggaaagaggagccaagattatgagagaaccttgggtcgaacaagataagtttggcaaggtgaagttcgcagtgcttcaaacttacggagacactacccacactcttgtcgaaaagatgaactacattggccaatttcttcccggttacgaggcgcccgcatttatggaccctctgctgcctaaattgccgaaatgtagtcttgaaatgatagaccatattgtgggcaatcagccagaccaggaaatggtgtccgcttcggagtggtacctcaaaaacctgcagtttcaccgtttctggtccgtcgacgatacccaagtgcatactgaatactcttcccttcgctcgattgtggtcgcaaattacgaagagtcaatcaaaatgccgatcaacgaacctgcaccagggaagaagaagtcgcaaatccaggagtatgtggactacaacggtggtgctggagtccagcatatagctcttaaaactgaggatatcatcaccgcgatcagacatctgcgtgagagagggcttgaatttctttcggtaccatcaacttattacaagcagctgcgggagaaactgaaaaccgcaaagatcaaagtgaaggaaaacatcgatgcacttgaagaattgaaaatccttgtggattacgatgaaaagggatacctgctccagatattcacgaagccagtgcaggataggcctacccttttcctcgaagtcattcaacgacacaatcaccaaggtttcggagcaggtaactttaacagccttttcaaagcatttgaagaggaacagaatttgcgggggaacctcactaacatggagactaatggagtcgtaccagggatg

SEQ ID NO: 5487 - DNA, 1179 bp, synthetic construct
  misc_feature 1..1179: note = source = /note="Description of Artificial Sequence: Synthetic coding sequence"
  source 1..1179: mol_type = other DNA
atgactacatattcagacaagggcgccaagcccgagagggggagatttctccactttcactctgtcaccttctgggtggggaacgctaagcaggccgcaagtttctactgctccaagatgggattcgagccactggcctacagggggctggaaaccggcagcagggaggtggtgagtcacgtgatcaaacagggcaaaattgttttcgtcctaagctctgccttgaatccctggaacaaggaaatgggggatcaccttgtgaaacacggcgacggggtgaaggatatcgcattcgaggtcgaggattgcgactacatcgtacagaaagctagagagcgcggggctaagattatgcgcgagccttgggtagagcaggacaagttcggcaaggttaagttcgccgtcctgcagacatatggcgacacaactcataccctggttgagaagatgaattacataggccagttcttgcccggttacgaagcccccgccttcatggaccccctgctgccaaagcttccgaaatgcagtttggagatgatcgaccacatagttggaaaccaacctgatcaggaaatggtgagcgcctctgaatggtatctgaagaatcttcaatttcaccgcttttggtccgtggatgatactcaggtgcacacagaatacagcagcctgcggtcgatagtggtggcaaactacgaggaatccatcaagatgccaattaacgaacctgctcctgggaaaaagaaaagccaaattcaggaatatgtggactacaacggcggggctggcgtgcaacacattgcccttaaaaccgaagatattattacggcgattcggcatctgcgagagcgaggactcgaattcctgtccgtgccgtccacatactataaacagctgagggagaagcttaagacagcgaaaatcaaggtaaaggagaacattgatgccctggaagaactgaagatcctcgtggattacgacgaaaagggctatctccttcagatttttactaaaccagttcaagatcgtcctacacttttcttagaagtgattcaacgccacaaccaccaggggtttggcgcaggcaatttcaatagccttttcaaagctttcgaagaagagcagaatctccgaggcaacctgactaatatggagaccaacggcgtcgtgccaggcatg

SEQ ID NO: 5488 - DNA, 1179 bp, synthetic construct
  misc_feature 1..1179: note = source = /note="Description of Artificial Sequence: Synthetic coding sequence"
  source 1..1179: mol_type = other DNA
atgactacatattctgataagggcgccaagcctgagcgtggccgcttcctgcactttcatagtgttaccttctgggtcggaaatgctaaacaggcagccagtttctattgttctaagatgggctttgagcctcttgcctatcgggggttagaaaccggctcacgggaggtggtgtcacatgtgattaaacagggaaagatagtgttcgtcctgtcttctgcactgaacccctggaataaggaaatgggtgatcacctggtgaagcatggcgacggagtaaaagacatcgctttcgaggtagaagattgcgactacattgtgcaaaaggcacgtgaaaggggggctaagattatgcgggagccctgggtggagcaggacaaattcggcaaggtcaaatttgccgtgctacaaacctatggtgatactacccacaccctagtggaaaaaatgaactatattggacaattcctgccagggtacgaggcacctgcctttatggacccactgctgcctaaacttcccaagtgctcattggaaatgattgatcatatcgtgggcaaccagcctgaccaggagatggtgagtgcatccgaatggtacctaaagaacctacagtttcataggttttggagcgttgacgatacacaggttcacactgagtacagctctctccggtccattgtcgttgctaattatgaagaaagcatcaagatgccaataaatgagccagcacccgggaagaaaaaaagccagatacaggagtacgtggactacaatggtggcgccggagttcaacatatcgccttaaagaccgaggacattatcactgccatccggcacctgcgagaaagaggcctcgaatttctcagtgtaccaagtacatactataaacagctaagagagaaactgaaaaccgccaagattaaggtcaaggaaaatatagatgcactggaggaactgaaaatccttgtcgattatgacgagaagggctacctgttacaaattttcacaaagcccgttcaggatcggccaaccctattcctggaggttatacagcggcacaatcatcagggcttcggagctggcaacttcaatagcctatttaaagccttcgaggaggagcaaaatctgcggggaaacctcaccaatatggagacaaacggcgtggtgcctggaatg

SEQ ID NO: 5489 - DNA, 1179 bp, synthetic construct
  misc_feature 1..1179: note = source = /note="Description of Artificial Sequence: Synthetic coding sequence"
  source 1..1179: mol_type = other DNA
atgaccacgtattctgataaaggagccaagcccgagcggggaagatttctccacttccactctgtcaccttctgggtcgggaatgcgaaacaggcagcctcattctactgctcaaaaatggggttcgagcctttagcctatcgcgggttggaaacggggtcaagggaagtggtgtcacatgtcatcaagcaagggaagatcgtgtttgtgttgtcgtcagccctgaatccctggaacaaggagatgggcgaccatctggtgaaacacggagatggtgtgaaagacatcgctttcgaagtcgaggactgcgactacatcgttcaaaaagcccgggaaaggggagccaagattatgagggagccatgggttgaacaagataaattcggtaaggtgaaattcgctgtacttcagacctatggcgacactacacatactctcgttgaaaaaatgaattatatcgggcagtttttgcctggctacgaggctcccgcgtttatggatcccttgctgccgaagctacctaagtgcagtctggagatgattgatcatatagtgggtaaccaacccgaccaggagatggtgagtgcctccgaatggtacctgaaaaatctgcagtttcatcggttctggtcagttgatgacactcaggtgcatacagagtacagctcattgcggtcaatcgtggtcgccaactacgaagagagtattaaaatgccgatcaatgaaccagcccctggcaaaaagaaatcccaaatacaggagtatgtcgactacaacggcggcgcaggagttcagcacatagccctcaagaccgaagacatcatcactgcgatccgccatttgcgcgaaaggggcctggagtttctgtcagtgccaagcacgtactataagcagctgcgcgagaaattaaagacagccaagatcaaagttaaagaaaacattgacgccctagaagagttaaaaatcctggtggactacgatgagaagggatatttactgcagatctttaccaagcccgttcaggaccgccctacactgttcctggaggttatccagaggcacaatcatcagggattcggcgcaggaaattttaacagtctgtttaaagccttcgaagaagaacaaaatttaaggggcaatcttaccaatatggagaccaatggggtggtacccggaatg

SEQ ID NO: 5490 - DNA, 1179 bp, synthetic construct
  misc_feature 1..1179: note = source = /note="Description of Artificial Sequence: Synthetic coding sequence"
  source 1..1179: mol_type = other DNA
atgacgacttattcagataaaggcgccaagccagagcggggaagatttctgcacttccattcagtgaccttttgggtgggaaacgctaagcaggccgcgagcttctattgtagcaagatgggcttcgaaccactggcttacagaggtcttgaaaccggttcaagggaagtggtgtcacatgtgatcaagcaggggaagatcgtattcgtgctgagctctgcgctgaatccctggaacaaggaaatgggggaccatcttgtcaaacacggagatggagtgaaggacattgcatttgaggtggaagattgtgattacatagttcagaaagcccgggaaagaggggcaaagataatgagggaaccttgggtggaacaggacaagtttgggaaagtcaagtttgcagtgctgcagacttacggagataccacccatacgctggtggaaaagatgaattacataggtcaattcctccccggatacgaggcacctgcatttatggacccgctgctccctaagttgccaaaatgttcgctcgaaatgatagaccatattgtcggaaatcagcctgatcaagagatggtgtccgcctccgagtggtacctcaagaacctgcaatttcacagattttggagtgtcgatgatactcaggtgcacaccgaatactcatccctccggtcgattgtggtcgcaaactacgaggaatccattaagatgccaattaacgagccagccccaggaaagaaaaagtcgcagatccaggagtacgtggactacaacgggggcgctggagtccaacatattgctctgaaaactgaggacatcattactgcgattagacatctccgagaacggggattggaatttctttcggtcccatccacttactacaaacagctgagagaaaagctgaaaacggcaaagattaaggtgaaggaaaacatcgacgcactggaagagttgaaaatactggtggattacgacgaaaagggataccttttgcaaatctttaccaaaccagttcaagatcgccccactctgtttctggaagttatccaaagacataaccaccaaggtttcggtgcagggaactttaacagcctcttcaaggcattcgaggaggaacagaaccttcgggggaatcttacgaatatggaaactaatggtgtagtgccaggtatg

SEQ ID NO: 5491 - DNA, 1179 bp, synthetic construct
  misc_feature 1..1179: note = source = /note="Description of Artificial Sequence: Synthetic coding sequence"
  source 1..1179: mol_type = other DNA
atgactacatactcagataagggcgccaagccggagcgcggaagattccttcatttccattctgttaccttctgggtgggaaacgctaagcaagctgcctcattctactgctcaaagatgggctttgaaccactggcctaccgcggattggaaactggctctagggaggtggtttcccatgtcattaaacagggtaagatcgtttttgtcctgagtagcgcccttaatccgtggaacaaggagatgggtgatcaccttgtgaaacatggtgatggagtcaaggatattgctttcgaggtagaagactgcgactatatcgtacagaaggccagggagaggggagccaagattatgcgcgaaccttgggtcgagcaagataagttcggaaaagtcaaatttgccgtgcttcagacctatggagacaccacccacacacttgttgagaaaatgaattatatcggtcaattcctgcctggatacgaggcaccagcctttatggatcctctcctgcccaaactgcctaagtgttctttggagatgatcgaccatatcgtcggcaatcagcccgatcaggaaatggtgtccgcatctgagtggtacctcaaaaacctgcagttccaccgcttttggtcagtggatgacactcaagtgcatacagaatacagctccttgaggagcatcgtggtggctaactatgaggagtctatcaagatgcccatcaacgaacccgctcccggaaagaaaaaaagtcagatacaagagtatgtggactataacggcggtgctggtgttcaacacattgctcttaagacagaggacataatcacagctatccgccatctcagagagcgcggtctcgaattcctctcagtgccgtctacttactataagcagcttagggagaagctgaagaccgccaagatcaaggtcaaggagaatatcgacgcgttggaagaactgaaaatcttggtggattacgacgaaaagggatacttgctccagattttcacgaaaccagtccaggacaggcccaccctttttctggaggtcatccaacgccacaatcaccagggcttcggtgccggaaacttcaattccttgttcaaggctttcgaagaggagcaaaaccttagaggaaatctcaccaacatggaaacaaacggtgtcgtaccaggtatg

SEQ ID NO: 5492 - DNA, 1179 bp, synthetic construct
  misc_feature 1..1179: note = source = /note="Description of Artificial Sequence: Synthetic coding sequence"
  source 1..1179: mol_type = other DNA
atgactacatattcagataaaggagcaaaacctgaaagaggtagattcctacactttcattcagttacattttgggttgggaacgctaaacaagcagcatcattttattgctctaaaatgggttttgaaccattagcttatagaggattagaaactggatcaagagaagttgtaagtcatgtaattaagcaaggaaaaattgtttttgttttatcaagtgctcttaatccttggaataaagaaatgggagaccatttagttaaacatggagatggagttaaagatattgcatttgaagtagaagattgtgattatattgttcaaaaggcaagagaaagaggagccaaaattatgagagaaccttgggtagaacaagataaatttgggaaggttaagttcgcagtacttcaaacttatggtgatacaacacataccttagttgaaaaaatgaattatattggacaatttcttccaggatatgaagcaccagcttttatggatccattattgccaaaattaccaaaatgttcacttgaaatgattgatcatattgtaggaaatcagccagatcaagaaatggtttctgcatcagaatggtaccttaagaatttacagttccatagattttggtctgttgatgatacacaagtacatacagaatattcatctcttagatctattgttgttgcaaattatgaagaatctattaaaatgccaattaacgagccagctcctggaaaaaaaaaatcacaaattcaagaatatgtggattataatggaggtgcaggagttcaacacattgcacttaaaactgaagatattattactgctattagacatttaagggaaagaggattagaatttttaagtgttccatcaacttattataagcaattaagagaaaaattaaaaacagcaaaaattaaagttaaagaaaatattgatgctttagaagaattaaaaattcttgtagattatgatgaaaaaggatatcttttacaaatttttactaagccagttcaagatcgaccaactctttttcttgaagtaattcaacgacataatcatcaaggattcggtgctggaaattttaattcattgttcaaggcatttgaagaagaacaaaacttaagaggtaatttaacaaatatggaaacaaatggagttgttcctggaatg

SEQ ID NO: 5493 - DNA, 1179 bp, synthetic construct
  misc_feature 1..1179: note = source = /note="Description of Artificial Sequence: Synthetic coding sequence"
  source 1..1179: mol_type = other DNA
atgaccacttactccgataaaggtgccaagccagagcgcggccggtttctgcatttccatagcgtaaccttttgggttggtaatgccaagcaagcagccagcttctactgctccaaaatgggttttgaaccactggcataccggggcttggaaactggttcacgcgaagtggtttcacatgtcattaaacaaggaaagattgttttcgtacttagcagcgcactgaacccttggaataaagagatgggagatcacctggtgaagcatggggatggcgtgaaggacattgcgtttgaggtggaagattgcgattacatcgtgcagaaggcaagagaaaggggtgcaaagattatgcgcgagccttgggtcgaacaagacaaatttggaaaggttaagtttgccgtgcttcagacttacggcgacaccacccatacgcttgtggaaaagatgaactacattggacagtttctccctgggtacgaggcccccgcatttatggatcccctgcttccaaaactgcctaagtgcagccttgagatgattgaccatattgtgggaaatcaacctgaccaagaaatggtgagcgcctcggaatggtaccttaagaaccttcagttccatcgattctggtctgtggacgatacccaagtgcacactgagtactcctccctgagatcgatagtggtcgcaaattacgaagaatcgattaagatgccgattaacgaacccgcgccaggtaaaaagaagtcgcagatccaggagtacgtcgactataatggtggcgcaggagtccagcatattgctctcaagacggaggacataatcaccgcgatcaggcatctccgggagaggggtctggaatttctgtcggtgccctcgacctactacaaacaattgcgggaaaaacttaagaccgcgaagatcaaagtcaaggaaaacatcgatgctctggaagaacttaagattctcgtcgattatgatgaaaaaggataccttctgcagattttcactaagccagtccaggacaggccaactctgttcctcgaagtcattcagcgccacaatcatcaaggatttggagcgggtaacttcaattcactcttcaaggcatttgaagaagaacagaacctgagaggcaatcttaccaacatggaaacgaacggtgtggtgccaggtatg

SEQ ID NO: 5494 - DNA, 1179 bp, synthetic construct
  misc_feature 1..1179: note = source = /note="Description of Artificial Sequence: Synthetic coding sequence"
  source 1..1179: mol_type = other DNA
atgaccacgtactccgataaaggcgcgaaaccggaacgcggacgcttcttgcacttccactcggtgaccttttgggtgggcaacgcgaagcaagcggcctccttttactgctccaagatgggattcgagccgctggcatacagaggactcgaaaccggatcccgcgaagtggtcagccacgtgatcaagcaaggaaagatcgtttttgtgttgtccagcgctcttaatccttggaataaggaaatgggcgatcatctggtgaagcacggggacggagtgaaggacatcgcattcgaggtcgaggactgcgactacatcgtgcagaaggcgcgcgaacgcggtgccaaaatcatgcgcgagccttgggtcgaacaggacaagtttgggaaggtcaaatttgctgtgctgcagacctatggagatactacgcatactctcgtggagaaaatgaactacattggccagttcctgcctggatatgaagcaccggcgtttatggatccgctgctgccgaagctcccaaagtgctcgctcgaaatgatcgaccatattgtgggaaatcagccggaccaggagatggtgtccgccagcgagtggtacctgaagaatctgcagtttcatagattctggtcggtggacgacacccaagttcatactgagtactcctccctgcgctccatcgtggttgctaactacgaagagtcgatcaagatgccaatcaacgaaccggcgccaggtaaaaagaagtcacagatccaagaatacgtggactacaacgggggagctggagtccagcatattgcgttgaaaactgaggacattatcaccgctatcagacacctccgcgagaggggactggaattccttagcgtcccaagcacctactacaagcagctccgggaaaagctgaaaactgccaagattaaagtcaaggagaatatcgacgccctcgaagagctgaagatcctggtcgattacgacgaaaaggggtatctgctgcagatcttcacgaaaccagtgcaggaccgcccgactctctttctcgaggtgatacagcgccacaatcatcagggattcggagccggaaacttcaactcactgtttaaagcattcgaagaggaacagaacctgcggggaaacctgaccaatatggaaactaacggcgtggtgcctggcatg

SEQ ID NO: 5495 - DNA, 1179 bp, synthetic construct
  misc_feature 1..1179: note = source = /note="Description of Artificial Sequence: Synthetic coding sequence"
  source 1..1179: mol_type = other DNA
atgactacctactctgataaaggcgcaaagcccgagcgcggtcgcttcctccattttcacagcgtgacattctgggtcggcaacgctaagcaggcggcgagtttctattgttctaagatgggatttgagccgctcgcttaccgcggattggagaccggttcccgagaggtcgtgtcccatgttattaaacaagggaagatcgtgttcgttctctcctccgccctaaacccatggaacaaggagatgggagatcacctggtcaagcatggcgacggtgtcaaggatatcgcattcgaagtggaagattgcgattacatcgtccaaaaggcccgagagcgcggcgccaagatcatgcgcgagccctgggtcgagcaggataagttcggtaaggtcaagttcgcagtgctccaaacgtacggtgacactactcacacactggtggagaagatgaactacatcggtcagttcctgcccggttatgaagcccccgcgtttatggatcctctacttcccaagttgcccaagtgctccctggaaatgatcgaccacatcgttggcaaccagcccgatcaggagatggtgtctgcttcggaatggtatctgaagaatttgcagttccatcgcttctggagtgtggatgatacccaagtccacaccgagtactcgagtcttcgtagcatcgtcgtggccaactacgaggagtcgatcaaaatgcccatcaacgagccggcgcccggcaagaagaaatcccagatccaggaatacgttgattacaatggaggtgccggcgtgcagcatatcgccctgaagactgaggacatcattacagccatccgacacctgcgcgagcggggtcttgagtttctgtcggtcccttccacctactacaagcagctacgcgagaagttgaaaacagctaagattaaggtgaaggaaaacattgacgcactcgaggagctgaaaatcctggtggattacgacgaaaaaggttacctgcttcaaattttcacgaaaccagtccaggaccgcccaaccctcttcctagaagtgattcagcgccacaaccatcagggattcggagccggcaacttcaactcattattcaaggcgttcgaggaggaacagaatcttcggggtaatctaactaacatggagacgaacggcgttgtcccgggcatg

SEQ ID NO: 5496 - DNA, 1179 bp, synthetic construct
  misc_feature 1..1179: note = source = /note="Description of Artificial Sequence: Synthetic coding sequence"
  source 1..1179: mol_type = other DNA
atgaccacctactcagataagggagcaaagccagagcggggacggttcttgcatttccactcagtgaccttttgggtgggcaacgcaaagcaagcagcgagcttctattgttccaagatgggttttgaacctctggcctatagggggctggaaactgggtcgagagaggtggtatcgcacgtgattaagcagggaaagatcgtgtttgtgctttcctcggcactgaatccgtggaacaaggaaatgggagatcatcttgtgaagcatggtgatggcgtgaaagacatcgcattcgaagttgaagattgtgattacattgtgcaaaaagcccgagagcgaggagctaagattatgcgggagccttgggttgaacaagacaagtttggcaaggtcaagtttgcggtgcttcaaacctacggagacaccactcacactttggtcgagaagatgaactacattggtcagtttcttcctggttacgaggcgccagcattcatggatcccctgctgcctaagctgcccaaatgctcgctggagatgattgatcacatcgtgggcaaccagccggaccaggaaatggtgtcagcatcggaatggtatttgaaaaacctccagtttcatcggttctggagtgtcgacgatacccaggtccatactgaatactcatctcttcggtcgatagttgtggcaaactatgaagaatcgatcaaaatgccgataaatgaacctgcacctggaaaaaagaaatcacaaatccaggaatacgtggattacaacggcggtgccggagtgcaacacatcgcactcaagactgaggacattatcactgcaatacgtcatcttagggaaagaggtttggaatttctgtcggtcccttcaacctactacaagcagctccgggagaagctgaaaacggcaaagattaaagtcaaggagaacattgatgcactcgaagagcttaagattctcgtggactacgacgagaaaggataccttctgcaaatctttaccaagccagtgcaagatcgcccaaccttgttcctggaagtgatccagcggcataatcatcaaggtttcggagccggtaactttaactccttgtttaaagccttcgaggaggaacaaaatctgaggggaaacctgacgaatatggaaaccaacggagtggtgcctggaatg

SEQ ID NO: 5497 - DNA, 1179 bp, synthetic construct
  misc_feature 1..1179: note = source = /note="Description of Artificial Sequence: Synthetic coding sequence"
  source 1..1179: mol_type = other DNA
atgaccacatactctgacaagggcgccaagcctgagcgaggcagatttctgcatttccactccgtgacattttgggtgggtaacgcgaagcaagctgcttcattctactgtagcaagatgggtttcgaaccgctggcatataggggactagagacaggcagccgggaggttgtctcacacgttatcaaacagggtaaaatcgtttttgtgctgagctcagccttgaacccgtggaataaggaaatgggggaccatctggttaagcacggtgacggagtgaaagacatcgccttcgaggtcgaagattgtgattatattgtgcaaaaggcccgagagagaggcgcaaagatcatgagggagccttgggtcgagcaagataagtttggcaaggtgaaattcgccgtactccagacctacggtgacactactcataccctggtggaaaaaatgaattatatcggacaatttctgccaggatatgaggctcctgcttttatggaccctctgttacctaagctccccaaatgcagcctggagatgatagatcatatagttggaaaccaaccggaccaggagatggtttccgcatccgagtggtatctgaaaaatctccaattccatcgcttctggtccgtggatgacacacaagtgcatacggaatattcctctctgcgctccatcgtcgtggccaactatgaggagtcaattaaaatgcccatcaatgagcctgcacccgggaagaagaaaagtcagatccaagaatatgtagactacaatggaggagctggggttcagcatattgcactcaagaccgaggacatcattaccgctatcaggcacttaagagaaagggggctcgagttcctctcggtccccagcacatactacaagcagctgagagagaagctcaagaccgcaaagatcaaggtaaaggaaaatattgatgctctggaagagttgaagatcctggttgattatgacgagaagggctacctcctccagatctttaccaagcccgtgcaggacagacccactttgtttctcgaggtgattcagcggcataaccaccaaggatttggagccgggaatttcaattctctgttcaaggcattcgaagaagagcagaatctgagaggaaatctaacgaacatggaaacgaatggggtcgtccccggcatg

SEQ ID NO: 5498 - DNA, 1179 bp, synthetic construct
  misc_feature 1..1179: note = source = /note="Description of Artificial Sequence: Synthetic coding sequence"
  source 1..1179: mol_type = other DNA
atgacaacatacagtgacaagggagctaagcctgagagaggccggttcctgcacttccattccgtcactttttgggtaggcaatgccaagcaagcagccagcttttactgttctaaaatgggatttgaacctttagcctatcgcgggttggagacagggtcgagagaggtcgtgtcgcatgttattaaacagggtaaaattgtgttcgtgctgtcttcggcccttaacccgtggaacaaggagatgggagaccacctggtgaagcatggcgatggagtgaaagacatcgcattcgaagtggaagactgtgactatattgtccaaaaagcacgggaacgaggagccaaaataatgcgagagccttgggttgaacaggataaattcggtaaggtgaagttcgccgtacttcagacctatggcgacactacgcatacactggtggaaaagatgaactacatcggccaatttctcccaggctacgaagcccccgccttcatggatcccctgcttcccaagctacctaagtgtagcctcgaaatgattgaccacatcgttggcaaccagccagatcaggaaatggtgtccgcctcagagtggtacttgaagaatcttcagttccaccgattttggtcagtggacgacactcaggttcacaccgagtatagcagcttaaggagcatagttgtcgctaactacgaggagtcaatcaagatgccaatcaacgaaccagcaccggggaagaagaaatctcagatccaagaatacgtagactacaacggcggtgctggtgtccagcatatcgcgttgaaaaccgaggatattatcaccgctatcagacaccttagagaacggggactggagtttctgtcagtgccctctacatactacaagcaactacgcgaaaaattaaaaaccgcaaagattaaggtcaaggaaaacatcgacgcgcttgaagagctgaagatccttgtcgattacgatgagaaaggttatcttcttcagatcttcactaagcccgtgcaagacaggcctacattattcctcgaagtcatccagagacataatcaccaggggtttggcgcgggaaatttcaatagcctttttaaggccttcgaggaagaacagaacttacgaggcaatctgaccaacatggagacgaacggtgtggtgcccggaatg

SEQ ID NO: 5499 - DNA, 1179 bp, synthetic construct
  misc_feature 1..1179: note = source = /note="Description of Artificial Sequence: Synthetic coding sequence"
  source 1..1179: mol_type = other DNA
atgactacctattccgataagggggccaagccggagagaggccgctttctccacttccattccgtgaccttctgggtcggaaacgctaagcaggcagccagcttctactgttcaaaaatgggttttgagccacttgcataccggggtctggagacgggctcgagagaggtggtgtcccacgtgattaagcagggtaagattgtgtttgtgttgagcagcgcacttaacccttggaacaaggagatgggagatcacctcgtgaagcacggggatggagtcaaggatatcgcattcgaggtggaagattgcgactacattgtccagaaagcacgagaacgcggtgcaaagatcatgagagagccctgggtggagcaagataagtttggaaaggtgaaattcgccgtgctgcaaacttacggagacaccacccacaccctggtcgaaaagatgaattacattggtcaatttctcccaggatacgaggcgccggcattcatggaccccctgcttcccaaacttccaaagtgtagcttggaaatgattgaccacatcgtgggtaatcaacccgaccaagagatggtgtcagcatccgaatggtaccttaagaaccttcaatttcatcgcttctggtccgtggacgatacccaagtgcataccgagtactcaagtctccgctcgatcgtggtcgccaactacgaggaatccattaagatgccaatcaatgaaccagctcctggcaagaagaagagccagatccaggaatacgtggattacaacgggggagcaggtgtgcaacatattgcgctcaagacggaggacatcataacggcgattcgccatctgcgcgaacggggacttgaattcctttccgtcccatccacctactacaaacaacttcgagagaaactgaaaaccgccaagattaaagtcaaagaaaacatagatgcccttgaggaactgaaaatccttgtcgattacgatgaaaagggataccttctgcagattttcaccaaacctgtccaggatcggcccaccctttttctggaggtgattcaaaggcataaccaccaaggtttcggagccggcaactttaactctctgtttaaggctttcgaggaggagcagaaccttcgaggaaatcttactaatatggaaaccaacggcgttgtgccaggaatg

SEQ ID NO: 5500 - DNA, 1179 bp, synthetic construct
  misc_feature 1..1179: note = source = /note="Description of Artificial Sequence: Synthetic coding sequence"
  source 1..1179: mol_type = other DNA
atgacaacttattccgataaaggcgccaaaccggagcgtggccgattcttgcattttcattcggtgacgttctgggtcgggaatgcaaaacaggccgcctccttttactgcagtaaaatgggcttcgagcctttggcgtatcgagggctcgagacaggctcccgagaggtcgtgtcacatgttattaaacagggtaaaatcgtctttgtcttgtctagtgcactcaatccatggaataaagagatgggcgaccaccttgtcaagcacggtgacggtgttaaagacattgcttttgaagtcgaggactgtgactacatcgtccagaaggcacgcgaacggggtgctaagattatgagagagccctgggttgagcaagataaattcggaaaggttaagttcgccgttcttcaaacatatggtgatactacacatacactcgttgagaagatgaattatataggtcaattcttgcccggttatgaagcacccgccttcatggatccattactacccaagcttccgaagtgctcattggaaatgatcgaccatattgtgggtaatcaaccggatcaagaaatggtatccgctagcgaatggtatttgaagaacctccaattccatagattctggtctgtggatgacacccaggtccatacagaatattcttcgcttcgatctatcgtcgtggctaactatgaagagagcataaagatgccgatcaacgaacctgcccccggtaaaaagaaaagccaaatccaagagtacgtggattacaatggcggagcgggggttcaacacatcgccctgaagaccgaggacattattacagcgatccgccatctgcgtgagcgaggattggagttcttatctgttccgtcaacgtactacaagcaactccgagagaagttgaagacggctaagatcaaggtcaaggaaaatatcgacgccctggaggagttgaagatccttgtggactacgacgagaagggctaccttctacagattttcactaaaccggtccaggaccgtccaactctattccttgaagtgattcagcgccacaatcatcaagggtttggggctggaaatttcaactcattatttaaggctttcgaggaagagcaaaacctccgcggtaaccttacaaacatggagaccaacggcgtcgttccaggtatg

SEQ ID NO: 5501 - DNA, 1179 bp, synthetic construct
  misc_feature 1..1179: note = source = /note="Description of Artificial Sequence: Synthetic coding sequence"
  source 1..1179: mol_type = other DNA
atgaccacctattccgacaaaggtgcgaagcctgagaggggtaggttcctccacttccattcggtgactttttgggttggtaatgctaagcaggcagcctctttttactgcagcaaaatgggattcgagcccctggcctatcgcgggctcgagacggggagccgcgaagtcgtaagccatgtgatcaagcagggtaagattgtgttcgtgttgagtagtgccctgaatccatggaacaaagaaatgggggaccatctcgtaaaacatggagatggcgtgaaggatatcgcttttgaagttgaggattgtgattacattgttcagaaagcaagggaacggggagctaaaataatgagggaaccctgggtcgagcaagataaattcggcaaggtgaagtttgcggttctgcaaacgtacggggacacaacccatacacttgtggagaaaatgaactacatcgggcagtttttgcctgggtatgaggctcccgcttttatggatcccttgctcccaaagcttccgaagtgctcactagagatgatcgatcacatcgtgggaaatcagcctgatcaagaaatggtgtctgcaagtgagtggtatctgaagaatctgcagtttcaccggttctggagcgtggacgacacccaagttcataccgagtatagctctctcagatctatagtggtggcaaattacgaggagtcgataaaaatgcccattaatgaacctgctcctggcaagaagaagtcccagattcaggaatacgtcgactacaacgggggcgccggggtccagcacatagccctgaagactgaagacataattaccgccattcgacacctacgtgagcgcggcttagagttcctatccgtgccgagcacctattacaagcaattgagggaaaaactgaaaaccgctaagatcaaagttaaggagaacatagacgcccttgaagagctgaagatcctggttgattatgacgagaaaggatacctcctccagatctttaccaagcccgtccaagaccgccctaccctgtttttggaggttatccagaggcataatcaccagggcttcggtgcagggaactttaacagcctattcaaagccttcgaggaggagcagaacctgcggggcaacctaaccaacatggaaactaacggcgtggtgcctgggatg

SEQ ID NO: 5502 - DNA, 1179 bp, synthetic construct
  misc_feature 1..1179: note = source = /note="Description of Artificial Sequence: Synthetic coding sequence"
  source 1..1179: mol_type = other DNA
atgactacgtattccgacaagggagctaagcccgaaagaggacgattcttgcactttcattccgtaaccttttgggtggggaatgccaagcaggctgcctctttctactgcagcaaaatgggcttcgagcctcttgcttatagaggcctcgaaacagggtcacgagaagtggtaagccatgttatcaagcaggggaagatagtttttgtgctttcttctgcactgaacccctggaataaggaaatgggggatcatcttgtgaaacacggagacggagtgaaggatatcgccttcgaagtcgaagactgcgattacattgttcagaaggcgcgggagcgaggtgccaagattatgcgtgagccctgggtggagcaagacaagtttgggaaggtcaagttcgccgtcctgcaaacatatggcgatactactcacaccctcgtagagaagatgaattacataggccagtttctgcccggctatgaagctcctgccttcatggatccactcttacccaaactccctaaatgctcactggagatgatcgaccacatcgtgggaaaccagcccgatcaggagatggtttccgcaagtgagtggtacctgaaaaatctgcagtttcacagattttggtccgtagatgatacccaagtccataccgagtatagctcactccgatccattgtcgttgccaattatgaagaaagcatcaaaatgcccattaatgaacccgcccccggaaaaaaaaaaagtcaaatccaggaatacgtggactataacggaggcgccggggttcaacatatcgccctgaaaacggaagacatcatcacagccatccgacatttacgagaaagagggcttgagttcctgagtgtaccctcaacctattataagcagttgagggaaaagttgaaaacagctaagatcaaggtcaaggaaaacatcgatgcattggaagagctcaaaatccttgtcgactacgacgaaaaagggtatctgctccaaatttttactaagcctgttcaggataggcctaccctgtttctggaggtaattcaacggcacaatcaccagggatttggcgctggaaatttcaacagtttatttaaggcttttgaagaagaacagaatctgcgagggaatctaactaacatggagacgaacggtgtggtcccaggaatg

SEQ ID NO: 5503 - DNA, 1179 bp, synthetic construct
  misc_feature 1..1179: note = source = /note="Description of Artificial Sequence: Synthetic coding sequence"
  source 1..1179: mol_type = other DNA
atgaccacttattcggacaaaggggccaagccggaacggggacggtttctgcactttcacagcgtgaccttctgggttggaaatgcgaaacaagcagcctccttctactgctccaagatgggctttgagccccttgcttaccgcggactggagacgggaagcagagaagtggtgtcgcacgttatcaagcaggggaagatcgtgtttgtccttagcagcgcactcaatccatggaacaaggaaatgggagatcatctggtcaagcatggggacggcgttaaagacatcgcgttcgaagtggaggactgcgattacatcgtgcagaaagctcgggagagaggcgccaaaatcatgcgagagccatgggtcgagcaagataagtttggtaaggtgaagttcgcagtgctgcagacgtacggagacacgacgcataccctcgtggagaaaatgaactacattggacagttcctcccgggatacgaagctccggccttcatggatccactgctcccgaagctgccaaagtgctcgctggaaatgattgaccatatcgtcggcaatcagccagaccaggagatggtttccgcctccgagtggtacttgaagaacctgcaatttcacagattctggtcagtggacgacacccaagtgcacaccgaatatagctcgctgcgctcgatcgtcgtggccaattacgaggaatccatcaagatgcccattaacgagccggcgccgggtaaaaagaagtcgcagatccaggaatatgtcgactacaacgggggtgcgggcgtgcagcatattgcccttaagaccgaagacatcatcactgccatccgccatcttcgcgagcggggtctggaattcctcagcgttccgtctacctactacaagcagctcagggagaagctgaagaccgcgaaaatcaaagtcaaagaaaacatcgacgctcttgaggagctgaagatcctggtggattatgatgagaagggctacctcctgcaaattttcaccaagcccgtgcaggaccgcccaaccctctttctggaagtaattcagcggcataatcatcaaggttttggagctggcaacttcaattcattgttcaaagccttcgaagaagaacaaaacctgcgtggtaatctcactaatatggaaactaatggagtggtcccagggatg

SEQ ID NO: 5504 - DNA, 1179 bp, synthetic construct
  misc_feature 1..1179: note = source = /note="Description of Artificial Sequence: Synthetic coding sequence"
  source 1..1179: mol_type = other DNA
atgaccacgtactccgacaagggtgccaagcccgagagaggacgttttctgcatttccactcagtaactttttgggtgggcaacgccaagcaggcggccagtttttattgcagtaaaatgggctttgagccactggcttaccgggggctagaaacaggatctagagaggtggtatcacacgtgatcaaacagggtaagatcgtgttcgtgctgtccagcgccctgaatccatggaataaggaaatgggtgaccatctagtcaagcatggcgacggggtcaaggatattgccttcgaagtcgaagattgcgattacatagtacaaaaagctcgagagagaggggccaagataatgcgagagccctgggtggagcaggacaagttcggtaaggtaaagtttgcagtgctgcaaacctacggggacacaacccacacacttgttgaaaaaatgaactacattggccagttcctgccaggatacgaggctcccgcctttatggacccccttttgccaaagctacctaaatgttctctagaaatgattgatcacatcgtgggaaaccagcctgaccaggagatggtgagcgcctctgagtggtatctcaagaatctgcagtttcaccgattctggagtgtggatgatacgcaggtccatacggaatatagctctctacgctcaatcgtggtcgccaactacgaggagtcaataaagatgccaatcaacgagccagcacctggcaaaaaaaagtcacagatacaggaatatgtggattacaacggaggagcaggcgttcagcacattgctttgaaaaccgaggacattattactgcaatcagacacttgagagagcggggactcgaatttctcagcgttccctcaacttactataaacagttgcgggagaagttaaagaccgccaaaattaaggtcaaggagaatattgacgccctcgaagagctgaagatcttggttgactatgacgaaaaggggtacttgctgcaaatattcacaaagccagtgcaggaccggcccaccttgttcctagaagtgatccagcgccacaaccatcagggattcggtgccggaaactttaactccctttttaaggctttcgaggaggaacagaacctgcgaggcaatctgacgaatatggaaaccaacggggtggtgccgggaatg

SEQ ID NO: 5505 - DNA, 1179 bp, synthetic construct
  misc_feature 1..1179: note = source = /note="Description of Artificial Sequence: Synthetic coding sequence"
  source 1..1179: mol_type = other DNA
atgacgacctacagcgataaaggtgcaaagcccgagcgggggcgcttcttgcactttcattcggtgactttttgggtcggcaacgcaaaacaagcggcctccttctactgttccaagatgggattcgagccactcgcgtaccggggcctcgaaactggatcgcgagaggtggtgtcacacgtgatcaagcaaggcaagatagtttttgtgctctcgtcggcattgaatccatggaataaggaaatgggtgatcatctcgtcaaacatggagatggcgtgaaggatattgcattcgaggtggaagattgcgactacatagtgcaaaaagcacgagagcgcggggcaaagattatgcgagaaccttgggtcgaacaagataagtttggtaaggtgaagttcgcagtgcttcaaacctacggagatactactcacaccctggtggagaagatgaactacattggacagtttttgcccggatatgaagcacctgcctttatggaccccctgcttccaaagctgcctaaatgcagcctcgagatgattgaccatatagtgggcaatcagcctgaccaagaaatggtttcggcgtcagaatggtaccttaagaatctccagtttcacagattttggtccgtcgacgatacccaggtgcacaccgaatacagctcgcttcgatcgattgtcgtcgcgaattacgaagaatccattaagatgcccattaatgagcctgccccaggtaagaagaagtcacaaatccaagaatacgtggattacaacggaggcgcaggcgtgcagcacatagcactcaagaccgaggatatcataaccgccattcgtcatctgcgcgaaagaggacttgaattcctctccgtgccttcgacctattacaagcaacttagggagaaacttaagactgcgaagatcaaagtgaaagaaaacattgatgcactcgaagagcttaagattcttgtggattacgatgagaagggttacctgctgcagatctttactaaacctgtccaggaccggcccacccttttcctggaagtcatccagagacataaccaccagggttttggagctggtaacttcaactcgttgttcaaggcatttgaggaagaacagaacctgagaggaaaccttaccaacatggaaaccaatggcgtggtgcctggaatg

SEQ ID NO: 5506 - DNA, 1179 bp, synthetic construct
  misc_feature 1..1179: note = source = /note="Description of Artificial Sequence: Synthetic coding sequence"
  source 1..1179: mol_type = other DNA
atgacaacttacagtgataagggagctaagcctgagcgcgggcggtttcttcatttccactccgtcactttctgggtaggcaacgcaaaacaagctgcttcattttattgcagtaagatgggttttgagcctcttgcgtataggggtctggaaacgggctcaagggaggttgtttctcacgtcattaagcaaggcaagatagtttttgtactatcaagtgcactgaatccgtggaacaaagagatgggagaccatctggtgaaacatggcgatggggtgaaagatattgccttcgaggttgaagactgtgattatattgtccaaaaggcaagggagcggggggccaaaattatgagagagccatgggtcgagcaggacaagttcggcaaggtgaagtttgctgtactgcagacctacggcgacacgacccatacacttgtagagaagatgaactacatcggtcagtttctgcccgggtacgaagccccagcctttatggaccccctactgcccaaattaccaaagtgctctcttgagatgatcgaccatatagtgggtaatcaacccgaccaagaaatggtgtctgcctcagagtggtacttaaagaatcttcagttccatcggttttggagtgtggacgatacacaggtgcacacagaatacagcagccttcggagtattgtagttgctaactatgaggaatctatcaagatgcccattaacgagcctgcaccaggaaagaagaaatcccagatacaagagtacgtggactacaatggcggcgcaggggtacaacatatagcccttaaaaccgaagatatcattacggctatccggcacctgcgcgaaagaggtctggaatttttgtctgttccctccacatattataagcagcttcgggagaagctgaaaacggcaaagattaaagtgaaagagaacattgacgctctggaagagctgaagatcctggtcgactacgacgagaaagggtatctgctgcagatctttacgaagcctgtgcaggacagacccactctcttcctcgaagttattcagcggcataaccatcagggtttcggcgctggtaattttaattctctctttaaagctttcgaagaggaacaaaatctgcgagggaacctgacaaatatggagacgaatggggttgtacctggtatg

SEQ ID NO: 5507 - DNA, 1179 bp, synthetic construct
  misc_feature 1..1179: note = source = /note="Description of Artificial Sequence: Synthetic coding sequence"
  source 1..1179: mol_type = other DNA
atgaccacatactccgacaagggggccaaaccggagcgaggacggttcctgcacttccatagcgtgactttctgggtcggcaatgcaaagcaggccgcgtccttctattgcagtaagatgggtttcgagccactggcttatcggggcctagagaccggaagcagggaggtagtctctcatgttatcaagcagggcaaaatcgtctttgtcctcagcagcgcccttaatccttggaataaggagatgggagatcacctggtaaaacatggggatggagttaaagatattgcttttgaggtagaggattgtgattatatagttcaaaaagccagggaacggggtgccaaaattatgcgagagccttgggtcgaacaagataaatttggaaaggtgaaatttgcagtgctccagacctacggcgacacgacgcacaccctggtggaaaagatgaactatatagggcagttcctgccgggatacgaagcccccgccttcatggatcccttacttccaaaacttcctaaatgctcattggaaatgattgaccacatcgtggggaatcagccagatcaggagatggtatccgcctctgagtggtacttaaaaaacttgcagttccaccggttttggagcgtggatgatacgcaagtacacacggaatattcctctctgagaagtatcgtagtcgcgaactacgaagaaagtataaagatgcctattaatgagcctgctccgggcaagaagaagagccagattcaggagtacgtggattacaatgggggagccggagtccagcatattgccctgaaaacagaagacataatcacggctatccggcatctccgtgagcgggggttggaatttctgagtgtgccctcaacctattacaagcaactccgcgaaaagctcaagacagccaagatcaaagtgaaggaaaacatcgatgccctggaagagcttaagattcttgtggactatgacgagaagggatatctgctgcagatttttacaaagcccgtgcaggatcgcccgaccctattcctggaagttatccagcgacacaatcatcaggggttcggtgcgggtaactttaacagcttatttaaagctttcgaggaggagcagaaccttcgaggtaatcttacaaacatggagacaaatggtgtggtcccggggatg

SEQ ID NO: 5508 - DNA, 1179 bp, synthetic construct
  misc_feature 1..1179: note = source = /note="Description of Artificial Sequence: Synthetic coding sequence"
  source 1..1179: mol_type = other DNA
atgaccacatacagcgataaaggcgccaagcccgagagaggtagattcctccatttccactccgtgactttttgggtcggtaacgccaaacaggccgctagcttctactgcagcaagatgggatttgagcccttggcttataggggtctggagacaggttcccgcgaagtcgtttcccacgtgataaagcaaggtaaaatcgtgtttgttctctcctctgccctcaatccatggaacaaggagatgggcgaccatctggttaagcacggagacggtgtcaaggacatcgcattcgaagttgaagactgcgactatattgtgcagaaggctagggagcgcggtgcaaagatcatgcgtgagccatgggttgagcaggacaagttcggcaaggtcaagttcgccgtcctgcagacttatggtgatactacacatacattggtcgagaaaatgaattacatcggacagttcttgccaggttacgaagcacccgctttcatggatcccctgctgcctaagttgcctaagtgttctcttgagatgatcgaccacatcgtgggaaaccagcccgaccaagagatggtgtccgcttctgagtggtacctcaagaacctccaatttcatcgcttctggtctgtcgacgacactcaagtgcataccgagtattcctctcttaggtcaattgtagtggccaattacgaagaaagcatcaagatgcctataaacgagccagctcctggcaagaaaaaatcccagattcaggaatacgtggactacaacggcggagctggtgttcagcacattgcccttaaaaccgaggatatcatcacagcaattagacacctccgcgagcgcggactcgaatttctctcagtgcccagcacttactataagcaattgcgcgagaagttgaaaacagctaagatcaaggtgaaagagaatatcgacgccctcgaggaactgaagatcctcgtcgactacgacgaaaagggatacctgttgcagattttcaccaagcctgtgcaggacaggcccacactgtttctcgaggtgatccaacgtcacaaccaccaaggatttggcgctggtaactttaatagcctgttcaaagccttcgaggaggaacagaatctgaggggaaatctgaccaacatggagactaatggcgttgtaccaggtatg

SEQ ID NO: 5509 - DNA, 1179 bp, synthetic construct
  misc_feature 1..1179: note = source = /note="Description of Artificial Sequence: Synthetic coding sequence"
  source 1..1179: mol_type = other DNA
atgaccacttacagtgataagggagcaaagccggaacgcggacggttcttgcacttccactcagtcacgttctgggtgggaaacgcaaaacaagcggcgagcttctactgttctaagatgggattcgagcctctggcttacagaggacttgagactggatccagagaggttgtgtcacacgtgataaagcagggaaagatcgtgttcgtgctgtcgtcggcattgaacccttggaacaaagagatgggagatcatctggtcaaacacggagatggagtgaaggacatcgcctttgaagtggaggattgtgattacatcgtgcagaaagcccgggagagaggagctaagatcatgcgagagccgtgggtggaacaagataagttcggcaaggtgaaatttgcggtcttgcagacctacggagacaccactcatacgctggttgagaaaatgaattacatcgggcaatttctgcccggatacgaggcaccagcgttcatggatccgctcctcccaaagctgccgaagtgcagcctcgagatgatcgaccacattgtgggaaaccaacctgaccaagaaatggtgtccgccagcgaatggtatttgaagaaccttcagttccatcgcttctggagcgtggacgacacccaggtgcataccgaatactcgagcctgcgctcgatcgtggtggccaactacgaggaatcgatcaagatgccgatcaatgagccggcgccgggtaagaaaaagagccagatccaggaatacgtggactataacggcggagcgggagtccaacacatcgccctcaaaaccgaggacattatcaccgcaatccggcacctccgcgaaagaggcctggagtttctctcagtcccttccacgtattacaagcaactcagagagaagctcaaaactgcaaagatcaaggtgaaggagaatatcgacgcactggaagaactgaagatcttggtggattacgacgaaaagggatacctgctgcaaatctttactaaaccagtgcaggaccgcccgactctgtttctggaagttatccaaaggcacaaccatcagggatttggggctggaaactttaactcgcttttcaaggccttcgaggaagagcaaaaccttcggggaaacctcaccaacatggagactaatggggtggtgccaggaatg

SEQ ID NO: 5510 - DNA, 1179 bp, synthetic construct
  misc_feature 1..1179: note = source = /note="Description of Artificial Sequence: Synthetic coding sequence"
  source 1..1179: mol_type = other DNA
atgaccacatacagcgacaagggcgcaaaaccagaacggggaaggtttctgcatttccactctgtgacattttgggttggtaatgccaagcaggctgcaagcttttactgcagcaagatgggattcgagccactagcttaccgaggcttggagacgggctccagggaggttgtgagtcacgtgattaagcagggtaagattgtgttcgtcctgagctccgctctcaatccatggaacaaggaaatgggagaccacctggtcaagcatggcgacggggtcaaggacatcgcattcgaggtggaggattgcgattacattgtccaaaaagcgagagagcggggggcaaaaatcatgcgagaaccctgggtcgaacaggataagtttggcaaagttaagtttgctgttctgcagacgtacggcgacacaacgcacacactggtggagaagatgaattatattgggcagtttctgcctggatacgaagcaccggctttcatggaccctttactgcccaagctgccaaaatgctccctggaaatgatcgatcatattgttggaaaccaaccggatcaagagatggtttctgcgtccgagtggtaccttaaaaatctgcagttccaccggttttggtccgtggatgatactcaggttcacaccgaatactcctcgctaaggagcattgtagtggctaattacgaagaaagtataaagatgcctataaacgagcccgctcctgggaagaagaagtcacagatacaggaatatgtcgactacaacggcggagcgggagttcagcatattgcccttaagacagaggacatcataacagctattcggcatctgcgagaacgcggcctggagttcctctctgtcccttctacatactataagcagctcagagaaaaacttaaaaccgcaaagattaaggttaaggaaaatatcgatgcgttggaggagctcaagattctggtcgactatgacgaaaagggctacctgctccagatcttcacgaaacccgtgcaggacagacctactctttttcttgaggtgatccaacgccacaatcatcagggcttcggtgccggaaacttcaattcgttgtttaaagccttcgaagaggaacagaatctcagggggaacttgaccaatatggagaccaacggagtggtgcctggcatg

SEQ ID NO: 5511 - DNA, 1179 bp, synthetic construct
  misc_feature 1..1179: note = source = /note="Description of Artificial Sequence: Synthetic coding sequence"
  source 1..1179: mol_type = other DNA
atgacaacttattccgacaagggcgctaagccggaacgcgggcgattcctgcacttccactccgtgacgttctgggtcggaaacgccaaacaggccgccagcttctactgctcgaaaatgggcttcgagcccctagcctaccgcgggctggaaaccggaagccgggaggtggtgtcccatgtcatcaaacaagggaagattgttttcgtgctgtcctcagccttgaacccctggaataaggagatgggagatcacctggtgaaacacggtgacggcgtgaaggacatagccttcgaagtcgaagattgtgattacatcgtccagaaagcgagagagaggggcgccaagatcatgcgcgaaccttgggtggagcaagacaagttcggtaaggtaaagttcgctgtgttgcaaacatatggcgataccacacatacgctggttgagaagatgaattatatcggccagtttctccccggctacgaagcccccgccttcatggatccacttctgccgaagctgccgaagtgcagcctggagatgatcgatcacatagtcggcaaccaaccagaccaggaaatggtctccgcatccgaatggtacctgaagaatctgcagttccaccgtttctggtccgtggatgatacgcaggtacacacggagtactccagtttgaggagtattgtggtcgccaactacgaagaaagtatcaagatgccaatcaatgagcctgcgcctggcaagaaaaagtcccagatacaagagtatgtagactacaatggaggggccggcgtgcagcacattgccctgaaaacggaggatatcatcaccgccatcaggcatcttcgagaaaggggtctagagttcctgagcgttccttcgacctattacaaacaactacgcgaaaagctgaagacagccaaaattaaggtgaaggagaacatcgatgcccttgaggaactgaaaattctggtcgactatgacgagaagggttacctactccaaattttcactaagcctgtgcaagaccgtccgacgctgttcctggaagtcatccaacggcataaccatcaaggcttcggtgctggtaatttcaatagcctgttcaaggccttcgaagaggagcaaaacctgcggggcaatttaactaatatggagacgaacggagtcgtccccggtatg

SEQ ID NO: 5512 - DNA, 1179 bp, synthetic construct
  misc_feature 1..1179: note = source = /note="Description of Artificial Sequence: Synthetic coding sequence"
  source 1..1179: mol_type = other DNA
atgactacgtattcggacaaaggggcaaaacctgagagaggccgttttttgcactttcatagtgtgaccttctgggttgggaatgccaagcaggcagcttccttttattgctccaagatgggtttcgagcccctggcgtaccggggactcgagactggatcacgggaggtcgtgtcacacgtcattaaacaaggaaaaatcgtctttgtactgtctagcgcacttaatccatggaataaggaaatgggcgaccacctagttaaacacggggatggcgtgaaggacatcgctttcgaggtggaggattgtgactacatcgtacagaaagccagggaacgcggggcaaagattatgagggagccctgggtggagcaagataaatttggtaaggtcaaattcgccgtgctgcagacgtacggggacactacgcacacattagtggaaaagatgaactatatcggacagtttctgccaggatatgaagcacctgctttcatggatcctttactccccaaactgcctaagtgctcattggaaatgattgatcatattgtgggcaaccaacccgatcaggaaatggtgtcagctagcgaatggtatttaaagaacctccagttccatagattttggagcgtagatgacacacaggtgcatacagaatactcttcccttagatctatcgtggtggccaactacgaagagagtatcaaaatgcccattaatgaacctgctcctgggaaaaagaaaagccagattcaggagtacgtggattacaatggaggggccggcgtgcagcacatcgcccttaagaccgaggatattataactgcaatcaggcacctgcgagaaagaggactcgagttcctgtccgtgccatccacttactacaaacaactgagggagaagctgaagaccgctaaaatcaaagtcaaagaaaacattgatgcattggaggagctgaaaatcttggtggactatgatgaaaagggctacctcttacaaatcttcacaaaacccgtgcaggatcggcccactctcttcttagaggtcatccagagacataaccaccaaggcttcggggcaggtaacttcaatagccttttcaaggcattcgaggaggagcaaaatctgcggggcaaccttaccaatatggagacaaatggagtcgtgccaggcatg

SEQ ID NO: 5513 - DNA, 1179 bp, synthetic construct
  misc_feature 1..1179: note = source = /note="Description of Artificial Sequence: Synthetic coding sequence"
  source 1..1179: mol_type = other DNA
atgactacatacagtgataagggcgctaaacccgagagagggagatttctgcactttcactctgtcacattttgggtgggtaatgcaaaacaggccgcaagcttctactgcagtaagatgggatttgagcccctggcataccgagggttggagactggtagtagggaggtggtgagtcacgtcattaagcagggaaagatcgtcttcgtcctgagcagcgcgctcaatccgtggaataaagagatgggagatcacctggtgaagcatggcgatggggtaaaggatatcgcgttcgaagtcgaggattgcgattatatcgtccagaaggctagggaaagaggcgccaagattatgcgcgagccctgggtggagcaggacaagtttgggaaggtgaagtttgccgttctgcagacctacggcgacacaactcacaccctggtcgagaaaatgaactatattggacagttcctgcccggctatgaagctcccgctttcatggaccctctgctgcctaagctgccgaaatgcagtctcgagatgatcgaccatattgtgggcaatcagcccgaccaggaaatggtcagtgccagcgaatggtatctgaagaacctgcagttccatcgcttttggagtgtagatgatacgcaagtccacacagagtattcttccctgaggtccattgtggtcgctaattacgaggaaagcatcaagatgcctatcaatgagcctgcccctggcaaaaaaaaatcacaaattcaggaatacgtagactacaatggaggcgcaggagttcaacacattgcactcaagaccgaagacattatcactgcaatccggcacctgagggagagaggtctggagtttctgtccgtgccttcaacttactataagcaactgagagagaaactcaagacggctaaaattaaagtgaaagagaatattgacgctcttgaggagctgaaaatcttggtcgactacgatgaaaaaggatacctcttgcaaattttcaccaagccagtgcaggaccgccctaccttgtttctggaagttatacagcggcacaaccaccaaggtttcggtgccggcaactttaattctctgttcaaggcattcgaggaggagcagaacctgagaggcaacctgactaacatggagacaaatggagtcgtgcctggtatg

SEQ ID NO: 5514 - DNA, 1179 bp, synthetic construct
  misc_feature 1..1179: note = source = /note="Description of Artificial Sequence: Synthetic coding sequence"
  source 1..1179: mol_type = other DNA
atgactacctacagtgacaagggcgcgaaacccgagaggggtcgtttccttcacttccacagcgtgacattttgggttgggaatgccaaacaggctgcgagcttctactgttcaaagatgggatttgagcctttggcctatcggggacttgagaccggaagcagagaagtggtatctcacgtgatcaagcagggcaagatcgtcttcgtactgtcatctgccttgaatccttggaataaagagatgggcgaccaccttgtgaaacacggcgatggcgtgaaggatattgccttcgaggtcgaggattgcgattatatcgtacaaaaggcaagagaacgcggcgccaagataatgcgtgaaccttgggttgagcaagacaagttcggaaaagtcaaattcgcagtgcttcagacctatggagacacaactcacaccttggtggaaaagatgaattacattggccagttcctccctgggtatgaagctccagcctttatggatccattgttgccaaagctcccgaagtgcagcctggagatgatagatcatattgtgggtaaccagcctgatcaggaaatggtttcagcaagcgaatggtacctaaaaaatctgcaattccacagattttggtccgtggacgacactcaggtgcatacagagtatagctctctccgaagcattgtggtggcgaattatgaggaatctataaagatgcccataaatgagccagctcctggtaagaaaaaatctcagattcaagaatatgtggactacaatggcggggctggggttcagcacattgctctgaagaccgaggacattattacagccattcggcaccttagggaacggggtttggaattcctctctgtcccttcaacatattacaaacaactgcgcgagaaactgaagaccgcaaagattaaggttaaagaaaacatcgacgccttagaggagctgaagatacttgtcgactacgatgaaaaagggtacctgctgcagattttcacaaagcctgtccaggatcggccaactttgttcctggaagtcatccagcggcacaaccaccaaggctttggggcagggaacttcaatagcctttttaaggccttcgaggaggagcagaatcttcgggggaacctgacaaacatggagactaatggcgtcgtacctggcatg

SEQ ID NO: 5515 - DNA, 1179 bp, synthetic construct
  misc_feature 1..1179: note = source = /note="Description of Artificial Sequence: Synthetic coding sequence"
  source 1..1179: mol_type = other DNA
atgaccacctactcagacaaaggagccaagcctgaacgcggacgcttcctgcattttcattccgtgaccttttgggtgggaaacgccaaacaagccgcttcgttctactgcagcaagatgggattcgaacccctcgcatacagagggctggaaactggatcccgggaggtcgtgtcgcacgtcattaagcaaggaaagattgtttttgtgctgtcgtcggccctcaacccttggaataaggaaatgggcgatcacctggtcaagcacggcgacggtgttaaggacatcgccttcgaggtggaggattgtgactacatcgtgcaaaaagctcgcgaacggggagccaagatcatgagggagccatgggtggagcaggataagtttggcaaggtgaagtttgcggtgttgcagacgtacggagacaccactcatacgctggtagaaaagatgaactacatcggacagttcctcccaggatacgaagcaccagcttttatggatccgctcctcccgaagctccccaaatgctcgctggagatgatcgaccacatcgtgggaaaccaacccgaccaggaaatggtcagcgcctcggaatggtacttgaaaaacctgcaattccacagattttggtccgtcgacgacacccaagtgcataccgaatactcatcgctccgctcaatcgtggtcgccaactacgaggaatcgattaagatgccaatcaacgagccggcgccgggtaaaaagaagtcacagatccaggagtatgtggactacaacggaggagcgggcgtgcagcacatcgcactgaaaactgaggatatcatcactgccatccggcacctgcgcgaaaggggccttgagttcctgtccgttccgagcacctactataagcaacttcgggaaaagctcaagaccgccaagatcaaggtcaaggagaatatcgacgcgcttgaggagctgaagatcctcgtcgactatgacgaaaagggatacttgctgcaaatcttcaccaagcctgtgcaggatcgcccgactctgtttctcgaggtcattcagaggcataaccaccaaggattcggcgcaggaaactttaacagcctgttcaaagcgttcgaggaggaacaaaatctgaggggaaacctcactaatatggagactaacggagtggtcccaggtatg

SEQ ID NO: 5516 - DNA, 1179 bp, synthetic construct
  misc_feature 1..1179: note = source = /note="Description of Artificial Sequence: Synthetic coding sequence"
  source 1..1179: mol_type = other DNA
atgactacgtactcggacaagggagcaaagccggagcgaggaagattcctgcacttccatagcgtgactttctgggtgggaaacgctaagcaggccgcatcgttctactgctcgaagatgggctttgaacccctggcgtaccggggactggaaaccggctcgcgcgaggtggtgtcgcacgtcatcaagcagggtaaaatcgtctttgtcctgtcatcggccctgaacccttggaataaagaaatgggagatcatctggtgaaacacggagacggagtgaaagatatcgcctttgaggtcgaggattgtgactacatcgtccagaaggctagggaacgcggcgctaagatcatgcgagaaccgtgggtcgagcaagacaagttcggaaaggtgaaattcgcagtgctgcaaacttacggagacaccactcataccctggtggaaaagatgaactacatcggccaatttctgccgggatatgaggcgcctgcattcatggatccacttctgccaaagctccctaaatgttcactggaaatgatcgaccacatcgtgggaaaccagccggatcaggagatggtgtcagcgtcggaatggtacctgaaaaaccttcaatttcatagattctggtcggtggacgatactcaagtgcacactgagtattcctccctccgcagcatcgtggtggccaattatgaggagtcgatcaagatgccaatcaatgaacccgccccagggaaaaagaaatcacagattcaagaatatgtcgactacaacggaggagctggagtgcagcacatcgccctgaaaactgaggacattatcaccgcgatccggcacttgagggagcgcggactcgagttcctctcagtgcccagcacctactataaacagcttagagagaagctcaagaccgcgaagattaaggtgaaggaaaacatcgacgcactcgaggaattgaagattctcgtggattacgacgaaaagggatacttgttgcagatctttaccaaacccgtgcaagacagacctaccctgttcctggaagtgattcagcggcataatcaccaaggattcggggcgggtaacttcaacagccttttcaaagcctttgaagaagaacagaatctgagaggaaacctcactaacatggaaaccaatggagtagtgccgggcatg

SEQ ID NO: 5517 - DNA, 1179 bp, synthetic construct
  misc_feature 1..1179: note = source = /note="Description of Artificial Sequence: Synthetic coding sequence"
  source 1..1179: mol_type = other DNA
atgactacgtactctgataagggagccaaacctgagcgcggtcgcttcctccacttccactcggtgactttctgggtcggaaacgccaagcaggccgccagcttttactgcagcaagatgggatttgaacccctcgcatacagggggctggaaactggatcaagggaggtggtgtcgcatgtcattaaacaggggaagatcgtgttcgtgctgtcctcggctttgaacccttggaacaaggagatgggcgaccatctcgtgaagcatggcgatggtgtgaaggacatcgcgttcgaggttgaagattgcgactatatcgtgcagaaagcacgggagagaggtgcgaagatcatgagggaaccttgggtcgaacaggacaagttcggcaaggtcaagtttgccgtcctgcagacctacggcgacaccactcatacgctggtcgaaaagatgaactacatcgggcagttcctgccgggatacgaagctcccgcctttatggacccgctgctgccgaagctgccaaagtgctcactggagatgatcgatcacatcgtgggcaatcagcccgaccaggaaatggtgtcggctagcgagtggtacctgaaaaacctgcagttccatagattctggagcgtggatgatactcaagtgcacaccgaatactctagcctgcgcagcatcgtggtggctaattacgaagagtccatcaagatgccaatcaacgagccggccccggggaaaaagaaatcacagatccaagaatacgtggactataatggaggtgcgggggtgcagcacatcgcgctcaaaactgaggatatcatcactgcaatcagacacctgcgtgaacggggccttgaattcttgtcggtgcccagcacctactacaagcaactccgcgagaaactgaaaactgcgaaaatcaaggtcaaggagaacatcgacgccctggaggaactgaaaatcctggtggactatgatgaaaagggttacctgttgcaaatcttcactaaaccggtccaggatcggcctactctctttctggaggtgatccaaagacacaaccaccaaggatttggcgccggtaacttcaatagcctcttcaaggctttcgaggaggaacagaatctgcggggaaacctgacgaacatggaaaccaacggtgtggtcccggggatg

SEQ ID NO: 5518 - DNA, 1179 bp, synthetic construct
  misc_feature 1..1179: note = source = /note="Description of Artificial Sequence: Synthetic coding sequence"
  source 1..1179: mol_type = other DNA
atgactacatacagtgataaaggggctaaacccgagcggggtcggttcctgcactttcatagcgttacgttctgggtggggaacgccaagcaggcagcaagcttttattgcagcaagatgggttttgagcccctagcgtatcgtggcttagagacaggatcgagggaggtggtcagtcatgtcattaaacaaggcaagatcgtctttgtcctttcctccgccctcaatccctggaataaagaaatgggcgaccatctggtcaagcacggggacggtgtcaaggacatcgcatttgaggtcgaagactgcgattatattgtgcaaaaagctagggagaggggagctaagattatgcgtgagccatgggtggagcaggataaatttggcaaagttaagtttgcagtgctgcagacctatggagatacaacacataccctggtggagaagatgaattacattgggcagtttctccctggttacgaggcgcccgcctttatggatccacttctccctaagctgcccaaatgttccttggagatgattgaccacattgtgggaaatcagcccgatcaggagatggtcagcgcatccgaatggtacttgaagaatctgcagttccacaggttttggagcgttgacgacacacaggtgcataccgaatatagctcactgaggagcattgtggtcgcaaattacgaggagagcatcaagatgcccatcaatgaacccgcaccgggcaaaaaaaagtctcagatccaagaatacgtagactataacgggggggccggcgtccagcatattgccctcaagactgaggatattattaccgccatccggcacctacgcgagcggggccttgagttcctctccgttccgagcacatactataaacagctgagagagaagctcaagaccgccaagatcaaagttaaggagaatatcgacgctcttgaggagttgaaaattctcgtcgactacgacgagaaagggtatctgctgcagatcttcacaaaaccggtgcaggataggccaactttgtttctggaggtgatccagcgacacaaccaccaggggtttggcgcgggcaacttcaatagtcttttcaaggcgtttgaggaagagcagaatctgcggggcaacctaacaaacatggagacgaatggagttgtgcctggcatg

SEQ ID NO: 5519 - DNA, 1179 bp, synthetic construct
  misc_feature 1..1179: note = source = /note="Description of Artificial Sequence: Synthetic coding sequence"
  source 1..1179: mol_type = other DNA
atgacaacctactccgataagggtgctaagcctgagaggggcagattcctgcacttccatagcgttactttttgggtgggcaacgccaaacaggctgcaagtttttactgctcaaagatgggcttcgaacccctggcctatcgagggctggaaaccgggagcagagaagtcgtgagccatgttatcaaacagggcaagattgtgttcgtgttgtcttccgcactgaacccatggaataaggaaatgggggatcatttggttaaacacggtgacggagtgaaggacatcgcctttgaagtggaagattgtgactatatcgtgcagaaggccagggagaggggagctaagattatgagagagccttgggttgaacaagataagttcggcaaggtcaaattcgcagtcctgcagacctacggggacacaacccacaccctcgtggagaagatgaattacattggtcagttcctccctgggtacgaagcacctgccttcatggaccccctgctgccgaaacttccgaaatgctccctcgagatgattgaccacattgtcggaaatcaaccagaccaagaaatggtgtcggctagtgagtggtacctaaaaaatctccagttccatcgattctggtctgtggacgacacacaggtccacactgaatacagttccctcaggtctatcgtggttgccaactacgaagaatccatcaagatgcctatcaacgaacctgcccccggaaagaagaagtcccagattcaggaatacgtcgactataatggcggggccggcgtgcagcatatcgctctcaagactgaagatattatcactgccataagacaccttcgagagcgtggcctggaattcctgtccgtcccctctacatattacaagcagctgcgggaaaagttgaagaccgctaagattaaagtgaaggaaaacattgatgccctagaggagctgaagattctggtggactacgatgagaaaggctatctcctccaaatatttacaaagccagtgcaagatcgtcccactttatttctggaggttatccagaggcacaatcaccagggtttcggggcaggaaacttcaactccctattcaaggcgtttgaggaagagcagaacctgcgtggcaatctcactaatatggaaactaatggggtagttcccggcatg

SEQ ID NO: 5520 - DNA, 435 bp, synthetic construct
  misc_feature 1..435: note = source = /note="Description of Artificial Sequence: Synthetic coding sequence"
  source 1..435: mol_type = other DNA
atgagcactgagggaggtggacgccgctgtcaggctcaagtctcccgccgcatctccttcagtgcctcccaccggctgtacagcaagtttctgtcagatgaggagaacctaaagcttttcggtaagtgcaataaccccaacggccatggccataactacaaggtggtcgtgacggtccacggtgagattgatccagccacgggtatggtaatgaatctggcggacctcaaaaagtacatggaggaagccataatgcagccactcgatcataagaatttggatatggatgtgccgtacttcgcagatgtggtctccacgacggaaaatgtggctgtgtacatatgggacaacctacaaaaggtgctgccagtcggagtgttgtacaaagtcaaggtatatgaaacagacaataatatcgttgtgtacaagggcgag

SEQ ID NO: 5521 - DNA, 435 bp, synthetic construct
  misc_feature 1..435: note = source = /note="Description of Artificial Sequence: Synthetic coding sequence"
  source 1..435: mol_type = other DNA
atgtccactgagggagggggccgccggtgccaggctcaggttagccggagaatcagcttcagtgctagtcatcgcttatacagcaagttcttatcggatgaagaaaacctaaagctcttcggaaaatgtaacaatcccaacggccacgggcacaattataaagtcgtggtgacagtgcacggggagatcgatcctgccacaggtatggtgatgaatctcgcagatctcaagaagtacatggaagaggcgataatgcagccattagaccacaaaaatcttgacatggatgtaccatactttgccgacgtggtttccaccactgagaacgtggcagtttacatctgggataacctgcagaaagtcttgcccgtcggggtcctctacaaggtcaaggtttacgaaacggataacaatatagttgtctacaaaggtgag

SEQ ID NO: 5522 - DNA, 435 bp, synthetic construct
  misc_feature 1..435: note = source = /note="Description of Artificial Sequence: Synthetic coding sequence"
  source 1..435: mol_type = other DNA
atgtcaacagagggcggcggtagacggtgccaggctcaggtgtcacgacggattagcttcagcgcaagccaccggctctactccaagttcctgtccgatgaagaaaacctcaaactgttcggtaaatgcaataacccaaatggacatgggcataactataaggtcgtcgtgaccgtccacggggaaattgatccagcgacagggatggtgatgaaccttgcagaccttaagaaatacatggaggaagcaattatgcagcccttggatcacaaaaatttggatatggacgtgccctattttgcagacgtcgtgtcaaccaccgagaatgtggccgtgtacatttgggacaatctgcagaaggtgcttccggtgggagtactttacaaagtgaaggtgtacgaaacggataataacatcgtggtttacaagggagaa

SEQ ID NO: 5523 - DNA, 435 bp, synthetic construct
  misc_feature 1..435: note = source = /note="Description of Artificial Sequence: Synthetic coding sequence"
  source 1..435: mol_type = other DNA
atgtctaccgagggcggcggcagaagatgtcaggctcaggtatctcggaggatttcatttagcgccagccacaggctctacagtaagttcctgagcgacgaagagaatctcaagcttttcggtaaatgtaacaacccgaatggccacgggcacaattacaaagtcgtcgtgacagtccacggtgaaattgacccagcaaccgggatggtaatgaacctggcggatctcaaaaaatacatggaagaagccatcatgcagcctctggaccacaagaatctcgatatggatgtcccttacttcgctgatgtggtctccacaactgagaatgtcgccgtgtacatttgggacaacctgcagaaggtcttgcctgtgggagtgctgtacaaggtcaaagtatacgaaacagacaacaacattgtggtgtacaagggggag

SEQ ID NO: 5524 - DNA, 435 bp, synthetic construct
  misc_feature 1..435: note = source = /note="Description of Artificial Sequence: Synthetic coding sequence"
  source 1..435: mol_type = other DNA
atgtccaccgagggaggaggacgccggtgccaggcccaagtgtcccggcggatatccttcagcgcttcccatcgtctgtacagcaagttcctctcggacgaagaaaatctcaaattgttcgggaaatgtaacaatccgaatggtcatggccacaattacaaggtggtcgtcactgtgcatggtgaaattgatccagcaaccggcatggtcatgaaccttgcagatctcaaaaagtacatggaagaagccatcatgcagcctctcgatcacaagaacctggacatggacgtgccgtacttcgcagatgtggtgtcgaccactgagaatgtcgcggtgtacatttgggacaacttgcagaaggtcctgccggttggagtgctgtacaaggtgaaagtgtacgaaaccgacaataacattgtggtgtataagggcgaa

SEQ ID NO: 5525 - DNA, 435 bp, synthetic construct
  misc_feature 1..435: note = source = /note="Description of Artificial Sequence: Synthetic coding sequence"
  source 1..435: mol_type = other DNA
atgtccactgaaggcggcggaaggaggtgtcaagcacaggtcagccgcaggatatccttctccgcaagccatcgtctctatagtaaattcctcagtgacgaagagaacctgaagttattcgggaagtgtaataacccaaatgggcatgggcacaattataaggtggtggtgactgtgcatggggaaatcgaccccgccaccggcatggtcatgaacctcgctgatttgaagaagtacatggaagaggccatcatgcaacctttggatcacaagaacctggacatggacgtaccttacttcgctgatgttgtgtccaccactgagaatgtagccgtgtatatttgggacaatctgcagaaggtgctacccgtcggtgtgttgtataaggtgaaagtgtacgagactgacaataacatagtggtttacaagggagaa

SEQ ID NO: 5526 - DNA, 435 bp, synthetic construct
  misc_feature 1..435: note = source = /note="Description of Artificial Sequence: Synthetic coding sequence"
  source 1..435: mol_type = other DNA
atgagcactgaaggaggcggccggaggtgccaggcccaagtgtccaggcggatttcattctcggcctcgcaccggctgtactcgaagtttctgtccgacgaggagaatctgaaactgttcggtaagtgcaataaccctaacggacacgggcacaactacaaggtcgtggtcactgtccacggagagatcgacccggcaacgggaatggtgatgaacctcgcggacctcaagaagtacatggaagaggctatcatgcagccgttggatcacaagaatctggacatggatgtgccatacttcgctgacgtggtgtcgaccactgaaaacgtggccgtctacatttgggacaacctgcaaaaagtgctcccagtcggagtgttgtacaaggtgaaagtgtacgagactgataacaatatcgtcgtgtacaagggagag

SEQ ID NO: 5527 - DNA, 435 bp, synthetic construct
  misc_feature 1..435: note = source = /note="Description of Artificial Sequence: Synthetic coding sequence"
  source 1..435: mol_type = other DNA
atgagcactgaggggggtggtaggcgctgccaagcacaggtctcccggcgtatctctttcagcgcctcgcacagactgtactccaaatttttgtcagatgaggaaaacttaaaactgttcggaaagtgcaacaaccccaacggtcacggccacaactacaaggtggtggtgacagtccatggtgaaatagatcccgcaaccgggatggtcatgaatctcgctgacttaaaaaaatacatggaggaagctatcatgcagcccttggaccataagaatctggacatggatgtaccctatttcgcggacgtggtctctactaccgagaatgtggcagtgtacatctgggacaacctgcagaaagtcctgccggtcggcgtcctgtacaaagtgaaagtatatgaaacagataataatatagttgtatacaaaggggag

SEQ ID NO: 5528 - DNA, 435 bp, synthetic construct
  misc_feature 1..435: note = source = /note="Description of Artificial Sequence: Synthetic coding sequence"
  source 1..435: mol_type = other DNA
atgagcacggaagggggcgggcgtagatgtcaggctcaagtttcccgtaggatcagtttttcagcctcgcacagactgtacagtaagtttttatcggatgaggaaaaccttaagttgttcggaaagtgtaataacccaaatggccacggccacaactacaaagttgttgtaacagtccacggtgaaattgatccagcaacaggaatggtgatgaatctggctgatttaaagaaatacatggaagaggccatcatgcagccactcgaccacaaaaatcttgacatggatgtgccatatttcgctgacgtcgtgtctaccacggaaaacgtggctgtatacatatgggataacttacagaaggtgctgcccgtaggggtcctttacaaagtgaaggtttacgagaccgataataacatcgtcgtgtacaagggggag

SEQ ID NO: 5529 - DNA, 435 bp, synthetic construct
  misc_feature 1..435: note = source = /note="Description of Artificial Sequence: Synthetic coding sequence"
  source 1..435: mol_type = other DNA
atgtccactgaaggtgggggcagaagatgccaggcacaagtgagccgacggatcagcttttccgcatcgcatcggttgtactcgaagtttctgtcggatgaggagaatctgaagctgttcggaaagtgtaacaaccccaacggtcatgggcacaactacaaggtggtggtcactgtgcatggagaaattgatccggccaccggtatggtgatgaaccttgcggacctcaagaaatacatggaggaagctattatgcaacctctggaccataagaatcttgatatggatgtcccttactttgccgacgtcgtgtccactaccgagaatgtggcagtttacatatgggataacctgcaaaaggtgctgcctgtgggagtgctgtacaaagtaaaggtctacgagactgacaacaatatcgtggtctacaagggtgag

SEQ ID NO: 5530 - DNA, 435 bp, synthetic construct
  misc_feature 1..435: note = source = /note="Description of Artificial Sequence: Synthetic coding sequence"
  source 1..435: mol_type = other DNA
atgtctacagaaggaggcggacgccgatgccaggcgcaggtttcacgtcggattagttttagtgctagtcatcggttgtattcaaagtttttatcagatgaagaaaatcttaagttgttcggtaaatgcaacaatccgaatggtcatggtcacaattacaaagtcgtggttaccgtacatggggaaattgatccggcgacaggaatggttatgaacttagccgaccttaaaaaatacatggaggaagcgattatgcagcctttggatcataaaaatcttgatatggatgtgccttattttgcggatgttgtcagcacgacggaaaatgttgcggtatacatctgggataacctccagaaagtgctcccggttggagtcttatacaaagttaaagtctacgagaccgataataatatcgtagtctataaaggagag

SEQ ID NO: 5531 - DNA, 435 bp, synthetic construct
  misc_feature 1..435: note = source = /note="Description of Artificial Sequence: Synthetic coding sequence"
  source 1..435: mol_type = other DNA
atgtccacagaaggcggtggaagaaggtgtcaggcgcaggtgtctagaagaataagctttagcgcatcccacagattgtactccaaattcctgtcagacgaagagaacctgaagcttttcggcaaatgtaacaatcctaacggccatggccataactataaggtggttgtgactgtgcacggtgaaatcgacccagcaacaggaatggtaatgaatttggccgacctgaagaaatacatggaggaggccattatgcagccgctggaccacaagaatctggatatggatgttccctatttcgccgatgtggtgtctactaccgagaacgtggcagtatacatatgggacaacctgcagaaagtgcttccggtcggagtactttacaaggtgaaagtgtacgagactgacaacaacatcgtggtttataagggagag

SEQ ID NO: 5532 - DNA, 435 bp, synthetic construct
  misc_feature 1..435: note = source = /note="Description of Artificial Sequence: Synthetic coding sequence"
  source 1..435: mol_type = other DNA
atgagcaccgaagggggaggaaggcgctgccaagcgcaggtgtcgcgccggatatccttcagcgcctcccaccgcctgtattccaagttcctgtcagatgaggaaaatctgaaacttttcggaaaatgtaataacccgaacgggcacggacacaactacaaggtggtggtcaccgtgcatggtgagatcgacccggcgaccggtatggttatgaaccttgctgacctcaagaagtacatggaagaagccatcatgcagccactggaccataagaacctggacatggatgtgccatacttcgccgatgtggtgtccaccacggaaaatgtcgctgtgtacatttgggacaatcttcagaaagtgctccccgtgggagtcctctacaaggtgaaggtgtacgaaaccgataacaacatcgtggtgtacaaaggagaa

SEQ ID NO: 5533 - DNA, 435 bp, synthetic construct
  misc_feature 1..435: note = source = /note="Description of Artificial Sequence: Synthetic coding sequence"
  source 1..435: mol_type = other DNA
atgtcaactgagggcggaggcagacggtgtcaagcccaggtgtcccgaagaataagctttagtgccagtcatcgactgtattccaaatttctttccgacgaagaaaacctgaaactgttcgggaagtgcaataaccccaatggacacgggcacaactacaaggtggtcgtgaccgtgcacggagagatcgaccctgctaccggtatggtcatgaacttggcggacttgaagaagtatatggaagaagcaatcatgcagccactcgaccataagaatttggacatggatgtgccttatttcgcagatgtcgtcagcactacagagaacgtggccgtctacatctgggacaacctgcagaaggttctgcccgtcggagtactctataaggtgaaggtgtatgagactgacaataacatagttgtttacaagggggag

SEQ ID NO: 5534 - DNA, 435 bp, synthetic construct
  misc_feature 1..435: note = source = /note="Description of Artificial Sequence: Synthetic coding sequence"
  source 1..435: mol_type = other DNA
atgtccaccgagggaggaggacgccgctgtcaagcacaagtctcccggcgcatcagcttttcggcgagccatagactgtactctaagtttcttagcgacgaagaaaaccttaaactttttggtaagtgcaataacccgaatggtcacggtcataactacaaggtggtggtgactgttcacggggaaatcgacccggcaaccggcatggtgatgaatcttgctgatcttaagaagtacatggaggaagcgattatgcagccacttgaccataagaaccttgatatggatgtgccatacttcgccgatgtggtgtccaccaccgaaaacgtcgccgtgtatatctgggacaacctccaaaaggtgcttcctgtcggcgtcctctataaggtgaaggtctacgaaactgataacaatattgtggtgtacaaaggagaa

SEQ ID NO: 5535 - DNA, 435 bp, synthetic construct
  misc_feature 1..435: note = source = /note="Description of Artificial Sequence: Synthetic coding sequence"
  source 1..435: mol_type = other DNA
atgtctacagaagggggcggacgcagatgccaagcccaggtgtctaggagaatcagtttctcagcatcacacagactgtactctaagtttcttagcgatgaggagaacctgaaactgtttggcaaatgtaataaccctaacggacatgggcacaactacaaagttgtcgtcacagttcacggagaaatcgacccagcaacaggcatggtcatgaatctggccgatctgaagaaatacatggaagaggccatcatgcagcccctggatcataagaacctggatatggatgtgccttatttcgccgatgtggtgtcgaccacagagaacgtcgctgtatatatttgggacaacctgcagaaggtgttgcctgtgggagttctttacaaagtgaaggtgtacgagaccgataataatattgtggtctataaaggggaa

SEQ ID NO: 5536 - DNA, 435 bp, synthetic construct
  misc_feature 1..435: note = source = /note="Description of Artificial Sequence: Synthetic coding sequence"
  source 1..435: mol_type = other DNA
atgtcaaccgaaggaggtggacgcaggtgtcaggcgcaagtgtcgcggcggatctccttctcggcctcgcatcggctgtactcaaaattcctgtccgatgaggaaaatctcaagctgttcggaaagtgcaataatcccaacggccatggacataactacaaagtggtggtgaccgtccatggggagatcgatccggcgactggtatggtgatgaacctggccgacctgaagaagtacatggaggaagctatcatgcaaccgctggatcacaaaaatctcgacatggatgtgccgtacttcgccgacgtagtgtcgaccaccgaaaatgtggcagtgtacatctgggacaatctccagaaggtcctcccggtcggagtcctttacaaagtcaaggtctacgaaactgataacaatatcgtcgtgtacaagggcgag

SEQ ID NO: 5537 - DNA, 435 bp, synthetic construct
  misc_feature 1..435: note = source = /note="Description of Artificial Sequence: Synthetic coding sequence"
  source 1..435: mol_type = other DNA
atgagcaccgagggaggaggacgccggtgtcaggcgcaagtctcgagacgcatctccttttccgcctcacaccgactttactcaaagttcctctctgacgaggaaaacctgaagctgtttggtaagtgcaataacccaaacggacacggccacaactataaagtggtggttacggtgcacggagagatcgatccagcgactggaatggtgatgaatctggcagacctcaagaaatacatggaggaggctattatgcaaccactggatcacaagaatcttgatatggacgtcccgtacttcgccgacgtggtgtccactactgaaaacgtggccgtgtacatttgggacaatctgcagaaggtccttcctgttggggttctttacaaggttaaggtgtacgaaaccgacaataacatcgtggtctacaagggagag

SEQ ID NO: 5538 - DNA, 435 bp, synthetic construct
  misc_feature 1..435: note = source = /note="Description of Artificial Sequence: Synthetic coding sequence"
  source 1..435: mol_type = other DNA
atgtcaacggaaggtggcggaaggcgatgtcaggcacaggtctcacgcagaatttccttctctgcctcacataggttgtactctaaattcttgtcggacgaagaaaatcttaaactgttcggcaagtgtaataaccctaatggccatggacataattataaggtcgtcgttaccgttcatggtgagattgaccccgccacgggcatggtgatgaatcttgctgatttgaaaaaatatatggaggaagctatcatgcagccgctcgaccacaaaaatcttgatatggatgttccttactttgcggatgtggtaagcacaactgagaacgtcgcggtctacatttgggataaccttcaaaaggtcctacccgtcggtgtgctctacaaagttaaggtttacgaaacagacaataacattgtcgtgtataagggagag

SEQ ID NO: 5539 - DNA, 435 bp, synthetic construct
  misc_feature 1..435: note = source = /note="Description of Artificial Sequence: Synthetic coding sequence"
  source 1..435: mol_type = other DNA
atgagcaccgagggtggcggcaggcgctgtcaagcccaagttagccgaaggatcagcttctccgcaagccataggctctattctaagttcctgtctgacgaggagaatctcaagctcttcggaaagtgtaataatcccaatgggcatggccacaactacaaggtggtggttactgttcatggcgaaatcgaccctgcaaccgggatggttatgaacctggccgatttaaaaaaatacatggaggaggcaattatgcaaccactggatcataagaacctggatatggatgtgccctattttgccgatgtggttagcaccaccgagaatgtggccgtgtacatctgggataatctgcagaaagtgctgcccgtgggagtgctgtataaggtgaaagtttatgaaactgacaataatatagtggtttacaaaggcgag

SEQ ID NO: 5540 - DNA, 435 bp, synthetic construct
  misc_feature 1..435: note = source = /note="Description of Artificial Sequence: Synthetic coding sequence"
  source 1..435: mol_type = other DNA
atgtcaactgaaggaggaggtagacgctgtcaggctcaagtgtcgagacgaatctctttttccgcatcccatcgactctactcgaagttcctgtccgatgaggaaaaccttaaactttttgggaagtgcaataaccccaacggtcacggtcataactacaaggtggtggttaccgtgcacggagaaatcgatcctgcgacgggcatggtcatgaacctcgcagacctgaagaagtatatggaggaagcaattatgcaaccacttgatcacaagaatcttgacatggatgtgccatacttcgcagatgtcgtctcaaccaccgagaacgtggcagtttacatatgggataaccttcaaaaagtccttcccgtcggggtgctttacaaggtgaaagtttacgagactgacaacaacatcgtggtttacaagggcgaa

SEQ ID NO: 5541 - DNA, 435 bp, synthetic construct
  misc_feature 1..435: note = source = /note="Description of Artificial Sequence: Synthetic coding sequence"
  source 1..435: mol_type = other DNA
atgtccaccgaaggaggaggccggcggtgtcaggctcaagtgtctagacggatttccttcagtgcctcacatcgactgtatagcaagttcttgtcagacgaggagaatctgaaactctttgggaaatgtaacaatcccaacggccatgggcataactataaagtggtggtgactgttcatggagagatcgacccagctactggcatggttatgaacctcgccgatcttaagaagtacatggaagaggctatcatgcaaccactcgatcacaagaatctcgacatggatgtcccttattttgcggatgttgtgagcacaaccgagaatgttgcagtatacatctgggacaacctgcagaaggtgcttccagtgggtgtgctctacaaggtcaaggtttatgagacggataacaatattgtagtctacaaaggcgag

SEQ ID NO: 5542 - DNA, 435 bp, synthetic construct
  misc_feature 1..435: note = source = /note="Description of Artificial Sequence: Synthetic coding sequence"
  source 1..435: mol_type = other DNA
atgtcgacggaaggtggtggtcgtcgttgtcaagcgcaagtatcgcgtcgaatatcgttttcggcgtcgcatcgtttatattcgaaatttttatcggatgaagaaaatttaaaactatttggtaaatgtaataatccgaatggtcatggtcataattataaagttgttgttacggtacatggtgaaatagatccggcgacgggtatggttatgaatttagcggatttaaaaaaatatatggaagaagcgataatgcaaccgctagatcataaaaatttagatatggatgtaccgtattttgcggatgttgtatcgacgacggaaaatgttgcggtatatatatgggataatttacaaaaagtactaccggttggtgttttatataaagtaaaagtttatgaaacggataataatatagtagtttataaaggtgaa

SEQ ID NO: 5543 - DNA, 435 bp, synthetic construct
  misc_feature 1..435: note = source = /note="Description of Artificial Sequence: Synthetic coding sequence"
  source 1..435: mol_type = other DNA
atgtcaaccgagggcggagggcgacggtgtcaagcgcaagtgtcaagacgaattagcttttctgcatcccacagactgtattccaagttccttagcgatgaagaaaatcttaagctgtttggaaaatgcaacaaccccaacggacacggacataactacaaggtggtggtgactgtgcatggtgaaattgacccggcaactgggatggtcatgaacctggctgacctgaagaagtacatggaagaggcaattatgcagcctctcgaccacaaaaacctcgatatggacgtgccgtactttgcggatgttgtgagcaccaccgaaaatgtggcagtgtacatatgggataatctgcaaaaggtcctgcctgtgggagtattgtacaaagtgaaggtttacgagactgacaataacatcgtcgtctacaaaggagaa

SEQ ID NO: 5544 - DNA, 435 bp, synthetic construct
  misc_feature 1..435: note = source = /note="Description of Artificial Sequence: Synthetic coding sequence"
  source 1..435: mol_type = other DNA
atgtccaccgagggcggtggacggcggtgccaggcacaggtgagcagacgtatctcttttagcgcctcccacaggctatatagcaagttcctgagtgatgaagagaacctgaagttgttcgggaaatgtaacaatcccaatggacacggccataattataaagtggttgttaccgtccatggtgaaatcgaccccgcaactggtatggtgatgaatctcgccgacctcaaaaaatacatggaggaggcaattatgcaacctctggaccataaaaatctcgatatggatgtcccgtatttcgcagacgttgtttcgacgactgagaacgttgcagtgtatatatgggacaacctgcaaaaggttctccctgtgggggtgctgtacaaagtgaaagtgtatgaaacagataataatatcgttgtctacaagggagaa

SEQ ID NO: 5545 - DNA, 435 bp, synthetic construct
  misc_feature 1..435: note = source = /note="Description of Artificial Sequence: Synthetic coding sequence"
  source 1..435: mol_type = other DNA
atgagcactgaaggcgggggaaggaggtgtcaagcccaggtctctcgaagaataagtttctccgcgtctcatcgcctctactccaaattcctgtccgacgaagagaatctgaagctgttcggcaagtgcaacaatcccaacggccatggacacaactataaagtcgtggtcaccgtgcatggtgaaattgatcccgccactggcatggtgatgaacctggccgatctgaaaaagtacatggaggaagccatcatgcaacccctggaccacaaaaaccttgatatggacgtgccatactttgcggatgtggttagcaccactgagaatgtcgctgtctatatctgggataaccttcagaaagtcctgcccgttggcgtgctttataaagtcaaggtgtacgagacagataacaacattgtggtctataaaggagag

SEQ ID NO: 5546 - DNA, 435 bp, synthetic construct
  misc_feature 1..435: note = source = /note="Description of Artificial Sequence: Synthetic coding sequence"
  source 1..435: mol_type = other DNA
atgtcaactgaaggggggggtcgccgatgtcaggcacaggtgtcccgacgtatcagcttttcagcaagccacagactttactcaaagttcctgtcagacgaggaaaacctgaagttattcggaaagtgcaataatccaaacggacacggccacaattataaggtggtggtcacggtacacggcgaaatagatcctgcaactggcatggtgatgaaccttgctgaccttaagaagtacatggaggaagctattatgcaacccctggaccataagaacctagacatggacgtgccttacttcgctgatgtggtaagcaccactgagaacgtagccgtatatatatgggacaacctgcaaaaagtgctcccggttggtgtgttatataaggtgaaagtgtacgaaactgataataatattgtagtgtacaagggcgaa

SEQ ID NO: 5547 - DNA, 435 bp, synthetic construct
  misc_feature 1..435: note = source = /note="Description of Artificial Sequence: Synthetic coding sequence"
  source 1..435: mol_type = other DNA
atgagcaccgagggcgggggtagacgatgccaagcccaagtgtcccggcgcatcagcttcagcgccagccatagactgtattcgaaattcttaagcgacgaggagaatctcaaactgttcgggaagtgcaataacccgaacggccatgggcacaattacaaggttgttgtgacagtgcacggagaaatcgacccagccacagggatggtcatgaatcttgccgatctgaagaagtacatggaggaagcaattatgcaaccattggatcacaaaaatctcgacatggacgtcccctactttgcagatgtcgtgtctacaacagagaacgtcgctgtctatatctgggacaatctgcagaaagtgctcccagtgggcgtgctgtacaaagtgaaggtttacgaaactgacaataatatcgtagtctataagggtgag

SEQ ID NO: 5548 - DNA, 435 bp, synthetic construct
  misc_feature 1..435: note = source = /note="Description of Artificial Sequence: Synthetic coding sequence"
  source 1..435: mol_type = other DNA
atgtccacagaggggggtgggcgccgctgtcaggcccaggtttcacggaggatctctttcagtgcctcccaccggttgtacagcaagttcctttctgatgaggagaatctaaagctgttcggcaaatgtaacaaccccaacggccatggacacaactacaaggtggttgtcaccgtccatggcgaaatcgacccagcaaccggtatggttatgaatctcgctgacttgaaaaagtatatggaagaggcgatcatgcagcccctagaccataaaaatctggacatggatgttccttattttgccgatgtggtgagcacaacagagaatgtggcggtatacatctgggataaccttcagaaagtgttacctgtgggagtgctttacaaggtcaaagtctacgagacggacaacaacatagttgtctacaagggcgaa

SEQ ID NO: 5549 - DNA, 435 bp, synthetic construct
  misc_feature 1..435: note = source = /note="Description of Artificial Sequence: Synthetic coding sequence"
  source 1..435: mol_type = other DNA
atgtccaccgaaggaggcggtaggcggtgtcaagcacaggtttcacggagaatttcgttctccgcatcgcatagactgtactcaaagttcctgagcgatgaagagaaccttaagctgttcggtaagtgtaataaccccaacggtcatgggcataactacaaagtggtggtgaccgtgcatggggagatcgatcctgcaactggtatggtcatgaacctggccgacttgaaaaagtacatggaggaggcaattatgcaaccacttgatcataagaaccttgacatggacgtgccttacttcgcggacgtggtgagcactaccgaaaatgtggccgtgtacatctgggataaccttcaaaaagtgcttcctgtcggagtgctttacaaggtgaaggtgtacgaaaccgataacaacatcgtggtgtacaagggagaa

SEQ ID NO: 5550 - DNA, 435 bp, synthetic construct
  misc_feature 1..435: note = source = /note="Description of Artificial Sequence: Synthetic coding sequence"
  source 1..435: mol_type = other DNA
atgtctaccgagggcggcggacgtcgatgtcaggcccaggtatctaggcgcatctcattttccgcaagtcatagactatactcaaaatttctgtcagatgaagagaacttaaaactatttggcaaatgcaacaacccgaacgggcatggccataactacaaagttgtggtcacagtccacggcgagattgatccagccactggaatggttatgaatctcgccgacttaaagaagtacatggaggaagccatcatgcagccgctcgatcataagaacttagacatggatgtgccatacttcgccgatgttgtctccacaactgaaaacgtggctgtgtatatctgggacaacctgcaaaaagtcctcccagtgggggtcctctataaggtgaaagtatatgaaactgacaacaacatcgttgtgtataagggagag

SEQ ID NO: 5551 - DNA, 435 bp, synthetic construct
  misc_feature 1..435: note = source = /note="Description of Artificial Sequence: Synthetic coding sequence"
  source 1..435: mol_type = other DNA
atgtctactgaggggggcggtcgccgttgtcaagcgcaggtgtcgcggaggatttccttctctgcatcgcaccggttgtacagcaagtttctgtccgatgaagaaaatcttaagctgtttggaaaatgcaacaatcccaatggtcatggacataactacaaggtggtggtgaccgtccatggagaaattgatccagcaactggtatggtgatgaatctcgcggatctcaaaaagtacatggaggaagccataatgcagccacttgatcacaaaaatctggacatggatgtgccttactttgccgatgtggtttcgaccactgagaacgtggcagtctacatatgggacaaccttcaaaaggtcttgccagtcggggtgctttacaaggtaaaagtgtacgaaacggacaacaacattgtcgtctacaagggagaa

SEQ ID NO: 5552 - DNA, 435 bp, synthetic construct
  misc_feature 1..435: note = source = /note="Description of Artificial Sequence: Synthetic coding sequence"
  source 1..435: mol_type = other DNA
atgtcgaccgaaggtggaggaaggaggtgtcaggctcaagtatcccgccgaatttctttctctgcgagccatagattgtatagcaagttcctctccgacgaggagaatttaaagctgttcggtaagtgcaacaatcccaatggtcacggccataattacaaagtggtggttaccgttcacggcgagatcgatcctgcaaccggcatggtcatgaatctggcagatcttaagaaatatatggaggaagccattatgcaacctctggatcataagaacttggacatggatgttccatactttgccgacgtcgtatccacaacggagaatgttgccgtctatatatgggacaacctccagaaggttctgcctgtgggggtgctgtacaaagtgaaggtttacgagacagacaacaacatcgtggtctacaagggtgag

SEQ ID NO: 5553 - DNA, 435 bp, synthetic construct
  misc_feature 1..435: note = source = /note="Description of Artificial Sequence: Synthetic coding sequence"
  source 1..435: mol_type = other DNA
atgagcacggagggcggggggcgcaggtgccaagcccaggtgtcgcggcgcatatctttctcagctagccatcgtttgtactcgaagttcctgtccgatgaggagaacctgaagttgtttggaaaatgtaacaatccaaacggacacggccataactataaggttgtggtgactgtgcacggcgaaattgacccggctaccggcatggtgatgaatctggccgacctcaagaagtacatggaagaagcgatcatgcagccgctcgaccacaaaaatctcgatatggacgtgccttacttcgcagacgtcgtgagcaccaccgagaacgtggccgtatacatctgggacaatcttcagaaagtcctcccggtcggagttttgtacaaggttaaggtctacgaaactgataacaacatcgtagtctacaagggtgaa

SEQ ID NO: 5554 - DNA, 435 bp, synthetic construct
  misc_feature 1..435: note = source = /note="Description of Artificial Sequence: Synthetic coding sequence"
  source 1..435: mol_type = other DNA
atgtcaactgagggaggcgggcggagatgccaagcccaggtgtcccgccgcatctcctttagcgcttcgcaccggctgtactccaaattcctctccgacgaggaaaacctcaagttgttcggaaagtgtaacaacccaaacggacacggacataactataaggtggtggtgacggtgcacggggagattgacccggcgaccggaatggtgatgaacctggcggacttgaagaaatacatggaggaggccattatgcagcccctcgatcacaaaaatctcgacatggacgtgccatacttcgccgatgtggtgtcaaccaccgaaaacgtggcggtctacatctgggataatctgcagaaggtgttgccggtgggagtgctctacaaggtgaaggtgtacgagactgacaacaacatcgtggtgtacaaaggcgag

SEQ ID NO: 5555 - DNA, 435 bp, synthetic construct
  misc_feature 1..435: note = source = /note="Description of Artificial Sequence: Synthetic coding sequence"
  source 1..435: mol_type = other DNA
atgtcgactgaaggaggaggaaggcggtgccaagcccaagtgtcgcggcggatctccttctccgcctcacaccgcctgtactcgaagttcctgagcgacgaagaaaacctgaagctgtttggtaaatgcaacaaccctaacggacacggacataactacaaggttgtggtgactgtccacggcgaaatcgacccggcgacgggaatggtgatgaatctggccgatttgaagaagtacatggaagaagccatcatgcaaccccttgatcacaaaaacctcgatatggacgttccgtacttcgctgacgtggtgtcgactaccgagaacgtcgcggtctacatctgggacaacctccagaaggtgctgcctgtgggcgtgctgtacaaggtgaaagtctacgagacggacaacaatatagtggtgtacaagggggaa

SEQ ID NO: 5556 - DNA, 435 bp, synthetic construct
  misc_feature 1..435: note = source = /note="Description of Artificial Sequence: Synthetic coding sequence"
  source 1..435: mol_type = other DNA
atgtccaccgaaggtggaggtaggcgatgtcaagcgcaagtctcccggcgcatatctttcagtgcctcgcacagactctacagcaagtttctctcggatgaagagaaccttaaacttttcggaaaatgcaacaatccaaatggtcatggacacaattacaaggtggtcgtgactgtgcatggcgaaattgatcctgccaccggaatggtgatgaatctggcagatctgaaaaagtacatggaggaggccatcatgcagcctctggaccataagaatttggacatggatgtaccatactttgcggatgtggtgtccaccacggaaaacgtcgcagtgtacatttgggacaacctgcagaaagttctgcccgtaggggtgctctataaggtgaaggtgtacgaaactgataacaacatcgtcgtgtataagggagaa

SEQ ID NO: 5557 - DNA, 435 bp, synthetic construct
  misc_feature 1..435: note = source = /note="Description of Artificial Sequence: Synthetic coding sequence"
  source 1..435: mol_type = other DNA
atgtcgactgagggaggcggacgccgttgccaagcacaggtcagcaggcgcatttccttttcggcatcccatagactgtacagcaagttcctgagcgatgaagaaaatctgaaactcttcggaaagtgtaacaacccaaacggacatggtcacaattacaaggtcgttgtgacggtgcatggggagattgaccccgccaccggtatggtgatgaacttggcagatctgaagaagtacatggaggaggcaatcatgcaaccactggatcacaagaacctcgacatggatgtgccttactttgcagatgttgtgtcgaccaccgaaaatgtcgcggtgtacatctgggataaccttcaaaaagtcctcccagtgggagtcttgtataaggtgaaggtgtatgaaaccgacaataacatcgtggtctacaagggagaa

SEQ ID NO: 5558 - DNA, 435 bp, synthetic construct
  misc_feature 1..435: note = source = /note="Description of Artificial Sequence: Synthetic coding sequence"
  source 1..435: mol_type = other DNA
atgtcaactgaaggaggtggacgtcgatgtcaagcacaagtttcacgaagaatttctttctcagcatcgcaccgtttatattcaaaattcttatctgatgaagagaatttaaagttatttggtaaatgtaataatccaaatggacatggtcataattataaggtagtagtaaccgtacatggagaaattgacccagcaactggaatggttatgaatttagcagatcttaaaaaatatatggaagaagctattatgcaaccacttgatcataagaatttagatatggatgttccatattttgcagatgtagtaagcacaacagaaaatgtagctgtttatatttgggataatttacaaaaggttttaccagttggtgttttatataaagtaaaagtttatgaaacagataataatattgtagtttataaaggtgaa

SEQ ID NO: 5559 - DNA, 435 bp, synthetic construct
  misc_feature 1..435: note = source = /note="Description of Artificial Sequence: Synthetic coding sequence"
  source 1..435: mol_type = other DNA
atgtccactgaagggggtggtagacggtgtcaagcacaggtgagccgccgcatttccttctccgcgtcgcatagattgtactcaaagtttctttcggatgaggagaatcttaagctgtttgggaaatgtaacaatcccaacggacacggtcataactacaaggtggtggttaccgtccacggcgagattgatcctgcaacgggtatggtgatgaatctcgcagacctgaagaaatacatggaggaagccatcatgcagccactcgatcacaagaatttggacatggacgtgccatactttgccgatgtggtgagtactactgagaacgtcgccgtgtacatctgggataacctgcagaaggtgctgcctgtgggagtcctgtacaaggtgaaggtctatgagactgataacaatattgtggtttacaagggagaa

SEQ ID NO: 5560 - DNA, 435 bp, synthetic construct
  misc_feature 1..435: note = source = /note="Description of Artificial Sequence: Synthetic coding sequence"
  source 1..435: mol_type = other DNA
atgtcgaccgagggaggtgggagacggtgtcaagcccaggtcagccggcgcatatcattttccgcgtcccacaggctctacagcaaattcctgtccgatgaagaaaaccttaagttgtttggtaaatgtaacaatcccaacggccacggacacaattacaaggtagttgtgaccgtccatggcgaaatcgaccccgccactggcatggtgatgaatttggctgacctcaagaaatacatggaggaagctattatgcaacctctggatcataagaacctggacatggatgtgccatactttgccgacgtggtgtccactactgaaaacgtcgcagtctacatttgggacaacctgcagaaggtccttccagtgggggtcctgtacaaggttaaggtgtacgaaactgataacaacatagtcgtgtacaagggcgag

SEQ ID NO: 5561 - DNA, 435 bp, synthetic construct
  misc_feature 1..435: note = source = /note="Description of Artificial Sequence: Synthetic coding sequence"
  source 1..435: mol_type = other DNA
atgtcgaccgaaggaggagggcggcgctgccaagcacaagtgtcacgtcggatttcgtttagcgcctcccaccgtctgtactccaagtttctttcggatgaggaaaatctcaagctgttcggtaagtgtaataaccccaacggccacggacataactacaaggtggtcgtcaccgtgcacggagaaattgatccggccactggcatggtgatgaaccttgcggaccttaagaaatacatggaagaggccatcatgcagccactcgatcacaagaacctggacatggacgtcccatactttgcagatgtcgtttcaaccaccgaaaacgtggcagtttacatctgggacaaccttcagaaggtgctgcctgtgggtgtgctttacaaggtgaaggtgtatgaaaccgacaataacattgtggtctacaaaggcgaa

SEQ ID NO: 5562 - DNA, 435 bp, synthetic construct
  misc_feature 1..435: note = source = /note="Description of Artificial Sequence: Synthetic coding sequence"
  source 1..435: mol_type = other DNA
atgtcaactgagggcgggggaaggaggtgccaagcccaggtgagcagacgtatctcattctccgcaagtcaccgcctttattctaagtttctgtccgatgaggaaaatctgaagctttttggtaagtgtaacaatcccaacggacatggccataattataaagttgtcgtaacagtccatggcgagatcgatcctgctaccgggatggtgatgaatctggcggaccttaaaaagtacatggaagaagcaatcatgcagcctctggatcacaagaacttggatatggacgtgccctacttcgccgatgtagtgagcaccaccgagaacgtcgctgtttacatttgggacaacctgcaaaaggtccttccggtgggagtgttatataaagtcaaagtgtacgagaccgataataacatcgtcgtctacaagggagag

SEQ ID NO: 5563 - DNA, 435 bp, synthetic construct
  misc_feature 1..435: note = source = /note="Description of Artificial Sequence: Synthetic coding sequence"
  source 1..435: mol_type = other DNA
atgtccaccgagggcggtgggaggcggtgtcaagcacaagtgtcgcgccgaatctcgttttccgcatcccatcggctttattccaagttcttgagtgatgaagaaaatctgaagctgtttggaaagtgcaacaacccgaacgggcatggacataactacaaagtagttgtgaccgttcatggagagatcgatccagcaactggtatggtcatgaacctggcggacttgaaaaagtacatggaagaagccattatgcagccactggatcacaagaacctcgatatggacgtgccttactttgcagatgtggtcagcacgactgaaaatgtcgcagtgtacatttgggataacctccagaaggtgctccctgttggcgtcctgtataaagtgaaagtgtacgagactgataacaatattgtggtgtacaagggagaa

SEQ ID NO: 5564 - DNA, 435 bp, synthetic construct
  misc_feature 1..435: note = source = /note="Description of Artificial Sequence: Synthetic coding sequence"
  source 1..435: mol_type = other DNA
atgagcactgaaggcggtggacggcggtgccaggcccaagtatcaagaagaatttccttttcagcctcacaccgactttattccaagttcctgagtgacgaggaaaacttgaagttgtttggaaaatgcaacaatccgaacggccatggccataattacaaagtggtggtcacagttcacggagaaatcgacccagcgacgggcatggtcatgaacctggctgatctcaaaaagtatatggaagaagcaattatgcagcccctggatcacaaaaacttggacatggatgtgccctatttcgcggacgtggtgagtacaacagagaatgtcgcagtgtatatttgggacaacctgcagaaggtgctgcccgtgggggttctgtacaaggtcaaagtgtacgaaactgataacaacattgttgtttataagggtgaa

SEQ ID NO: 5565 - DNA, 435 bp, synthetic construct
  misc_feature 1..435: note = source = /note="Description of Artificial Sequence: Synthetic coding sequence"
  source 1..435: mol_type = other DNA
atgtctaccgagggcggcggccgccgttgccaagcccaggtcagcagaagaatttcatttagtgcatcccaccgcctgtattcaaagtttctgtctgacgaggaaaacctcaagctcttcggtaaatgcaacaatcctaatggacacggccacaattacaaggtagtcgtgaccgtgcacggagagatagatcctgccaccggaatggtgatgaatctggctgatctgaaaaaatatatggaggaagcaatcatgcagcccctggatcataaaaacctggatatggatgtgccttatttcgccgatgtcgtctctaccactgaaaacgtcgccgtttacatctgggataacctgcagaaagttcttcccgtcggagtactgtataaagttaaagtgtacgagacagacaataacatcgttgtctataagggagag

SEQ ID NO: 5566 - DNA, 435 bp, synthetic construct
  misc_feature 1..435: note = source = /note="Description of Artificial Sequence: Synthetic coding sequence"
  source 1..435: mol_type = other DNA
atgagcactgagggaggcggacgaagatgtcaggcccaggtaagtcgtcggatatccttttctgcgagccacaggctgtacagtaaattcctttctgatgaggagaatctgaagctgttcggcaagtgtaataatccgaatgggcacggccacaattataaggtggtcgtgacagtccacggggagatcgaccccgctaccggaatggtcatgaatctggctgacctgaaaaagtacatggaggaagccattatgcaacctctggatcataagaacctggatatggatgtcccatactttgccgacgtggtgagtacgaccgagaacgtggctgtgtacatctgggacaacctgcagaaagtgttgcctgttggcgtgctttacaaagtgaaggtgtatgagacagacaacaatattgtggtgtataagggcgaa

SEQ ID NO: 5567 - DNA, 435 bp, synthetic construct
  misc_feature 1..435: note = source = /note="Description of Artificial Sequence: Synthetic coding sequence"
  source 1..435: mol_type = other DNA
atgtctacagaagggggagggaggcgttgtcaggctcaggtttcccgaagaataagtttcagtgcctcccatcggctctattctaaattcctctcagatgaagaaaatctgaaacttttcggaaaatgcaacaaccctaatgggcacggacataactataaggtggttgtgacggtccatggggaaatagatcccgccactgggatggtcatgaacctagccgatcttaagaaatatatggaagaggccataatgcagcccttagatcacaaaaatctcgatatggatgtgccatattttgcagatgtggtgagtactacagaaaatgtggctgtgtatatatgggataatcttcagaaagtgctccctgtgggggtcttatataaagtgaaagtttacgaaactgacaataatatcgtggtatacaagggggaa

SEQ ID NO: 5568 - DNA, 435 bp, synthetic construct
  misc_feature 1..435: note = source = /note="Description of Artificial Sequence: Synthetic coding sequence"
  source 1..435: mol_type = other DNA
atgagtaccgaaggtggcggtcgaaggtgccaggcacaggtctccagacggatctccttctcggcgtcgcaccgtctttatagcaagttcctgtctgacgaggagaacctgaagctcttcggtaaatgcaacaaccccaacggtcacgggcataactacaaagtcgtggttacagttcatggagaaatcgacccagctactggtatggtcatgaatcttgccgatctcaagaagtacatggaagaggccataatgcagcccctggatcacaaaaatctcgacatggacgtgccttacttcgcagatgtcgtttctaccacagagaatgtcgccgtctatatctgggataacctgcagaaggtcttgcccgtgggtgtcctctacaaggtgaaggtgtacgagaccgataacaacatcgtagtctacaaaggcgag

SEQ ID NO: 5569 - DNA, 435 bp, synthetic construct
  misc_feature 1..435: note = source = /note="Description of Artificial Sequence: Synthetic coding sequence"
  source 1..435: mol_type = other DNA
atgtcaacagagggcggggggagacgatgtcaggcccaggtctcacggcggatcagttttagtgcgtctcatcggctgtactctaaattcttgtccgacgaggagaacctcaaactctttggaaagtgcaacaacccgaacggccacggtcacaactacaaagtcgtggtgacagtgcatggcgaaattgatcctgctactgggatggtaatgaacttggccgatctaaagaaatacatggaagaagctattatgcagccactggatcacaaaaatctggatatggatgtaccgtattttgccgatgtggtgagtacaactgagaacgttgccgtgtatatctgggataaccttcaaaaggtcctgcccgtcggtgtgctatacaaagtgaaggtgtatgagaccgataacaacattgtggtgtataagggcgag

SEQ ID NO: 5570 - DNA, 435 bp, synthetic construct
  misc_feature 1..435: note = source = /note="Description of Artificial Sequence: Synthetic coding sequence"
  source 1..435: mol_type = other DNA
atgtctaccgagggagggggccgtaggtgccaggcacaggtttcgcgtcgtatttccttttcagctagccatagattgtactcgaaatttctttctgacgaagaaaatctcaagcttttcggaaagtgcaacaaccccaacggtcatggtcataactataaagtcgtagtcaccgtgcacggggagattgaccccgcaacgggaatggttatgaatctggccgacctcaagaagtacatggaggaggctatcatgcagccacttgaccacaagaacctggacatggacgtgccgtatttcgccgatgtcgtttccacgaccgagaatgtggcagtatacatatgggacaacctacaaaaggtgctgcctgttggcgtgttatacaaagtcaaagtctacgaaacagataataatattgtagtgtacaaaggagaa

SEQ ID NO: 5571 - DNA, 435 bp, synthetic construct
  misc_feature 1..435: note = source = /note="Description of Artificial Sequence: Synthetic coding sequence"
  source 1..435: mol_type = other DNA
atgtcgaccgaaggaggaggacgcagatgtcaggcgcaggtgtccagacgtatctctttttcggcctcgcatagattgtactccaagttcctgagcgatgaagagaacctgaagctgttcggaaagtgcaataatcctaacggccacggccacaattacaaggtggtggtgaccgtgcatggcgaaatcgaccctgccaccggaatggtcatgaatctggctgacctcaaaaagtacatggaagaggccatcatgcagccattggaccacaagaacctggatatggacgtgccctacttcgcagatgtcgtgagcactaccgaaaatgtggccgtctacatctgggataacctgcagaaagtgcttccggtgggagtgctctacaaggtgaaggtctacgaaaccgacaacaacatcgtggtctacaagggggaa

SEQ ID NO: 5572 - DNA, 435 bp, synthetic construct
  misc_feature 1..435: note = source = /note="Description of Artificial Sequence: Synthetic coding sequence"
  source 1..435: mol_type = other DNA
atgtccaccgaaggtggaggccgtcgctgtcaggcacaggtgtcacgcaggattagcttttcagccagccaccgactgtattccaagtttctgtccgatgaagaaaatctgaagctctttggcaagtgcaacaaccccaacggacacggtcataactataaagtggtggtgaccgtgcacggagaaattgacccagcaacggggatggtgatgaatctggcagatctgaaaaagtacatggaggaagccatcatgcaaccacttgatcataagaacctcgacatggatgtgccctacttcgcagatgtcgtctccactaccgaaaacgtggctgtctacatttgggacaacttgcaaaaagttcttccagtcggagtgctgtacaaggtgaaggtctacgagactgataacaatatcgttgtctacaagggggag
